United States Patent Application Publication US 2011/0191912 A1 - sequence listing, part 8

SEQ ID NO: 8838 - DNA, 3000 bp, Unknown; identical to SEQ ID NO: 8823
  misc_feature (1)..( 3000): cDNA_ID_1989227_gDNA_ID_1971898_Annot_ID_58521 3000 nt of promoter + ATG

SEQ ID NO: 8839 - DNA, 3000 bp, Unknown; identical to SEQ ID NO: 8817
  misc_feature (1)..( 3000): cDNA_ID_1989254_gDNA_ID_1971898_Annot_ID_176899 3000 nt of promoter + ATG

SEQ ID NO: 8840 - DNA, 595 bp, Unknown; identical to SEQ ID NO: 8822
  misc_feature (1)..( 595): cDNA_ID_1989226_gDNA_ID_1971898_Annot_ID_58522 3000 nt of promoter + ATG

SEQ ID NO: 8841 - DNA, 3000 bp, Unknown
  misc_feature (1)..( 3000): cDNA_ID_1989262_gDNA_ID_1971905_Annot_ID_58524 3000 nt of promoter + ATG
tatgtattaaaaataattcgttccattcatggggtggttttcttattaatgtttggttgaaggagaaaagcaagcagtaattaaaatatatagaaattaatattgctgtaatttgttgatttactagatgtatgttattccaaacactaatttttgaaagataatattttaataattgttattagtcatattgaacgtttacaaaagatgtagaagaaaccaacgtgtagcttgggttcaaaacctagttctattaatactaaagtttgctaatcatgtttaaagtaaaattagatgaattttattaatccaatctctatgaatttaatatctttttatataatttcgtatgttccattgtttattatttcatattatcactcttctaattgaaatatgttattcttatcatcatttgaaaattgtttttattctctggactttcccatatataaccgctccattgttttacctttttagaaccctaatttgttctttccaggtcatttactatgtggtttttagatgtggacaataatatataagttatgaaattatctgaatctatactttttggatatgtgaaactcggataaacatcaaaatatccgtatcagaatccgtaaaatgttagtagaaaatatttgaaggtataaagagttgggcaacatgtgttagcggcaatgattttgaatgtgatgagaagtaatatctaggaacaagtggttagatacacaattatgtgaatagatgatataatagatacaacaaaaatgattgatgagaaggagatagaaaaagggaactttgttccattgaccaatgtgtttgcgatcactttttcaaattttgaagtaattgactacattgtacaatttatgtgtaatcatgcctatagtttctacatcgattcatcatacaatcatgagttttcatatatctagatcctaattactatcaaatataggtttgtgagaggttgtatgtgacttggaataaaacacaacatcctccatcatatctcttttgaggatttaagataattttgaagatttctttagttgaaaacacataaatctaaataacatgatttaaatggaatttgggaagattttcaaacaaatcataataactactctaaattcacttaagatcaacaaaatcataaaaactcaaatcatttaaaacaaagggttggatacactttgaaacttgcaacttatattttgattggtttttttttttatagtcgattgttcttaacaaaaaccctctatacttgatacatatattaataaaataaaaaaactatagactaacttttttgctgtgaaagtgtgttaattatatcttcaacatgagagaatgcatcattggtggtgtgagataaaaccattgtgtctttctaacccacatctaacaaatattttatctaattgggcattaaaataataataagtgaaggctcaataacacctaaaaatgcagcgaatattctagcttccatgcgtcataagcaagcaaaaaaaatggagactatatataagttcttctgtataattagagttacaaatttgtggagactatatataacttcttttgcctcccatgcgtcataagcaagcaaaaaaaaaaaatggagcaaactttcatcacgtggaaaacttgtctttcttttttttaatacatatttgaaggtttaaaagagttagacaggatgtgttagcgacaatgttttcgaatgtaatgaaaaataatctttaagaacaagtggttatgtacaaatttatgcgaatagatgataaagtagatacaacaaaaatgattgagtagcaagagatggagaaagagaactttgctatattaaaaaatgtgtttgagatcattttatcaatttttgaagtaattggctacatcgaataatttatgtacttatatatagtttctatatcaattcatatacttgatacatatattataaaaaataaaatccttaaaactacaatttttgtttagaaaatgtgttgtgtatatcttcaacatgagagaatgcatcagagtggtgtgatcaaactcttctaacccaaatctaacaaatattttagggttttgtgccaacaaccctcaaaaatattgttcttgcaacataacctttcatataaaatacatgtaggtcaatactctgatatcaaaagtcacccgcaatataaccacgtgcataaattttatataatccttgggcgtgtatagattttgcaaaccgtataagtatgtatataagttattaaactacgtcgtttgagcatttttcggaaaataatatattactagagtggattggaaccaataaggccccgatccagatttgaaaccagaaattggaattttcaaacttagggtttgattttggggatttataagtggggatcttttgtttatgtcacaacgtcgtcgtatctggtcaataacagagactctttcacaaccgacgtcgtatctggtcaataacggagaccctttatctctgtattttgagataactcagtcgtgaagcagtcataactaagctgtgtgactattataactcggtcaaaccctgaaagtgctttccttaagccatcagttggtacaatcaagtaattaacatatcataatcacattccaactagtggaatcatgaaactatctcatattctatatactttatccaacatcatacccaacaacatcattcctagaagtttggtcaacatagtttgtcaatcgacacttaccgaaaacccaatttattttttgttttcatattatagatcttgaaactaatagaaccaacaatttggtggctagtttgaaatctcataataacatctggtttcttataactcggtcaaaccacaaaatcttctggcataactcagtcgtaacgtattggtattgtgaggcccaagcccaagagggtcccaaccaacccaagtaacacacaaaaccctaagcgtgtgt

SEQ ID NO: 8842 - DNA, 3000 bp, Unknown
  misc_feature (1)..( 3000): cDNA_ID_1031665_gDNA_ID_1971905_Annot_ID_58531 3000 nt of promoter + ATG
tggtatgttaatacttggattaccggctaatatcataagtttatggtgatttgagatagtttcacttttgttatgaattagagttagcacctaatacaaatgttacattaacttttatcttttggactgtgttttaataagggaaagaagggatacaactttccatttagaaagagaaatgacgatgacgactggtttccctaaaaatcaataaataaatagcaaaaaagaaaaaagactacatgcaaagaataataataatctgacacaatatattcatacagtataaaaagattttcctaggggtacatacgcaatttccacatgtacaatattagtcaaacagtgatttttttggacacttaaataacaactcttccaagtatagattgtgcaattttcctaaacaaaaagcagtctaaaccgttgatagatttgtccgtcctaaccgcgtaaccatttgaactcttagctttttttaatgttaagttgttgccaataaaccgaccgtaaatgaatcgagatacttgatttgaaaagtcgatccaaaatcaaatcaaacaaagaaaaatggtttaaaaccgaaatttctttaaaaattaaggatattgtagataaacattcaataccgaaccaaaataaaaccatactaaaccatccataatttggataccagtactaagaaaccaaatttttaaaaaccgaataattcaaataaaaaccgaaccgaaatcacatggttttgtaagagatcatttgaaaaaaataaaaaatattcgctcaacaattttgtttctctataatcaatcaccaatcagcaaaattctagggtttcaattatcttctctgcgatttgaatgaacaaatccaacttcattcacaaatttcatcactctgcaaaaccacatacaatggaagataacgaagaagaagaagaatcaccgacggagttaaacacgatcaccggtttaagcggttttgtagttatctctcccgataagctatctctcaaatacactggcgtttctcaacacggtcacgatgtcggcgttgttcaagctaataaacctgctccgtgtaaacgtttcgcttattacttcgagatttatgttaaagatgctggtgttaaaggacgtgtctccattggtttcactactaatagtttcagaatcgcgagacatcctgggtatgatattgagttttgtttagatttgattaggttcttaaagatctcttatttttgtttagttgttttaagtttgattaggttcaggatttggttcaattgtgtgagttttatttatgtttggttaggatcagaacatacgaaagtgttggattttgtttctatatcattgttgctgagcattcaaattgatagttttgtgatatttcttatgtaatggttagatgggaactcaacacttgtggttatcatggtgaagatgggcttatatatctaggaaaacgtcaaggtgaagcttttggtccgacttatacaactggtgatactgttggtggtggtataaactatgattcgcaggaattctttttcacgtgagtatctaagagttcaagagtcaattcattttcatgttacagttctgacatatctttgttatgagatgccagtgtaaatggaactctggtagggacagtctccaagtacatcaagggtcctctattccctactgtagctgtacatagccaaaacgaagagtatgctctctttgtttcttaatatgatgtcagcgtgaactatttttcaagtgcttgaatatgttctttgtttgatgttctgaatcttggtagggttacagtcaacttcgggcaggagaagtttgcctttgattttaaggtaagatccttgaatatttttggtatactagtggagtttctagctcttagcttgtgtaatttatcgatgggatagtccgaagtataactatcgtatagtaaagaaacatatgcatctttttgatatggtacaaacatataatgtggcagatgattcactgtaaaaaaatacagtgattaaacatcttctcttagactctacgattaagaattgtatgtgtaatatgtgtagaaagttgaggtagagagtaatatgtgtttacttgtgcttctctttctgccttaggtttgtttgaggttaaggttacaggagtgattacgtatgatttagctgttcctctttttttctgttgtgttagggatatgaatcatcggagaggaataagcaacaaatagcaatcgaaaagatatccataccatcgaacatgagtcttgggtgagtacactcttgttctgtagttactgaggtgaagttttttcttctattcttttattgcattggtaataaaatttctgcgtagctaagaagcttctggttttttttgatcatcaggcttgtaaagaactatttgcttcattatgggtatgaagagactcatcatgctttagacttggctactaacagtacacttcctcctatcaatggagctcaagaaaatggtattgatgatacatcatatgcattgcatgagagaaaaattcttagacaggtattgaattagactgctatcttgctcgttactactactacatctctttcgttaagtattgaactgatccatacgtcggttggtaaagcttatacggaagggtgagatcgatgctgctcttgcgaaactccgagatagctatccccaacttgtacaggtggattgaggaactaatcatatcagttgattcatattgttacattgaaaatatgaactcttacctcaattgtataatctgcagaacgataaatcagaagtatgcttcctccttcactgtcaaaagttcattgaattagtacgggtatgctcttcattccttatatattaatcagatccactgcggttagactgacctctctctaagtaaataaatactaaaatgtgacatacttagattggagcactagaagaggctgtgaaatatggacgaatg

SEQ ID NO: 8843 - DNA, 3000 bp, Unknown
  misc_feature (1)..( 3000): cDNA_ID_1989256_gDNA_ID_1971905_Annot_ID_176972 3000 nt of promoter + ATG
attttttttgaaaaaataattttggcgggaaattttttttccgaaaacttttggcggaaaatgtttttgacgggaaaattttggcggaaaatttgttttggaatattttaggcgaaaaaatattaagattccattttgttaacctaaaataatttccaaataagggtaaaatggtcattaaaaatttaaagagggtagaaatgaaaatggataaaataaaaggatagagttgaaaaagggcatcatgaaaaaaaaaagaatctttcttcaattaaacatataattacaaaataattttaaaaggaaatcttgcaaaatctgccatattccactctatttctttcaatccctgccatattctgtaactccttccaactcatgccacattttgctgcacgtggaattcagtggacgaaattatccttaaggtgggtcagcgctctgacgaagatggtgacataacagcttttggctgatgtaatgatacaagacgaaaaatcatgctggaagaataaagaattaggggacaaaatagtggagaacaactggcttctactgttgttattgggtatttaaaaatgacttatttaaacaaattggttatccaaaattctgcgggggacaacgtaatatataatacattaggagacatgattacctgatagcgggggacaacgtaatatataatgcgttaggagacatgattacctattagcggagaacaattggagcaagacttttgttttagtcttcagatcttgtcctcgaatagaaattctcttttgcatctacgttttgtcctcgatttcaccatcttgctctattattatgaatcctacatcttatatgcaattgttctcatttaataattttgaattttatttaaatttttgcgatctattttgatccacagattagttgagcgttattgtcttcacctacacgttaacatattttaataatatgttatatcgggacaagttcatatcgaatgagtaatagaattggatcggggacaaagtcagatcgaatgatagacaagataatatgtaataactgaatatttttgttgttttacaatagaagaaaaaaaaatcgtgtcggtgaaaacaataatgctcaactaatctgtggaccaaaatagatggtaaaaaatgatgaaatcaaggacaagatctagatacaacagaaatattgtgatgaataaaattgagagacaaatttaattgaaagttacatgtaaagaatctgtgcaggttgtcaaagaaagtgagagagtgacaaaagcgcttcatcttcgggaagataataatatatggttaaagcgcacagatttcaaggaaggagagataaaatagagaagaaatggagagggacaaaatcgatatttcagtatgaaatatgacatgagttgtaaggcccagcaaattatggcagattgcataaggattggaaaaaatatggcatatgttgtaattttttcctttttaaaaataatctaaataattctataatcaatatgtgaacgatattatactttacagatctttttgtaacttcaccttaattatgatagaccttgcaaacaaataaatgcaacaaaaaatagacactaaaaaatctcaacaacaatctttaaattataaaaaatcacataaatatcttcgggattcaaattttaataattatttaaacggattttctaatttatatcaaaaccaaatatattgaatataaaatatacaaataggaaatacattaatttaaaagatacaaaatatttaacaagaaattgtgttattttttgttcaaagaattcgatataaaatcttcgaaacgatccgatattgattcttattagattgaaattgttaaaatttcaatatattatacaatttttctttttaaattgaaattgtaaaccgactcgaagtatattaaataaaaatattattaaaaagaaaaagaacaatttgatttttagttatcacgggacggatttatatggcgggacgggtttacaggagacgagtttacatggtaggacgggtttggatgagacgagattatatggtgctatgagtttagatgggaaaaatttggataccacgggtgtactcctagaattaacaatcaaattacaactatacaatagtaaacaaaacaaacaataataacataacaaatacaattttaatttcaaatttttagttacaaaaaaataaataaaatcaacattttagtataagtgttaatcttctttgacacctctaaatgttattcttctttgatacatttaaatgtgtaattttaatataaagttactaaactacatatgttccatggattaaatttgaaaacaccaaaagtttatattaaataatttttttataacaaattatgaataaaataaaatattatcccgtggtatggtctatcacaagtcaaatcctaaaagataaaataacatatattagacttattaatatcataattgtgactcaataaaaaacatacacaaccttatcgataattattaatcatcacaaacaacaacaaacaacaaattatattttgtgataaagaaaaataaataaataaatttaatttacggtatatcgcgggtcatatcctaattatgatacaattgtctatttttaccctatatatattacaaacgcacacatttgttgcataacatatttagacatcgcttccaaagaaagaaatcatttatctctacattatttcttcctctcattgcccctctcttctcaacgttttgtctcttatatctttacgtttcatactttttttttgttgacatttaattatttaaattttttgttcctatggacactagataggacaacaaaagatataaagaaaatctacaccacacatatcatgaggttctggaacaagtttctgcggtaagagaaaccaaaaacatgaagggcagaaaaaaaaagaacaaaccatcttcaacacagagccatg

SEQ ID NO: 8844 - DNA, 3000 bp, Unknown
  misc_feature (1)..( 3000): cDNA_ID_2138868_gDNA_ID_1971905_Annot_ID_176952 3000 nt of promoter + ATG
tataaagtactatgcatacttaaagaacgaaacaagattggaattcttacattgggagctcaagaatcatggagaatattatctaaaggtttccttagtcattacaaagtgacaggttatgcaaaatgcattgatggagtcatctactatgaaggttcttttggtgatggtttaagacaagagcttgccataatgagttttgatttaagatctgaaaagttcagtttgattaaacatccgaagaaaagtagcatagctacatgttggtcatcttatgagggaagattagctttggtaagttccattgcttctggagttagcttatggattttggaggatgctgataatcacaaacaatggatatataaacattttccttcacatcgagaattcatcaaagagagatggaagttgaagggtgttactcgtactggtgaatttatttacacatcttacagagcttatgtacttaatgttgaaggaagggttttatatcaatggttccgtattttgtatgttgatcccaagagaaacagtatgagggtagttatgcatggaggaattgcagttgacgatattaggcgacttgatgaagttggatatgatcttatgaaagacttgactgtcataccaaatcacattcagatttgaagctgatcttaccatgtcgttgtaagagttttcttcatttttcttttcttaagttctgcaaattttgtgatgatttttgaatcattgaatcccattgaggggtttttgtcttgatttaagaaattccttataaaatcgtggtagtgaagtaacacctgactctaacgcaagaacatcactgaaatgtgtagcttagtcttctatattggttacatatatagtcatctaatgttcttgaataaaaatacctcatgagcagaactccaggtcatatttttcttaatcaagagaaatacattttgttatgatttgataagttccttaatcccaacatgtttttattgtgtttggaagacagtttgattacctaagtttgtaggaggtctaggcctgaaatatcactttcatgtaataaactagaacaaactattttatcaagatggaactaatatgcactttaatattaatacataatacttttaaaaatggtgaaaaataatgagcttatctaccaaaaaacagaaccagttgtttatgatggccaaaagtgtcataattacagtccctagttgctctcatgtgtctttcagatttccagctcttgaaactttgtcaatgtaccaagtgagatgatgatgatgttatgttttgtgaattgtcaacaggtcctgaattggagcgcttgttgaaggagctgatttggactcagaatcaactggatgaaaaaacagtctatgtgtatccacgcatgaatgatttttccactggccagctcatataccgaccagaatgattcttcttccctttcagcaactaacggctctgcaaaagggaacatatatagtgatatataactgatctgtcgcaagaacatgatgaccatttcttcctagtgagtattttgagtgaggggggagtttttagccttgctcttatgatttagggattttcttattcatgacaatattggacccctaggtagtactaataacaagagagggtttttgttttcaaatgttggtttactggttaggcttttattctccaccatggtatggttcctataaagctacataagaattcattttgaagtttgtttggtgtgtgaccgaagaaccaaaaaaaaaaaaacagttgctcattctttgtctacttatctcactattcggcaatgcatatacgtcctaatctttgttttgcttatcttagttattctatctctctcccttacctaaaaagctggcttcaaaggacttgacggatcgtttataaaacagactagtcataaacatagatttatattcgagatggcttcaaatacgaatcttaaactgtttatagtatatatagtatctaatagctgcgggtgttgtgaaagggaacttagtgttgaccatggtcatggagtttaaccaagaagtttgttgaaccaaggattcacacaatagatttgtttagagagggaaaacaaatctagtaatttctcttcattaggtattctatccaagactcgattataagaggggttctaatctcttatgaaatacattagggttttgctcaagaacagaaaaagaattagagttttaaaaaggtatagctgcatccatgatggattgcctacgtaccctgtgaagggatcaagccattcgtagttttcaataggtataaagttctatgtttcttgtgaatatcccaagatctccccctttttgtgaagtccctaaggcactttatataggatccttaaaccgcctccctagcgatattcttcggaagattcttatttatccttaggtcggttctagaggataatcgtcctaaggatattctccttattcttcggaggttttggggagatttcctgatttcgacattatcttcaaagattctcctttatcatttctgaaagtcccataaaagatcccattttaccggaaatgatccttggagaatgaatggtttttacaagtctttgcctcgcgtgttcttcacggctcggtggtcgtttgagaggtggcttcggggcaaacggtatgtaccggctcggggcgcgcttgatgactgtccattaagctcagttggctgtctcccgagccgatatagatgtttcccgcagcgttctcacgattggttcgggctgtgttcatatgattaacacccgagccattttacaaactctcttcgggacggtcgatcgaataaggtcccgaggtgctttgttctaggctaggggccaatcatatgtttaaccatgaggtgattgttattcttagactgtttggctcggtcttgcttgtgggggaatccgaccccaacaaagttgtaccttgacggaagagagcacga

SEQ ID NO: 8845 - DNA, 3000 bp, Unknown; identical to SEQ ID NO: 8843
  misc_feature (1)..( 3000): cDNA_ID_1989256_gDNA_ID_1971905_Annot_ID_58533 3000 nt of promoter + ATG

SEQ ID NO: 8846 - DNA, 3000 bp, Unknown
  misc_feature (1)..( 3000): cDNA_ID_3043759_gDNA_ID_1971906_Annot_ID_176981 3000 nt of promoter + ATG
caattccttaatgtatgtgagtacaatgctccaaaacttcaagtatttgttttatgatataatttgaactaaattaaattacctctcattgaaatcttagagatactagatccatttattcttccattttcaaactaaagttaacaacttcaggcttgatggatagatattttcacattgtagattagctcagatgaatttatgaaaggattggtgggacagacttctggcttccttccccgggacttgcaagctcttgtagctgatgctggtgccaacttatacatcagtcaagagtccgagaccaagaaaattaactctctgtcagatgatcttcatggagttgatatacaccaggcaagccaaatagataacagcactgagaaattaacagctaaggaagactttaccaaagctttggatcgatcaaagaagagaaatgcatcagcccttggtgctcctaaggtaacattcacagttttcttgctgtggtgttttctcgtttgtttgtctatttatgagacaagtttgcatatttttttgttactggagatgcacataacttaaaggtttatttgtattcgtaggttccaaatgtgaaatgggatgatgttggtgggcttgaggatgtgaagacatcgatattggacacagttcaactacctctcctgcataaagatttattttcgtccggattgcgtaaacgttctggtgtacttctctatggccctccaggaacagggaaagtaagtaagccattttttctttcacttttagcatctcttaatagtctgttttttggcagttatatttttgagtttttgaattaaatttacagactttactggcaaaagctgtggcgacagagtgctccttaaatttcctcagtgtaaagggtccagaattaatcaacatgtatattggagagtcagagaaaaatgttcgagatatatttgaaaaggtaagttatatttcttcttccctaggagaagcatattgagtctttggttctgattcttaaactagtgtgttttcttcaattgcaggcaaggtcagcgcgaccttgtgtgatcttctttgatgagcttgattctcttgctccagctcgaggtgcttctggtgattctggaggagtcatggatcgagtggtatctcagatgcttgcagagatcgatggactcagcgactcttcccaggatctgtttattataggagcaagcaacagacctgacttgattgatccagctcttttacggcctggcagattcgacaaacttctatatgttggagtcaacgctgatgcgtcttacagggaaaggttaggcatttaaacaatcaaaagcatgtccaaagacaaaaaaaattagaagcttcctgattcttgtttttgacagggtacttaaagcactgactcggaaatttaagttaagcgaagatgtatctctttattcagtagcaaagaagtgtccctctacattcaccggcgctgatatgtacgccttgtgtgctgatgcttggtttcaggcagctaagcgaaaggtgagagggatagggttgaaatttaagactatataagtctctgtaaaagcttttattgaaatcgctttgtatctgcatacttggcaaatgcaggtgtcaaaatcggattcaggggatatgcctacagaagaagatgatcccgattcagtcgttgtagagtatgtggattttataaaggttaaaactcttttccttcatctactcatcaaaaagagttgccattttcatggttgagtagaaatgttaatttgttatggttcggttttatcagtcgagagttataatagtttcccactttgtcttctttgtaggcaatggatcagctctcgccatcactctccataactgagcttaagaagtatgagatgcttcgagatcaatttcaaggccgttcgagctaaacccctctcagtacataaaaattagcttataatgaagacatttcatatttttttcccagactattttctctgaacagttctgttgatttggttagtcaattgatagtaaaattaaagaatcaataatgtaaaataattttcttggtttgaattacctttgattggttacgcacaagtgattcttcgcttccatagttccatgtaataatataacacacaagtgaagcagattattcaatggtaaaaggttttcttaaaaaaatttccacaacggttcataaaagaattctgtttttggtttgggtaggaaataaaatcatcagtttgttatattaggtttgtgttttatattatctgtttgattatggtgttgttagtaatttcagaatattttctccaaacaattatttcaattggcattccaaaaatagcgtttttgttttccacacgtgactaaattccattaattacgtgaagcatagaatccatatggcgaaagttttttaaattacagtaaaaatttttatgattaaggagattttacttgcaaaaaaaagacaaatctttgaagactgaaatgacgaacttgaccactatgacatcacttgtcacgtgggatttgctttgtttgggcgagctggtccgaaatcaatttttttttttaggaaattatttttgttgagttaattttttttcctctttttcgtttgttcgagaaaacagagaatgaggaatcaaaaaacggaattttgaatttgcaacgtgaggaacctcctctgtcgtttcgatcttcaagtttttttttaaagctttctctcttcaaagctcttcacgtgagctctcccaaatctgggcgttattcgctttctggattctgaatcgcattatccaacgaattcagctgattgattttatcgggctgctttgttcaagtctctctatgtaaatgggtatttaagagttttgcttattctctcgatcgatctaagtttttttctgaggaaatttggaagattttagcttcttcgattgatatgatatatataggtttgggttttag

SEQ ID NO: 8847 - DNA, 3000 bp, Unknown
  misc_feature (1)..( 3000): cDNA_ID_2178997_gDNA_ID_1971906_Annot_ID_177010 3000 nt of promoter + ATG
gaattcttcatatggtgatttactgatttgtttgccaagtctcagttttttgataatgtaaaaaagtctttgactcttgtatctcttctatacaatgatagttgggacgaatggataaggctggactgtctgttgaaacattcagatgagaatattgagaaacagaaagaacagggtttgaaacagcaagggattaagagtgctatggcttggaaagtgtcaaagatgaaacctagaagccctaatggtcagtcagcttcttcttttgtttgttttgcatattcttgtctcgatggatatcttgctgcttttgtggatattcagagtctctatcagggactctcatttggtcttgcttgctttattctatgtcgactaagtagaagttgttgagattaaagtatacatacacatctttcgttgttagttgagatattgtgtcagttgagatattgtgtcagctgagattttgttcaatattttcttaatttttgcagttgctagaggaagaaagcggaagcaagattctgttgatacggtaatcgctcctttagtggatgtatttgcttaatctttcagcttccaaatatccagggatttttttaatcaggggagtcttactcatgtcttgttgtttgctgaatacaggagaagaatgtgcttccctctgacaaccttttaagtttcaatattccaccagcattaaggaagcaacttcttgacgattttgaatttgttactcagatgcagaaggtatttctatcagcctgttatttcttctctcaattctcaaacggtcttttctgtgtgttttgacgcagttgaccatagtcttttgattcatttagtcagagaaaaaatattcttgtagtcgcatgaatatatttgttgtgaatgtcatatttaggtgcatatgttaaggaatttattttaagtcatttttgggaattgtctgagcagcttgtgcaacttccgcgttctccaaatgtggatggcatcttgaagaagtacattgacagccaaatgaagaaacatggcaggtaagctctttgtggattatagtttctttctgctgtcagtttccaacagttacacttgttaatctcttttgttgctattctcatatacttaaagagagtataaatcatttgtatatgctccatggataatttggttgacagataaagcgtattccaagcttctgatatatctagtactttctttggtgaatctatatagggtaacagattcattagaggaaattctgaaaggcttgcgttgctactttgacaaagctttaccggtgatgttgctttacaacaatgaacggaagcagtacgaggaatccgtatcagggggtgtttctccttcaactgtgtacggagcagagcatttgttgcgactctttggtaaggccagtttttgtaatctgcaaatctgcctttatcatgtggtttagttgtcaagataagactatataaatattgagttttgcagtgaaattaccggagttgctagtacatgtgaatatggcagaagagacattgaaggaattgcaggacaactttgttgatattctcaggtttcttcttcttgttctcctacttaactctttttacaagtatttaaagacaaataacaaaaacaaaatgataaagcaggttcttgaggaagaatcagagtgtgctttttgtatcgacatacaaagcagtggaagaaatggagaagaaagaaggttaggaaattgtgcctaatgacgtgttcttgtaagtatgtgcagcgaatcttctctttgtagtattttgtaacgagacctaagaccatcctgaccatccttattgatggtctcttaacataactcttatgttaagagatatgtcttataattaacaaaagtgacttaaagtctcttatataagaaattttgttagttataaaacatgtctcttagcataagaattgttttaagagatcatcaataatgatgatctaagaactattatactatgttccgtctcgattttgaaagtacttaaacgtcgttatcgtgtttgtctcggcgttttaaattccactgtattagtaagaatttatttttaaaataactttagtcatttttaattatctcttctcccttttcaattattaatgatcatagtaacttctcttgatttgtaaatatgctacatagttgatcttttgaatatacgaatgaaaacatattataatagtatgtgttcaaaatcttttgagttttatgagtacagaactatatgtttaatgggcagattagtatataaaattaccagtgcatcagaaggaataatgatctactcgagtagtatatcaaaataatactattcaaatgtataccaacgacaatgagttcaaaatcatcaaaccccatgggatgatgagcaaataatatttttatcagctactctatacatcatttgatgataatatgcaaaaattgtataccaatgagttcaaaattatcaaaccacatgggatgagaaaaaagcatattactatttttaaacagcttctccaatataaatttatttgaccgttacggaaagggagagagatacacacactctttctcttttattattttccgtttatttgacttttcttctttatagatcgacctggtcccacgtaatcttttcaaacttaccgtttggattcgataatcaccgtccgatctcacatgaagcaacgtgaataaaatgaacggtttagatctatcgaccgtttatagcaatacctttctcctttataatctctatatctctctctctctgaatttcgaaaattataatgctcttctgcttcgtactagctgcttcagcttcttcttcttcttccttagattcaaaatctctcttcttctgagtttctgattttcaagtttgagaactactcttttccttctaaatctttgatttttttctctcgtgatttttgtggttcactgctaattgtgaaccaaag

SEQ ID NO: 8848 - DNA, 3000 bp, Unknown
  misc_feature (1)..( 3000): cDNA_ID_2178993_gDNA_ID_1971906_Annot_ID_177009 3000 nt of promoter + ATG
tacattttcaaatatggatgctgttattttgtggatttttaagtgtctaatatattatcgaatatgcagtgttttgtggattttgaagtgtctaatatttattgaatacagtaagttaatatatatatatattatatagacaaattgacatatatttttggccaaagtatctcccttggattttgatcatactctgcgaatgtgattcctttcggttttgatcatactcgccaaagtgcatgaagaaggttttttgaatgtgtttcgtggaataacatttattttcgccaagaacataactttatgctttccgatttttagtttacagtgtgttacatactctgcgaatgggcccctatttactctgtttatgaagtcaatttttgaaatgttggatgctctcgaattggatttgcagttacgaacagagaacacttatacggacaaaattctgaggttcgttatataaagcagtgggaagttaaacaacgttgtagtaactgggttcgttagcgtgttaaaacagcatgctttcaaaaagttgcatcgcccaccgtggggctcgaacccacgaccacaaggttaagagccttgcgctctaccaactgagctagacgggcttgttgactatattcacactattgttatactcatataaaaaaaacacatcccaattttaactagatgcaggaaagaaatttgcaaggacggtgctctgcgacaaaagattcttgtgaagaaacaaactgaaaactcatcagcttatattataaggctaaagctagtgttatgtctgtaaaaaagatgcatatatataaatagagctgaataaaattacaacaatgacaatcacctgcctttcccattggcgacttcacatctttattttactcagaagagtcacattcatcatcaaacatggctgatgacaacagtccctgtacaaactcacacttctttgccttctccaatttatcactatccgataaaggacacgacgatgtaccctcttttgctgctgacgaatccttaatcggattcttgtcttctacacttgaatcaggcagcacaagcttggtctgatttggtaatgcagaattgttgatgaacgataaaaattgatcggaaacatgtttagagggatgctgatgatgattcatagatggtggcaactcatcaagatgaggttgaagatatttatcagataaatatggatcttccctgtaagacatttccttctgctcactgtaaaattatcggtcaaggaatttcaaataaatcacattcattatagcgacggaaatttgacttgaaaggttttgaaaagaaacaaaaaaggatatcttcaagacatctctatgatgtgatgttatatgatccaccatatgcatcttcacccttttgctacatacaggacatatctacaaaaaccacaaaacaaccaaaacgaattgtaagatgatgctaccacatgacaattcacggaaccagattaataatgttccatcatactacttatatattcatttctttagctcgtaaaaccaatctatgcttcaaaacagagagctcaagtcacctactctctatagcaagtatgtaaagccaaaaaaagtgtcaaaagtattaatatcctaaaaccttaaactgatcaatggagagttatgtaaaacccaaagagtaacttaagataagagtggcatgtttctctattaaaactatttgcaatagcaatcagattctcaaacgcatcaatctaaaacaaatcctaatcaaaattatagattgaagttatgtttcccacaatccgaataactaagctgtgtaaaactgcttcatgtgaagcttgagtgtgaaatgaaaagagcaggagagataggaagtgaattcacaaaccccattgttagcttcatgacgatgttcttcgtcgatatggtgacacaattcaactaaatcataatcacttgcgcaaaacgggcatggatactccactgctatatcgtcgtcaacttcttcaaactcttccaaatcttgataaggccctgaaatattcaccactaattaactcgagagcaaaagagaaaaaaaaagtcttctctcatctaaaaagcaaaacgtaaagctacaatttttaacttaaacgaccaactacaaaaagtcatcaaaacagaactcaactcaatcgaaacccaattaagaccaatcttcaatcataaaccctaaaaatgaagtttgaaagaaaaattgaggggatttggataataaacctgattgatacttagcagcagtttccgatcgatagcttctagaagaaccagatgagctaacgcaccacatatcgtcttccatctgctttgtcggagcctttcttatgtaaaaatctcagataattgatgagagaccttcttcgtcgtgtcagctaaatacccaattgtgtaagagatagcagaaagaaaatgtcaagaaactactccacggaaaggccaaacctttttttaatccgccgagtcttaatggacaagaatacttcgggtggtaagagtgaactactattatacccttacattgcactgagcctttttctcagctaactcaggggtgtttttgtccttttcttgtaaggatgttactgttattgcattgctccccaagttaattatcagtaaaggcctgacttgaaattatataaatgggcttaaagtcaagattttgaaatgatataaatgggcttgaagtcaagattttgaaattatttaaatgggcttgtaggcctaataataaaagcccatgttaaaatctgagaatttttagattctgatagacggaaaatcccaattttcccggaaattttcagacaaaatcgcgttgagattcaacaactttgagtgagtttttttttttgtcatttacctttgtcgcttcgacgtgagacgagccgtggaagaagacgaaagggctcttaagctctctttactcttttcttctcctcctctttttgag

SEQ ID NO: 8849 - DNA, 3000 bp, Unknown
  misc_feature (1)..( 3000): cDNA_ID_2178989_gDNA_ID_1971906_Annot_ID_177008 3000 nt of promoter + ATG
ctacaaagagaagattcgctgcacatacttacaagaacacgtcattaggcacaatttcctaaccttctttcttctccatttcttccactgctttgtatgtcgatacaaaaagcacactctgattcttcctcaagaacctgctttatcattttgtttttgttatttgtctttaaatacttgtaaaaagagttaagtaggagaacaagaagaagaaacctgagaatatcaacaaagttgtcctgcaattccttcaatgtctcttctgccatattcacatgtactagcaactccggtaatttcactgcaaaactcaatatttatatagtcttatcttgacaactaaaccacatgataaaggcagatttgcagattacaaaaactggccttaccaaagagtcgcaacaaatgctctgctccgtacacagttgaaggagaaacaccccctgatacggattcctcgtactgcttccgttcattgttgtaaagcaacatcaccggtaaagctttgtcaaagtagcaacgcaagcctttcagaatttcctctaatgaatctgttaccctatatagattcaccaaagaaagtactagatatatcagaagcttggaatacgctttatctgtcaaccaaattatccatggagcatatacaaatgatttatactctctttaagtatatgagaatagcaacaaaagagattaacaagtgtaactgttggaaactgacagcagaaagaaactataatccacaaagagcttacctgccatgtttcttcatttggctgtcaatgtacttcttcaagatgccatccacatttggagaacgcggaagttgcacaagctgctcagacaattcccaaaaatgacttaaaataaattccttaacatatgcacctaaatatgacattcacaacaaatatattcatgcgactacaagaatattttttctctgactaaatgaatcaaaagactatggtcaactgcgtcaaaacacacagaaaagaccgtttgagaattgagagaagaaataacaggctgatagaaataccttctgcatctgagtaacaaattcaaaatcgtcaagaagttgcttccttaatgctggtggaatattgaaacttaaaaggttgtcagagggaagcacattcttctcctgtattcagcaaacaacaagacatgagtaagactcccctgattaaaaaaatccctggatatttggaagctgaaagattaagcaaatacatccactaaaggagcgattaccgtatcaacagaatcttgcttccgctttcttcctctagcaactgcaaaaattaagaaaatattgaacaaaatctcagctgacacaatatctcaactgacacaatatctcaactaacaacgaaagatgtgtatgtatactttaatctcaacaacttctacttagtcgacatagaataaagcaagcaagaccaaatgagagtccctgatagagactctgaatatccacaaaagcagcaagatatccatcgagacaagaatatgcaaaacaaacaaaagaagaagctgactgaccattagggcttctaggtttcatctttgacactttccaagccatagcactcttaatcccttgctgtttcaaaccctgttctttctgtttctcaatattctcatctgaatgtttcaacagacagtccagccttatccattcgtcccaactatcattgtatagaagagatacaagagtcaaagacttttttacattatcaaaaaactgagacttggcaaacaaatcagtaaatcaccatatgaagaattctcttatttataaatagtttcaaatgatttcaaaccgattagaagccagtaactatattggatgaagctctaaccttttgttccaaccctgccaaaagaaatcatttacatcttcaaaactaaagatagaagcaaaatagctcaaaagaatgattttaaacatatacagtatctacttacaatgtaatgcacaaaatatttccattcattgtctttaaattcaactttaagaacctgagaatattattataaaaaaaaaaaaggaaacgatcagagacataaagcataagcagagaagaacactctaattcaagaatacagagagtgtatttcactaaccttggcttcgtagaagcaatcactgtgtttggctaaaactctctctccttcttcgaagtggccgggaggagcaggtagcagaagaagaggcaaatcttctccgtcacaatcggtgttggtctctgtatcagaaccagagtcccgtcgtgtgtctccgatgaaatcatcggttgttagatccgtctcggcggcggcgttagggcttcccatctcaaaaagaggaggagaagaaaagagtaaagagagcttaagagccctttcgtcttcttccacggctcgtctcacgtcgaagcgacaaaggtaaatgacaaaaaaaaaaactcactcaaagttgttgaatctcaacgcgattttgtctgaaaatttccgggaaaattgggattttccgtctatcagaatctaaaaattctcagattttaacatgggcttttattattaggcctacaagcccatttaaataatttcaaaatcttgacttcaagcccatttatatcatttcaaaatcttgactttaagcccatttatataatttcaagtcaggcctttactgataattaacttggggagcaatgcaataacagtaacatccttacaagaaaaggacaaaaacacccctgagttagctgagaaaaaggctcagtgcaatgtaagggtataatagtagttcactcttaccacccgaagtattcttgtccattaagactcggcggattaaaaaaaggtttggcctttccgtggagtagtttcttgacattttctttctgctatctcttacacaattgggtatttagctgacacgacgaagaaggtctctcatcaattatctgagatttttacataagaaaggctccgacaaagcagatg

SEQ ID NO: 8850 - DNA, 3000 bp, Unknown
  misc_feature (1)..( 3000): cDNA_ID_2178985_gDNA_ID_1971906_Annot_ID_177007 3000 nt of promoter + ATG
aacctcaatttataaatttggtgtagcttttcaaccttgatgaaattattacatagaatcattcgttaaaagacttataattgggtttagaaaagcccattttaaatttaaagcccaatatactgctcgaaaaggaggaaaccctagaaacattgtggtatataaattcttttcgtctcgttcgctaatcagttctccgccacaccaatctccagaaaaggggagaagcaaaaatggtttctctgaagctccagaagcggctcgccgcatcagtgatgaagtgcgggaagggcaaagtttggctcgatcccaacgaaagctccgacatctccatggccaattcccgtatgttgttgcttttttcttcatccttttacttttattgttgtcctgtgtttgtctgcgacggtggtagacggtcttaggtgttgaatcactgtgtttgtttccgatctgaaaatttagagcttgtaggtgttgttacggtttcatttctctagttataggccttgtagaactgtgatttgtctcgtgaatcaaagctagaggatttgatttctgatattgcttcttaatagactgaggatttgaatgatgttccatttcgagtattgttgttatatatttgaagatctttgtagcttcaaatattaagaatgtgatgattggtgttgaacttattgtaggccaaaacatcaggaagcttgtgaaggatggtttcatcatcaggaagccaaccaagattcactctcgttccagagctcgcaaaatgaagattgccaagatgaagggtcgtcactctggatacggtatatacttcacaactctgaaaatccctctatttaatcgtgattttgaagaatgattagcgttgtttactcttgccttttttcctgtgtttatgattaaataggtaagaggaagggtacccgtgaagctaggttgccaacaaaggtactgtggatgcgtaggatgcgtgttcttaggcgtctgttgaagaaatacagagagacgaagaagattgacaagcacatgtaccatgacatgtacatgcgtgttaagggtaatgtgttcaagaacaagcgtgtcttgatggagagtatccacaagtcaaaggctgagaaggctagggagaagactctgtctgatcagtttgaggctaagagggcgaagaacaaggctagccgagaaaggaagcatgctaggagagaggagcgtttagctaaggtcagagcttaacttcttacaaactttataaagtttttttttaattttgatcagagattcttatgtgttgtggattgtttgcttgtagggtcccggtggagatgttgcgcctgtagctgctccagcacctgctgctacacctgctccaactgcagcgtaagtgttatttcaattttgttgtgaattgaatttgtttcaaattggttaacatctatctaaatcgtgtatgtgtgtttttttgcttgtgcagtgtaccgaagaagaagtctaagaagtgaagaggatatatagtgtgaagctatatcgatcatcagttcacggattagactctgaagaaggttttgaatgttttatcgaatgcgtttgtggaataacttttattttcgcaaagaacataacttatgtcagttaatctttatgctttcagatttttagcttacagtgtttcaacagacctactttgcaagttgttctttttttggtttcttattgtttttcgttcgtcatacgcaattacaaaataaccatccattaatccatccataaattgttaaattttagaattaatatatgcaataacaaccatcatctatttcgaagtgttgtttattttcttttgactttcgttttgttgattcttcactctactcctccagatgatccaacaagtggtccacctcttctgtctgctgagagcttttagtagaagcgttatttgataataactgtaatacatcaacccaaacgatactgatatgttttcatttcaatcctttacattaatcaaacactaataacaaattcacagtaacatatgaaaaacatcactgtcattaaatatcagtggaggtattacgtaccaacctgtaagcgccaattcataaaacactactaaccaacacccactcccatgtttttttctagcttttactatacatggtatactttcattttcttttagataacagctaaagctttttacaactcgtatgcgagtctatgttctccttgttgtcttattactataacgagcaaatatgtgtttgacaagagaataagacaaagaaaaaggtctcacattgacacgacttctatacacacaccaataaaccaatgtgtgtgattttggatatgcgttggagatattaacgtatacatttatttacatgtaggaaatacatagctgtatcaccaatatctccaacacattttatcacgtttaatccaaaaactacaattatctttctttttttttaattattatcataagaaaatgtaaaactataaacacatgtcaaaatcaataatgttacatatatcaaaatccaataaaaatattatgattgaatatgcgtggtgaattgattgacatgtgtcacaaaaagaaattacaaactttgaaaagtctagcttatacaataagatgatatattttaataaataatatatgtgattcttttctttttagtattataaatctattatattatcttatttcaattgatataatttaatacactttttcaaaaaacagtgattgtaatacttttattattatactatctgtaatttattagataattttccttttatttatataataaatgttctttttaaacttgtattttgggttgacaaggcccaacaaaagcccataaatgaatttcggatggatatatagaagagaaaggacatttcgcctgcatgggtaaaaaactcaacaaatcctgaaaacaacaaattcccgaatcacacagcgaggaggaagagaat

SEQ ID NO: 8851 - DNA, 3000 bp, Unknown
  misc_feature (1)..( 3000): cDNA_ID_3043733_gDNA_ID_1971906_Annot_ID_177006 3000 nt of promoter + ATG
cactgtaataccaatacttttctataaggaatcaaatctataaatagcatactaactagcactataaaaacattatgaatcctcctatgagcaaatcacttttaaatttgttaacactcttttaaaagaacaaaaaaagcaaaaaaaaaataaagatattatcaccatggctaacgcaagaagtttggtcgccaaggcaaacaatattaacgtaggttcattgattctaatggccttggtgtttggttcttgcgtggctaatggtgaatatctcggcggccgccgtggtctcgctgctaattccggtaaccccacggtctatgatattactaagtttggagccgtaggagatggttccaccaatacttttaaggtaaagtttagtttcattttcgatccataacctttttgagtattttatagtaaaatgcatgtgacattctaacgattgatccaataacattcatgcaggcgtttttgaacacatggatacaagtgtgtgacagtccagtaccagcaacgctactagttcctaagggaacatttttggctggtccagtcattttcgccggtccatgcaagagcaaagtgaccgtcaatgttataggcacaatcatcgctacgaccagcgggtacgcaactcccgagtggttcttgttcgagcgtgttgacaatctcgtcctcaccggaaccggcacattccacgggaaaggtgaagctgtctggaaagcagatggttgtggtaaaaaggtccaatgcaatcttcctccaacggtaagaccaaataactatatattatttcaaatcatgtatatatagatacttgcaataactaatcacacatttgtacgcatacatgcagtctctcaaattcaggaacatgaaaaatgttgaaatcaatggcataagctcggtgaacgcaaaggccttccacatgttcttagtcaaaactgagaatgttaacatccaaaacattaagcttaccgcaccagctgaaagccccaacaccgatggtatccatttgagcaatgcagacaacgttagcatcctcgacagtaccatagcgactggagacgattgtgtttcagtcggtcgtggctccaacaacgtaaccgtcgaacgtgtgatttgtggtccaggacacggtctaagtgtcggtagtcttggtaagtacaagaacgaggaagacgttagcggaatccacgttaacaactgcacgatgattgagaccgacaatggtcttaggatcaagacatggggtgggtcagacccaagcaaggctgtggacattaagtttgaaaacatcatcatgcagagtgtcaagaacccaatcatcattgatcaaaactacggttcaagaggcggagtaagtatatacatcactgaaaatgtctcaaaccaactattcttttgaatatatgcgttaacaattccttttttttggcatgttttgtaggattcacaagttgctataagtgatattttgttcaagaacattagaggaacaacaattacaaaagatgttgttcagattatgtgtagcaaatcggtgccgtgccaaggagtaaacgttgttgacgtgaacttggactatgtaggcaagacaggaggagagaagaagtcgtcatcaggcggtttggtcggagctctttgcgataacgccaatgttatcttcggtggaaaacttagtttccctatgtgtcccaaataagctttttggtataaataatttaatattaaaaaaaaaaatcaaaagtttcacaaacattgttttgtttgtgagttagtttgggaatttatcaacaagaaataatcagtggaatatttgacttttgataatgttttttttcccgattttttttgattttttttttggttttatgtataaataaacagatccttcagctggttgcttaatagtttctggttagaaaatttggtctgtgggtattagtgtgtacaatcattttattgctctatctaaagtcatcgatttctttctttctaagtggcaaaatatctctttcataaaaaaaaaaggaaagaataataaataaaaatatctctttcattctaacttggcattaaaatttagcaaaaactatttgtggaacttgaaaaaaatattactagctcagacttaaacttaaatagtaacaagcatattaaaagtcatgctaactgagatattgatttcctcatctcaagaaactatcttatgaatctgtttccgattattttagtttcccatcaatcatctttaatttctaggaagtttgattttttgaaaatttctccacctgcttaaatttcattacaatttttaatcttagataaacaactgtaatttatgcaaaatgaactgattatataagtcgttatgaatatttatattttttaaaaacatttcagcaaaactgatatactttttttttttttttttttgcaagcaaataaacaaacttccttgaataaaacgtgaaaaataataagagtctttaaagataaacgttgttcatatacattacgtcatataatatatataacaattaagacaatacaaacatatatacaattctcattgggttgaaacattataaagataagataaacatctgtatatatacattggtatacaatatttttcataaatttttttttctctaatcgacagttatatatatacagaaccataatttttaaagcatgctttccaatgcgttttttttttttttttttttttttgtaaaccaaagccgtgtttctaaacctcaatttataaatttggtgtagcttttcaaccttgatgaaattattacatagaatcattcgttaaaagacttataattgggtttagaaaagcccattttaaatttaaagcccaatatactgctcgaaaaggaggaaaccctagaaacattgtggtatataaattcttttcgtctcgttcgctaatcagttctccgccacaccaatctccagaaaaggggagaagcaaaa

SEQ ID NO: 8852 - DNA, 3000 bp, Unknown
  misc_feature (1)..( 3000): cDNA_ID_2105271_gDNA_ID_1971906_Annot_ID_177005 3000 nt of promoter + ATG
gggaaacagagtggtttaacgttagcgtgttcataggttggtgatcctaacatggaccatgcttgttgggagagaccagaagacatggacacaccaagaagtgtgtttaaagtcgacaagaacaatcctggttctgatatcgccggtgaaatcgccgccgctcttgccgctgcttcaattgttttcagaaaatgtgatccttcttactccaatcacctcctccaacgagccattacggtactgtaaatgtgtcatttttcacaattaatattcttcatttagtaaacctatatttttcaagttttataattaggtgaaatattcttcatttaataatcatttggctattaattttttttttttaaatctatatgagcattaattaaaaagttgcatttgtgggtttttaaggtttttacatttgcggacaaatacagaggaccctacagtgcaggtctggccccagaagtttgtccattctactgttcttactctggatatcaggttcaacattttaaacttttgaagttggatctatattaatttaaagtgtaactgtaatctcggaaaaaaaaactgaaattgaagtcatgtttttggttttggtttgttcaggatgaattgttatggggagctgcttggttacaaaaagcaacaaataacccaacatatctcaattacatcaaagctaatggacaaatccttggagctgatgagtttgataacatgtttagttgggataataagcacgttggtgctagaatccttctctccaaggttatacaaatctttgaaactaatcaaagattccaaatttagaccattggttcttgaattcttatgaaacattttttgtgtgactttgttttgttttttcaaggagtttctgattcagaaagtgaagtcacttgaagaatacaaagagcatgctgatagtttcatttgctctgttctacctggagcatcctcttcccaatatacaccaggtttttgcatatataccactcatcttctcattgaaatttaaaaatcaaggaatttatgatatatgtgtatacatatttataggtgggctattgttcaagatgggtgagagcaacatgcaatacgtgacgtctacatcgttcttgctcttgacctacgccaaatacttaacctctgctcgcaccgtcgcttattgcggtggctccgtcgtcacccctgcccgcctccgctccatcgcaaagaaacaggtttgtttcaaaaccaatgtatattgactctggtatactttggatgtcaaaatcaaacttgactatcaagtaaattttcagttaatgcacataataaatgtgacaccatctgcaagactacagcataccaataaaagaattaagaatctatactttattataatgataattagcaaaaatgaaataaattttgtattttgctaaagcatgaattaattaatatcccaatataaaatggaaagagtagtatttgcttaattaattgattcatgtgatatatgcttcaggtggattatctacttggaggcaacccgttgaagatgtcatacatggttggttatggtctgaaatatccacgtcggattcaccaccgtggctcatctctcccctccgttgcagtccacccgaccaggatccagtgccacgacggcttctccttgtttacctctcaatctcctaatcctaacgacctagtcggtgcagtagtcggtggtccggaccagaacgatcaattccctgacgaacggtccgactacggacggtcagagccagcaacttacattaacgctccacttgttggagctttggcttatcttgctcgatcctaaggccaactttaactaagcttaaaccgcatttaattgttggtttacaatgttaattagtagtaatgattttataaatgaatggccaagattgtccgatccggctgaatgaatgttttagatgatgtggtatttgattttaattttctaataaaaaaaaaagtagcatttagaagtgggaatgggtctatgaaatgagattacgtcaatatgagtgaaattgataaattatccaatcccataaacgagatggtgaacaaatataaatttacatttactgctagtaaatacaactacaattactttttaccacgcaaaaggagagaggagagattttttttttttttttacttcgtaaggataatatgtacttagaaaataatatacagtgacgaaggatgatgaatgctttcatgggaaacgagcaattgaccaggttgagagagatatgggccgattaaagctgtcactgtctctgttatgacagaactaagttcacgtttacgtgatttaaatttttattgatagaggagatgattgtgtttacaatcactgaattgttactgattttactgtgaattgcatatcaattggtaaacctgtaaaattgtcttatcattttgtggattaccaatcatatttatgagaaatctcaattccatttacataaatatttaaaagacaattacagaataatttagctatgacgctccgacataatcaacaaacaaaacaatattttgcatctgtatatatatatatacaaaattttgttacacatacacataattttgaggaagaaacaaaaattattatttggttgcaattttagactgttttataattaaccgagtaatattgatcattctcaaccacttaatcaattgattcttttttttttttttttttgcttgatataaaaaaagttacggtaaaattggaaatcgttactacctaagattggggtcaacaatccgtaaaagaagatggaatcacacactgtaataccaatacttttctataaggaatcaaatctataaatagcatactaactagcactataaaaacattatgaatcctcctatgagcaaatcacttttaaatttgttaacactcttttaaaagaacaaaaaaagcaaaaaaaaaataaagatattatcacc

SEQ ID NO: 8853 - DNA, 3000 bp, Unknown
  misc_feature (1)..( 3000): cDNA_ID_2178973_gDNA_ID_1971906_Annot_ID_177002 3000 nt of promoter + ATG
atggtatcaggatgtgaagtggctttgaggagaaagtcagtagcccaacgaatagcgtcttttgcgtttggtaactcagatttcatgagaccaccaaactcaattaaactccatgagagcattgtggttgtgaatgccattgggaatccaaacttcatattgtcccctgcatcgtagtatcctcccaccaaatccacctacaaaattaaaccaattcacacaaattaggctttccaagaaaatatgtaacttagtttctctgttttaacctaaaaagcataataacaaaattagggtttcaattcctctgttctaagcaagagtcccattaagtttgaatttttttatgattttgatagagaaatttaacctaaaaaccataataaacaaatttagggtttcgattcctctgttttatgcaacaaccccataaagtttgaaccttttttgatgatatatgttaagttttaacctagattgctagcattcatgttaatcgagaacagacccatttcacattttccataaaagcaacaacaaagcaagagaaagtagtgtcatttacgttgagagcagagccatcagagagaccagagttgcttctccaagtcattctctggtttggaggaagctttccggatctttgaccttcgaagaagagaatggacttggagagagcgtctttgtaattgtggttgtccaggtggtgacgatggtggatgctagggcgagaggaagaggacgagaagccattggagagaagcaagatgaaagagagaaaggtgatgagtcgtgaagaagagagatagagagccatttctctagtctctagagataggaaaagaaaagagagagctctgattaaccaatcaatgaccagtatgcagaagaagaagcttgctgctaggtgagcagaggagatttagctatttatatagagcaaagatttggttttctctttcctagctaaaccggttagttagtcacatgaaccaaacaaacagaatcattaatatttggaaattacgaaaaaactaaacacacctttatacttgttaaataacatgataagtttagtttgttttttttgtgtgattgattttttttaagttgtttacgtagctttgtaaaaaaagttaagtttgaagggatcttgtaaatattgcttgctcattgttaacacaatctcgaaatcgtaaaagttttgtaatcaatcactccataccgaattcagtggaaacattttaagtgtccatcaaatatggtaaaaaatgaaaaataaaataaataaaaatccaatgaaacgtccagtcaattttacgtggtaatgaccaaaataataataatgagatatgcatatgctttgtcagaccaaaaaagaagaagaaagagatggagcttggagagcgaaagaacaaatgtgagagttgtgggcattgtgtccaaactaataacaaatcaaggtgaaaatcgtaaaagtaagaataaattaagggtcttttcgtaatatttggtaaagttgctattgtccatacgcatgattcatctccttgaaaatgggctaaactttgagggcccaacttacaaagtcgataagccttgcaccttcatttattcctttcagttcaatatagtagttgggctattataatcgcaacacctggcccataggccatatgtcttcttcttttttttcttctaggccatatgtctacgattgaccaaaagtaaaataaagtaaatgttgtttacggattagattggtgtgaaggagctgtgagcctatggcatatgtaccacgttaagatttaagaaaatctggaataaaaaatgcaactagatattatgttatacaaatctaggccagagtcggttgttttcggaccgttctgccgtgaaactgtgttccttaacattttgatttaacgtttccatatttctgacattccaataaattattgataactagtaattaattaaaacggtttactctgaactctgaagtgtgtgaggtcatcaaatgtcaacggctacaatttcattagttacgtgcgtgactgcgtgttgacatattaagcagacaaaattataattacgttagatcattagcaattagatacagtcacgaatgcattgaatgtaagttgattataaaactttaaagcggactaattgtatttaaaaagagagctatagttagattggaacttggaaccatcgatatgattttatccgttaaataatttgagaaaatgtttaatgctgacaaataattgaacaatttgtcaacatattgcaagtttgcaacaacgaaaaacgataaattaacacctaataagtcagttgtacaaatatacctacaccaaacatgcatttacatatttgttcaaatatttttctttgaaaggagtgttgcaccccccataaaataaaacgtcaatattctttcctgttttgtttctttcggtaattagagaaactgattgtgaattctttaccaacaaacaaacaaatttacctagcaaagttttaatacttcaacaagcttacatgatattaaatcatttgtctcgaaattccgtgttatgatgcactaatgtcaatcaaactattaataaaaacaaatatcataacaggtaacggctactattaataactcaattatcatcgagatacgcatatagatagacacataatcaaatactaatattttctctataaacgtatgaatataatgttctgcaataacagataggcatctttgaataagcagacagagtttccgatgattagtaaattactttctgcaaacaaacctacgcgtttttatgactcccaaacgagttgactcaggattatgatcgcattacaatatcatagttatcatacacatattaaaaaattaaaatggacctacctcatcctcattaatcatcaccacacttatataaaccacttaacctaaagtttgtattcacataaaactttccagtaccaatg

SEQ ID NO: 8854 - DNA, 3000 bp, Unknown
  misc_feature (1)..( 3000): cDNA_ID_1026880_gDNA_ID_1971906_Annot_ID_176997 3000 nt of promoter + ATG
tttttaataaatttattgcttgttgttcaagagaatagctcgtagctcagccgggtcaatctcctcagaaacggtttccggtctgtaataaccggttttaggatctggaacccatggtgccttctcgcttgaagcttccccagctctcttcttcatctccgcggtcgaaacgcttccatctaacgccgttttggctgcggcggcaaaccctcgtctgaagagaatccaaaatccaaaacgtcagcgttttgttaaagcgacgagaaaacagagcaatacataacgtttttgtttcagaaacagatgttacctgaaaacggcgttcgagagcttttcggagccgaagacggattggatcttagcgttagcgagagaacgagccattgtggtttataggttttacgagttttggagaagaagaaaaacagcgcaaaagagaagtttctcaggttcttgatctgatgactgctgttacctttttgcggcaacgagatcgaacaaacttggtcgtcctatctctcttgacagatttcaaaatgctttgcaggatagatgagaaggaagagagatgagaggagggtttatatagaggaagcagagcagataggctgcgtcaatttaggctttcacccaaagttattgttttctgtttcttttgatttttttttttgggtttagggttttaaagttagttgtaacttataattaaaattgttttcaaagtcgttttgtatgtaattaacaacttgttttacttatctggatttaaaattaattaactcatctaatatacaagtatactatagtttgaccaaaaccaatttttatcttcttttttttgtagtcaaccgaaaatataaatgttcatatatgaaattaccatatgtacgtattcataatgctcaaaagaaattaatgatatatttagatatttttttatctcctaaataattgtgattgcatatatttagatattttttgatctcctaaactaaattgagtcggaaccactcaattctgccgaaccaacacggcctcaaaaagagtcggccatttagtcactctttctttcagaattttgaaatgaacttagtcctcatccttgtgtcaattttaaccaccaaaatcatacgacagcaaaaacttggacaattaataaagatccgtcctaagcaggaaaaatatagaccaagtgtaattaaaaatgaatgaagaaggtcgagcttaatcttcctcgtaactagctacttcatcgtcaatcctgaagtagcgtacctcgtagacatttttgtctttgttagatgcaatcactcgtagccaatcacggagattgtacttcttcaaatatttctttgtcagatacttcaagtacctgaattcaaaaccagatttttgcaatttaagagcaagttagggtttctaaagacgtgtgagagaagaaaagaagtttaccgtttggagaaattggaattggcgttgacattgatctttccattatatcgggtgatggagacggagttaccaagagcaccggctttacctctgaccttgattcgttcctgaagaaacttctcaagcgtggctatctccaagatcgtatcatcaactggtttagagcagtcgatcacaaaagaaactcctttcttcttagcaccagctccactcgacttggcccctactcgagccatcttcctacagagattgaattgaatgaaactctcttgcttagattagacgttggctcgaaaagatgaaaatcttcccgcggcgaggttagggatggactatataaatgacccacaagagtccctagggttttgtttagtgttagcccaatgggcttcttaggcccaatacttgggctaagagcttgtctaatttctgtttgatccgaaatgatatcaaatattgaaccggcctcggttcaattaatctttgttcaacatcaagagatatttgatcacataaaacctgtaccgtatttcatttcctagagtagttatctcagcatttaaaagatgtggaggaaactatatcaaacactggtttattctcttacaattgtacaattatgaataaaacatctatacaacttctcaaggctttgcgatttcgcattgcgactcggaagcagtttttcatcttagtggatgaaagtcagtcacctgaagaaataacagtgctttgatcgaatctataagtaaaagaatgttatgagtcatggaatcaatagctttgtaatcattccttctgcctcgacgacatctatagtgagattttttgtctgacaactctttctcctcagcacaaatctccttgcttgattctgtatctgcttaacaaatcaaaaacttcaaaatcagatttctctaagagcaacaaagacatatctcaaggcaaaagacttttaactacaaaccaattcaacaaggttcttacgcctataatgaaagaacaatgtcaaattttggagagaaccaaccctagttagtgatcaaacatgttttgccatatttgtcttcctaaaactaaccttacaatttctatgtttgtagctggctataattaagacgactgacggagaatgacattactcgaacaatatagtcttagaagcatctccataaagttggaatggtcacaggcaaatgaacctatctaacaacaagccagtttcggagacatgtaatttttttgtttgtgagaattttttaagttgctttctttgtaatgttttaagattttgattaaagcagataattgaaacgtttcttcgccacactatagtatataaaaggctcacgtgactcacgtgacgctcccttattaacctatatcgttcgccaacttcgaaaccctaaattcccaaattgcggaggctgagagatctcaaatcgacgaccaacaggtgaattttcgcttcctctgcttcagacattcttgataaagtttgaatcttgactttggacttgtgtttttggatttgataaaggaagaatg

SEQ ID NO: 8855 - DNA, 3000 bp, Unknown
  misc_feature (1)..( 3000): cDNA_ID_2106710_gDNA_ID_1971906_Annot_ID_176996 3000 nt of promoter + ATG
gatggtggtagtcgtgggccatctaggagatcagagtttcgtggtatgtagtcatataatttgcattattctgtccaaagttgtaggaattgttcctaattttacttgtttttcttttgtccaccacagttctagtcacaggcttgccttcatctgcttcttggcaagatctcaaggtgacttcacactggtcaacaaaactccttacttccccttgtatctttaaagtttctgaattctaacatgaatcacttttacattaggatcacatgcgtaaaggaggcgatgtctgtttctcgcaagtgtaccgtgatgctagaggtaataagtgtgcccatataatcttgtccatcgaaaaccaagttgaatggttttaatcttggacaatcttactgtagggacaactggagttgttgattacacctgctatgaggacatgaagtatgcggtaagctattttccctgtttctcttctgtggttgagagtttgttctactcatccttaatcactgattagctctcactcttgaatttccccagctgaaaaagctcgacgacacagagtttcgaaatgcgttttcgaatggatatgtccgggttagttgaagctgactttcctgtgaattgtgatcttttcattgttgtgtttaatattttgtttcatatctctttaggttagagaatatgattcaaggaaggattctaggagtcctagccggggaagatcctattctaagagccgcagccgcagccgtggacgaagcgtgagccgaagcaggagcagaagcaggagcaggagcagaagtcccaaggcaaagtcttcacgtaggtcccctgcaaaatctacatcaagatctcctggcccccgctcgaagtcaaggtcaccgtctccaagaaggtaatgatttgattccttttcagaatgcaccaggcaacattacttagtcggtagattttcctgtgaagtttatgaaaatctgattagaaaagtcattgttgatgctcaaagttcttgttgattgagcatatactggttttttgttgacacctgctgtttgctcgtcattattgtcccttcttactccatccttatatttagatgcttagcccttttctggttaagatttgcgagattggccttacatttttagcatttttaaatatgctcttttctttcctgagaagaaaatggttttgtttcatagatatggatttacatacgactagaaaatggaaattaatatctggatggaaattgattgttgacaagtgtttcgtctaagaggtatgggaaactttggaatagagactttgcttttcgtggcttcctgatatagtattcactaatttacattgctgctagatggataacagtggagacattggatcacttggatcacaatattatatcgggatttctgtaaaactatattggctcgatggattgacaatatggaatctgggttctcttgggacgtccgtggctcatttggcaacacaagtttttttggccacatggcttataaaacctctgtcctatcacctatgttttaactaagtagcagaatagtttggtttatgtttctttttttttatttgttgcaacttcttaatctctgtgagatagaaggagaggctccaggaccttgctgaacagtataaaacacaacatgtttggatttttgaatctgagtttcttttcttggacttttgcagatcgcgttcaagatcaagatctcctctaccttctgtgagtaacaagatccaacttgtgacccctcttttattttgacataatcttctgttttacattgttcgttatcttaatagcttttctgtatcacaggttcagaaggaaggaagcaagagccctagcaagccaagtccagccaagagtcctatccacactaggagtccatcgaggtacataatctttcttagaaatgaaacattgcaatctgattttgtttgataatgcgtaaatctgaatctgagctcttgtttgcaggtaaaatgggagatatccaggtgaaaagagaagagagaagcatcttcttgctactcaaaacaaattctactttcttgaagtggattatatctgaacgcttattgactgtagaagatgcgacaagtttgatttgcactatcattttgtaatattcttgccattcttcgtcttctggatccctttacttttgagaatgatgtttttttttgaagatatcgtttcttttccctccttctgattcatccttttcttaattaactaaagctctcacttaaacaacgtcgtgtttagacctgatccggaatctgactgtatagcctgaactgtacgattccagtaaccggtgaatcttgtctggagacgtctgctttgaacttggtttttgtggtgaactcagtcctttgttcgtttccctaatttctcatgctcttttgcaatcatatcatgttcgattccatctttatagttctatatccttggtatagtagtgcctgatttggattctctgtcctctttagcttagagagctatataagcctgaagacaaaacttgattttattggatgatatagaacatgcaacaaaaggcaatcaacaatctctttgaaaagtattcgctgctcattgagagataatgaaagtgtctttacttagagagtgtggtactatggtgttgatcactcaatatgttaacatgtgggtccaaacaaaaaaatactaaagctaaggaaacaaacaaaaagccttttgaaagctaatgctgctccctattttctatatcgttggacgatttgctctttacttcttcatcaaacttgtcaaaacaagtggacccactcctagaagcagacgaatgcagttccgtgtttcaaccaaacttgtacttgcttgttaaagtacttaaataatctatcacaaggggttcaccgttcgtatttgttcttgcttgctaaagtttttttgctctgtacggtgacaagaccagagagatg

SEQ ID NO: 8856 - DNA, 3000 bp, Unknown
  misc_feature (1)..( 3000): cDNA_ID_3043737_gDNA_ID_1971906_Annot_ID_176995 3000 nt of promoter + ATG
gtgatcacctacaagagacaagactgatgtttgatgatttgcttctttcagtatgcaaatacaccatggagtctgcaacagatacttttgtatgtcaaagaaacttatggaaaccctcctgtctatatcctagagaatggtctctctttatctctctctgcctctctcagactttagtttgcttcttcatgtgtcttaaactctctctctctgtcgggtgattgattcttcatttacaggacaaatgactcctcacagctcatcacttgtggacacaacaagggtgaagtatctgagctcgtacattaaagcagtgcttcattcactcaggtaacagtaaaagttgttcaagttatcattcaatggatgtgtcagtcagattctaagcataaaatttgacacagcaggaaaggatcggacgtaaaagggtattttcagtggtcgttgatggatgtgtttgagctatttggtgggtacgagaggagctttggattattgtacgtggacttcaaggatccttctcttaagaggagccctaaactctctgctcactggtactcttccttcctcaagggaacactgcaccatccatcatatgcttcgtcttgatcatttgatttcaatggttataatgcttagttgtcggaaatgcaaaccattactatgttttatttttgctaaataaaatcattactatgtttttttctttatcatctttacaataaatcaagatataaacattgtatgttagaaaaagccaaataggtattagtctgttattacaatttctctttgatagataaaggtgattatgtattcttcaaaactatgtttatcttatggattagcataagagctggatatagcgtgtttgacctatatatataatattgcgtataaagcaagacatacgctttcgtataaaaagccgtacttaatacctataattccttgagtgtcttttgcattttagttacgcaagagacgactgatttcttgtcaaatcttaaaggcatcaatttatttacttgtttaatacgttacacatcgtacattgttgtattgttaattagaatgtataagaaaatgattgtatgctaagttagtaaccgtgtaattcgaaaatatttgactaatgcgtattttctgttttccttttgaaaacatcaaatcccactggccactaggccttaaaatgatcataaccagtcgaattgtataaaacaaatgaccacttgagcagacaaatgaatggtgtgccactttatttttggaacttttgtcgattcatttggaactttaaattgatattttggagcttttcaaaaagtaaatagtgaattgaaacgttcaaacctagaacactagcaagatgaaacattatatgttatcacattacctcattatgtagtaagaaatagtacaattcatatagctttctattaaacatttaaaatgcaagggtttaatgcatcactattacaccattcaaataaagctaaaagaaattaaagtttcaaagttaaattttctttgccactagagcatatacctctaatttgttttgttttttttgtaagatgaaaaaaaaatgtaagcaaagaaaaaaggacagtggtgggtgactctggatgaaaaatgttagtgcaaaatcatgatacacatagtaataattaagggggtcgtaaagttaaaataaacaaaatgcgcggcttgaaaataatataaagcagagttttagtggcgaaatccaatccaagtcaattataagagcatctccatgagtagtctctcacatagtttttcattaactaaaaaatataaaataataataaagtaggagagagatatgagagagattgagaatagtttctctgcagagaaactttagaataatgattgagagactatgtgtatatatgtgtgtttattattggacataaactaaatcatagtaaaatattattatattttttttttgagagactatgtgtatatatgtgtgtttattattggacataaactaaatcatagtaaaatattttttttttttttttgagaaacttttaaagtatcttaccaatggaaatggcctaaacttcctaaaaaaatatattatattcttaaaactatttccaagtttctaatttgaccccacaaaggagaaaaaccaacaaaagggccctttctggtggcatctttatcccaaattacacagtggttttcatattttatatattatctttacatcagagttttttttttcccatcaacatgtatacgtaaaagaaaacaacaaaaattatagcaaaataacccttcttgaatggtaaaatatctcgcagattttatatcataattttatatagtttacgataataaagaaatgtgagactaaataaattcaacgaataggatatacacagaatccagactttggcatccacgcggcataaagaaatagatcgagtgtgatatacaacaaatcacaaatgtgctctcattaattttaaaaaacccaaatctttaatgtattcgtaacgagtctgtcactacattaataataagtcattgaaattgaaatccaccaatagttgcacagaagaattaatatatatttccataactctcataacacaaacttcaccttttaacgaagaagaagatatgttcccaaaacaaacgttttgactttttttttgttttctcatattcttttatttcacaacttgttatttccgccgacttcaccagtcaccaccaccttcatttattcataaatacgtctctgttctgtttttgtttctgtttcattttcatacataattaagccaacacgagacgcaagagagagatagggaaagagataagagcgactctgttttgttgatcaaaatcctttttttttgtttgagggctgaatttgtttgttgatggtcatctaaatttgtaacctttatctgttttattgagttgtgaaattcagagaaaaaataaatg

SEQ ID NO: 8857 - DNA, 3000 bp, Unknown
  misc_feature (1)..( 3000): cDNA_ID_1010567_gDNA_ID_1971906_Annot_ID_176994 3000 nt of promoter + ATG
gaagatcggaaaaaattctgagagtttcgtctaagggtttcgaatggacttttcgagcggaagatcagaaaaaattctgacgagagaagacaactacaagagaacggtggacccacattaggctttcgaatggactttgctttttgggccctttttgcttcccaagcccaacaaggtattttactttcctcctttcttatttttgtttttctcccttttttattttcttactaaaactataagtttttcttttataagtgttaaattttaaaattttgtgtaaactaattgttaaatttttataagtgttaaaatttttgtgtaaatttttataaatgttaaaattttaaatttttgtgtaaatttttataagtgttaaatttttaaattttataagtttttcttttataagtgttaacgtccatacccctaagaggcgtcatcggttcaatatgatttacacttaatttaattttttaacatttatttttattttattcaaaaatatttttaaaactatattttatattactactagtaaaactataaggtttttaaactataaagttttttcttatatgtgttaaacttttaaattttgtgtaaactaattggacacaatgtccaaacccctaagcggcgtcatcggttcaatatggtttacatttaatttaacttttaacacttatttttattttattcaaaaatgtttttaaaactatattttgtattactactattaaaactatattttgtattattactattaaaactataaggtttttaaactataaatttttttcttatatgtgtaaattttttaaattttgtgtaaactaattggacacaacgtccaaacccctaagcggcgtcatcgttttaatatagtttacacttaatttaactttttaacacttatttttattttattcaaaaatgtttttaaaactatattttgtattactactattaaaactataaggttttttcttatgtgttaaacttttaaattttgtgtaaactaattggacacaacgtccaaatccctaagcggcgtcatcggtttaatatggtttacacttaatttaactttttaacacttatttttattttattcaaaaatgtttttaaacctatattttgtattactactattcaaactataaggtttttaaactataaagtttttcttatatgtgttaaatttttaaattttgtgtaaactaattggacacaacgtccaaacccctaagcggcgtcatcggttcaatatggtttacactaaatttaactttttaacacttatttttattttattcaaaaatgtttttaaaactatattttatattactactattaaaactttataaagttttttattatatgtgttaaaattttaaattttgtgtaaactaattggacacaacgtccaaacccctaagacgcgtcatcggttcaatatatagtttacaattaatttaactttttaacacttatttttatttcattcaaaaatgtttttaaaactatattttgtattactactattaaaactttataaagttttttattatatgtgttaaaattttaaattttgtgtaaactaattggacacaacgtccaaacccctaagacgcgtcatcggttcaatatatagtttacaattaatttaactttttaacacttatttttatttcattcaaaaatgtttttaaaactatattttgtattactactagtctactattaaaactataaggtttttaaactataaataatttcttatatgtgttaaatttttaaattttatgtaaactaattggacacaacgtccaaacccctaagaggcgtcatcggttcaatatggtttatacttaatttaactttttaacacttatttttattttatttaaaaatgtttttaaaactatattttatattactactattaaaactataaggtttttaaactatcaagttttttcttataagtgttaaatttttaaattttgtgttatctaattggacacaacatccaaactcctaagaagtgtcattggttcatacctaatttaaatttttaacacttatttttatttatttaaaaatgtttttaaaactatatttttatattattactattaaaactataaagtttttaaactataaggttttttcttataagtgttaaatttttaaattttgtataaactggatacaacatccatatttaaaaatgattttaacactatatttttatattaataaaacttcttataaatgttaaattattaaattttgtgtaaactaattggatataacatcaaaacctcgaaggaggtgttttaagttcaatatagtttacatctaattttaatttttaatttttaatacttatctttattttattttaaaaaaattttataatatttattgtatttttgtgtaatttacacaaaattttgaatccttaggattgttgagttcacatttggtttttgtataacactcacatcgattgtagacttgtagtgagtttgtgagatgctctatgttctccctaacttttttttctgtctctaggcacgatttcacgaaaccggaatctgtggaccaaaagttacctagagagtgattatttttgagaaaatagtcttcttacgagtatgttaaatctaaaattataaatgaatgtgatttttatccacacataaccttgagtactaaatacgaattttgtaaaaatgaatcttttctttggaataagtttacttcaaaatttacagtgaaaaaattataaaagatccactgaaccaatcaaatattgtatctattaccgtatatcatcgaccggtttaaaataatttgtaataggtaaataacagaacgacgtcgttttagagaaccgtgtaaaccctttgtagttaaaccctttccgccgcgaacttcatctctctgctttttcttctccatcgcgaaaataaaaaatcagtgagagag

SEQ ID NO: 8858 - DNA, 3000 bp, Unknown
  misc_feature (1)..( 3000): cDNA_ID_2178924_gDNA_ID_1971906_Annot_ID_176982 3000 nt of promoter + ATG
aattagcaaattccttaatttcacatttttgtacaaatactgctcttcaataatataaggagagttatttcataattttttgattttttgaccaataaaaagaaaacttgttaaattaatcacaataaacactaattctaaatcgtaatttggaaatacattaaaaacattatatatttcttaaaaggttaaagatataaatacatacacattgattttttaggactcggaatccaaggaaccaatgaagtattattcatttgagtcacgggcttgttcatatgtctttagcatactttttgaatcaatcaatctatgatagtcaggtgataatgtgaatagttggctggttgagtctccagtcgggtgcactacgaccactttaaatccattctctatgagatctaaaatcacatccgcaaaccctccatcacccgtcatcatcgctataacactttttccgattttctcttcatatcatatcctctttatgttagaatatataaaaaaacaagtataaggttcgctgtccgaataattttgagtctcaagaaggttgacaataagaataacttgtttatcaatatttcttttagtttaattttttttaacttttaaaaccaataaaagaattaaaaaattataaatactttaatttaattttctaaaattgatgtatctatccataataacaagtaaaaatttgtattatgtataaaatgattaaaattatactataaaacagaaaataatttaactttaaataaatattaaaattttaattttaattttagtattatttattaaattacatgacacgccttccagaagatccactgcacctctactttatctgtaacaaaatattactatcctttcatctaacggttaaataggaaatccaccgtagtcattgatacagctgattattcccaagctcgaaacgagaaaagactagagcgcgcaaattttgaatatatttatttattgtctttactttccatcaaattttgaagaacgaaagaacactgttggctaagaggaaaaccctaggaaccatcaaccgagaagaacgaagaagattcgaaagatggaagggacattggagcgacactattctgcttcaattcggtcaattttcgaagctttcttttgagaatcgtccatcgtcgaatgttgcttcatcggagtttcagggtcttctcgattcggactcgtcggagctccggaatcagttgggctccgctgattcaggtgccaattgcggagataaggactttattcttagccaagacttcttctggtaaatcttcggcatttcctgtaacacaattctggtaaatcttcggcatcaaatcagtacttgtaagtatctgtaacacaattctggtttagttattctgatatcttccgtagctaaaaaggaaatttctctcatcaccatttgattccaatattcctcagaacaagaagctgcgcaaaagaatttgaaaacgaaaacgactcacagttgcttccaccgttacatcaccgggatccctagcataatttagcgcaccacaacctgaaaacaacacataagctccttatgaaaacactttccttaatcagttaatctatgaactgcaagaaggtacgggaaacctgactgaagttaagatagtcatagaaaaggcttgatcgcaaaatatatacctatgagtttttcgagctttgtttgaagtattaatcctccctacaatattcaagccaactatggtcaaaccacaatcaaattcaccctatagctcctcaaaactagtcaagccaacaacaatcaggaattgggcaaaatcaaaagttcccatgttctttctcaaagacaaattctcaggagttcccagagagctttatgcaagctcaagttgagattaaacattacctcttcttcctttgcattctcgcttggccacatatcattttctcccaaactaacattgatgatctcttcctcctcctctaaaagaccaaacaacagcttgcgaatcacttgttagacaatgagcgacctaaacactaagatctaaaatcgaaatttcagatgataaaagcaatcatcagttctcaccagagatgctctgatcggaatctggattcccctgaaaatccaacaagaacaaaagcaaaactcaaaatcaaattaatccaacaataaaagaaatcgcaaaagcaaacaattctcagagatgtagaacagtcaccggaaggtttcttcgccgtcacattcgccgtcaccgttcaaatcgatctcgccggcgtgcacctttataccgtccttgccgttagtatgcttggatatgggcccttctctgagtttactttcttttagtattagtaattgggctttaataggcccaattcccatgttttatatcccacattttagaattaatcaaacattaatctggcaattccttaatttcacattctagtacaaattactggtctttagttataaggattaaggagagttaattcatgtttggaaaaaaaaaaatgagaaactttttagttgtttgaccaataaaaatacaaattgttaaattaattaacaaaaaatactaattcaaaattttaattagtgaatcgtaacaaaaaatattatatttcttaagaaagttgaatatttaaattagtgaatcgtaacaaaaaaaatgctagtgctattatagaaaaaaatattatttattaaagacccatcaaagcgtacatgatacgctctacagaagatccgctgcacctttactttatctgtagcaaaatatttcaatcctgaagattgaacggtccagaattgattatataggaagtgcaccgtagtcagtcatgcagatgactattcccaaattttagctcgaaactctaaaagacgagagcgcgcaaattttgaatttattaatttatttcaattatttttccttagttgaatcaccacccaaagtaataatattcatcgtcatg

SEQ ID NO: 8859 - DNA, 3000 bp, Unknown
  misc_feature (1)..( 3000): cDNA_ID_3043752_gDNA_ID_1971906_Annot_ID_176985 3000 nt of promoter + ATG
ctcctgagaagttgtctttgagaaagaacttggcaacttctgatttgccgaattgattgttgttggcttgagtagttttttttgaggagctatagggaatttgattgtggtttgaccatagttggcttcaatattgtagagaggattactacttcaaacaaagctcgaaaaactcataggtacatataatatatccattttgcggtcaagccttttctacgactatttaacttcagtcaagtttcacaaagagcttctgtgttgtttccaggttgtggtgagctaaattatgctagggaaaccggtgatgtaactctggaagcaactgtgagtctttttcgttgcaaattcttttgtgcagcttcttttttggaggaatattggaatcaaatggtgatgagagaaatttcctttttagctacggaagatatcatcctctcttgaagatgtggtcgaagttcctgactcccccgaggagagttatatttcttcttccagaagaactggattagcatgcatatctgctcaggaaaatgggtcagatgatgaggttaccttctaatcttggagtccatttcactcatgcatcttgataagttcttcaaattggtgacagtatcctctacttatgttttgaatggtgattgttgttgccttcagattacacatgatgaacaagtggcaacttggtctgctataagtaaagaaaccaagtcactaatccatttgaatggtgttgcttcagtcgcatcatcccatctatctggcttcagagccaagaaaagtagtaatggtactgttttatccaaaactcttcttggtatttttttaccgtacaagttaaagaacgttgcaccacgtatgaaaactcaaagaaacagatcatgtatgcacgattttctgaaatctctgagttgggtttctaatgtatatgcaggtctcaaagatcatgggaggccaaaattttcatttaactcacatactcatggagaaacgtcatccaagataagtgacatggctgaaatctttgagcctgatgtggaggatcaggctatagaagaggatccaattattgaatgccccaacagttttgatgaaagatcagaaaacaggcagggtgtttctgttgctgagtcgagagaagttttgcacgagtgcactaaagatgcggtacccaagcttcaagaaattcctctagataaaattagactgataaaaagaagctctgaactggtattattgattatacagtggattagcatttgatttgctgctttgctctcagacatctgtttcattcgtttggcctcctttctgctccaggacagcagacatgaagcaaaaagtcggaaatttactcataagggaaattcatctaacttccaagatagtgatactgatgatgaacttcctggacctatggatagtggatcatcaagcgatgatgaggttttattcttttcctttcttgtgatttgggtaatctccttctcctcagtttacagtcaaattcaaattatattgttctgtgacatagcctagttatcaaagctcagtgccaaacatttccaaccagaagaaacaatttgttggggaccggtttgatgaagcaataaaagcttcctctttgagcaaagaaggtctcttgttcggttcacctaaattatctgggtaatcaaactctcaacatcttttatgcaccacactcttaaaatcacacatcagttaacatgaaaacccatttttggttgcatcaatttgcagtggctctagcctgtatggcaagctgcaacagatcatgaaacaagaaaaagagacggaaatggaaatcatgaggaaattgcaaagcggaatcggagaagcaggtaactctttttgtaactcccatataaacaaaatctagttcatacctctgttactcgttccaatttcccaactcagattcatcgggctatgttgatgttaaagtcatgtcaagacacttggagggaaagcttgtcgtctgcaaatgctctgtcattgacctctctggggtttatctctccatctctttgacgcatctgataaacctgctcctttaattagacccttaagcaattgatttagtcacattcgattttgtaggactccctattactcaagaacacacaagctcttgcggcaaaagaaacagaaacaacaattatttttagtccgaaagtttgtgcggatgttgatatcgaaatagggaactttatccgagtatatgcgccatggtcagttttgattccactctttagactcttatcccatgtcactaaactcttttgtgatatttagcttttcaattttcaacaggaaggagttggaagtgcagaaaaccaatgatgtgattattttgtcttcatatttctcaagtttgtaatataactcacacaaatgtcaagatgtggaaaaaacttgcaaatgattttatcagtgtgtataaaaacgataattaaagctctctgattgataacaatcatactgatcagagcttaaagtgttttttgatttatcgtgttttcttctttgggtttactactgattaaaggcgttaatcagttctcacaaatgattcaactcgttttagttatttatacatgaactgtttgttggtttgattcctgtcgtgtgctttggtaaacctcaaagtaaagcataatcatagtattcgtcttgtttattaattagcacttaaaataatggaacaaaaaggataataaaagaaccagaaaggataaataatgaaataaaacggtagatccctagtttacattgtatcattggaacaattcatctctcaatacacaagaaaggtggactctttacgtggatgtcaaggaaaaacaaaatgttcctcagcttttgtattgcaaagaaaaagcatataactaagttggtatatataatagggtttatggaggatacatgcagaaattaaacaagtgtatctatatcgtatatatggactgcttacag

SEQ ID NO: 8860 - DNA, 3000 bp, Unknown
  misc_feature (1)..( 3000): cDNA_ID_2109499_gDNA_ID_1971906_Annot_ID_176987 3000 nt of promoter + ATG
tggttaatatatgtttcatgtaaataaataaagaacaaaaaaagcattatttaaactaattagataaattcagataagattctacgattatgaaaatgcgaaaagcagatataaataattcgatgccaattttgaatttatagatcactacactcatgcattcttgttatgttaagttgcattactccaaaactaccaatatcttctggagtaaccaaatagaaggagggaattttaaaacaagctatattcacacagcctcggatgtggtgcctgaacatattggattggttttgataatatttcaattattttcaattcaaataataataataaaactgaaaataataaaatccagtttcattgaatatttgggtattcctagtactaaattagttaaatcaataaaaatatatttgaaaattttaaatccgaaaatttaaaaggtaaaaaaattattttatttacttaaaaaccttgcaaacgaaaatattttgtatataaaaaaaatagtttacataataaaaatatttgcaaaaaacaatataatttagtcttagtgttaaatttacttgagtgaaaaacagttaaactttatatacctcaattagataagctattaaatctatacctcaatttttttattttattttttggttcaacgctatatcctacctaattagattggctaaattgtataagctagtgcaaaaagttcatataagaacaaaaaactgtaaaaggaaagaaatctacaatttcatgtaaaaaatccaacttattaattaacaaattttgaaaaggaaataaagtaaataataatggttatggattcaccttatctaattataaatacatctttatatgctctatcctctatgagtgtactatagagagtagagagagtagaaaaaatgggttcctccatattattggttttgtttactctcatggttatgctgtccatttcttatgaaccactcaaatgtaattatcttgaattttttttgtttgcttttcttcttgtgctatggttttgaatattcataattgcgttgtagggatgggcataaacgcgagccatgtaccggaaacttgctaccatcattgtaaccagacgttcgagagtagtcgccaatgctttaaatggtgtcaagaattagctcgtaaagatggtaatcatactcatttatatactaattaatgggatggaataaagaagttttgatgggtttcttaattctcctccttcttcatcgtattacatgatgaaatatgtaaaattgcagagtacaagatttatgggtacccttactcaaccaacacaaggcgtgtcctcgccgttcttcatgagaaaggtctctcttacgatcccatcaccgtcaacttgatagccggtgaccagaagaagccgagttttctcgctatcaatgtacttttcacatctaaatatctaactctgcttcatgattaatggttaggtcttaactagggtttccattttattggtctcttcttattgatgcagccatttggtcaagtcccagttttcctagacgggggtcttaagttgactggtgagtttaaaactacattttcaactaattaatgatctaatgaattttgatataatttgttttcgtcagaatctcgagctatatctgaatacatagcgactgtccataaatcaagaggcacacaacttctgaattacaaaagctacaaaacaatgggaacacaaagaatgtggatggctatcgaatcttttgagtttgatccactcacatcaacactgacctgggaacaatccatcaagcctatgtacggtctaaagacggactataaggttgtgaatgaaaccgaggcgaagctagagaaggttctagatatatacgaagaacgactcaaaaattctagcttcttggctagtaacagcttcacaatggctgatctttatcaccttcctaatatacaataccttatggacacacatacaaagagaatgtttgtaaaccggccaagcgtgcgccggtgggtggctgagatcacagctagaccggcttggaagagggcatgtgatgtgaaggcttggtaccataagaagaagaattaatcttataatcttgtgatgtactttcggtgatttctttaagtttgatgttatgaataaaaggcaaagcttttgcaaaaatcactcttttttttgccataatgatttcaaaattccaaagaataatatatacttcaatatacatgtcacaagattaaatgtcaaagttgtttataatgagcatttttgtggatgtggaaaatgtgaaaattactctgttcctttgaatgtttctatacgaaattatagttaggatttagtaatgtatttctccataattatgctaaatttagttagttacttcaatatgattaaatactttattgaccccaaatttgtaattgtaccagattgtcaaaagtgtgaaaccaaattttcttttcttttgatattgttttgtttcttattatctctcgttctatcgaatgatctaactcgagcatccaacgatctaactcgagcatctaacgatccacgtggacccaacaacgtcggtcagagtttgactagtagatgaaggactattcttgtggtcgttgtcacgcggtggctgatattttctcttatttttattttattttaactattttttacgttatatttaagtcttgaaccaatagaaacgacgaatcatacattactcagcttgactttgaaataatcctataacaaaagagcattccaagaattttatccaaaaaacaaaataaaaaagagtattcaagcttggtggcgccgtttgtttttggtttattcactaaagttactctgttttagttgtataaatacacactcccatttgtgtatttcttttcatcaatcacaaagatctctctacttcaataaatctccaccttactttaagaacaagaaaaacacagtattaacaa

SEQ ID NO: 8861 - DNA, 3000 bp, Unknown
  misc_feature (1)..( 3000): cDNA_ID_3043748_gDNA_ID_1971906_Annot_ID_176991 3000 nt of promoter + ATG
cactcccaacaattctccaattaataataattaactaatttgcataatcattttttttcatttcactgtcaagtggcatttctgttaataccgaaataacacaagtaaaatttcgaaactataatgtaagttcaaaaaattctattgtaactacagaaatcaaaaattctaaacagaagctcgttaaattttcaaaattttaatataacaaagagaaaatgttactagtattcgaatcaacaagttattgtcatgctatgtctcatattcttctaaataaatactgaaacttttaataaaaacacaaaatagaatttgaaaaacaaaacaaaaaaagagaaaaaaaaatcttcaacaactacaaaattaaaaaatcgagtccacgcactcaccatgtatatataaacattaacttaagcaataataaccaaacaaaagaacccaaagaaaggcaagaaaatggacaagtcctttactctgttcttaactcttacgattctcgtcgtcttcatcatctcttcacctccggtccaagccggcttcgccaacgacctcggtggtgtagcatgggctacgactggagacaatggttcaggctgccacggttcaatagcagagtgtatcggggcggaggaagaagaaatggactcagagatcaatagaagaatattggcgaccacaaaatacataagctatcagtctttgaaacggaacagtgtgccttgttcaagaagaggtgcgtcttattacaattgtcagaacggagctcaggctaatccttatagtcgtggttgcagcaaaattgctcgttgcaggagttagacctacaaacaagaaagctatcttcttgatcttgacttatgttttctttgatccatcaagcgttttcattttaattaaatctttaaatattcatcatgtctctgcacaatagtaaagacctatgttttgatcaaattgggttgatttgtaatattttatgtgaataatcatggtcttaatgatccatgaagttgtttggtttttaattattacaaagagacgagtattcaaagagttattacctacgtttgatcaaaccgggtttggtttgtacctcagccgctttcacagtcggattgaataaccggtctcaagttgcaacacacaagtgaccaactctcaacctaacccttaccaactctcggcgcgtttacgggaattagtttgttttgaaaattaatattttatatatattggtcgatttgaaccaaaccggatcgtaagaaattggttttatccatgataccactttttctcttcgaagggtttgagaaactgaaacatgggcttggaaacatagaaggaaattcactacaaaacaaaacatacttgaattagtaacaaaaagcgtgaaacatgcagacattattataacaaactaacatttttggttcttgtctaatcaattaggggttgtctcaataaaacatgtcgcccatcagcttgacaacatggttctaacacggtttcttttaggttaaattggccaagttgctaatcaggagaacactatcttaataattaaatcaagtagttgaaccatccgtaacaacatcaattttataaatcattttcatgtaatttgcaaaattttatagttaaaacttaaaaacgttccatcgttgaaagaaaatagaggtactacaaataacaataatataggtagaagatccatgataatggatttttgattttttttggtttgttaaaaggtattcattaatcatggcaaaaattcgcaacatgtttgcttgcatacgctagaaaagaaagaacatgatgagttacaattttttttaatcttctccctagctatcccaaatatccgaaaataaagaagaagataatattcaggattgagtttctctttttataaacaatagaaaacatcttcttctttggttgatccttatcccaaaaaatgattggccacaaaattttgaaatattttcttatacattttccattccaccattaaatgtctcgtctttctctttttccctctttcaataagtgatggatttgaaccaaccgacttaaaatgggccggtcttaaagccgcaccacactaatgggcctttacctatttacaatttttctgtctattgaacagtagacttactgctcatataattggcgggatcaatacacgtgcttaatactagaacattcggttcgttcctaactgcaaacgagtttggtaatttagttaccccataattatcaccacagttgaccttagttttaagtttgaaattcatctaaaacaccatatatttgaatacattacaaatacaatgaaacatatgacacacttgtgtgatggtttagataaaatacgtattgaaatagctgtaagaatgttacttgaaatgcaataaaacgcatgtcaagttgtcaacatgtaaacccaacaaattaaacgattaaaaaaatcagccacaaaaacaggtagagcatgcagcaaaatattccaatgcttgggtctctatgttaagttctgtaattcgtctttattatatatatatttggcaaaatttaaatattgaccgttggatgtttttggttttaaatctgtaccaataagcgaatgagagaatctacttcttcaatataattccctcaaaatctacttgtgatcattttataatgctttggtcaaaagtgctgattttgtaattaattaatttttgtcgtttctaatacgagggtgaaatttgtttcttaaagtaaaaaaatggaaacttgttaaatgttttagaaatatgacaaagaaaaaggaaaaaaaaaaaaaaaaaagagtggagatacgaacttttatataagaagaagagaaagttgcagcacttgtctgaatattattatttaagataaaaccgacttttgcagtgaaaatctcttctttgaatcaagcggcggagacggcggcggtgaagaagaagaattagagagagagat

SEQ ID NO: 8862 - DNA, 3000 bp, Unknown
  misc_feature (1)..( 3000): cDNA_ID_2178947_gDNA_ID_1971906_Annot_ID_176989 3000 nt of promoter + ATG
aagtcttgaacgttgacttccaaattaggtcgctctgctactcatcaatcactaatcttcttcctttccctaatcgattccaaaccttctgtggtgatggcaagcttcaaagtcaacaatgttattcatatttgtttgagcgtaactgtcaccaaaaaaggttcctagatcaaaaaagttgaaagttaattagtttccgaaataaaacagaggaacaaaaggaagcgtgtttaagataaaattagggttttcttaggaaagcatataaataaattgcatagctgtcgcaaaacctctgtttactcgagtgcgaagaaacgacggaaatggttattaccaggagacggagacccttttcaattctcgccggaattaggattctcatttcctaggtagattacttgtattcacggaatgtaagtcttaactagggtttccatttaactggtcttttctgctcgaacgatcgtcttttaatctctaaactctttactgaagtagacctattttgaactatttttgtttactaatttagcgattagtcatcgacgacctagtaaacttgttataacgagggtatattattacgtaacgatcagttgcttatatttgttatatcttattagggtttttagcctcttgaccttactcatgcaactattgatctgataaacatttttgagtttgatttcgggaaaattttgatatgtctagtcttgctcagagtctcgagctatatctgaatacatctcgtctgtccatagatcaaaaggctcataacttgtgaattacgaaagctacaaaacaatgggaacacaaacattgtgaatggatattgaaacttatgagttcgatccactcgcatcaatacttacatgggtataatccattaaatctaaagacggactataaggttgtgaatgcaagcaaggcgaagctagagaaggttctagatagatttattacgaagaacgattcaaaaagaatagcttcttgactaataataacttcacattgcctcatctccttgattcaatgatccaatttgaacatccaacgatccatatgttttcaacaacgtcggtcaactttgactagtatacattaaaagactattcttgttgtcttatccagccatggttgatattttctccgattatattgttttataagttatatgaacagtatatgaaaatcttgaaccaatagaaacgacgaatcatacgttactcagcttgactatgaaataacaaagagtattcaagcttggtggcgccgtttgttttttgtttattcactaagttactctaatttagttgtataaatacactctcccatttgtgtatttcttttcatcaaccacaaagatctctctacttcaataaatctccaccttgctttaagaacaaagtcttaacaaatggcaggaatcaaagttttcggtcacccagcttccacagccactagaagagttctcatcgctcttcacgagaagaatctcgactttgaattcgttcatatcgagctcaaagatggtgaacacaagaaagagcctttcatcttccgcaacgtgagtaatatttgtcaaaacaaaatattgtttcatttagatactgaacctttagtctgaaaaatcttgaatgttgttttgcagccttttggtaaagttccagcctttgaagatggagacttcaagcttttcggtaagcagcaaaacacttaaatttagacctaatctcaaattctgtttttgacaattgcaattaaagaaagcagaaacactcaacttttttaatgttttgttggcagaatcaagagcaatcactcaatacatagctcatttttactcagacaaaggaaaccaacttgtctcccttggctccaaggacattgcgggcatagccatgggcattgaaattgaatcgcatgagtttgacccagttggttcaaagcttgtttgggagcaagtcttaaagcctttgtatggtatgaccacagacaaaaccgttgttgaagaagaagaggctaagctagccaaggtcctcgatgtttacgaacacaggcttggtgagtccaagtatttggcttctgataaattcactttggtcgatcttcacactatccctgtgattcagtacttgcttggtacaccaactaagaaactctttgacgagcgtccacatgtcagtgcttgggttgctgacatcacttctaggccttctgctaagaaggttctttaagtgactcacaaactgttaatcagaagattgaataaagtggcgatgacctcattgccctaattctcataaacaataaaagtggcgatgacctaattgccaaattctcatacactctgtgatttttttgtgtgtgtctcctctgttttttttttttggtttgaatgtaatcttcaataataatgagtcttgatatataataaaaatatatttggtagcctaaagtttagctactaataagtagtgttgatctcttatgaccaaaaaaaagaaaagaaaattagtgttgatctcattcttgaaagttgacttaattattctaatttttgaaagctgacttgagacttcatttttgccattgtaaggaagaaattgactgttgacttttaatgctttgcaatttaattagaatattaaacttcatagttagacagaatcacattcagttattaaaatatcacaacactaactccaagttaggtctgctactcatcaatcactaatcttaacaccaactccagcttagttatgctactcatcaaatcactaatcttcttcgttttcctaatcgattccaaaccttgtgtcattgtgtgacaaagtcaacaatgtttttttctttgggtctaattcgtaccaaatataagtttctagataatattcaaagaagttggaagttaaatattatttccgaaataaaacagaggaaataaaaagcggataaaagttttgttttttttccgtaagcgtagaagaaaattga

SEQ ID NO: 8863 - DNA, 3000 bp, Unknown
  misc_feature (1)..( 3000): cDNA_ID_4362174_gDNA_ID_1971909_Annot_ID_177025 3000 nt of promoter + ATG
acgaagatttgaagacggatattcaacgtatatccaacggtgatcgttctccgatcttgtcttctcatcccatcaccgagtttctcacaaggtatgttacttaagtcaaccaactatatcaatgattaatatcgtttcttttgtttttacaactttatcaaggagtaccaatccccttgtactaggtcaccatccttttagtaatgactaaaacgttgttataaaaaaattcaatgacgggattttgatcaccataatacaaattgttaaaaaatattttatagaatactatacagtttttttaccgtaattaatttgtaatgttttgtgtgtattgcagctctggaacatctgctggcgagaggaaattaatgccgacaattgaagaagacataaaccgacgtcagcttttaggcaatcttctcatgcctgtgatgaatctgttagtatattacttttaacattattaaacaaaattgtaacgatttataaaattaaccaaaaatgtttaacaactacagctacgtgccgggattagacaaaggcaaaggtttatacttcttatttgtgaagtcggagtctacgacatcaggtgggttaccggctcgtccagctctcactagttactacaaaagcgactacttcaggacgtcggattcagacagcgtctacactagtcctaaggaagccatcctctgctgtgactcgtctcaaagcatgtatacgcaaatgctatgtggtctcttaatgcgccatgaagttaaccgactcggtgcggtgtttccttctggtctcctccgtgccataagcttcctccagaacaattggaaggaactttctcaggatatctcaaccgggaccctaagttctaaaatctttgatcatgcgattaaaactcgaatgtcgaatattttgaacaaacctgatcaagaactggctgagtttttgataggggtttgttcgcaagagaattgggaaggaataatcacaaagatatggcctaacacaaagtaccttgatgtgattgttactggtgcaatggctgagtatatcccaatgttggagtactatagcggtgggttaccaatggcaagcatgatttatgcttcatccgaaagttacttcgggattaacctaaatccgatgtgtaaaccctcggaggtttcttacacaatcttccccaacatggcctacttcgaattcctcccacataatcacgatggagatggaggagtagaagcaacctcacttgtggagctagctgatgttgaggttggaaaggagtatgaacttgtgatcacgacctacgcggggctctaccgttacagagttggcgacattcttcgtgtcacggggtttcataattccgctccacagttcaaattcatacggagagagaatgttttgctaagcattgaatctgataaaacagacgaggctgatttacaaaaggcagtggagaatgcgtcgaggttgcttgcagagcaaggaacacgtgtgatcgagtatacgagctacgcagatacgaagactatacctggtcattacgtaatctactgggagctacttagtagagaccaaagcaatgctcttcctagtgacgaagtcatggctaagtgctgtttggagatggaggaatcgctgaacgcggtttatagacaaagtcgggtttcagataaatctatcggtccgttggagatacgtgtggtgcagaacggcacgtttgaggagctcatggacttttccatctcgagaggttcatcgattaatcagtataaggtcccgaggtgcgtaagcctcacaccgatcatgaaactgcttgactctagagttgtgtctgctcatttcagcccttcgttgccgcattggtcgccagaacgacgtcattaggtaaaactttatgatagatatcaaaccgatgctagctgtgcggttttagaatatgaagctctgtttctgattctaagtctccctattagatttcttattatgatgttgtgtacttgtgtttagggttttgctagcattgcctgctcagtcttctatatactatggatcttcttgtttttatattttgcttgttacacaatctctgcttatattatgtagatggtcttgtttaaaaaactagtttaataattcataatataatttagttgtgtggtttaaaaatggatctgccaatacttgatgccttgatggatttgtgttttccatcaaaatcccatatccaaacaataaagtttagaatttgaatagtttggatatgtagaaaataagaaatcatgactaatgatactttttttttttttttttgatattcaaaaggttgatgacaaactccaaaaagtaaaaagtaataatgtcattgttaatattttgaaaagaaaaggggtacatcatatttgaggataaatacaatttaatgaataaaggaaataactatttttttcattaatattaaaagttaaaaccaataaacatatttcaaataaaattatacaaaacttttttttttttttttttttgccgtctaaatttattatttattacaaattatgagaactgttacatagacgacggacaattcctttcgatccttattagatccacgacagacgatacctcttctcattttctatgctcttgatggacatcttcaatatcttctcttgcatagaatcctgacgaacagctataattgtacaaaaaatttaaagaaatttaatttagtaatcatgttaattatataataaaatctcctcattaatatattcttcacagttgtttcagatcgaacccgtcaccaagaactcagaatctctttctctcacaaccgtcctctgatcccgccctcatctcccaactcccacttgtataaatccaatttccaaaactcctccgacgagtattttgattttcccagtgacctgagaaatcgactaactaattccctatcggtaaaaaaattcggttgacctaaccctaactagagagatg

SEQ ID NO: 8864 - DNA, 3000 bp, Unknown
  misc_feature (1)..( 3000): cDNA_ID_3043803_gDNA_ID_1971909_Annot_ID_177043 3000 nt of promoter + ATG
agcttcctgttgttactaccaccccgactaagctcccatcaatccttgttgtaaatgttcaggtatattgtctagttccatggttaaactgttcctcttttgcatcgtctttggtgtttcggtttaatgatgatgttgctatcggaatcatagattccattgtatccagctgcaatttttcatggtgaaactgatggagaaggaatgaatttcgttttatactttaaactttcggataactatttaaaggagcttccaccacattttcaagaaagcattcaggtagtttaatcttccacgtcgtgattctgtttttttgtgctgtactcttgtgttgaaaacgcatttttgaatcgctttgtctttggatatatgcagagattactagatgatgaggttgagaaagttagaggctacactactgacacgaatgtaccctttagagaacggttaaagatattgggtcgtgttgcgaatgtagacgatcttcagttgaatggtgcagagaaaaaactcatgaatgcttataacgaaaaacctgtgctttcacgtccacagcacgagttctactcggtatgtcacaattatcataacaaatgcaaatcctattgaaacttgcaatataatgctgaactaacttaactttgaaatttgatcttgtagggtgaaaattactttgagattgatattgatatgcatagattcagttatatatcgcggaaaggatttgaagcatttttagacaggctaaagaactgtgttcttgatgttggactcacaattcaggtaatgtgtttcaatttgttacttctttgatgaatttttgggtctaattgctgtggttatttaactgtataatctcattttcaggggaataaaccggaggagttaccggagcagattttgtgttgcatccggttaaatgggattgattacatgaattatcatcagttagctcttagtcaagaagtcctatgatactaaacaaaagatatgacctttttttttgttgttgttctttatcttcttttcttttgttcctcaagaacacaaaatctaagagatacatcgttttgaagaagaagtcaataatggaagcatgagtatatacatgatacatcattccgaaacctgatcatttctcggagattgcctacgactctgtacagtggccaatattgctcatcataaatatcataattcaatgagaaatcaccaacaacagtaggatttaatgatgtcttcggaaaaccgttttctgatattataatgatgtatccgtaagaatatacatattttctctaaccaaatcatatcaaagctggtacgactataagtttcagtttgcttttactggttataaggggatggttttgacttttgagcaatgatcttgacccggggttttgagagaggagcaaggcaaagggctttcatatgtttcctctctagtctctacatgatgaacaaggcatttgggtttagacttcgtttaacctagtgtcgtcactaagtttctgttgtctctttataagttttagcttcttggttttggttttggcttttctatttgtgacttttgtccctctaactagttttggattcggtctctttcttttgggattagttttccaaagattttaccatattccgcatatcttttataattctcgtaacttagaaccaaattcacatcaaaaagaaccaaagattttgtctctctacctagttttggactagtctatattaaccgcgaacggaaatataatgtctaaaccaacctcactaaacccataaagtagcaggttgacaaatgtgcttaaaatttttcttctacaaataattgaaaaattaatcttcaaatattattatactaacaatttttaggtttaaaataactttagtatcactctttttgtaaatattataattcttctacattacattttttttaacacattaaatatccttatcaaatttgtaccttttgttttaacattaaatttttatttactcattttagaaaaagaaaaaaaatgttgtatttaatagaagaggataaaaattggaaaaaaagaagtaaaaaacagtaacaataaagaaacagaacagtgtttaaaaaaaaaaaagaacaaaaacaaattcacgtgggcgaaccgggaggaaatgaaccataattcgagtcggtccaatcaatcccatttcacaaaccgagctttggaaagacgctagattgacttattaaatacaacgcgagtcggtcgaaccgaataatcaatcctggttaacaaaccgagcgtcggagagacgctacactgacttgaatacaacgcagaaactcactgtttatatataaactcagcctcctcctccacttttcattctacgtacaaaaatactcttttaggctttttgattccggcgaggtctctgcttctttctcctccttctccgtcgtctccatatcgtgatacttcaggttacattcctcaaatcctcttttttgattctacgacgaacgacatcgctttccttaacagtttcggcgggtttatcacgcctgaatcctaatttttccaacatctgacgaacgagtacagaaatttctggttatttatcttgtgtgacattcgtgagacgtagtttagtttagttagattgatttccatcggattcatcataggtaatatttgttgaagtttatgtcatcgatttggttttgattttttgtactctgttttctaatttgatgattcctggttatgaaatacacaacttgtgatgttgccttgttcaatgtcgatcctatatacgactaattgtgttgttaattggtgtaaattggttcgttttggggttcttggtgtatatgattcatgatttggaacttgaaaagttccattacagtgtttgctaatgtacatgtttttttgttgttgtaccaggctagaagaaacaattcctttggctgagccgagagacgtgaatatatagacgaag

SEQ ID NO: 8865 - DNA, 3000 bp, Unknown
  misc_feature (1)..( 3000): cDNA_ID_2053753_gDNA_ID_1971909_Annot_ID_177047 3000 nt of promoter + ATG
tatttggggcaaatcagatggattcgagccagaaaacaattcggctaatctaacatgtttagtctgggatacaacaacagtaatcgtaaccacaaaatcatgaagtttcttatgtttatgacaaaacagcatgtccacaatactcagaaatctatgattttaactccagttcatggaggctggttgagatcaatcccgtctggtttttacatagcgaccgcgtgtctttgaagggaaatacttacttttttgctcaagatttactaaaggatgcaaagattgagaattatttactctgttttgattttacagcagaaagatttggaccgcatcttcctctgccggttcactcttatgatgacgtgactctatcttgtgtcagacaagagcagcttgctttgttatatgggaacaacgagacagatgattcattagagatttggattacaaatcagattgatcccaatgcagtgtcgtggagcatatttttgaaagtggatatcaaaccgcttattggttttccaaaagacttcgatcctgggagcttcttcattgacgaagagaagaaagtcgttgtggtttacgatttggacggacatttatatagtaccaagaagaactgtgcctaccaaaggctttacatcattggagaagatggatacttcacatctgtaaaaatcaaatgctctgactcacctgaattctctgcttatgctccaagtttagtgacatacaaaccaaccaactacgcaaaatgaaaagaaaaaggaagaataaaagaagaaagatgcagattacttcttagttccatttgcaatactttttttgttacgtatttttttgcatcgtctcctgttttcattcattgtctttcatttccttttgaacatttattaatttgttttttgctatttatcatctaactaagtatttagatttatcatgatattttaggctttttttcaattgttagtatcaaatttttcaatataaaacaaattatatctaccacaatgcagattcgtcttgatgttctttgtgattgtcttggcattctctatatgtttttgtggaagcatcggagttttagattagatatgattaacgtaggagttcatgtagaagtagagagatgtgttgtaatttataaaagaggcttcatgataagatagcttttgttgtttgtcttcacttccatggttcattgtcttccttttccattgatgtgctggtgaatcacaaagatactcatgcatttttcaatcctaattttggcatatgtaagtttttttcaattttgtttgctttttaatccaggcattggatgaaaacagagagaattcagggctaaagaaagcctttgatttttttttttttgtgtgtgtgtcaaaacagataataaccttttgtttttgggtcgtttaattgctatatgatgcatcaaatcttgtaaacaagagtgattccaagaaggtggaagtatttccgcatgattacggttgttgcttcacaaaataggagacggcttgtttcctctgccgaaccattgacatgtaaaggtaaatgttcatgttttgagtgattgattgattcaagccttaattagcatgtttatattctcttttccatatcatcaactaacattcataccagttgtttctaagagatttagtcgctggcatgaactaatatatatgcaatagtatagaggcacacaaataaaagatttgatcggataaagatcataagaaaaatcagagacataaagaacatgcatcatataaaataaatgtaattgaaagggataacaaagaaaacatttgataagcattgacctatgaaggcgctacttcacaaaaacacgagactcttgatgtgatttgggtaaaccttcatgttgtacatatagtctttaacaaatccatagcggcttctaaattcatcacccacaattccttcaaccgagacttctctaatactgtttctcctcggatcaaaatatagtagataaaacgattcaaacaatatcgatggtgcaaaaacaatctcaccagcatcactaacaccataaaagcttggcttttctttccgtattaggtccatttcagaaagagtcaaaaacgcgattatgcgtccattcgtgtctatctccattcgtcaaaatccatatatcaatagacgggaatttaaaagtcttaactagggctaaccttcccacataaggtaccatataacaacttttcctataataaccctctggaagtttgatctggttgaacttttcagatctaacgtctaagctcattagtttgcgttccacttcaataccatcaccaacataaacagttgctccatagtacatgactccattaattagtatatgcatcccccacaacgtatagtagatcgatgcctagggacaccgttggttattattctccatgatcttagtccttaagctcccagtgtacgaatgcaaatcttcgagtctctctagtaacatgtagtagtacaatgattcaagttttcaatcaatctgatcatatttacgctaccattcttgattagatgcttatcctgctcaaaaatgtattcagatatatattaacaattacttttgaatggtatcaaatatttattaactaattctttttaataatttaatccaattaaattttaactttttaatggattcaaatatatactcattctttatttagtgttaaaaaaaaaaaagtagctcaactggaaatgtatgtaaattatatattaaaagctgacccgggtctagaggatgtatggaaagccaatagcatcgtttcgaacattgcaataatattgtgtggtgacaagcaacacatgatatgtccgtttagaaacagacaaaataagaagaagaagaaagagtcgtggaggattcttcattcttcctcatcctcttcttcaccgattcattagaaaccaaattacaaaaaaaaacgtctatacacaaaaaaacaa

SEQ ID NO: 8866 - DNA, 3000 bp, Unknown
  misc_feature (1)..( 3000): cDNA_ID_3043774_gDNA_ID_1971909_Annot_ID_177044 3000 nt of promoter + ATG
ggacagaataccaatcctgcacttgtacagagcaacactttcagtacaccttccactggctttgggaacacgttttcaagctcttcatccttaactacaagcatctccccctttggtcaaataacggttagtttttctgtaactaatttaaatgccagttcacttcagagttgatgtctctttcacttccgtttgagttatgtagggatttctaatatgagtttatttttgcagcctgctgttacgccctttcaatcagctcagccaactcaaccattaggtgcttttggtttcaacaactttggtcaaacccaaataggtatgtgaatcagtcaaaggcaccctgaatattatcatcttgaatactcgaagccaagtcttgtatgtttatgtttctgaagctaatacaactgacattgcaggtgcaatgggaacttttagccaaggaaactttaagcaacagtatggtctctctgacctcagtgtttccgactcttatttccgactagataccactagtttaattgtactttggaagttgcgtctctggagcttaattcttttctttttgttttgttttgttgacaggcctgcattgggtaactctgctgttatgcaaccaactcctgttacaaacccatttggaacacttcctgctttgcctcagatttcaattgctcaaggtggaaattcaccttcgattcagtatggtatctccagcatgcctgtaagtttttctgcctttttcaacacccacacacaccaccctttttcttcataacttctttccaaatttgaagcaaataaaatatagatattctcaaagatacaatgttacagaaacaaatgactactccatgttattaccctgaatattttcctttcttctcaggtcgttgataagcctgctcctgttagagtatcaccactcctaacttctcgacaccttttacaaaggcgggtcaggctaccaacaagaaagtaccgtcctagtgatgatggtccaaaggtatgtttttctattttctgaattttggctttgtcttgaatatttcagtctttagtgatgtttactgaaggtctttctacctgtttgtttcaccaatgtttgtccaggttccattcttcagcgatgaagaggagaattccagtacaccaaaggctgatgcgtttttcattccaagggagaaccctagagctttatttatacgcccagttgaaagggtaaaatcagaacatccaaaggatagcccgaccccactgcaggagaacggtaagcttcccttttttttttcattcattggcttatttattgcaagatttagagctttgtttcaattgcaaaaagaagcttttcattgtcccaatagctcggaagatgatctgcttgcatattaatatagtggctgaatttgatcatatctgaccccttattacatttgaaattcaggtaagaggtcgaatggggttactaatggagccaaccatgagagtgagtattttaaatatgcatttgtaacaaaattgtgattaaagtttgtgcattggtgaggccattcactgactctactgttaatatgtgcagctaaggataacggtgcaattcgtgaagctcccccggtaaaagtcaatcagaaacagaacgggacacatgaaaatcacggaggcgacaaaaacggttcacacagttcaccaagtggagcagatattgagtcattaatgccgaagttgcatcactctgaatatttcacagagcctcggatccaagaactggctgcaaaagaaagggttgaacagggttattgcaagcgggtaaaggactttgttgttgggagacacggttacgggagcataaagtttctaggagagacggatgtgtgtagactcgacctggaaatggtggttcagttcaaaaaccgggaagtgaatgtgtacatggacgagagcaaaaaaccgccggtgggtcaaggattgaataagcctgcggtggtaactttgctgaacataaaatgtatggacaagaagaccggcacgcaagtgatggaaggcgagagattggacaagtacaaggaaatgctcaagaggaaagctggggaacaaggagctcagtttgtgtcttatgatcctgtgaatggcgagtggactttcaaggtcgaacatttcagttcctacaagcttggagatgaatatgatgtgtagaaaaggaccaaagtcgttgtcatatgtagactagtgtctcgattattttttattttttttaccttgtggggttttgtctattggtcttttgcaatataatgtcaaaatgatacgtcttttacctcattggctcaacctggaaaaattcaatattcattttgttgttttcgccaattaatataataatatctcactaagaagcagaaaaaaaaaatagagtcgtggaggacacaaaactggtctcaccagttgtttcgtggtttcttctaaagatattattagttcctaatttataaaaaattttgatgactttaatcacatcctaaaaagtaaataaaagaaagattataaactatttagagaattttttataattttattgattagcttttataattttgtaaaatttctcaaataatttttctattttaataatatttttcatgactttctatgactttattttgtgaaaaaaatgtagaaagttatgaaccaataacataataattcaaatcattaacaatcagaaattattatattttaattgaataacacaaaacttttactgattttataagagtatgaatctaataactccaaatttatgaagattttagattactttttacaaatcttatttgaataacataaactttaacatatttttaaaaagtcttgattgaatatcaacagattctacataacactttaaatcactaactttttttttgaaatcatatataaaccaataacaccccctaattgtatacctaaactaaaaataatttagacaaaacaaag

SEQ ID NO: 8867 - DNA, 3000 bp, Unknown; identical to SEQ ID NO: 5682
  misc_feature (1)..( 3000): cDNA_ID_2993959_gDNA_ID_1971909_Annot_ID_177048 3000 nt of promoter + ATG

SEQ ID NO: 8868 - DNA, 3000 bp, Unknown
  misc_feature (1)..( 3000): cDNA_ID_2178872_gDNA_ID_1971909_Annot_ID_177037 3000 nt of promoter + ATG
gaaactagttttgcatacaatctagctccgaattcagaagaagcattcaataaaaccatttctgctaatgataaaacctcatatgctatttaagaagcttacgcaacagtgaaaactactaacttaccatctccaaattttctcaaaatatttgtgtaaataaaacctgatagtggtctttgcaacataaagaataccttttccattgagcgaccacaaaaagccttcatggcattcacgaaatcattgtacttctcgaactgaaccacaatcttacaatggagacctgatatgaggtctccactatcctcatctgcgtccttacctagatcatcgtcctcagcaacattaagattcctatagaggattagttaatgcagcggaacatggaatttatgtaaactatcggaattatattaacatcagattcattggtaaacagaataaatgatccgaagaatactgagaacacatggtaagcaagttcaatacaatgattgtaattagtcttcagataagatttccatacaaaatgtcatttcttttgaactacatggacaaatactgtatactatgatcaaatgtagatgcatcaaatctatccaaagcagcacaaaactacttaattttccaataagcaagccatagatcactctcaactcacatagtgtcacattcttgaagcagatttatgaatgttctcttcactccgattgaaaaaaaaacaatcctaatcaagctggacatgaaagatgacaaaatcttacctaattttcccaaagctagagaagattgtatgtgtaaccaacatagaaggcttcgatgaaactcgtggctcagcaaaccatcttgatggcacacctctaagtataatcgtatcagcctctctccttccttcccttgaatgtcctgcaaatcacaatcacatcaattaccacgaaaaaatcgtaaaatcaaaatccaaaattgaagaaccaagattaccaaaagcgtaaaactcctcccaatccttcttcaacttctcgaaatcatctgaaatcggaagtaccacactaagcttatacttaactccttccaaattaagctcaataccattcatcttctccaccaaactcttcctccaatccaaaaacttcttctccaattccttcacatctctctctccatcattctccttcttcttcttcttcccatcgagaaaccctaaatcgcgtataaacaacgatccatgagcaactggctcctcacgcttccgtttcttcaagtccttgtgacgacgaactacgatgtcttcctccggaactgtgacggaggttacgacagagtttttgaggtaatctattaaggatcgcttgagttgccattcgtcgatggatttggatacggatgggactactgggtggattgtgagattgagcttgacgcgtgagacgagagcgagaccgttctcttcgatatctagagtttctatcggagatagctcttctaacgatcgcatttttcgccgtcgatgcaaaattcaaaatcgcgattggctctctctctcagagtgtcgtcggctattgagtacagagaacaggaggatactgaaaacagtggtaaaccagaattccaaatcggttatttccggttctcttggtttccaatattttgggaataaattgcataaacggtccaaaatagagataaattccaatgtaaattttttgaacattgactgaaaccattaataaatgttgaacgtttcatccaatgcctaaatatatatggtaaggattcttatcttagttatgagttttggcatactaggactgaagcattgcatcctactgtgagttttggtggtttgtgctcttctgttgaccttagcaatgcgtccatataaattgagtatggttggattactgttcatacctctagcgaaacattgcaattcgctaggtctctattgtggggttagatggcatgaaccattagttgcacaaatgaactctaatgcatatcatagaggcttgtttttggatatagtttacgaaatattgagatgatatctttcatacaaaaacaaaaaatgcatatgatgatgacactcttacatacacttttggtactatctatccgcgtatgattttaagataatttttttgagcttttactttaattagaatttagtgatatacttgtatgcacaaatttatacaagcaatttatgaatacggtatacacaaatttatatacaaacagttagaccaataccaaaatttggtgatatacttgcaaacctagcatgctaacgaatttgataacttacatgccttatcccatctagcgaaacaaattagagagattaaactgttggagataaatttagaactcggttgatcacaactcaacatttcgcactcaaacattacaaaaatactagtctcctacatcaggattacaaagtggtcttccgcatttgttcatttggaaaaatatacaaccaaacaagcgcattcgatgatacaaattcttgtaccacattgaaattcacttacaatattttaattcgaacaaatttagctgagaatgtctttattgatagcaaaaagttgtgttaatttatattttacgcatccacatttgtgtgttttatgctttcacatttgtaaagaatttctttgaacagttgtgaaaattttcaacatttatgaaagaaaagaaaaaaccacttaataattttcaacatttatgaaatttgaaaaatgtgttaattactacgtgtttatgtaaagttatatgacccgtcttgcccattctctccccgacgaagacacacacagacaaacaaatcctagcttagcaccgtcgcgaccgaattcgaaattccggtaacccaatcgccgggaaaatccaccgctcgtggctaccgatattgattctaatcggatctagcggctccctttcttcgtccagatctcgtacttcattcgacctcgattcgctgtgcaagttacg

SEQ ID NO: 8869 - DNA, 3000 bp, Unknown
  misc_feature (1)..( 3000): cDNA_ID_2178852_gDNA_ID_1971909_Annot_ID_177030 3000 nt of promoter + ATG
tttgattaaaaaaaaaaaagtttctacttaagaaaattaaaccaaaccgaaatcatcaggtcacctacattgtcttgtcctcgttcaaatggtttttgtctctttatttattattgattcatttcttatatgcactgttcacattgtgtttgggtgaaaaagttatatttccctaatgctgtcatatctatggtggttccatgaccttccaccactaatgtttaaattgggataaaacaaaaactattttaaggttttgactaaagactgacctcacctcataaactaattcaataagagagtatttataaatgagaagaaaccacaagatattttacttaaacaaaaaaaaaagctcaaggtttttcattttagcaaaataaaaaaaaatcagctatacatcacgagaatcatcatcataaatccctgcatgcgtgctacacattcgacaaactttaacctagttatagtagtgacggatccataaagtttttgtatcgaggtcaaacataacggaatagagatatggaaatgcaaaccttgaaatttaacggtggcataacagtttttcttttgctaaatgctaagatcaagatagatgtctcactgtctcagtctcacgatggtcgacccaacattttttgatacataaaacctaataaaatttcatagaaaattttaaattcgtgattttctattattaaatgagacaccaattactaaactacaagatttttacacgaatttgatattgcttgaacctaaaatattggatgctttctaaaaagtttgttagactttaggacttgacaagccatatgtcgcacgattctcttgagaatataacagttataggaagaaccatgcaaactccacacaaacaatgacttgatggacttttcaacatcatcctattgagtatgatataaacactcgtttccatcttgattcactcgttatctttgcattgatcataaaatttagtttcttagggcattttttcggtgatatctttaaacaaaaactatctacaacattgtggactgccctttcgttccgtcttagtgtttttagtcacctttttaccatcttttcctatttagttttctttccaactaaatcttgtgatttagtagatgaatagataaggcccgcctaaatagattggtataacatataaatgttaattttaatcgatagtatttgggttctgaatagtaaaatagtaatctacaaattttagatatttaagttaatatttttatttaaatataatttcagtcttatgtattctattttatttatgcacactcaatcttatcgatgatatttgaatttaaatagtagtccacacacttttgttatatgtaatttagtattaagtatgataatgatatttgaatttaaatagtaatccacacactttatcatcttacacattcaatttcgcaatacaatttaagtatttatttcatcatattaaactcgattttaattatacatactaagtgataacaattttatatcaaaataatatttatatcagatcaaatttatatcttagttaatattaaaaataattaacacttaacaaaacataattaatataaaaaatccacaaaatattttgaaaactaacatggtttaaaggcgcaattgcaaaaaagctctttttagtgccctttttcaagaataattcatcttatggattaaggcgtagagtctagggatattttaaggaaatagataaattgtagatctagctatgattaggattgttaacacaccgttctaaaactcaaatcactaatgtaaagtcaactaactctcgttgtatcaactagctatgcctaataaataaggattctaactctcattgcaaatacttaattgctaaacatgcattaatatcaagtttgattagttcacctaagtatctaaacgagacatattcatatctagatagttaagctcatctatgatagtttaaggtaataagcgccctcttagatcttacctattatcctaagatcaagttctaggtgatcaatataaaactagcattaagaacaattaagatgaaaaaacctaaagatatttcgtaacaggttatcgatctacaaattcatttaaatctctaatgagagaaaccctaaacccaacaacgtgattactaagacatgattaaaagaacacaaatcatattctaaaaaaattgcattgaattaaaataagagaatagagttaaaggagtttagaatctctcttcgagaagttttgattcttctttccttgaatataaaatctctcacacaaaaggttaagtctaaacaatgacctcaaaaatctatatctaagttaacaaaaacgtggagagactatctttcaaataagggaaacttatgaaacttctgcaattcttgataacttgattaaaacgtggagaattcctttggtcccgatacaagtgtggtgtcgatcgacaccatcgcatcaaaaacgtctatgttgcttttccttgctagaaagcttccaaatttcctattttgctctatagctctcaaaagtggatatgcacctgtaaagacttgaaaacatacgaaaagaactaaaaagactcttaaaaccattctaatatcatgtttgaaatgagtaaaaaccattatatatcaatatccaaacgcaattcgaaccgaaatctgaatgtttatatctagatagcggtatgtctttttggcctagttaatgcattttcatgtttcaaacggcttgtcaacgtttaattcatatataaaatgcttacatatgaatttgatgtataaaacggtaacaatttgaaaaatttgggtattaaatgatatttttccaatttgattggtcaaacaaaaagaaaagggtattactgtaaatttaagttacattcaaatgcttaaaggctccccctctagggtgggattctgagattcaaatttcaaacggcactttcagatcgagacgaag

SEQ ID NO: 8870 - DNA, 3000 bp, Unknown
  misc_feature (1)..( 3000): cDNA_ID_2178863_gDNA_ID_1971909_Annot_ID_177034 3000 nt of promoter + ATG
cttttaacaatcaaaatagtattggtcaaacaatatttctgcattaattagttttttcatatttagcaaaaaagaattaattaaaaaattcatccctattcgacttcactttctctctctgcctgaaaattttgatcggtttctggtttctcggcgaaagaagtaaagtggccgacaaatagtgatctcgtgaaggaatcagtgtgtacagtggaagaagatgatacatttggctggatttacatgttgcttaggcggcgtcgctctttatcttcttaccaggagcacaggcaggttaggttttttttcttgtctttactatttacgaattacgataactagggtttactgttattcggtggtaatgttcttctttcgtgggacagagatatcaaatcaatcactagggtttaccaactcaaggatttgggtaatgttcctgcattgttctgcatttcaattttaggtggatgggttttggttatgtgtttgatatcattcgtttttattcagaacaattagtagaagtagagagcaaggtggtacctttgatcatcgcagtatcaggagatgttggctctgagactcctattaagtgtgagcatagttatgttctcggtgtatttctcaagagaacggtatgtatgaattggattagataatctagtttttcgtttctgtgattttggatatgttaaaaagaaacgatttttttcaggcagaacaacaggttttgagacgtaattggagattttcatgggttcgaaatagtacattgatgcagccgatgactaaggaagtcccctggtatctggtatgtctgttggactttgattggagtgtattactttctaaagtcatttacaaaatatgatattggttgcctataggacgacgggacaggtcgtgtgaatgtagatgtatctcaaggtgaattaggcttggcgttgacggttggtagtgatgtatttgaaaaggcagagccggtatcgcttgttcaaggagcgttgggttatcttaaaggctttaaggtcttttcttttcctttcctaccacttttcattgatttgcttttgttttgacaatgcttatacattgtggcaccattgttgtctatagatacttggagtaagacacgttgagcgtgttgtcccaattggtacaccgcttacagttgttggtgaggtatgtcttttatctgttagcggtccaaaatacgttttatatctctctttgttatgttgcttaccatgttaacaggctgttagggatggcatggggaatgtcaggattcaaaaacctgagcaaggacctttctacgtcacttatataccgctagatcagctcatctctaaattgggagatttgtcaaggttgtttcttttctctgtttttgcctattcttttcttcgaaaactatgattgaaaaaaattctaaaagatctctttcttttggcaggaggttcaagtatgcctccatgggtttaactgttcttggtgtgattcttatttcaaagcctgtgattgaatatattctaaagagaattgaagatactctagaaagaaggcggcgacaattcgcactgaaaaggtatgacgcaccctaaccacagccacgtatgaagtattcattgcgagttgcgagttgcgagttaagtgttgggtaacttgttgcagagttgttgatgcagctgctaggagagccaaaccagtaactggaggtagtaatagtatctatccattagagtttgtactttgtagtagtaacatgtgaatcctttttctgcatacacttggaattgctctgcttacaaaaacgtcttaccaggtggtacaagcagagatggtgatacacctgatctctgtgtggtttgccttgaccagaagtataacaccgcttttgttgagtaagtataagaccgcttttcttctaaaagctcttgaaaaccctctcactgatcaaacatggcatcttttgattcctctttttgtttggtttggacttgtaggtgtggtcatatgtgctgctgcacaccatgctccttgcaactaaggacctgtcctctttgccgggaacgaatacaacaagttttgaaaatttaccgccattgaaggacaaaactcagaacgatttttacaagcgaacaattactagtcttgtacatatagtaaagcctttgtatcatgagtttttgactagaaatttttttgcattgatagattgtgattgaacaaatgctaatataaatttcaagcttagatttacatttactaatgaagttatataatcacgtttcgatgttaaaataagaagtgaaaaaacgtgaacggcaggattcgaacctgcgcgggcaaagcccacatgatttctagtcatgcccgataaccactccggcacgtccactttttgttaattcctcactatcttaaatatctaattaccgttaattattacaaatcaggttgggcttaattaagcccaaagttaaagacagattagtgaaggagacagagaaagaaacagctctaaaatggtaatgaacgagaaactagagagtcaacggtcatagcgttgaccaaatctctcactctcaccagccaaatctctccaacttcctctttctctccacccaaatctcgccggcgatcgtcactgacgaatctgattcgtccccaacactcaacgggtaagctctctctgcaaaattcagatcgttctagctcaatctcaacatcggatcaagattcaacttttgttcttttctcttaaacaaagcttttgatcattagtgaaatctaaaatattaacctttgaatctgtaaacttaagcttagagaaccctaagatcaaaactaaaaatttgatctttcattgtcacttgttggaagcaattcaaaattctgtgttgtgtatattttcaaatttgtggattgttccaatttcgataaagttttgatttttattccttttgttgtgtgtttttataaggaggtagaaga

SEQ ID NO: 8871 - DNA, 3000 bp, Unknown
  misc_feature (1)..( 3000): cDNA_ID_2178869_gDNA_ID_1971909_Annot_ID_177036 3000 nt of promoter + ATG
caaatcaatcaatttcagtggtggagctgcaattaaaagggaaaaatatgttatgatgattacagaaaccagtacaaaacaaacgatatgtgataattcatgttccaaagagaacatttaagttagatcttcatttagatatatagtccaattttcacaacttagcttcagattctacccaaaagaagttgaagcgctaatgtgcgttagatttagaggtaaaaactcattacagctgaactgttcacttaagtaggggacattatccgacttaggcttgggtaatatggatgttgcattaaatagggattcccatttatgattgtgcaagtagaaaggaattacctgtgctggtacgaagttttaggtatatttcatcacgaccccttcctgaagctcctttgctaagcctatcttgtagtgaatgccttagtgcacctgtaatacacacattcgaaaaaaacggaaatattagtcaaatattaatctaatgcattgcatcttacatgcagaaatagcttcacaaatcattgctaaattgcatatgtgcacatagggagctcttacttgcagaaacttgttgatttttattgtcaatttgcaagattattgccttgctgctcagtgattcttctctactcaaatcaatgataataggagcccgtgtcgcaccattctcacccgtcggctatccatggtaatcatagtagacaggacaacacaaagtggttactttaagaaaatgtatcagccaatagtgacatacacaaattgccgcgcactcaaattcaatacacaacttaccagaactggatgcccaattaggctatttagaactgcagactttccagctccctgatccaccaagaaaagtgaaataacttcagtcttcacataagaaatttttcttttctaagcctaagaagtttcaatcacaaacacatagcaatattttttctgtcttccaacagataagtgttttaggaaacagagtaaatcacatacacttttcgttctgatatacactttctaaaatagatttctcatagtttcaaataacaaacgcatcaaccttctctactatagtaatacctcccaggtttgaatctcatagaatcaaataatccctaataaagagagaaacgcaacaaaacaagctacgaacgaagagatgaagaatacaaaacatcctaccaaactcctaggttacgggaccatttcgaaaacacctcatcgagatccacaagatccacgatatggcaacaaaaatctacactcgatcacagtataaaacttacaacaaacgccaaatacagtcacatctcagaaacagaaaaagcgagagaaaacccaccacattccctagggcaacgacgttgagagaagtagctggccgtctagaagaagaggtctcatcgggatcttcgtcagcgagcagagacgccgcttgtctcatcgaatccgaaagctgagacaactcatcgatcgcctccatcgtaacttgcacagcgaatcgaggtcgaatgaagtacgagatctggacgaagaaagggagccgctagatccgattagaatcaatatcggtagccacgagcggtggattttcccggcgattgggttaccggaatttcgaattcggtcgcgacggtgctaagctaggatttgtttgtctgtgtgtgtcttcgtcggggagagaatgggcaagacgggtcatataactttacataaacacgtagtaattaacacatttttcaaatttcataaatgttgaaaattattaagtggttttttcttttctttcataaatgttgaaaattttcacaactgttcaaagaaattctttacaaatgtgaaagcataaaacacacaaatgtggatgcgtaaaatataaattaacacaactttttgctatcaataaagacattctcagctaaatttgttcgaattaaaatattgtaagtgaatttcaatgtggtacaagaatttgtatcatcgaatgcgcttgtttggttgtatatttttccaaatgaacaaatgcggaagaccactttgtaatcctgatgtaggagactagtatttttgtaatgtttgagtgcgaaatgttgagttgtgatcaaccgagttctaaatttatctccaacagtttaatctctctaatttgtttcgctagatgggataaggcatgtaagttatcaaattcgttagcatgctaggtttgcaagtatatcaccaaattttggtattggtctaactgtttgtatataaatttgtgtataccgtattcataaattgcttgtataaatttgtgcatacaagtatatcactaaattctaattaaagtaaaagctcaaaaaaattatcttaaaatcatacgcggatagatagtaccaaaagtgtatgtaagagtgtcatcatcatatgcattttttgtttttgtatgaaagatatcatctcaatatttcgtaaactatatccaaaaacaagcctctatgatatgcattagagttcatttgtgcaactaatggttcatgccatctaaccccacaatagagacctagcgaattgcaatgtttcgctagaggtatgaacagtaatccaaccatactcaatttatatggacgcattgctaaggtcaacagaagagcacaaaccaccaaaactcacagtaggatgcaatgcttcagtcctagtatgccaaaactcataactaagataagaatccttaccatatatatttaggcattggatgaaacgttcaacatttattaatggtttcagtcaatgttcaaaaaatttacattggaatttatctctattttggaccgtttatgcaatttattcccaaaatattggaaaccaagagaaccggaaataaccgatttggaattctggtttaccactgttttcagtatcctcctgttctctgtactcaatagccgacgacactctgagagagagagccaatcgcgattttgaattttgcatcgacggcgaaaaatg

SEQ ID NO: 8872 - DNA, 3000 bp, Unknown
  misc_feature (1)..( 3000): cDNA_ID_2179402_gDNA_ID_1971910_Annot_ID_177068 3000 nt of promoter + ATG
tgcagctaaccaaacagacccttaagacatttctcatctacaaaccctagaacagagctccatggcttaattaaacctaagagagcttaacaagaaaatgaatgttaaagagtgataatgagacctgatgatgtgaacataactactaaaactatgagatttcaaattttaggagcaagttttcaaacaaactaataaagtcaaaggtcgtaccttgctaaagtctcaagtttttctttgtttatctttagaaattctcacttcattgtagactaaatctgaagaagaaatcgaagaatccacaaaccaacctctgcttaaaccctgcagactaaatcaacccaaacagaagtcaaaaatcaacccaagaatgagaagaaaaaaaaaatagaacagaggatgaacacagaaaaaaaaactcaaagaaaaaatagatgaacaaaagatccaaactttttgttgtgtaaaagaagaaagtcctaaaacccttttagagaatcaactatttatatataagatgaactaaaaacaataaatgcgacaaaaattagacattattgttattagctaacaccaatggagattaggcccacggccagcgacatgaaccttccactgtaataaaaattaaaacttcgaaaacacacaaaaaaaaacaaagcaataatggaatcgaatcattcaccagaaacccgcatgaaagtttaacaaacaaaacttgcttaagtgaaaataatggtttgtacactcaccgaagttagatctctctgtttctttaccttccttgaaaacttacaaacaatagacagattcgtccaaagaaagagtagagagaaaagagagttaaggttgaagatgagagagaaaatgagagctggagatgagaaacggtcagagaggagaagaagaagaagagagtaatgtgaaatgacggaaaaggacaaaagacagagagagtaaaaaagcaaagacgagcattgggagattcaaattgagttttcctaaaataccctttaaagcaaaggctattgacaccggccgttgcgactttgtttagggagagatctcgagatgcgcgaaaggtgtttttggtcattttctaataggcaatatgtatggacttgggtgggtttattaatgggccaactaagatatcaggtaaaagtgtgagttgattgggcttatctgttttgttacgggctcagctcgatttgattaataaagaaacaggttccgattggtgaggcttgggactttcttcttttagagaaaaaaagtttggatcttttgttcatcttacggacaattgctgaaaagaatctaaaaaacaagaagataaaatatatgtctagctcttcacgtcataggcgttaaggtggaatgcaaaaatgccaaaacgaaaaacgatttattttttatagtcttttacatgaaaagctttgagatttttttgtggttcagttcctccactaccaaagaaatggacaatcactttctttgtcatttgactcagtgactcatgttcatcctactttacttttttctctactatcgtctatatcaaccgtctcggtgattggtaatgccaccaaaacgataatggaatgatcaatgactaataataatgaaatcaataaaacgataataattttttttgtttattcttattttttaatctctaacaaatttatattgaataaaaaaattttactttaaaaacgtaaaatttacaatttagttaatgaatgaattttatcttatttagttataatttttaaacgtataagatgaattgaaaaatcatttgtcattttcacgttctgttgtcccgtaaaatgtattcgacagaatcaagttttaaaaacgtgaaaaatcaaccttgttttgaggattttaaaatttcggttattaattcttttctatcttccaaatttggaccagtaaattcaatatactatgggaccagttgattgtaacatatgaacacaatttgcaatctatcctaaatttaatttctcatgatgacgaatattcaaaatttccctctatcatttattatatagtcatgaaaaaattagtattttacaaattatgttcctcaatcaattatagtttaatgtataaaaaagtcagggtttcaaattttgaaatgacgtttctacagaaaacttttgttattacaatttgaattctggaagagaaatctgcatttcgatactacttataaaacggaaattttattttcttaatcacaaatatttcctatcattatactttagagaaaatttgactaaacttagaaataaaatatttattttccctaatcaatggtaaatattgacacttttatagatactttaaaaccgtaattataatttaaagtctatatgtccttccttttgtcctaatgaataattcaacgcactctcttcgtcttccctcttccttctttcttgtcgaggtcaaagatggcggattaacctgcacatctcaaagctttgtagattactagtaaacaaagcttccctaagcaactttaattttcatggattcttcagctcccaagtcatgaacttcaatacttcactagtcataatgtacgtttttttttctttcatttccattgatcctggttccactcttttagtctctgtaatttagggttctttgaattctgcaatctaagaaagaaatattaaaactttctctgttttgtttgatgtgatctggagaaaaagaaagcacttttatgtttctgggttatcaaattcttgaaattagattgtcttggagtttgtgatgtgatgtaataagaccaataaaaactcaacctttatgtagctaaacccaagtcaagcttaacaattgattaatataatgtatggaattagatggatcgtttttcacattgctcctcacgttcctcacacacagtgaagaccactatcgtttctccaactcccttcacgttttttccctctccactcacaaatcacaatg

SEQ ID NO: 8873 - DNA, 3000 bp, Unknown
  misc_feature (1)..( 3000): cDNA_ID_3043873_gDNA_ID_1971910_Annot_ID_177086 3000 nt of promoter + ATG
ttttaaaattagacatttcattattaaagtaggattatttggaaatataataaataaaacgataataaagtaggattatttggaaatataataaataaaactacttataaaagtaaacacttcattaataaaattaaataacataagatttaccagtgcatgattcttacctatatatatatatatatatatacaaagtttgtagtgaacatatatataattatttatacaagaaaaaatgagtatgaaaaaatgtgttgtattgatggtggtggtgttggtagttatggtggctatggtagatgacgttgaagggcggctttcatatgctacatgcatggatctttgcgagaccaagtgtaactttttttttacacatccagaaaaatactgtaaagataaatgtaaccgcaaatgtcgtagacttcaatcatctcagtaataatctcttcatttattttattgaatttctttttttttctttttatgttgtgtgtataaaatttttgacataaattatatgaaaaaattgcagggtggagactataggaatgagaaacataaatggataaataagttgacaaaatagttgatatatttgtaaacttgatgaagctttcatattaataacaatttttttttagaaatttaactctttttttgcaactatatatgtgacgtttcaaaattaaaatacatatcaattcttcatccattagtaaaaccgtaatataactctcatgtatattataaaagattgcagaatgacatagttttctatagttacattttaatctaagaaattgtaaaataagaggttcgaaccctgttttagttttaaaactaatggtataatgatgtaactaagtacatattttagctataaaacttataagtacttcccgattaatagtatcagattttgcattaggtgagttatcattttaagccaagacatctgtaatgaaatgttcttgaaaatccgacaacttgtatgtctctttcattatctttaaatcataaaaagttgcttcaatgttaagagttaagacacaaaagcaatcgtgttatatcattgtctcttgattccacacaaagccaactctcatatttattatcttcatctcctttcaaaattaaaaagaaaatatcaaaagaagatagaggagtacaaaccaattttttagggttaaattttgtattataaattatcggactcaaaatgttcatcaatacaaagcaatatatcatcaatgcaaatctttactttgcatcattttcaacatgcaaatctcatcttcacttgaaaaccttcctttggttcttctccttcatgtctttgtatgcaatatgggacattatacacatattttttcatcgattgagtaatctattttaaaaatatttgaatcacattatatgcataaaaaatctaatattttattaactataagtattttatagaaatttaaaataaattaaataaataaagtcaaataaaagtgaaagaagaatcatatatttatgtttaaattagatagataggttttaaaaaattagcaattaataaaaaaggcaatgtttgtggagtgctaaatcttttattttgatattttttgatatttttatattttaataaaaaaggcaatgtttgtggagtgccattgtaaataagttgaaaggctaaagttttttttatctcaaatatctccaaaattaattatatcattttaaaatatattaaataaactatttataaaaaattataagatttagaaattagttctaaaattaaacatttcattaataaagtgggattatttggaaatataataaataaaactataataaagtaggatcatgtggaaatataataaataaaacgtaaacatattattaatgacattaaataacataagatttaccagtgcatgattcttacctatatatatatatatatacaaagtttgtagtgaacatatatataattatttatacaagaaaaaatgagtcttaaaaaatgtgttgtattgatggtggtggtgttggtagttatggttgctatggtagaagaagtagaagggctttcatatgctacatgcatggacctttgcgagaccaagtgtaactttttttttacacatccagaaaaatactgtaaagataaatgtgaccgcaaatgtcgtagacttcagtcagctcaatcatcccagtaataatctcttcacttgttttatttagtttgattaaaaaaatattttgtataaagaaattgacatgatttatataaaaaaattgcaggatggagactatagaaatgagaaacataaatgggtagataagttgacaaaatagtcgagatatttgtaagattgatgaagttttcatatcaataaaaatattttttaaattataaaacttttttttataccaattataaaagaagcaaagattaaaagaagatagaagagtgaaaaccaacatttttggtttacttttgtagtattataaattatcggactcaaaatgttcatcaatacaaagcaacatctcatcaatgcaaatctgcactttgcataattttcaacatgcaaatctcatctactccactcggaaaccttccttaattgggttcacaacttcataagttcacatcatagatctgtgttattgggctgttttatggcttgtaaaagttggactagacccactaatcattatagcctggactaggcatgtattttcttttctttctcctacaatattatctctcatcaatacatcaaaaccacaacaagtttatgaacaaaactctgaaccgggaagttgttttctgataaaccaaactacacgccgtcttgagttgattgatgacgtgttaaaagattaatggctgattgtcattttccatccaatcacattaaaacacgtcaggataaagcccgtttcatcactgcttctctttcatcaaaagttctttaaggaaaaaaaaaaacgtca

SEQ ID NO: 8874 - DNA, 3000 bp, Unknown
  misc_feature (1)..( 3000): cDNA_ID_2179485_gDNA_ID_1971910_Annot_ID_177093 3000 nt of promoter + ATG
ttacctgatatacacagtaagagatcaacataagaactgaaaggattagagcaatcaacacggacaattgtcttccagaggttgagcccaacatctgcggaagctggacaatgacgaacggaataactgatatagccattattcttgcagcatagctggtccaaatatcaacagttacaccagaatctacaaaaacagagtaaacaacaataaggaacccgcatatagtaaagcacaaatactaaattctactgtattcatcagtcccttataaaaacccatacaaacgaagaatcctgaaggtgtaaccgtataagacacttccttgttaccttttaggtgaaagcctttggtgtcttggttgtttacagcaattgaatcacgaagatcacacttgccaaccacagtacaagttccccagataacagtgagaagcataacagtggaaccagcaagcaaacccattcccacagagacttggctttgagcagttgctgcatctccagatagtccagacactgaaagccaaaagacattgtttataaccaaagaaacaccaaacacataataaataacccatcaagataacaactccacagaaaaaaaagataagattttgactaaaaagcacaaagtgacaagttatgagttcatcggttaacatcagtgtatcatcatcatcttttcacaatttggtatcacaaaacccaacaaaaattcactttttgttaatccctgtatcatcatttgattcacagaaccaatcaaatattcactttttttgctctctcaaaattcaaagaatcttcatcaaagcaaaacaaaattcgtctatttcactcaaaatgaatttcaatttcgcatttgctacataactcgcacacaagcatgacactttatagatcgaattgaatcatacgaaacctcaggatctaaatttgaaactttgaaaaaaattaataaacattttgacatacccatgataagcatagcgtcaggaagagcaccaagcatcggaagaaacaaaccaccgacaattccaggtccaaggatctcaagaagaagctcacttccagcagagagatacgtcgcagccgtaaacatgagaaatccataaaccaaaatcagaaacacgtttccaagagcggtcttagtacacggcataaacccgtatgtctgctcacaagcttcctccttttcctcagccggagccgaaacaaccgacttgataaccgatccggaaccggcgagatttgaaccaccgtcgattccatcggagattagactcgttgaagatgggtttagggagacgaatcgagcgtaagcagatgaagtgaagaagagaaggaagaggagagagatgagagatctgaatctcatgattgatttcgaaagaagaagacaacaaaaaaaggtgaaatcaaaggaggacgttgttcatggagaaatcaatcagtcgagtttttgtggatgagtatgtatatatatacacacacacatatacgtgtacagataataaagttgtgtgtgtgtaattcgtgtggggcagttttttttgtttggagaagatgataaagctaataaggaagacgaagaaggcagtgactaattaccattttagccctgttaatttggcactacaccattatttatgtagtaagtaccaaatcgtttgattttttccaagattttcttctgtttatgtttaattagtcaatttaggaatataccaataatacaaaatttgggtgtataagaaaagggggaatataaatttgttagtgtaagttattaataatacaaaatttggttacatctagaagaaagatgccaaaattagttgttacttattagggtgtgttattaataaattaacaatataaaatttgcccactacaaaaagtaaaagtaaacgtattgggtactacaagtacttcttccctacattaatgggattcctcaaattcaacaatggatttgttcagcatttatttattttcttttttagcattttgatatttaaatactatataaatttaaatactccactagtataaaagttcaaaaacagataaggtagtcatcaattcatccggatttatgatgatttttttttgtggggtagatatgtctacttttttcaaaatttcggttatttatgagaggctgatttttttctatatatacagcataaattaattttcttgcaatatttatttatagttaaaaaattatttgaccttagtctcaacttaaaaaactttcggggtcaatcgcaacaatataataggcagaagctgaaaaaatgaaataaaagtaggtaagggcgattcgggaaccgtacgttttatttgcttagaaacgttcgttagtcattattaccagatttgattacgcggccacacttgtaataataaagcttaagagagggcaaaaatcaaatatttgtcaattttgccgacattatagttagattagataccatacaaaaatcataactatttaaaatatgatttgtctgaattctgtatttatagaaaaatatcaaacgaaagtgttgaccaaaagagcggtgaagacgctgacgctgagctgcgtttgagtaatgtcaaagaatcaaaacgtcacgtagttttgtctttaaaaaaaacaacacgcatgtttgggtattttcgaatgagatcaataattgggcctagtttagtattggcctaaagcccataaagaaaggagcgaaatctgaaaagtcagaagacatctccttgcacctttcttctctcttgctgtttctatggtggtggtattagggttttggaaaacccctaatctcacctgagaaaagcttcatccttttgtgacttttaaacttctcttacaagtcttcttcgtcatcctcctcctgggttcagcaattctcgccgaaatcgtaacctccgagctcacagttctgcaacttgtgggtgtatattgattcacaccaagatttagggattaagggta

SEQ ID NO: 8875 - DNA, 3000 bp, Unknown
  misc_feature (1)..( 3000): cDNA_ID_2179474_gDNA_ID_1971910_Annot_ID_177090 3000 nt of promoter + ATG
acatgaaccagaactacagaggtcctcctccaccaccaaacatgaaccagaactatcagggaccaccagcaccaaacatgaaccagaactatcagggacctccaccatcaaacatgggtcagaactaccagggaccaccaccgccaaacatgaaccagagctatcagggacctccaccgccaaacatgaaccagagctatcagggacctccaccgtcgaacatgggccagaactacaggggaccttcactgccgccaccaaacatgagtcagaattacgagggaccaccaccaccgaacatgaatggaggatggtctggaaactaccagcagaacggtggataccaacaacaaggtcagggtggtggaatgcagcaacagccttacccacccaataggaaccagagttaaaccgtcttgtgttttcatgtataggagcggataccattttgtggtcagtgttcttcagtttgtcactctgctttgtgagagagagactgagagttttagtctaataagttctgcatgagttattgtagccagcactcgtcaatctatttatttattatatcctcaagtcaaccttgtttatttatttagtggcacaagaaaaaaagagaaagctataaactaggagtagaaaagagttaatcaaaatccatcgatttcatggcaaaaagaccaaatctcgataaaacatcacttcctcgttggttcttagcagcttggatctgatcagcaagtgagatatctcctcttgttcgctctttccttatcaaatccaaatccagtttctccagtttagctgcaactgaaacaaccctatccgttccaattgcgatcttaccaagacttgttttcttcttgtgaatctgacaagacatttaatcaaaccaaagaatcatcaagtgggtttctaatattcttcagagtcatcaacggagtagtttttttatacctttgttagtctcttctttagtttagaacgtgaagcaatggttggattctccctttcctgctttggctttcgaatctttccttctcgtcggtctttctcctcacgttctttctttttttctgcagctctcctcatcttctcggtcctggcttttgcagcttcttttgctatcatcttggtttgttccttagctcttgctttctcttcagctaactgaagctgctcagatgaaaaatcttgttttattttttcatagctgtcccagtcaagttctgcctcgccacttcctcctttccttgcagcttctgcaatgttttctgaccacgatgacatgaacttctcctttaatcgcttcgatcttgaccgttctgcccaaacttgtttcactgaagctcttatcttctccttggtttcattactgcaagagacaaacttagcttagatatggctctagcttcattgttctctattctacactcaatactttacaaatctacctgtgtggttgttgatgatcggacatcttcttccgaacctgcaagatattgaagagaagaaaaagttctttgccaaataagttttcttccttcacttctcactgtaaacaatagaagatgggacaacaacaaaatgtccctgaatttgcattgaatcttacttgacttcaccttgggatttgtcaaagcttcgattgttctctgcttgattcgtcttcgagtgtctgttaaagagtatcaacaatctcactacacaaagcctcaaagaagaaacaatgtagaaaatcgaagaaaagatccttctaccttcactgtgtttccttcctttgttccatggcacctttcctttattagctaatccaatcttccttctcctttcctcttctttaatcttcctatcactatcactatcagcttcagtatctttgttcatagctttcacttccaaaagacttgaattgacttctttcctatgaatctcaaacacattgtacaatgaacctacagatttcaactccaagtgtctgatagacctcaaagaagcaagtgaattaggtattctcaaaacgattggttctttgagagtccaatagattgaatttgggaaccaccaagcgcattggaatggagcacgagttgattgaaatgtgcatttcatctccattgataaacctctgcaaaaacagtatttgaccaaatcgaaatcaaaataggtcaaataaaatcaaacaaccagtacctgaacgataaatcaatgaatttctacataattttcatcaaattagaaatagatttttataaatccttgatttcagagatgatttcaaatcacaagagataagagtttgagaatgcagaagcactcacaaatttagtgacatacacggcacggagacgaacaggagacaagagaaaactctgaaaagtttccttttatggtttctcaaacgcgaaagccattgaagaagaagaagaagagtgcgcagacacgaagagagagagagagagagagagagagagagagagcgggagaaacagataaggaagatgaagaacactaatgggccgtgaatgggcctaatctttattaataccttaaattacaatttaccctatttcaaagtaaagtacacctttgttttagaggttctctctctttactactataaactcgaaagtgtacccaaatgagtattatcttcatgtacatattaatttatttagtacggttttgatttatcattgaaatatgagagctgaagagacccaaaaaaatcggaataaatttgaacaccacaatgtgtaaagattttttccctaaaatcaaaaacaaattagacgaaaaatcttaaaaattaaattacgaaaaagacctgaaaggattaaagtaaagagggtggtggtatatctcatcgagtgtctcgcccagcttcttcagtcttcaccacataatattaataaaaagcattttcttctttcgattgcttcagattcgtcagctcactctttcctctccagaagaaaccctagacatctcatcgccaaa

SEQ ID NO: 8876 - DNA, 3000 bp, Unknown
  misc_feature (1)..( 3000): cDNA_ID_2179498_gDNA_ID_1971910_Annot_ID_177100 3000 nt of promoter + ATG
ttgtaaaaaaatattcttgataatatatgatgtgttcgtatcttttttggtcaaaatatattatgtgttcaaaactttaaatcaatatattgaaaattatatatttgattttgcgcgtaagtcctaaagtaatatttttttccatcttcatttgtaagcaattttgtgtcatatttcttagatgtgcataaatgtagataacattttaagttgatcactaagcaaatgtgtgtatttttgtatgaaaagtactaataaagtgtgtctcaatctagaccacaaaggtctaaatccatatgcactatagattccatttgcatatgataccttagattacgagtagataatttgttttctcttcttttagttgcctttaactattttttttaataaacttccataaagccattgttgctttctgctaaaacttataagagtatttttgggagaccgtgtccctcactacaataacctcaaagagtatgtacctctggctctgactgtgagctgtagacttcaattaaaaaaaaaatcatcaaacaacaaatataatctattatattaacactaatttaatatcaaattttgtatagtgttacctatataatttatgaaattatctagacaatgcctcgttattaaaaatctaattatagatgcaacatgtgggatcgtttagggatccacaacactttagacaaaatcatgacatgaacaccatatccattacttcacttggatctcattcttcctatgcccccacagaaaagtcaaacactgatctggcaagtctttgactgccgtactcattccgccacgtgtacagctttaactttgttcctataaaaacacaactaataaacagttaaacacattcacacacaagtaagaaacgttttgaagatggaggataaccggaaaactaccccaaactccggcgagaccaaaccagagacgtccctggagacgtcactatcatcagacttcgagtttggatcattgactcccacatctccatcacaagaccccttctcggaaaattctcccgctgatcatcttttcctcaacggccgtctattaccacactcttttccaacgagcacgataacgacacgttcagtgtcacgtactaccagcgaaaacactttccggagcgatagttggagcagccgaagcagtgatagtagcagcccgacatcttacactccaagaacaagcacttgtaatatcttcaagatcacaagttctagtaccggtcatgggaaagagactaatataacatgttttggtactcggtccgaagagattatgtgcctaaggcccgcaacttcttcaaagaaaacaaacacttgcatcagcaaagaatactatcacaaaccatcgttaatattggatctaaagaagagaccaccggtggaaaatggtaaagccgtaaacacgacaaataaggtttcgtatttgccgcaatgcaagaggaagaaagcgacggagattgtaacggctcagctttacgggtcgtattcacggcggtggcagcatataactccggtctttaaaagagaagggtcggtgaaaagtaagggaggagggattaaggtcggtggacggaaaaagaagtcgacgaggaggaagaagccgaagaaggcggaggagagaagaggaataagtagtaagttaatgaagtggtggaagagaattctaaaggcggtggtgtttgcttgcagggagtgtcatgcaatggagcctcatcagatacttgtaaatgatgatgctggtgtgaaaaagaagattattaaatgtccataatcaaaatttcaatgtttctctaatctatttgcttgtgttttctgctaatataaacaaactttatgggaaaaaaatatttgagacaaaacttttgcaaaaaaattcaatccaaacgatgttatcttacataaattaacgtttgtctttttgcatttttctcttcaaaaacccacagagaacgattaattagtgacgatgtaaaaacatgatcaaaataactagggaactccaagccaaaaatacctagagtaatcaaagtttttttttcttttgattattgatgaaagattaagaagcaataaaatcataaaacttttaaaattagaaggaaaaaaactttaaaatttagaaacatataataattaattactattcagaatcgtaaaaataattaaaatcacaaaatcaatgtctcgtcaaagtttgggctgggcctatcttataacttgttaagattaggtctacgttaaactaagcggtaatgataactcgggccaggtcgtttatctttacttggatagtaaactggtgaagttcaggtcgggtcgggtcgggtcgtcgtaaaggtttttcgtattgtttttaggaaattaaaaaaaaaaaaaaaacagaagtagaaaacaaaaaaatgaaaaattgaataatcaaaatcgagaaaacttgataatcgaagttcttgttcatcttctcgatctcttggtgctcgagaagcattggatagagaattttcttgggaaggtgatagaacaaaagtaagatctgtatatattcaacgcgtcttcttcgttcaactatataaggtaatctgaatgcgatcctagaatttctctgatttttgacatcgttatcgtagaagaaattggacttgtatgctttggtgattgatcgaattggagatatttcaatgaaggcgtttcaaattacgtgtatgttcaaatttttgctatcttatagtgggaaaaaattttagtctttggtttttttgcttgaatcgagtaaagagtctatatgcattgtgattatcagattttagttatagatctcagtttttgggaatgcgtagtgtaatagttgtagggttgactcaattttgggaatttgattgcaagtgagattgtgcttgtaattggcgaatttattgatgtaatcaagtatttgcagagggggaagaaggtggttttagttgtggaaatg

SEQ ID NO: 8877 - DNA, 3000 bp, Unknown
  misc_feature (1)..( 3000): cDNA_ID_3043848_gDNA_ID_1971910_Annot_ID_177097 3000 nt of promoter + ATG
tcaggtgccttacgttactgaaacacaattatatatacatacaaaattcatccgtattattttcttggttaaatttagatcctggaatatatgagatttttacaaaataggagtatgaacttataaagcacctatatattaaaccaaaaaaatttaaaacttataagcacctataaagaagaaaagaaaaagagagaggagcgtacgtatggatgcatcaaatccgaggagacaatcgcatcaagaaatggacggacacaatctcgacgagtcatgtgtcccaaagaaacatcacatacgattactcaaaaaaatggaagtatccgcaggcttttacatcaaatcaaaagcccattcaattttcctttcactctctatacaaaaagaaaactctgcacttttgagttttgatcgagtacgaatatttttacgtgctttagtcgatatgccacatatgttgactaaagaaacaagtaatggatcttcaaactgacattatatattgcacccattaattcttttgttccagccacgaactcatttaaattctctatatgagattgtccaaccaagagaaaaatattattaaaataacggcacaaatatgtcttgaagtttaaccaaacattaaattggagaaaaaatgtttttatcaaacttaaatcgaagcaaactaaattcattcaaaaatttagagaaagctgaccactcagtcatatactatacgaccatttcaaagcaatacgtctcaaaatcatgacattctatatcatgtgatagaatgtttaatgtagtttaaattagagtttacatctctaaatgcaattgaaaaaaactccacctctaacattttgctcccaatagcaccgttttgtcatccgcttgcagacaaattcacaccaacttcaaagcatggtctaattaagatcttccaagaaccagccatgcacttgagatctttattttttttttagtgatgtcttcctgaatatcttatttttccaccgacgattaattgtgtgaaaaaatgagtatattacaagtcttacattttatggttacataattaattatatatgcaggcaccagtgaactccctgattcaccatcttgtttttagcctacataacatatggaaattaaagactgcatgtcacgcacaagctattttgatatggttgttttacttgtttccaaaataagtaattcatggcaaatggttcatggaatgttaagaaggttcacgtgcaagatatccaagtggtattaatgggtgctcagagttagcgacaacatacatagctattagctaacatagtctattctttttatttggatcgttgaaagcactaggatggactatatcttatataaagttatattttgtctcactattttagacatcaaaatttgcatacgaattgttcagagtttatcttatcaatccaagagctttctgagtggcatgcgatttctatcagtttataatctttcgtgataagtatatacatattttcttataagaaattgataggtatgtttcaatttctattttctattttattttattcaacgtaacttaagtggaaaatttgtttagctactgttagaagtagaaacataaccttttttttgtaaactcttcaactccgattttaagttttaaaaaccgtgtggttgaagaaaatagtctagtgggtgttgtcgtgttgatcttttactaaattagttgtgatttaattaaataatgcttatgagacttgtaataggctcacgtaatgatggaaaacttggaattttctgggagagacttgctaccacatttctacttacccagtaaagtattagtcggttattaggccaatttatttggacacaagtaagatcaaagaatctttttcttgataagaagtaatcaaagacttcacataactagaaattaaagcagtaacacttttattgctgaaaattccaaagagcaaatcatgtgaaaggtctttccaagtgggagggaaaaaaccccaactgattttacttttggaaatattttaatgtcaatgtgacaaactgacattataaaatttaatagcattgtttgcggcgtaagtttattatccttagtataagtatctttttaatacgtagaagtaggattattatgaaacattcttcatttccattatctttgaagaggatgataccatattaatgcttgattttgcaacacgcaaaagagtaggcgtataactacggaaaaagtgaaattgaccaaatattttgagtatcttaacttattaataatatccacgtgattgcatacaaaaataaaacaatcaacaatcaatccataatatattcaattcatagtagaatataatattatcgttcgttcttatcagtaactgaaccacttgtcacgcacagattaacattgcggctttttgacggagatccagtactcgtgattattgttattttctctctctactgatttaattaatcaaaatcttcgtatatattctccaatatacacatatttaaaatcctcttactattagactacgtactacaaaatatactaatgtatataaacagagaaatcacatggcttgtggactgtcctgacattgattaattattatgtcatcgcttaagcaatcatagttttgttgaatctttttttatttcttatagttgttgccaaaattatgtattttattacccactttagatacctctaattttacataagtttcaatataccttatatagttgactctattgctctagaattgtaattattttttattttgcaataagttccaatttcagcattatttttcaccgggaaaatccttaaaatattctatgcaaaatccaatatattcactccacatagataataataaaaaacttataaaagaaataattgaagaaaggctgcccatgtgggcacttccaaataaatctccagaatcgatgcttcaaatacattggatg

SEQ ID NO: 8878 - DNA, 3000 bp, Unknown
  misc_feature (1)..( 3000): cDNA_ID_3043857_gDNA_ID_1971910_Annot_ID_177094 3000 nt of promoter + ATG
tgtgtaatccatgagtttatatatataggatatataggattggtggtacatataaaacaattaaagtttttttattgtaagtaataatattagaaatcattaaatcctattagataataccaatcagagaaaaatagtaaaatggtgttgaagtgatatgaaatagtgttacaaaatagatggttatggatggtggtatcgctttcgttttcgttctaccgctttcattgtattgtttacctacaaatcgctttctatttattttattttttgttcgttaactgatatttttcttacaataaaggacgttaattgatagttgttcaaaattttcccgatagggcaatcgaatcattaatctgactgactaaatactgacgaaaaagagaaaaaagaaaagaataaaagagcatattctcttcgtggttttaagacagtagaaagaatctgatccaaactctacacttggaagcaatgttataaccccaaatttacatatactgtattatatcgtgtatgttcttttatttgttagtatcgtctattttgttataaacttgtgctttttttgctacatgggattttctcgacacatacgtgtatggctagtgttattttataaggctacttcgagtatagtataccgtattaaaatgttattagattgaacaaataaaatagatttaaacaaatgacgatgcattcgagatataatgttggcatgtcaatcagaaacactaagaacgatgccatagatttaagtgtatgtcgaattcattctactaatatgttgacgatgaagtcaaacgtctatcttagctcaaagtacgattgtttggttaaattgacattgagcaatcatatacgttcttcaatgtattaactctaatctcatttatctttattttagattattgatataattattattaggatgaatgtgtaggtctcgtccaagcctactaaatatagttttatgttgacatacctctctagtatgtgtaattatgaggattaatatagttttatgtttgttaccattgttagatttagttcaacatggatcgataataaattaataactattatctagaaaaatgtgttaaaattatatatctataattgtaaatagtttttaaaaaatatgtgccaatccatttatttttcttatttttaaattagtaatttacgaaacttcagttataaaaattgcaacaacattttcaaattccaagcataatttaacgccgtttcaccaacaacgccaatacatatatttaaacccgataataacaacgcatttgagtttgagttttttggataggatgtggtgtgtacattttcttagattggtcacaaagttgtgaagccataaattctaaattaatattgggcataattaggtgtcaagctggttcaacaaagaaagcacatggggacacttccccaaagcttgttatgttaagaaaaaaaaacaaataattaataactttgctccaaaattctatctaataaagaaaattaagatgaagtaagtaaataaaccacaaaaacatctcatttaatgaaaaaaaaccttttcgttcattctataaaaattagaaaaaatacattttatccatttgcgttaatttcttttctatttatcttagctaataaaatcaattcttaattaatggttggcatgcttcagcaaccaaacataaaataaagcaaaatcagctctaataaaaacgaaacatttacatatgagatcaaaagtgtacactaattgaagtcattaattttaagtaatcctccatttattataacctaattacgacaccgttttagatctataattagaactccatatacatttctaattaaattattttcaaatgcaaaaatgaccaataaaaaaacaaaatgaatcaaagaaaaaagagtaaccaatgaaaaaaatagaataaaaagagataaaatgcgaaataaataaaaaccttccgtgagagtgcaaaaagaagagaaattttagaatcaagaaaccgacgtctctctcttcctcacctcctctttcttctctgcttcggatctctctcttctctctctctctctccctgattaaacctctaaaatcaggtaattatctcttttaatcatcaccataatcgtcttctctagcttctttttttttgaattcccagtttcattttgttcctgggaaaaacaaaaaaaacgtattttttatttggtgggttttgtttgattgtgaatttatgttatcatcaactttatctgaagaaattgcattgttctgggtttgtttgttttcatgatttcaatctctgattgttgatttttgtttatcttgcagggagtttttttcttctggtttcggattctcagaaaaattagcaagtctttgtcttttgctgctggttgcatagcccccattgaagcttttttcctctcaatcttaatgttctcaaggttagagttttgttccttcctccggttctgattgtagttaggcgtaatgggctagtttcctttctttgtttatgtaataaagttttgatctttagcgtttgaagaattggtattgttttgatatctgcagctaaagtttcattcttttttttccatttattggaaatgatcttggctttaccatgttaccatgagtttgagaatgcacaatgtaatcttccgagaatatggtttctttaagggacatttatatcagtttctaaggctaaatcgaggagaacatgtgctttgtatgttttgctttcgttacttatccccaaaattagaacttgacatatgtgatagcttagttattagtatcagcttgagatgtaataatgttgcattagttggtgctttgaatcaagaagtttgatttgttactcagtcgttgtatggttgctgatgtctttatggatcgaattatatcagagggcttctgcagcaagcgaaatgggacaaagaaataggaatgttgatttagaaatg

SEQ ID NO: 8879 - DNA, 3000 bp, Unknown
  misc_feature (1)..( 3000): cDNA_ID_1397582_gDNA_ID_1971910_Annot_ID_177083 3000 nt of promoter + ATG
atatatatgttcactacaaactttgtatatatatatatatataggtaagaatcatgcactggtaaatcttatgttatttaatgtcattaataatatgtttacgttttatttattatatttccacatgatcctactttattatagttttatttattatatttccaaataatcccactttattaatgaaatgtttaattttagaactaatttctaaatcttataattttttataaatagtttatttaatatattttaaaatgatataattaattttggagatatttgagataaaaaaaactttagcctttcaacttatttacaatggcactccacaaacattgccttttttattaaaatataaaaatatcaaaaaatatcaaaataaaagatttagcactccacaaacattgccttttttattaattgctaattttttaaaacctatctatctaatttaaacataaatatatgattcttctttcacttttatttgactttatttatttaatttattttaaatttctataaaatacttatagttaataaaatattagattttttatgcatataatgtgattcaaatatttttaaaatagattactcaatcgatgaaaaaatatgtgtataatgtcccatattgcatacaaagacatgaaggagaagaaccaaaggaaggttttcaagtgaagatgagatttgcatgttgaaaatgatgcaaagtaaagatttgcattgatgatatattgctttgtattgatgaacattttgagtccgataatttataatacaaaatttaaccctaaaaaattggtttgtactcctctatcttcttttgatattttctttttaattttgaaaggagatgaagataataaatatgagagttggctttgtgtggaatcaagagacaatgatataacacgattgcttttgtgtcttaactcttaacattgaagcaactttttatgatttaaagataatgaaagagacatacaagttgtcggattttcaagaacatttcattacagatgtcttggcttaaaatgataactcacctaatgcaaaatctgatactattaatcgggaagtacttataagttttatagctaaaatatgtacttagttacatcattataccattagttttaaaactaaaacagggttcgaacctcttattttacaatttcttagattaaaatgtaactatagaaaactatgtcattctgcaatcttttataatatacatgagagttatattacggttttactaatggatgaagaattgatatgtattttaattttgaaacgtcacatatatagttgcaaaaaaagagttaaatttctaaaaaaaaattgttattaatatgaaagcttcatcaagtttacaaatatatcaactattttgtcaacttatttatccatttatgtttctcattcctatagtctccaccctgcaattttttcatataatttatgtcaaaaattttatacacacaacataaaaagaaaaaaaaagaaattcaataaaataaatgaagagattattactgagatgattgaagtctacgacatttgcggttacatttatctttacagtatttttctggatgtgtaaaaaaaaagttacacttggtctcgcaaagatccatgcatgtagcatatgaaagccgcccttcaacgtcatctaccatagccaccataactaccaacaccaccaccatcaatacaacacattttttcatactcattttttcttgtataaataattatatatatgttcactacaaactttgtatatatatatatatatatataggtaagaatcatgcactggtaaatcttatgttatttaattttattaatgaagtgtttacttttataagtagttttatttattatatttccaaataatcctactttattatcgttttatttattatatttccaaataatcctactttaataatgaaatgtctaattttaaaactagtttctaaatcttatgaaattttataaatagttttatttattagatttttaaattatatatatgttcattaaaaagttagtatgctaggtgagaatcatgcacaagtaattttttttttttttttttgctaaacatgtaaaaatcatataaaggaaagaggggttttacaaagagcaaaaaaaagcctacacaaaagcaaccttggccaaaaaaaagaagaagataaaaacaaggcttccaatagagtaacaaaagatttgggaaaagctaacaaatccatattaaaatcttatgatcctattttattaaaaatttatttattatttttccaaatgatcctattttattaatgatttttaaaaaaatagaaatagaggattaatttgtgtcttattcaacacaattatcacattttataacttaaattaaaaaaaaataataaatattttcaatctaaaaaaaatcattttgcgcttatgtggtaagtccacaattattctcattttttttttctctttttaattctacaatccttttggccaaatacatttaattacaaatcttctaattttcataaaattaattgccaaacacacataaaagtttttttaatatttaatgttaccaaatttcgatattttgaattttattaatgcgatagctggtagacaacacctactgtttaatttaattaactaatctacgtttgaatccaaacaactttatatagcattgatgagaaattgagaattcattttaattggcggtatatttagtcaatttaacgttgcctaatttctttacaattacaactaaaagttcaaaaaaataattaagaacctaactctaattctctatcctccaacaaaaacacgtaaatatcataattaactcaagttagtataaatatgtgaccggatccgaataattggatccaccggatcggagggaaaaaaaacaaacccgtgacgccattaacgaaggtcgagcttccttgacaccacacaatg

SEQ ID NO: 8880 - DNA, 3000 bp, Unknown
  misc_feature (1)..( 3000): cDNA_ID_3043893_gDNA_ID_1971910_Annot_ID_177071 3000 nt of promoter + ATG
acgaaattcaccgactgaatttgaattcatggctgctactaagacgatatttggatagttgtgatattcttcttctccttcctctccctctttcatatacatgtatacagctaagcttgatagatgtattataatttttaatttggttacagaaaagtcgttaattattattttcccattttcggtctgacagtctttttatcatctattttttattagaaagtttgatagagaaacatttaaaaaataaattaaaaaaccttcaataacagtactgttcgtgtcgtgttaacgtgttatattaatgatagtggtaagatagtggaactcggagcacatgcgatcttttaccgacgtttactgcagttgacgaccattgttttgaagtaaacggcagtttttggctcgccaatgtttgatccgacgtgtcacatttttgatcacaaaaagtttgatatggcaacgatttggtgaatatatcagcagtctgttgccggaatgtgtttgacaactaacgatcccaaggtaacacgttcacggacatagtgataatcaaactcaaagtgtttgctgcgagcgtgataatcaaaaacagagatcaaaagggcaacgttctacaagtatccccttttgtcgtttttttacaagttgcaacgttattattgcttctagttggataaatatcatgatgataccgacaaaacctttacaaatataacacaattaaaagttctttctatatttatcacatttcgtaagaatatagtattttatagacaattttacccatactaacgttatagtgagaataaaaatataccatattaaatagttttccattttttttaaatctaaaattaaatagttttccattatttaaaatttccaaggacgatacatgatcctttccccatagacactcctaattcatcaacctgacaacctgacaaccactacccaactaccttactgtcaattttacatcgtaaatttatttgaaaaaaataaaaataaagaaatatcaaaagaaaagtcacaatagattaagataatttaacaataaatcaaaaatttataatagaaaatcataagtctcataagcatttattaagatttatactattattaaaaaacattgtaatgaaaatatgagatcataattaaaatatagtaaacgaatagttataatgagtatagactcaattttcaaatttttaaacaattataaatatagtcaacaaagcattatgataaaaaaaaaatacaacattttgtgttatattaaagagacaatcctttgaaattttaacaaataatcaaaattaattgttatttaggaaaaaaataatgatatagataacaagttatatatatatttttctcttttattagaaaagttgcatatgattattactactttttgattgatattttttcatatgaagttgcattctttcgctatctaatattctttctttttttttttttttgacggatgctacctgattttcaacgagtatataagggtgttttcgtcatttgcacttcatcagaaccctaaataaagtccagagtgtttcttagttgtctgataaattttcctcctcttcggctaatcgttctgtgtattaaaaagtattgatcttttaggtttcaggaatgaatcttggagtgaagaagatggctgtgctttaccattatccttgccatgacggtgttttcgcagctttagctgctcatctctacttctcagcaaagtcaatcccttcactgttcttccccaacacagtctactctccaatcacaatcaaccaacttccacttcaagacatcagtcatctctatctttttgatttcactggacctccaggtttcgttcaccaagtctctcctaaagtcgacaatgtcgtgatcctcgatcaccataaaaccgctattgatagcttaggtgatgtctctttgacttgcaagaacgttactagtgttttggatatagagagaagtggtgcgactattgcgtttgactattttactcagaagttggttgaagaaagtagaggaagttgcaaagagatgaatgatttcaagagaatgagacgtgttttcgagtatattgaagacgcggatatatggaagtgggagttaccagagagcaaagctttcaacagtggaatattggacttaaagattgaatacgacttcaataagaaccaatctttgtttgatcagctactctcattggatcatgaaagtgtgatcaacagaggaaaacagagtttgtccaagaaacataaactgattcacgaggtgttggaacagtcatatgagattgttcttggaggtgatgaggagtttggacggtgtttagctgtaaatgctgatgagattacagagcttagaagcgagttagggaatcaattggctgagaagagtaagaatctgagtttacgaggtgttggagctgttgtttacagagttcctgagcttggagatgagaataaactgaaaataagtttgaggagtgttgcagaagaagacacaacaccggtttcacagcgattcggaggtggtggtcataaaaacgcaagctccttcttgttaaactccatggagttcgagcaatggaaggtgaaatagaaactcttctactacattaaactagagatgttgtatgaatcaggctatttagctcttgtatggaatggctatttgaaccggtttggtttacggcattgccaatgtcttggtttttgtaaactctattcttcatgtaccctttagaatatattcgatttgatcaaaatgaagaatcaaaaaaagagattactgtggacaacactcagccaatgaattggtagctggataaggttgactttgactttttaaaaatttgatctctcttcttccaaactgagtgttgttattgtcttagtttcatatatatatttttcttcctgtttggtttgctttgatctgtcttttgtagtttgttgtagtatg

SEQ ID NO: 8881 - DNA, 3000 bp, Unknown
  misc_feature (1)..( 3000): cDNA_ID_3043883_gDNA_ID_1971910_Annot_ID_177077 3000 nt of promoter + ATG
gcttccgtaagcatccgcactagtaaagtgtccaaatggatgccgtcaaaacaacaaaagtgttttaaaaaagaaccgaaacaagttttcacacttggtccttagcttctcaaactcttcttcgtcctgataatggactttaattatcatgttatacgtcaaccaagttatcagctaaccatcatcactttattaagtatatgcagccttgtgctcataatattcattatattatactaaaagtctaatcatatgaagaaaggaaaaaaaaaaaaagaggcttgtttatgaaattaaggagtgcacgtaaggccatatttataattctatttcagaaaatgtaaattcaaacacggcaaatatgttagtttcatggtgcatgcatgatgcatttccaactgtttctttttttggggatgaaaatgtatttccaccggttaattaacgaagcttctatttcatgtttccgttttcttttactttttttttttgtttttacttcatatatatcatttgacaaagttaaggctttaaaatggcagtagtttcttaatttgtttttagattttggatttatggtgtttagttcttagtttttttttgcagtaaatttttagttttatataaatgtatgtacccaatacatatcactatatattttatagtccaaaagaattttatgtgatggtgaaaagaaaaaaatgtgtgatcattcgctgaaattaataaattttgcagtatattaaagaaaactagaaaagtgagtacctaatattccaacaattagactgtatcactcatgcctgtcgtctgtcgactgttgacttgtgttataataaagacatttcaaattatccgaatattccattagcacatatgaagatatccaatttttgaataattggagtcgaccaatgtaaaatattcataacgtgacatcacatcacatacatgtacgactttgtcacttaccaaaaatgatctagttatgataataacatcatcacatgagtaagaatgataaggcatgatctaatcagcatcatataccgctactttatttactatcacattttcgttcacaagagtaatattatatttgattttatatatgtctaaaaatttatcgtagactgccgattttagattttgggaggttagaagaactaataaaaccgaaagaaatagatgatggtcggttaaatacttaagtcctttataagaaagaaaaattaaaagtcaactttatcgctgaaagtgaaagttaggttgaaagttcagagatttattcatcaacttccgtgcattgacacatgctcttctctacattcgctcacgtgaattttagaacaacaaattattttacaaacactataatcttccggtaatttaaccacaataaagagataaataatctttatattaaatcgatcgaattctaattctgtaggtactgtgagtcaaacatgaaagtgtaaattttcaaaatatgattggtgttaacttaggtgaatcaatttttgatgtttttttgttgattatataaatcaaaattacggaagaatgcatgttgtttacataagtgatataattaattttttactgatatattaaaaataaaaatattttatgttattgttttggttatttttttgttccacaaaaattaattaatcataatatttctttcttgactatcactagattcaatgaaaatctctcttttatacataaataaaaatcttctcaatgcattaataaatatatataaattgaggaaaaaaagagatagaaatcatggaaaaaaaggttaaaaattccaactataagcgagcatcacatatagaaatagaataatgtataggaatccatcatgatctcactctctatatataggtaagccaagtatcttatttttggttatgtatctctgaaatctgaatctgactgacttcaaaggacacagcttttacttctataactggttagcttctccacacacacacacacttgttagatttacttttcctccgcactatcagcagatttttctcatctgggtctgtttgtttctgttgactcaaagtttccgactttcttattttctgtctccgatttcatcgccgaaatctcagtcaattttgtctttagatctttaatttttggatccctttaattattttgtttggtcttacttcagagcgaagcaggtgaaaaaatggcgaatcggaagttagagaagatggcatcgattgatgttcatcttcgtcaactggttcctggcaaagttagtgaagacgacaagcttgttgagtatgatgctttgcttctagatcggtttctcgatatcctccaggatttgcacggtgaagatctccgtgaaactgtacgttttctccattttggatttgacccttttgctataagatcctgaaactacatgctctgttttgagtattgactaaaggtttcaactttttttgattcgatcatggattagattagttagggttttgaaacgcaggaagatttaaactttatgttagttttgagattagtagtttcatgtgatctaattttgatgatcttattgtgtgtgttgttgtatataggttcaagagctttatgagcattctgcagaatacgaagggaagcatgaacctaagaagctagaggagctagggagtgtgctaacgagtttagatccaggagattccattgttatcgctaaagctttctctcatatgcttaacttagccaatttggctgaggaagtgcagattgcttatcgccgtaggatcaagaagctgaagaaaggtgattttgttgatgagagctctgctactactgaatctgatcttgaagaaactttcaagaagcttgttggagatctgaacaagtctcctgaagagatctttgatgctctcaagaatcagactgtggatttggttttgactgctcatcctactcagtctgtgagaagatcattgcttcagaaac

SEQ ID NO: 8882 - DNA, 3000 bp, Unknown
  misc_feature (1)..( 3000): cDNA_ID_3043879_gDNA_ID_1971910_Annot_ID_177079 3000 nt of promoter + ATG
aaaatgaggcttttgaattaagtattagctattttctttaatcacctaacttgctccaaaagaaaccaccatctgttttatgcataatggcatatttgcaaactatacgcatatcaaaacatgtggttcgaaggatatgaagtataacgcaagatttcggtatattctatgctccataacacaaagtcaagtgaaataatacaatcatatatttctttttaggtcacaaaatattctatgcttgataaaacattgttttatggataccaaaaaagcaaaaagaatacacaataatacttgtgcaatgcaagtgtcggtataccaaacccactactactccgactctccgagttatataaccgctccattatcaataaatctacactttagcatacgtataaccgactcaaacattttgcttttgttaaataacaaattcacacactcactctactttaaattaacaaacgaatctttaatttgataatatggccggattttaagaatggaatcccatattaatatcggaacgtgtatcttagtgttgaaatattacaagactctttaagagaaataaattgcaaaggccaaaagaatgcataaatctttgtcgccaagtgctactattttctgattatttttgcatataaaagtttttattattattattatgcatgttagaaaacttaggggtgcatggctccttagtttttgagacttggctccatattggaagttgtcatgtgatttggttgatggtactttgagtggaagaaggaaagcggagttgtgtacgcggtttgcgggtcttagcatatccatcgtcgtgtgactctcttcatcgaattgaagatgggtctgattctagtgattaaaagtttcgacgaatcgtgatatgattttggtagtgagtactcatgtattaaaataaaaatgaggcttttgaattaagtattagctattttctttaatcgattagtttagagtgcgtcggcctaaaccgcttctatttattttttattaggactgaaattttttttattaagaaatgttagaaaatttgtatagttatatttatttggaaattggatagtcaagacttttgaaaaataataactaacaacaacaattaaccgtagaatttgatactttaaatctaaatttaagttaaaatttcgattataacatttgttattaatcggaaccataatattgggattcatagtgtactactgtatgtataaatttgggataaatgtatacgtatgtaagtaaatgtgtaagcgtaaatttgggtatacgaaagtgtctgtaaaaaaaaaagaataaaaaagaacgatgaagccagaagaagaaaaaaatctcgtgcgaaagaagccaataagagatgagtgcaaattacgaggtcacttattacatcttgatgtgattactgattttccctatcatacccaaatctatcttactagcttcgtttacatattttctattgtatcatccattaatacattatgtgattctcagtagctaaagttttgtttacgaattagatatattgatcttgaaacgttaataaacttagagttggtatatgtatctctagaacaaatttcgtttcgtacacggtacaaaaattcttatttgtacatgtagtttgtttatttactagttaattcccttattaaacccgtacaggtaaatgttaaaactcatcaggcgattttacgtactatagttagatgcagtgttgatacaatgaatttgtttattcgattaataaataattaagttcgttgaatatacgtatactactcctccgtaaaatgcatttataactacaagaaataatgtaatggttaaattatttgcattttttcgcttaacaagatactattaaaaaaggtttaataataaacataaacataaaaaatatcaaatgtttgtagtgtattaccacattttattttagttgctcttatttttttatttttgtttcggacataacacaattttgtatagatgttataggagcgtagacgtcacttcccataaatcgcgagtggggctattaggatgttgtaagctccaaagtacaaagaaaaaaatcgaacagtaccgaaagcgaagtaagcagatttttttaagtatagttatttacaaattacaaattaacaattattttcttaaaccttttttttttgttgaattttttgtcaacatctttttatttctttgattcaacgataaagcgaaattatggagagaaaaaaaaaagcaagaatcaaaaacatgtctcgtgaagcagcagttgaacaagaactgttatttttttgcataacatttaatatattaccatttccgaaattttcttatccatttttttaagtttattaccaaaaaagtagcttaagaaaaaatttaatccaagaagaaaaaaaagttttgttaatttggaactgtgttgtagattttgaacataattttaaaagtttgttaaagtcaattctgttatttattttctttcactttgctagaaatttattattattaaactctgctttcgatttctattttttaattatagaataattaattataacctttctttttctttgtcaatattaaataacttttttaatttataataataattaaaaaatgttaaatattgggtctggttctccatcttcactcctcttcttctgtgaaccttctctcctctctctcttctcttcactgagaaaaaacaagttttctctctctaggcactcacattcattctttgcttcaaccttttaattcacgagatccccaatctctctttcgatgccttttcacagagtatctaatcctcctcctcctccattcatcttctccttctccattcttctccgtcgtctccattaacaaacaaccatttctctcaccggaactccattttagggttttcttcgattctctcaaatttcattcctttcactcaccacaacactcaaaatg

SEQ ID NO: 8883 - DNA, 3000 bp, Unknown
  misc_feature (1)..( 3000): cDNA_ID_4256734_gDNA_ID_1971911_Annot_ID_177114 3000 nt of promoter + ATG
gcggaggctcctgtgatttttgccaaggcctgtgagatgttcattttggagctcactctacgtgcttggatccacaccgaggagaacaagaggaggaccttgcagaagaacgacatcgccgctgccatttccaggaccgacgtgtttgatttccttgtggacataatcccgagggacgagctgaaagaagaaggtttaggcgtgaccaaagggaccataccatcggtggtgggttccccgccatactattacttgcaacaacaggggatgatgcaacactggccccaggagcaacaccctgatgagtcttaaaacttttcccctttcgtttgtttggttgtatcgtagtaaggtagctctgctctgctgggaaccatttctattgtgttctgtaatgacatgttagtatatccccagtctatatctatggcaatgcagtttctgttctcatgtgcattaaataataacaagaatgatagaaagaaaatcactactagtaatgcccaaaactttacttcacaggaattcaactatacagctttcatgtgattgctactttacaaccattttctttatgctattaaaagcttggctcctattcctttaaagtttaaaccttgtcatcctccacatctcccttagtggataaaaccttaacttacttgaacatggatccaaagatacaagtcccttctcgccattccagttgcagtcaggtggtttatataccgagataccgagagcttatctgcttcggtctccatgcattccaaatgagttttttttttatgggctgtccgtattagtaataaattacagaaaatgctggtgcttcaatcatttgcttgaagacatggcttcctcaatccttctaatcacaatgctaagaggacttcccacttggagagcttcaacagcggccctatgtgctgccttgtgccacttgagtagattgtaagattgtagaacagaccacctggcttgattcgacatctgtatgatcaaacgcacagattcgcaatgcttaacaatctgtacacttgtgcaagaaaagtggaagcacatattatactagtcaaatcagatatatatgaatttcattagtcctgacctgagctacggataacggtggttccagaaggactgagatgctcctgaacagattttcatcattctctccaccctcagcctcaccataaactagcgcttcagctgcaataccagcaaatagtaccatgctatacctaagagaaactgaaccagcattaggtttgtgaatgagagaaaactcagagggagagaacaacaccttgactaataatcacctatcaaatgagctaccgctaagtcgtccctcagcaatctcactctccatcttttgatcccagaattgggttccagcctagagaaacacatgataatccatttatgtactcggttccatatgtagctaaaagaacatagaatcacagcactacaaaatagaatagtataacactagagtgaatctaaataatacctggccttgaacccccatttgcatggcaacaaccggatccaatatcacaccacggattgggcagcccatgaggtatgctgcacgacaaataagctgcaatcgttagccacaaaacgagaaagaaatttcataaaaatactaatgatcacgaatgtcttaccaacaagaagatgaccagcttcgtgaactacgattctacgcttatgtggaggccagtagcatgatacttgggctaagcaggtaccaccaagaaaaacggaatccaaataagctagacccaaaatgacagcaaggtttggccgcacatcaatctcctgtgaaagaagataggagactccacccagcaaagcagccagagcaatgctagaaccaccagaaagtccccacttcttcggtgaaagtttagtcactaaccaatataaacagtaaaataagtttccatcgccacacactgagtaatcaaagatgactgaagagagaaatttgagctacacaccttccaagccagttgcagacttcaggacagtaggtgttacctctcttgttccttccaaaactgcatcacagtgatacagaagcaagaaacttatgaaacgatacaaattaatcagttcaaatgctcgcacacatagctaaacattacttttgtacatctatctaaacagaagttgattttgaaggcgcaaagaagagaaaacagagtaccaatactggtgaatttgccgaagttggccaaaagacctctctccttaagaaacctaaacgcacttccaacaagtctcatatcatctgcattcaaacacgcatctaaaacttgccaatccctctccaattcaagagctcccaagccgcttaacttagccgtgacaatagattcaaccgaatcacgctgttcatcattttcaatagatttgaggaatctaagagccccggcgagatcttttctcttcacagcatcttcgtactcccgccattccctgagtgcgctcggcctccgcaactcatgcttccggacgctaccaaagactagagactgtacgcgtggaacaaggaagccaatttggcgagaaaaagaaggcgaaagagatctgagacatggaggagacgacggagataaagccattagaggtgcttctcgccgggatttccaaaataaaataaacgacgtttatattcgaaaggacagaaattcattgggccgagtaaagcccatttagctatttaaatattgcaaatgagttatttaacttcattatatttatttttagagttgtcttttccatatatggaagtaaacttttcgatcaaaagacatgatctttgtgaatgtgggcaacgattgtaagcagagggaaggcgaagaattatgataacctctcatcaacgataagacaaaatccataaactagtaatatcatccaatcctctcacttcttccttattccctcactttcactctcactatctgttgacttcacatg

SEQ ID NO: 8884 - DNA, 3000 bp, Unknown
  misc_feature (1)..( 3000): cDNA_ID_3043916_gDNA_ID_1971911_Annot_ID_177136 3000 nt of promoter + ATG
agcttctttcaagtccatgaaacacgattttaccggaggcgttgagtctcggactatccgccgtcacggtgagaccccgagattcgatacacgccgacgatgatgatgatccgtcaacggaaggcgtcgacggtggatgattccgtcttggtttggctaatctgattcttggttggttaaggtttcgtgaatgagtccgcgacggagcaaagggattcgcacttggtttatcgaggtcaagcgagagtcttggaagatcatcgatctcgtggctagaggaagacgatgaagagagtgagagacgtgaagatgcgactgagattgattcggagatatctgattctttttgcaacggcgacgatgcggcggtagaagatttagatccccggtgaagaaattgcttaaacgatgacgttttggggtttgtggatgaagaagaagaagaagctttaatagattcttcttgttccttggcgttgacgagtctcttgagacctaaaagctctctccatcgagtcgtacaacgaggagctttaggagagaagaggtcagagatctccatctcaagtctccggcatgatttcagaacctctggtgatcctcttggttcggtggtagttgtgttgactgtcgttgacgtcgtcgtcgtcgtcgtcttagggccagagaacttcaaaggtacgagctttccgtcggagaagagctcatcggcagagagcattgtgaccggatcctcaaggcaaaactcgaaatccacaactggatcttggatttccggtaatgggtcagattgttgcttgtcaacggaggaagagcgtctgttgtcgtctctggttaaagacatccgagggctcgtccatccgtacgacgagaacttctccggcgaaacaccggcacttttaacgcaagcggaagccattaagtttgtgtgttggacttgttgataggagaaaaaagaagaatctttggagcatttgccggcaaagaactatgttaagagttagggagagaagtgggagtgacagagacaagcattatatacacagctcactctcaggtacaccgtacacacttgtttcatttaccggaaccattcgggtcggttgtttttaatgggccgggttcacctatcttatgggctcagtattatttgaccctttttttgttgtcaatgcttgtgttattgatagagtgaatgactgaatgttatgaaatttagatctggttcgtgtgagtatttatttttataagttttttttttgttattatgtgaatcgagtattattttttctcattatggtcacctaccaaccaataattgagtctgatcataggcacacgtttcgtgtattcatgcatataagcattgttttctttcaccaaaaacaatccctctttgattaagaaaaatatggtttacatccatagctaatcaatatgagaacacaaatctttttttataagaaacgataacgttacaattctagcatttcaaagcagaaaatatgttctgtcttaaaataaaataactagaattgcaaaagcttaagatcaaagagcttagcggcaagagcggatcaatctttatattatgataccattctaggcaactcttgttgagtttccgataaatggtgagcaatatagattaacatacgtattgcatgcccatattatgctttctaatttgagatgaagccgatacgagacaaaatctacgaataagcaatatatacatatttataacaaatcttcataaaactttatataagtatgcattacacatttcattggtgtaacctgaaaatgcaattcttagtcaaatttgataaaaataattaagagatacgatatacagataaattgttaatagttaatactgtcttttggaacctagctagctcctttccacaacgataaaagattccaaatcacattctatataattatgttgtcatatatgatatataaattatcataaggttgtgtcatattgtgggtattggatattactattcttcaatcgaatatgtaaaatctatgtcaaggaaatatcggaagggactcttggagtgacttgctatctaacataaaatctatatctcacccaccggtcgaatatttgtcttgattcaaaatttaatcttggacatacattaataatagcatatgcatggcctagattgcgatgtaaccatgctctacataataataatgataaaattttataaatcatttcaattacaaaatatacatttaaaatatatatagttgaatgatactttacctaatacgatattaagatgtattttctcttattgttcgaaggcatatccgaataaaattttggcatgcactgtcttttcctacggtgataagccttgatccgttagaaccctcagccgaaataaacttatcaaaaaaacaaaaacaataattcgtatgcatgggctaaaacatacaatattgtatcataatggaatgcacaataccgcacataatccaagaactttggttctatccaatcgaacggagaggaactataactccgatcaaagtacagttgaaattaaatagaaactcaaatagcttttgtctctatccaatattatcaaaaagttaatagaatcgaagtagtttgaccaagtcaactacaaacaaagcttttgttagttgttgttgtggccatcacttctacttctccaatgtcacaaacgacaacatcgaacccaatactttcactactctttcattgaatcttacatctatatatatggaccagcttcttcttcctcttcattattcaataatctctaataaacatgattttagttagttaacattcattattgttgttctaatcgctaataaatatttcaaatcatttaacgactactagcatgtaaacattaattacgatgatctgaggtaatggcgaaaacgacactggctttgttttatacacgaggcacagcaatgaaatagacatatccacaatta

SEQ ID NO: 8885 - DNA, 3000 bp, Unknown
  misc_feature (1)..( 3000): cDNA_ID_3043928_gDNA_ID_1971911_Annot_ID_177132 3000 nt of promoter + ATG
gactcttgctcgtacttgtcctgccaagttctgacctctgaggacagattctcttgctctctttcgtaggtttcaagctttagctttacttcttccaactctttcttttctttctccagcgcaatctctgattctctcctgagaatcatctcaccctcgtactttctttcaaactcctcagccttcaaacgcgtattatcaatttcattttcaacagtttccagttgaatctttaccttctctatcctatcccgttctatggcaagcaaggtttctgtttctttcctatgcctcaactctgcttcaagcttgtgctccaaggctttagcttgtagttgcaatttaccttgttcttccttgtaagactcaagcaactgttccatcatctctacatcttcctttttcatagcaagtgcatcttctgcttctttcctaagctttacttcttcattgtaatttccctccaactctactacctgggaatcaagctaccgttagagagatatatctgcaaaccaaacgttaaagcttaaacatagtcatgtctttggatagtggtgttacccgagaactacgaactagctgattgaatttttcatcagaaaaatggaagtcagctagttttccaatgatggaccgaaataaattcatcgcatcggtaatcctctcaggtggtaagatgggattcataagcacctacgttaccattgaaatgatcatattctcttaattaaacccgtaagtagaagcatatccaagagtgaaaaaaggcaagggcaaggcaaacctgaatcatacttttccgggttgtttctgtgatcttgctattcttataaacttcagctaaaacccttacggttttgatgaatctgtaatagtttgtttcatcaacataaacaagtggtaaatgttctgttttaggggatgcgttttcaagctcaattctgcatttgcgcaagaacagtctctcaaaagttgtaatatcgccgtgagattcatctgatggaagtggaggaagctcgtgaaaaagctctacgcataaacgagcgaataagacataggagttttccaccattgccatatcgaaaacgcaagacactagagactgcaacatatatacaaataccattagaaatagtctcataatatatttatcaacacaaaaagggacggagaaccttcaagatagaagcagatggaaatgattttattgtacgaacaatctcatccttgatcttctcgaagttgcgttgcgtcaaccaattgagtaaactacacgaattcaaaaaccaaaatgaatgaagaaataggtacagatatagtatgaaggagagtttgtgtaaataatattcaatgtagagcttatatagaactctaaaaacgaatccaaacttgcaatatctcttagttacaagatatacacaatttgcaacacaaagtagctaagcagagttccaaagctttttaccacttcgatttttccagcactcgcttctcctcgatcgaacatacaccgatgaaactccggcgagaatccatgagtataagatcgccggaactcttctgcttcttcttatgcaactctgattatctgcgcttcttgagaagctaaaaagttgactaaaacgtttaaacttcttcttgacatgcagagcaagtgtgacgtgtctttccttcattggattagtagtaattaaagttcggcccaccagaagatggaagtgtgactgaatgattcaatctgaattcaatagttaggcccatttaataggcccattgatatagtgggaaaccctagctataaattcgagaggctctcactcaaatcatttctctcttctttctcgagaaatcggcgaatctgagaactaagcatcaacaacaagaacaatgagagcgaaggtaacatcttcttcttcttcttcttcttcttcttcgattcaatattgttctttgtattagaacttattagcgttagtttcatcgataatacccattcatgtatggatacacatatacgtagagagagatagatgttacattctacaatgcaaatgttatatatatccttagtaaagtcgtacaagaagatctgaggattatgtttttgacattagaacaattgaaaatgataatcgattttgcatcccactgttaaatttgttgtactggaagccgtaaagagattctgaaaaaatgttggtaatctcgattggaaccatctctgtgccagaaaactcacttactactggtttatctaaactatagatagagatcttgttatataggttaaggttgttgaaatgaaaactctccatttatgtcgtgtttctttcatcatgtgtatcgtttgttatcctatacaaatgaatttgatactaacaaaattgtggataatattttgcagtggaagaagaagcgcatgaggagattaaagaggaagcgtcgaaagatgagacagcgatccaagtagactccaagttcctcccccaaataactatcggctctctgtgattctctttttagttttgtcttgaaactttttctttcttctagcaaaccttttttattttgattatggaagttttgaacattctgtgatgtatgtaaaacttgctcttgtgctcttatctatctaatcacagatcctttatctaatcactgttgtcaaaatgtgtgaagcttgtttttgtctaattgtcaagacagcaataatcttatgaagaagtattatgagtattaagaaaataattagcttaagctaatgaaacagttgtcaaaatgaattataaacaagaaccaaaatgattagtttaaactcagattctcgaaatgtttattaacatagggcaaaatacgtatattaaaaataagtgattgtgaaaacaaaggaccaatcaacacattctctgtaatttgcgataaaaagataatagacaaaagagacgacgaacacacttagaaattttgagctgagaggctgagaaaattagcaccatg

SEQ ID NO: 8886 - DNA, 3000 bp, Unknown
  misc_feature (1)..( 3000): cDNA_ID_3043940_gDNA_ID_1971911_Annot_ID_177129 3000 nt of promoter + ATG
cggatttcacccgtagtacaccattccatattaatatcgaatcaaacccgtcaattctatgatttcacctgtggtagtatttaattgtataattatattttaattgtcattctatgatttcactcctaattctatcgcaaattattatcaacccaaaccagacaattctaaaatattccgtagtacaccatcccatattaatatcgaatcaagcccgtcaattctaggatttcacccgtggtagtatttaattgtataattatattttaattatcattctaggatttcactcctaattctatcgcaaattcttatcaacccaaacagtcaattataaaatttcacccgtagtataatgtttaaatatttataatgtttaaatatttataatgtttaaatttcttataaaagaatcaaaatgtgttttaaaaaaattaaagttttaagtttttttttttaatattgttaattttgtttagtgtttaagattatataattatattatgattgttattatatgtttttttccatagcatactatcccatgttattatccactcaaacccgtcacaccatataaccccgtcccgtgaaattaaacacaaatttgtcattttattataaatttcaaatatttataaaattagaaacttcaaaaaagattaatattgacccaaacttcatcattgaattttgagtgttatatctaagatttctctcgcagtatatcgtcccgtattaatatcttttatattgtttaaatttcttgtaaaatttaatttataattttttaaactttttaaagtttcaattttttaaaataaataaccctagtaaacaaaccattttaattttggacacctcataaatcaagtttcatgctcattcgtaatcgaaatcattttggtcctttttatagtatggctcttgaccattgtccaatttttttaagcgatgtgggacattctaaaatcgtaattattatccacccaaacccgtcctaccatataacccagtcacgtgaaattaaacataattttgtcattttcttataaatttcaatattataaaatttggaacttaaaaaaatacaatatcgacccaaaattcatcattgaattttgattgttatatttaagattttttctgtaatatatcgtctcgtattaataaattttttatatatttataatgttaaatttcttgtaaaattcaatttataattcttaaaactttataagttttaaaattataaatatttaaagcattttttaaagataaactttataaaaaaatttaaaattataatatttaacttttgataaagttataatatttataattttttgagacattttaaagtttcaattctttaaaataaaaaatcccagtaaaatcggataactattttaattttggacgcctgataaatcaagcttcctgctcattcgtaatcagaatcattttggtccttttataatatgggtctgaaccattgtccaatttttctaagcgatgtgggacattgtacacatattatttcttcataggttgaataatatatgtccatttaaaaaaattagaattacatcatattcagaaaaaaatataatattttattaattatatatattttatataaattcaaaataaataaagtataagatcaaataaaattgaaagaagaattatatatttatgtttaaattaggtagaaatattttaggaaattagttaaggtaaataagaaatatggttagtttagagatattgtttatattaaatttggtaattaaatcattaattttcgtttttaattattagtttttaggtaacttttccaaaaattaatgttatctaagatcagaacagaattaaacatgttatccagaatccgaacagagttaaaccgggtaaaacccacccatttgaattaattgttgaattatggctcaaatcttcaacattatcttcaaaaatcccctccaaaaatgtatatatagataacggaaacaagattaatgtatcatcattcattccttgttgatttaattaaacagatgaacaaatgatatgtaataataaggtctcggtttacagtgaaagtgatttaatttagtatctttgttacttcgattattgaattgagcgtgtgtacttatgaagattaaatcgatgatgcatgggctcatgaagattaaaaaactcaatagacacttaaccagaattaatgatattggcccgatgagtattggcccattaaggcccattaagagagcgaaaaccctaaacgagaaacaagggatatactcagagcatcttccttggttactatataataagctttaggctgctagacgcctgcctccttgcacctcttttctttctctcgttctcatctttctctctaaggttagtcccttgtgtagatcctctcttcatcgattcaatttcatcttccttggtttgatttaggaattttgtcacgatttggtgtttagatgatggagtcttgctgttgatctatgtttatagcactttgtttccatggttctgttgtttcttaccgtttgttgtgcatcgatctggttttggtagatccctcgtagataataatctgaatatgtcaaagttttcttacaagtctgttgtgttttcagttttgattgatattgttatccatgtagtagtcgatcatccaaaaactggttcagtgtgattctccgatcatcgccgctgattttatatttatcatcatgtatagatttgcaggttttattttgttcgttgtgtgtttttgttctttgttaaatttaacctctatgcatttgatgtacatgtttttgtgttggtctcagtttctcttattctgtataagctaagctaaagtctccatggttagtgtctgtttagtattaaaatatttcaatttgctaattctttatgtttttgtgatgatattgcagagattttgtaggtgacaatcaaaagtttgacaaa

SEQ ID NO: 8887 - DNA, 3000 bp, Unknown
  misc_feature (1)..( 3000): cDNA_ID_3043958_gDNA_ID_1971911_Annot_ID_177124 3000 nt of promoter + ATG
taaacccctgaaaccctagtttcgttcgttgtatatttcttctcgctcagtaggtctttagggttttagtttcttctcctcaaaaaatggcgatgtatgttatctacgagtcttcttccggctatggtctcttcgaggttcacggactagatgagatcggacagaacactgaggcggttcggacttctgtctccgacctcagtcgctttggccgtgttgttcagctcacagcgtttcatccctttgagtctgctctcgatgctctcaaccaagtcaacgccgtctctgaaggtcagactcttcattactctcttcttattctttgttctgtatattcatgtgttgtgttgagtagcttgttcttgtatttagagctagagtagacacttcgatttaaaaccttatagttcaaatttcctggatatattgtagaaagagctttaatttatggttgattcttgtttttgtgttctgtttttgtttcattgttttggttttgtcattgatgcttttggaattggttttaatgtgatattggtaggtgttatgactgatgagcttagaagttttctggagttgaatcttcctaaggtcaaggagggaaagaaacccaagttcagtttaggattggctgagcctaaactcggttcacatatatttgaagctactaaaatcccatgccagagcaatgagtttgttcttgagcttctcagaggtgttcgccagcattttgataggtttatcaaggacttaaaggtgtgatctcctttctatgtgtttaaaatctttttgtctgtttgcttatctcatatggtttgtgttctcataaaaaatttctgtttatgtagcctggtgatcttgaaaaatctcagcttggattagctcacagctacagcagagccaaggtgaagttcaatgttaaccgagtggataacatggttattcaagctatcttcatgcttgacacgcttgataaggatatcaattcctttgccatgagagtcaggtttgttttgtgcttttccctttcagattgtgtgttttcctcgagaaaattggtagctgaactgtttataatgttattacagggaatggtattcgtggcacttccccgaactagtgaagatagtcaatgacaactatctttacgcccgtgtttcaaagatgattgatgacaagtcaaagttgactgaagatcacatccccatgcttactgaagtcttaggggatgaagataaggcaaaggaggtcatcgaagctggaaaagcatccatgggtaaaaattttgagctgacttttttggtagctttgagttaatgtgtgtttctgttaacttatgtcctgagacatttactctcttccctattggcaggctcggatttatcaccgcttgacttaatcaacgtacagacctttgctcagaaagttatggaccttgctgactacaggaagaagctctatgattatcttgtcactaagatgagcgacattgcccctaatttggctgctttgattggagaaatggtcggtgcccgtttgatttcacatgctggaagtctgactaaccttgctaaatgcccatcttccaccctccagattcttggagccgagaaggctcttttcaggtgcaatatctggcactatatttttaatgttcaccagtttccttttagtgctgcttgtgacatgaactgctgtggtatttcagggcacttaaaacacgtggaaacactcccaagtatggattgattttccattcttccttcattggccgagcatctgctaagaacaagggccgtatcgctcgttatcttgcaaacaagtgctctatagcatcccggattgattgttttgctggtaaaaatctgaaactccttgaagaagagttttggattatgaattctgttgtgaaagtgttaaattatgtgccctgatgtcctatgcagatggtgcaactactgcttttggtgagaagcttcgcgaacaagttgaggaaaggctagaattttatgacaaaggtgttgccccacgcaagaacgtggatgtaatgaaggaggtgatagagaatctaaagcaaggtatttcttgtagctgtttttttttggttgtaatcagagtcctctttatgatggcaaactcagtgtttttttatctgttcctcctttagaagaggaagggaaggagccagttgatgcctcggtgaagaaaagcaagaagaagaaggcaaagggtgaagaagaagaagaggtggtggcaatggaggaggacaagtcagagaaaaagaagaagaaagagaagaggaagatggagactgcagaggagaacgagaaatcagagaagaagaagacaaagaagagtaaagctggaggagaagaggagactgatgatggtcacagcaccaagaagaagaagaagaagtctaagagcgctgaatagaaagggatgcaacattaacaaaccctgtattgtattttttttttgagctaaattaatgtcgtctgtttttcgtagtgaacatcggagaatttttgttttggtctggaaacgattcaaggtttggcaatatcttaagtttgtttaggttttcactattttgacgtttgcaaccgtgaaggaggctcctccattttataaaatacaattaccaattccagtgctttgcaaatgtttcaataatagctaaactaactaccaaattggaaaactagcttaacaagtttgtgaaaatgaatttggagccatatgatttattattttacccaaatggagtaatagaagaagagcagctcgcgtttgaatggtcagttaacattaacaaaaggtaaaattgaatagatgttaaaacttgtgtaagtaaacaatagagctacctccttttgagaaggatagataaactcgtgaccaaccacattcccagtcccatattcttagtacaaataagaaattcacacccctcaaagaaatataacataatcaatcataggaaatatacttcgcata

SEQ ID NO: 8888 - DNA, 1730 bp, Unknown
  misc_feature (1)..( 1730): cDNA_ID_3043988_gDNA_ID_1971911_Annot_ID_177115 3000 nt of promoter + ATG
aagcttgtcttcttcaacaagggaggagccaacggaaagaccttgcgccttgtagaatgtaaagatcattccaccaccaagcagaaggatgtcacatttctcaagaagcgattcgataactccaatcttagatgagaccttggaacctcccacaatggcagcaaatggtctctttgggtttgaaaccgcaccaacaaggtagtccaactcctgcgaaatatataagataaccaaatgtgattcaattcaaactcataactcaattcaagtcaatggactcctccaaattgcagttgagaaacctattgaaccttgagtttagacctcttacatggaaagacaaagatgaacaagcaatcaatcaattatttcatgatcaaggatatagtggcggcacttgtggtgcttctaaattcctcaataatcaatttaagaaagaatcttgtatcaaaatgtcaccttttgcaaaaggaaaccagcaactgatggcttcaagaacttagtgactccctctgttgaagcatgggctctgtgagcagtcccgaacgcatcgttgacataaaggtcagctagagaagcaagcttcttagcaaaatcaggttcgttcttctcttcctccttgtaaaacctcacgttctcaagaagcaaaactccaccttcaggaagggaagccaccaaggtttccacttctggaccaatacaatcatcagctttcacgacctgcacatttcacaccccaaaaacctcaagagatttccacaacaagatgacagattcagatccgttgaaaatcagggtagtacctcaataccaaggagctctgataatctgggaacaagaggagccaagctgaactttggagtgacaccctttggccttccctgaaaattagagatgaaaatgtaaagacttttgtgtggatttgagttgattagagagatgggtaaactgtgaaccataccaaatgagtggagaggatgaccttagcaccattctcaatcaaaaacttgatggtgggaatggcggctctgattctagtgtcgtcagtgatattctggttgtcatcgagaggtacattgagatcagctctaacaaacaccttcttccccttcaaatctacagaattcagatctccaacactcttcttcgccatcgtaatcactcccctggcgccctttccgcgcacggagtggaccttggacgccacgtggaccgagaaacgagagtcaacgacggcggagaagccaaggcgacgtgcggagacagatgtggagggaatgtgtccaaaggaggcgcgggaggagcgtgtaacggcggcgccaccggtggatttgatgatcgaaagagctgcagttgcggcggtggaagccatgtgaagtcaacagatagtgagagtgaaagtgagggaataaggaagaagtgagaggattggatgatattactagtttatggattttgtcttatcgttgatgagaggttatcataattcttcgccttccctctgcttacaatcgttgcccacattcacaaagatcatgtcttttgatcgaaaagtttacttccatatatggaaaagacaactctaaaaataaatataatgaagttaaataactcatttgcaatatttaaatagctaaatgggctttactcggcccaatgaatttctgtcctttcgaatataaacgtcgtttattttattttggaaatcccggcgagaagcacctctaatg

SEQ ID NO: 8889 - DNA, 3000 bp, Unknown
  misc_feature (1)..( 3000): cDNA_ID_3043978_gDNA_ID_1971911_Annot_ID_177119 3000 nt of promoter + ATG
ttcttttctctctttttacagatttttagaaaccatgcatgattaatgttcttttaaaaagttgttgcatggttgtttttattattgcaaacgtagtagaaggaagaacagtgtcaagtctattagtgcatgcggttatatataatccaaatgataaatacggatatagtactgctttctaaagatgagttagtgaaattaatgaattttgggggaaataaacgccgtactatggtccattcgtacagaatgacccaccaactgactttatatttcttccatttacgtgtcataccaataataccaacacgacttttcttctaaaattaaatgcatgtatctgttctttgaaatgatgattttcttattaggtactgcatagagaacaccactatttgcttcatagttcatacaacgttttaaagtgaagtttagtttggtaaaagttgcatttacatactcaataatttaacagacgttgtgctacttgcgagtaatcactactggtcaattaatatataactcttccggagttactcaaatagtgtgtatagatatatagcaaattagcaatggtttaaatgcgaaagcgtgggctgccccaactgtccagccgtacgctccatgctacggacactttgctttcaacttcgacatttatgtttcttatttaataccatgagaattttggatatgagtttgtcctcacacatcaaataaaaatcatttagacaatcatacaaccaaatcttatctaactgaatcaatttgaatacttgatcctaaaacattgttagctcgaagtctctagttaagttccatcattgttccataaacacaatcttgaaatcaaacatttcaccacggtgatctctaaaagtagaccactagtttgtgcctcgctcaaggccagtgaaatatctgttagttatgtagtcaaaatttcagtcggactttgataataatagccaagagagattgtcaagccagaattttataatgaataactaaataatatgagaagatttagttgttcgttacagacagctctctgcactaacagttctatttaactgacttgaacaacgaagaagacagattcttaatgagttcttgggccttaattattagtaatcgattaaaaaaaaaatagaatttctactgtgaaaatttcaatttatgagtttagtatcatcgatttcatattggaacattcatatgtttgtcgagtgaaatttttaaaagaaaataagactccgaaatattgagatcactgatacaagaaattaaatgtcctcatcaagttaagagaaaccaagagaaaaacctagagattcaacaaagttttccaacctgacactgataggtcatgaattgggcttgtgggctttatattgtttaaagcctgttattcttagtattgctttctatttaagtttgttgtcttgcttggtaaacgtttatcgattaagaactcaagaatgtttatcttcttcatcatctcctttcttcttcctttccttctctgatttcttcagcatctcaacctatttcttctattatctcatctcctttctgttactaaaattgataagcaccattaatttatatgaacgtttacataataattataacatatatttatacttaaccttatggatgtgcacaattatcaatgttgtattcacagctcaaaaccctatttgaccattctttcgacaaaattggctatgcagaattgtttttaggtgtaaggttttagctttgttttttggatgtataaggaggctaattttttattttttttacggtatattataatttatgacattgtacggtttcatagtttattcacatacataattagtaataaaaaatgttttactaaaaatgatattcaaaccaaaacatctaaacgtttattttggaaatcggtcattttatactcgacctaaatttaagtggtcaattcatacaatatttttcttttcttatgtgctaatatattcaaattatatatccaaatttaccaaatcatacaagattatacattctagttcattctactgatgtagatgccacatttttgattattttgatgacgtagttaccacgctcttgacgatgtccgtgtcacgtcctcatcaccttatttttttttgtttcttcacctttttcttcttatattttttattttttgtcttctttatcactattgctcgaggaagctgtaaaaatattatgtgtttgatgcatgtaaaaagactagaaaaattattttcgatactaatgagtaataaccattatttaaatgaaagaacaaaaatctaatagagtttatagtcaattcatcaagtcattcagataaacattgtattattgttttcgttagaaaagtagtaacggcaagaatgtttttaaaacatggtcaaacctattaacttgtatttgacgtccttgtccgaatcataactctatcgcgaaatggtcgtttagtattagcaattggattgcatcagacgtatgtatctttgcgaatattttatacaaagtggaagaaaagaaacacgtatgtattttggtttcaaaatgagacaactggctgatgtcattgatatgtcatatacggttcgattaatcaactctatttaacccggttccaccaaatcagcagtttaaaattgaaattcggaaataacacttgatcacctaattcattagtttaatactaatgattaacaagtaaacaacgactaatgataaaacggccagggctttccgacacactttttttgttttattcatttattggataactaaatacaggaaaaagcttacccacatggcgacattatttatcaaaaaaaagtaattaggctgttaaattctaaagttaaaaccatataatatacatttatttatacgcataacaagaacaaaaatggctagttggtttactctggatccctcccgactctctcacatctttggtcgtcgacg

SEQ ID NO: 8890 - DNA, 3000 bp, Unknown
  misc_feature (1)..( 3000): cDNA_ID_3043974_gDNA_ID_1971911_Annot_ID_177120 3000 nt of promoter + ATG
tttttcgtaagtaaaacgcagagatgggcagtcagcaatgtaggactatttactgggagtaacagtaatcaatacatagctctttcggcaacgcaatttgcaaacacgtcagactcagagcttttccaatcagcgagactctctgcatcttctttaaggtattacggactggggctagaaaatggaggctatagtgtaacggttcagtttgctgagatacaaatacaaggttctaatacctggaaaagtcttggaaggcgaattttcgacatatatgtccaggtctctactattcttaccaatattaacttcgtcttctctgtgaattagttattttggttttgtgaactaggtccgtactctgtagtaactattttgaactagagagagaagatccttgataagctttggcatacaagagatcctttttctattagagtatctggtacaaggttgtagcacatatttcgttcaagtgggggtgaaaattagatgcatcgttttaaggctcaactcttcatgaacgatattctctactctcaaaaatggtttctgacctctgagttccttttgtttctcagggaaaacttgttgagaaggattttgacatgcaaaaagctgctaacggttctagtatccgagttattcaaagagtctataaagcaaatgtatcagaaaattaccttgaagttcatcttttctgggctggaaaagggacctgctgtattcctgctcaaggcacttatgggccattagtctcagctatcagtgcaactccaggtatacatacagcagaaactttcatgatcttcgtagagtccaatgtatcttctaactagcggcttttattctctgcagatttcatacctactgtaaaaaataagttgccctcgaaatccaagaaaaacattgttatcattgtaggggctattgtaggagcagggatgttatgtatattggtgattgctatcctcttattcatccgtaggaaaagaaaaagggcggctgatgaagaaggtaaatgaaaagtcttagctgtggcagttttattaaagtctaatcgttaacaactgtaaccttctaagtggtatttatcaaatatttctcaaatgcagtgctaaacagtctgcacataaggccctacacctttagttactcagaactcagaactgcaactcaagattttgatccttccaacaagcttggggagggaggatttggacctgtttttaaggtaagaccgtacacagaatgtgtaccaatattgggagtctagtgtactagaaagttatgtaaaattttacattatctatattctaaaaatattcattggtacagggaaaactgaacgacggaagagagatagccgtgaagcaattgtcagttgcatccaggcaaggaaagggtcaatttgttgcggagattgccactatatcagctgttcagcatcgcaaccttgtaaaattgtatggatgctgcattgagggaaatcagcgcatgcttgtatatgaatacctctcaaacaagagtctagatcaagctctattcggtaagtgcatgagatcttacatgtgttatccttgtaaaaaaaacaaatgctgttaccttacatgttgcgtgactgtggcagaggaaaagagtttgcagcttggttggtcacagcgtttcgagatatgcttgggagtagcaaaaggtttagcatatatgcatgaggagtcaaatccccgtatagtgcatagggatgtgaaggcaagcaatattcttctggactcggatctggtcccgaaactctcagattttgggttggccaaactatatgatgataagaagacccacataagtacccgagttgcagggacgatgtaaatatcctgaaaacctcacattggatgtggtttgtcaaatgggctaaaacttaccgttgttaaatgttatattgcagcggatatctgtcaccagagtacgtgatgcttggacatcttacggagaagacggatgtgtttgcctttggtatagtggccttggaaattgtcagcggaaggcctaactcctctccagaattagatgatgacaaacaataccttctcgaatgggtatatatctaacttttcctacaaacacatcctttttaattccaaatttggtgaataatttggtctttgcaggcatggagcctacaccaagagcagcgtgatatggaagtagtagatccggatctgacagaatttgacaaggaagaagtgaaacgtgtaataggagtagcgttcttgtgcacacaaacagatcatgcaatacgaccaactatgtcccgagtggtaggtatgttgaccggtgatgtggagataacggaagccaatgccaagccagggtacgtctctgagagaacatttgagaatgcaatgagcttcatgagtggttcaacgagctcgagctggatattgcctgaaactccaaaagattcttccaagtcccaagttgaagaacatggacgacgacattgaaacttgaaaacttgtggtttttctattttttgttcttacataaaaaaaaagaagtcaatatagaaatcgttgttggtaaataacacatatacatattcgtttgaccaaaattggatttgactgtttctcctgaaagttgtgtttggtcccatttttaacattaaaatcccttaaaaccatcattggcatttagtatcaaagtccaaaggtggtgatgcttcttgcactcgtaggcagcagccgccattgttgaaatctcccgttgacaacgcagcggaatctcggtttaagcgcgtccacttcacggcttgtggatgcatcgcgtgagacgcactgctccgcgtagttggttagaccattaattaaattcaaattaagccaaatgaaaagtatctcttcaaagtccaacataaacaccatttttgaaccaaattaaaaccttctccgtctagttttggcggctatcatcttcttctccgtttaattttagtttccgacg

SEQ ID NO: 8891 - DNA, 3000 bp, Unknown
  misc_feature (1)..( 3000): cDNA_ID_3043962_gDNA_ID_1971911_Annot_ID_177123 3000 nt of promoter + ATG
gtaacaaaaagataccctcacaaattatgttctccatgttgaatgtgcaaacatatggacagggctccaatgtcttattggaaaaaaattgttttaagactttcgctattgactggtgtctagattataacttttcgatcaactgcggaggcccagagataaggtctgttagtggagcactatttgaaaaggaggacgcggatcttggaccagcttcgtttgttgtgagtgctgcaaagagatgggcagccagtagtgtaggaaattttgctggcagtagcaacaatatatacatagctacttcactagcacaatttatcaacactatggactcagagctttttcagtcagcacgactttctgcatcttccctaaggtattatgggttggggctagaaaatggagggtacaccgtaacacttcagtttgctgaagtacaaattgaaggttctaactcttggaaaggtattggaagacgacgttttaacatttatgtccaggtctgcaccacttgatcgagctttccggttcacaaatgttactttttggttctgatgaattctaagatctagctccatttttccagggaagacttgttgaaaaggattttgatatacgcagaacagctggtggctcttcggttcgagcagttcagagagaatataaaacaaatgtatcagaaaatcatctcgaagtccatcttttctgggctggaaaaggaacatgttgtattcctatccaaggggcttatgggccattaatagcggccgtcagtgcgacaccaggtaacacaaacggttgatatattttttttcctctgattttcactatctcccgatactagttagtgccgtgtcacatattcttgttcagatttcacaccaactgtggctaataggccaccatcaaagggaaagagcaggactggtactattgtgggtgtcattgttggtgttggacttttgagcatctttgcgggtgtggttatcctcgtcattcgaaaaagaagaaaaccgtacacagatgatgaaggtacagatgtaataagaacataaacaagcccttgagctgaataactttagctctctgatcaaaattaaagttgactatcatctgttaaattggttgattttaagtagtgaattttttatggcagagatacttagtatggacgtaaagccttacacctttacttactcggaacttaagaatgcaacacaagattttgatctctcaaacaagcttggagagggagggtttggggctgtttataaggtaagtcccttactgaatcgaacaaaatagctgtatatttttctgagatactaggaaagaagggtacatgtaataccttttaatacgttttgttttgaataacacgttcaacagggaaacctcaatgatggaagagaggtggcggtgaagcagttgtcaattggatcacggcaagggaagggacaatttgttgcagaaattattgcaatttcttcagttctacatcgcaacctagtaaaactttacgggtgctgctttgaaggagatcatcgtttgctcgtatatgagtatctccctaatggaagtctcgatcaggcattatttggtaatgaacagaaacatgacttacctatctctgcttctgccaagctaaagtaatcattatgccattgggttggatgttacaggggataagagtttgcatcttgattggtcaacccgttatgagatatgtctgggagtagccagaggtctagtttatctccacgaggaagcaagtgttcgcataatacacagagatgtgaaggccagcaacattttactggactctgaactggtcccaaaagtttctgattttgggcttgcaaaactatatgatgacaagaaaacccatattagtaccagagtggcagggacgatgtaagcaaaatccatagaccctgacattttgtttgcaacacaattatggctttatagctcatgttagttgtatcaatgcagtgggtatcttgcgccagagtatgccatgcgtggacatctaacagagaaaacagatgtgtatgcctttggtgttgtggctcttgagctagtgagtggaaggaaaaactctgatgagaacctggaagagggaaaaaaatatcttcttgaatgggtacgtctatatttgtcatataggcgaagttgaagatggtgtgataaatgacaaaagccgataatccttttgtatttcttgtatacaggcatggaatctacacgagaaaaaccgtgacgttgaactaatagatgatgagctaagtgaatacaacatggaagaagtgaaacgcatgattggcattgctctgctttgcactcagtcatcttatgcgttgagaccaccaatgtcacgagtagtagccatgttgtcaggagatgctgaggtcaatgatgccacctctaagccaggctacctaaccgactgtacatttgatgacaccacaagctcctcattcagcaactttcaaacgaaagacactagcttctcgacgagctttatagcgcctggcccggagatgccacttagagacggcgaatcgaagccaatggttggattcaagatcaaggagggaagatgaagattgtcccctctataatttgatatgcttgtatatggaagttgacaattttcttctatataaggatgtggagaaacagatttcactttcattcaataataatattttagttgacaatttttcaatttttgtaacaaacttttgatatcttgcaaggatgaccaaaaaaaaaaaaaaaaaaaaaaaaaaagaaagttaacctgttgtgatgggccgggcattttataagctagtacaactaacacaccgttaaatgggcctggcccattgaatttttcaagagcagcgccatcaacagatgcgcttattaaacccctgaaaccctagtttcgttcgttgtatatttcttctcgctcagtaggtctttagggttttagtttcttctcctcaaaaa

SEQ ID NO: 8892 - DNA, 3000 bp, Unknown
  misc_feature (1)..( 3000): cDNA_ID_3043966_gDNA_ID_1971911_Annot_ID_177122 3000 nt of promoter + ATG
atgatggaagagtggtcgcggtgaagctattgtcggtgggatcccgtcaagggaagggacaatttgttgcagaaattgtagcaatttcttcagttctacatcgcaacctagtaaaactttatgggtgctgctttgaaggagagcatcgtatgctcgtatatgagtatctacctaatggaagtcttgatcaggcgctatttggtaatgaacagaaacatgacttatctatcactgcttctgcgaaccttaagtactcatttatgcccttggtttgcatgtttcaggggataagaccttacatcttgattggtcaacccgttatgagatatgcctgggagtagccagaggtctagtttatctccacgaggaggcgagtgttcgcatagtacacagggatgtgaaggccagtaacattttgctcgactctagactggtcccacaaatttctgattttggacttgcaaaactgtacgatgacaagaaaacccacataagtacccgagtggcagggacgatgtaagtaatccacaaactctgacctttggtttgcatcacaattacaaattagtgagacatgttagtgatgttgctgtatcaatgcagtgggtatcttgcgccagagtatgccatgcgtggacatctaacagagaaaacggatgtgtatgcctttggtgttgtggctcttgagctagtgagtggaaggccaaactctgatgagaatctggaggaggaaaaaaaatatcttcttgaatgggtacgttcttgcttattatgattgattgtaaatggatggagtttagaatggcaaaagccaataatacttgtgtattttctgtatacaggcatggaatttacacgagaaaagccgtgacattgaactaatcgatgataagctgactgatttcaacatggaagaagcaaagcgcatgattggcattgctctgttgtgcacacagacatctcatgccttgaggccaccaatgtcacgagtggtggccatgctttcaggagatgttgagatcggtgatgtcacttctaagccaggctacgtaagcgactggagatttgatgacaccacaggctcatctctcagcggatttcaaatcaaagacacaacaggctattccatgagccttgtggcgcctggctccgagatatcacccagagacagcgactttaagccaatgcttggatccaagatcaatgagggaagatgacaatgtatcatctacgatttatggctatagagatgtttgtatatatgtaagatgacaattttgtacaaaaaaaaaaagggattgacaattttcatctttgattgggaaaaacagatttcactttgattcgataataataatttagtagttagaagttgaaattgatctttaaccgttagtgatgggcctcgcattattcatgtacttagccaaatcaatgcagtctctgaaggtgactgactctgtagtatattcatgtgttgtaatgttttatttgggagtcaaaaatgaaataatctctgtactactttcatgagtgggggttccaggagctctaactggattttcaaagctgcaattcaaatatgtatgcttatgtcatgaagatgtagacgtcacatgagcaaagatcgtgtaaataagtgggggagaaaaccagagctaagcatattggatactttacagtcctagtgtaaatgaagttttgtattgaaagtctattagtgttgaatcaggacgaaacacttgaagctcctctccaaattatgatcagaaacagaaacatatcagttcaggtcttcaaatgatctatatatgtacctctaactcaaaagatcatagcattgctccagcatcagtttctcttgtgcggccctccatcgatctgctaatggaagatattaggttattacacactagtttaatacacgatttatcatgtcacgtttgtcctcaaaacctaccgtgggagaaacgtaattaactattcactgttgaaatgatagcatcagtgactgcttctgcattcttaagcttattccagtttccaagcggttccactgaggatcccaagccggatcagagctcaagaaatctccaaatgatgttgagatacaacaaaaagggaatcaagaaaagacctcaacgtttagccatgcatgcatggacgactctcattacggtacgtttaactaatcgaacattgcttgtatatcgaaactcttaactatgcgtttacttaaaataaaaataaaatacttctttgattcaataaaaatattttagtagctctaagttggacttggagtggatctctaaccggtcgtgatggggctcgcactattcatgtcgttttaagtctttaaccaaatcaaccggtgcagtctctaaaggtgattgactcttccgtagcaacttcttccttccttgatatgtaatcatgtgttatgtcttggaattcaaaaggaaataatgattaagatcactttcatgagtgggttccacgagcactaaatggatattggcatatctaaaggagacttaccaaataatccttaagtctcaagtcccctttttatcaaaaaagaagaaaaaaatctcaagtggttgaaaatggacgacgacttgaaactcgaagtttcgtttatagtcaatcttacattgttgatcagttacactaattctcttggctgtgtgtcaacaagtgggaagatttcatagtaagtcttctctcatagtactagtaattaagtcttctctctgctatagagtgtggagactaaaaaaagaagaagacaacattgtttttatattattatgtgaagtagtgtagtggtgaagaaggaagaattttccaactctacgaaccatagcaatcatagcctgatagccattaacgtctctatacagagaaaacagagagcccattcgctgatcggcaaatctctttataaacacactcatagtggtcttgtttttctgaaccaaagttatatctgttgaa

SEQ ID NO: 8893 - DNA, 3000 bp, Unknown
  misc_feature (1)..( 3000): cDNA_ID_1989267_gDNA_ID_1971919_Annot_ID_58534 3000 nt of promoter + ATG
cattggtctatgttaatgacataatcatcacatgaaacaatttggatgcatttgaaaatattttacaaaatctagctatcagttttcacttaaagacttgggtgagtaaatattgaagaataacttacaaattgattctatcaatcacaaatcgcaaacctgaatgctttcggttgaacaaatctcgtgcagttactagtgttcctcctctaccaaaatgaccaagatgatatagcatcctacgatatgaactaagaaacccagtcttggtgggatatccgaaatcaacaagatagtacttcccactaggcggatgtgggaaaaaggttcattcctcgcacaatgattcaaaacttttgtatcatgtgctctacaagatatactgacatatgcatatatgaatttcatatcgaagttacatatagcaagaacattcattatatgttctatctttctatatttatatttttctacagattgacttagacggcgaaccgggacataagttccatcaagtgctccaacacaatctctaaaaacaggccaatatcaatcatcattcttctaaacagggtttactctcgtaaattcaccttcttgtggctttagtgtatccactacaaactttaaaagagcactcaaaacatcatcaatcttttttttttttaccgtattcaatgaccgttgatatcttgtaactatatctcaaacagttttatcctgaccaaccacctcgaaaagtattagtgatttctacctatatagtgaagaagaccgtaagtattagttccaaacatttagacccattatatagaaacagacatagaatttggaaattttgaataaaccgatcaagctgagagtaactaagagaacacaaataaataagaaactcaaaatatttaagagatttcagtcagtgaataacgaaagtacctcggagtagagattcaacgttgtattagaagtaaccaacgacgggagatctagttgagctcaagtcaccggataatatttcgcaagattgcggcggcggagagagattggtttcaaagagtttgagatcgatgagtgtaagagagaaatgatgaaaaagaagtagaagaaatagagttaggtttgtttgtagtttctcaaacataataagggtataattgtcatttatcatatataatacaacttttaagcgttgaccgcagcattatgccgcacttacttgcatctgccgctgttgcagcaacctagataatcaaacgaacatcttattaaaaaaaaacagaagctgaaagcccaagcttatttaaagatgggccaataggggcctgcataaagttccaattttatttagaaaatatctatttaacatcatttatgaataaagtgtcctccgatgctatttgggtttggttaaagatggattttggaggttttccaaatgatgtcagattttgaagatgaacaatgaaataaatatatctaaagcttatacatctaggtctcttacccaacggcgatgaaataaagaatacatgtactaaaacgacgcatgcaaaataatacctgaaattttctttctacgttggaactcattgcaaaagatgaggaatattgcatagccatggattggatagagccataaagaatcggtacacattgcttttcatattttaatatcgttaaggcgtaatgtaataagtattagaaatggatttttaaaagtatttagatagttcgggtttaaattttattttattgctgattggactttgttttacaattatagagaaataattttgtgttaaattatagtattatacgacattcacacaattacatttacattaacatgtaccacgtctattttataatattgctccaaaacgaaagagtggtcttcacgacgagcgaggtttaaaatttgtagtcgtgcattgcaaaaagctgcgaaaaccgtgtgaactctcaaccaaaccaaatatgatatgaagaaattggttcttgtccattcggtggttagtgtgcatgcatgtcggtgaattttatatgttttccatttacgaccttttctctttatatcatatagatttttaggggaaaaaaaaatcatatagatttttaaaaaatcatgttcccaattaagacataatgtttagtagccaaattgagaaccaaccttttttctgtttattaaataatttaagtggatggattttacacatatattttaatgtcttacataaataaaatatcatgttattttttttgataatatcatgttttattgataaaatccatacatacttgatacttgcaaaaaatatcatgcacaaatttatctctataaatggttatctaccttttttttttttttttttttgaacacaatttacctaataatcttaataaatataagagaaatgtaacgcatacttttgttggacattgtttttggtcgagtctgattggttttttgttcagatctatcggatttatgtatttaagatctaataaacaaattataaaaaatttgattcgatttggttatcgattttattaataatgttaatataatccgacttactttggttagaaaaattaattcaaaagtaacaacaaaaaaaaattggataacaaaaccatctaaaatcctgctaattaattcacatctaataaccgaatccgaacctaaatgaccaaaccatttgtgtaaaaatctcaagcctagtccctatatttcaatagatttttttcttttttttttggtcaagatcaatagatttttttcatcaattcaatttattgcaaatttgcaataatagttggtaaatactataaatgtaaatggtcacgggataacaaaagagcaataataatataataattgcataagacgagtcaacatgaccaagaaacattgaagggttcgtaacttcgtatcatcttcctcctcctcctttgataaacaccaaaaaaaggcagagactttcgaaatcaagaaca

SEQ ID NO: 8894 - DNA, 3000 bp, Unknown
  misc_feature (1)..( 3000): cDNA_ID_1989266_gDNA_ID_1971919_Annot_ID_58535 3000 nt of promoter + ATG
atccctatcactagctcactgctataatcgtattgtcgccactacaatcgtattgccgccactaccaccgtcatttttaccgttatcaccactataatcgttatcatcatcaccattgttaccgtcaatcccaccaccatcgctactgtctatgtcacagcaacagtttaccacgcttgcttgggttcctaatattgtatctcttagggtatagttttttaattgtgatcatatcggtttaactcggtcatttggatcgtcaatattttatctcttacgattatcgtagctattatttcaacttaaattactatcccaccaccactaccaccactattactttatttaatttaaaatattttgttctaaactaaaattaaaactgaattacgaataatttatgaaaatagtatagtacaacattttatttctatacatcataaatagtacaatataaatttacttacaaacattatttactattttataaatacaaatccgattataaaaattcaaactatgttgtatgtagaaaaaaacataaatttttatcttataaatttcagaattagaatctattttttggaaaagatatataacaaaaacataaaaataggtgaaaactaaatgaagagttactaaatcatctctcaccaactattctacaccaaaattgtctttttacaacccttatatgctactttcttattttatatgtatataatgctatattcttaattaagttatcaaatatggctagttttgcaaatgaccctaaaaagtatcactttctgtgaaaaaaaaaaaaaagagtcataagtacatttaacttttttcctaagtatgtagtcatttgaaccttctgaactcagggcctgactgctttaaatgtagcgggtgcgggtgcggttgcgggagtttgcggaaacgggtggttgctgtttcaagcgtttcatgcgttttgaacgactggttgagcgtttgataatgaatgagtttgcgggagttttatgactggtaaaccagcgagtatgatagttattaaataaaaaataccaaaataaatataatatattattattaaaagaaataaaaatataatatattatgataaattgataatattagaaaaaattgattttctgaccaaataaaatacaatatattatctcaaaaattgataaaaaaaaaataaaaatataatatatcatctcgtctgacagaggaaacaaatcgaacatgtattcaatcaaaaactcaaaagaatacaaaaaaaaaaaaaaaacgatgccatgaaatactcaatgaattacactagctaatgaatgaataaaagaagagatgatacttacgttcaattctttattttgattttcatcagtttgggtggatgccataattgagagaatatggttacaatatattgattagagttttctaataaaaataagatatataaaagattagattattttaattgtagtgattagggtttgagtgaaagctataattattttaattaattaagaaaaaaagaatttttttttaactaatcgctactgctcgcaaccgcaaacgcttgcagaaaaaagtttttaactaccgatctcaaacggttcaaaacgatatttaacagtttttataatttgtatcaatcgctaacaactgagggcctgactggtttaaacgcagcgggtgcagttgcggttgcgggagtttgcggaaacggacggttgtggtttcaagcgttatcaagtgttttgaacgactggttaagcgtttggtaatgagtgcgtttgcgggaattttatgactggtaaaccagcgggtgcgataataattaaataaaaaataaccaagataaatataatatattactattaaaagaaaaatacaatatattattatgataaatataatatattactattaaaagaaaaatacaatatataaattgataatatttgaaaaattaaacatgcttaataattaaaaccataaataaaactgaaaattcaaaaataaataaattttataagaaaaagcttaatactttatgcatttggtacatcaccaaaaattgcatcaagtagtgtgataaactgtaaataacgttgaactcgcggattttccggattgcctctttacatatgataaagattcttcaagatatccaaacgatttttaacacatctccaactcaaatttttcccaaacgttaatattcttaagaatattttctttttgaacatcacttagaaatctgattttggggtctttggattcttccgtttatttctccacaataacccgttgaagtaacgcaaatgtggtctcgtctgaccaaatgattttctaatcgagaaaacaaatcaaaaacatgtattcaatgaaaaaactcaaaaaaaaaaaaaaaacaacgatgccatgaaatattacgagaattacactagcaaatgaatggatgaaaggatagatcatacttacgtttgattcttgattttgactttgattttcgtcagtttgggtgaatgccataattgagagaatagggtttcattgattagggttttctgataagaataagtatagggtttgggtggaagacataattattttaattaattaattaattttttttaacctaaccgctaccgcccacaaacgcaaacgcttgcggtaaggagcttttgaaatctggcaatttcaagcggtccaaaacggtatctagcaatttctatgattgatggcaaccgctaataaccgctaccacccacaaacgcagcgtttgcgggcggcagagggaaaaccaatcaaaccctgatactatccgcaaacgcaaaattctgtgcatcagcaaaacccatttccaattaaattataaatattattaaatatcaagtctttgcgtctgaaattgcacatatccaacaaatgttaagttcttcagtttccttcaaaattgggttttcttgagaaagcattacagacacagtaatg

SEQ ID NO: 8895 - DNA, 3000 bp, Unknown
  misc_feature (1)..( 3000): cDNA_ID_1692104_gDNA_ID_1971919_Annot_ID_58537 3000 nt of promoter + ATG
tgatttcgtcggctctaggtacactctttatccatttaatccgggcatgtaccttccccactacgtaactattcactgtcacacctaaaggtgttaacataataacaaagatacacaagtttgcacgcgttaattaacttgtctctatgcaaattttgcataatggaatatacgtgtaataccatgtaaatatacgcgtgtaaaagcaaaacgcatgaatcgtatgatgtgtgttaacaaatttggaaagtttttgctcttttgctgccaccaaatcttcgtattatattttggacattaccattttaacgagatggtcattgccattgggagccatgcggactctagttcgctggcatgttcatatccttccacatcgtcttctactcgtggaagaagcacacacaactacacctttcatcttcaaacacttgtcgtcattaacagtttaacaccataatgttaaactcggtttagcattttggtgtaattctacctctttaaccatacatactaaagacgcagagaagttcatatggtagttaatcgtaaatagctaaacttttaattggggttaacatattatttaacacttaacatttaactattgatctctcattttttttttattaaccaaaataaattcattttagaaccaaacgtttcaaaaactcgtaatgttttctcattaaatcttatctatagctcacacaaagaaaaactacggacatgcatgcacccaattatatacatggattattatttttagtgttataatatgatacaaaataaaaaacatttggatagccgataggcgatagccactataaatataccaaagaggttggattatacatatagccgtaataccaaagagagtatcagatagaaatagttctaatattttgtacaactcacagaaattgcatgagtttcgaacatggcagtcttccgaagtacactggttctgttactaatcatcgtctgtctcaccacttatgaggtttataatatttttggtctttatagttccccaagaacacctagcaatattatactcaattcatgtttatatgataatgactgatcattctcttcagcttcacgtccacgctgctgatggtgcaaaggtcggtgaaggcgtagtgaaaatcggtatgtaaccctaacttatatataacacgttggtatataacttaatatttctgatgggtgcactctcttcccaacttatatatatctttgttatggagaatgtctcaagcttttaatgagatgttatatctcggagaaggaaactatgaactaaaagctttggattcctttgcaacaaatataaacttttgatgggtttaaacggattaaattagttacatgtgtttgatgaatgtatgtatgattgtagattgtggtgggagatgcaaagatagatgcagcaaatcttcgagaacgaagctatgcttgagagcgtgcaacagctgttgttcccgctgcaactgtgtgccacctggtacttctggaaacacccacctttgtccttgctacgcctccattaccactcacggtggccgcctcaagtgcccttaaaatttcttctgtgtctgtttctgtttctacttctatttcgaatatatgtacatgtgtgtgtacgtgtgtatgtatacaagtactgctatgttttggaggacaaaagtatatgtatgagaagctataaactaattagaagttgatggttatgcgtattatcaaaccgtgttacttctgaacaaccaatttcggtttgttccaagtttggcaaccctaaaataaaaattcaaaatgattggagactactcgttaatagacattgaaaacgatgaaatctcgttacgtttttatattttttgaactgtaatattattatgcagaagcggttttgtaatgggccgacaaaaaaaaagtggttttgtaatggatatgattcggatctattctggaaatggtctcaaaaagtagagttgagatctcaatacgaaaatgaaccctttcgtttgatttatcaaagccttttattttgaaaacgttaaatcctcactaggatctctctttatattaatggttaaaaacatatgcatgttttgtgtttttgcatcttctttttcatagacaaaagcaagatgagtcttagaaggacatcaatgtcatagacatggctttagtatcttttgagtgtgctttaaatgatgatgatttaccctgaacctgaaattttacctattaattaatttaagtgtgcgttaaaccataaaccatatactctgaacctgaaattggttctaaagcacaacctaaacttgagattggagaatgctttaaaaggaaaaaaaaatcaaaggaaaccattaatgagccatcaaaaaatattcactaatatgacaagatgcattgtttatttttcttttcagaatcctcagaaactaccactaaactcctcaaggaacaaaaccatatcatgaattaggctggcaatttaactctgagacgtctttcttgtatagagaataaaacatacgcgtgtaaaagaaaacgcgtgaatcgaatgatgagtgttaacgttcgatcgagatgccaccaaatcttttcattaaaatgaattgtggaggacataccacttttaacgaggtcatttccactgggtgacatgtggactctactttgggtggcatgttcatatctttccacatcaccatgtaaacgtgaaaacacccaccacactcacttacatctcaaacacatgtcttcattatcgtacgtagctccaaaaaaaaaaatgaaaactaggtttagtgattctatttcgcaatgtataatatacaacttgtaaaaataaaatatttgaataagcattataaataaacccaaagaggtgttagatttatatacttaattgtagctactaaatagagaatcagagagaatagttttatatcttgcacgaaactgcatgctttttgagacatg

SEQ ID NO: 8896 - DNA, 3000 bp, Unknown
  misc_feature (1)..( 3000): cDNA_ID_1989265_gDNA_ID_1971919_Annot_ID_177170 3000 nt of promoter + ATG
tatcaattacagcagacgcaatgatataattgtgatgattaggatcttgggctgttgcgaaaactagcataccgccgtatacggtcttaagaaaagtggcatccacaataacaactttcctcataactttgaacccttcaatgcaagcacccaaagcaacgaataagtacttgaacttttgttgtgcatccacttccacatatgatattgtcccgggattcacctcctttaatacgtacagataagagtacaagtcggtgtagcttttttcaggactaccacgcacatcattaacgtgttgtcttttccctctccatgcggtagcatacgagcaatgcaaacccattcttccccgaacaatactcattatgcttttaggtggtggagtttgaaactcacctggataatcctcatgcaaaatatacgcgattaatcgtggtgtgctggtatgtttacaattgcctgagttcttattagaccgcttgcatgtgtgcatcttcctgtgaactttaacactaaaacaatctgaactctttacttttgcacatcgtaaatactattgacaacctgttgttttatattgccgacatcgtaacatgagtcgctttggatctgacgctatagttgcggtcgcaaaacaatacttatttgcagctctgttaaccaaatcttgcacggcctccttagaaacaaattcttggtgcaattcaatccccgttccatcttcccattccgtaacactctgacttttctcgctactctgacttccttcaccaacacatgaaagctcataatactcaattctaccatcaacaccattatcttcagcaacatccatccggctatccacatgctccctatcttcaataactacattctccatagcctcttcaaaaacccggttatccgcattctcaatagcctcttctacactattagcctcttcaataatcggttcatcattcacacaattacctcctgcagtttctcctctaaaaatcgtcactactccaccattctccatatcaaatgcattcaactcctcagaattaataccaactgaacttcttccctctacccttgaattttgttccaccctctcagattctttatttactacctccacgttcaaagttggtctaattcctttagcattcactaccgttagataacctaaaaagtcatcatcatctacaatagatgtatctctctgagatgtgcatagaatataactcaatttcaccttccttgaggtttcatctattccaatcttcttgcatatcttttctactaacatagagtatgttacctttaacgttctcaacaatacaccgcttaaagaattgtttgaaatccactcatgctcttttgaataatacccattgtcaaattgtatgaatgtgtgcttgttcttcatcgtctcctgtaattacaaataaattataaaaacacaattacgtaatcattcagatttagacataattgtacctatattataactcactaataccattcacctgtcctaattataaaacactattcttttttttttactaaatcactaatgacataattataaaacactattcttttttttctgtgtggagtagtgactattgaaaacaataattaatatacaattaacgggtttaaatcaatattaatatattatgatatattacaggtaaaattctaaaattaacaattaatatacaattatacaatcttaaacaataaacaaaataaataatattaactaaacaaatacaattaaaatttcagttataaaaatattgtaccatatatttaaattaaacaaaataatacgatatactatagatcatccttataaaaaaatcaattttcttatgaatgtacaactcaatgatgtaacattatgaaaaacaataattaacgagtctactaaattaaaaaataattttgactaatttttgatcatgtttaattctacaaacaccaatatttgaacaatcaaaacccattattaataatctgcacatgaatcgttgaccatatatacacacataataatcaatgtgcatataaagaataaagtaaatgtatgtattcaataatttaaaaacctggaacacagaattcatagtttctactagtttttcagtgtttaaattaaatgatgttgataaaacattttagttaattttctgaaacaacttctttaaaaatagagaaacctccagcataaatttagtttgaataaatttaaattttatgattttatttactccatttgtgtttgacgaacagtccaagtctagtataacacagactgatatataatttggttatctacaacttataatatgcatctactttgaagtaattaatcatatgtcaacacatactctctccatattattttaaatgatattttagagaaaaaatttagtttcatttaaagtgattttttttaatttttaaatgtatataatattttttgaccaataatattttatgatatattttaattattgattgaattagttataattaataatactttatatgaaggagataaaattaaatgaaaattttgtaatttctaaataaatgcgcacaaacaataaatttgtcaaaaaacaaacattggggaaaatggtacccacacccaccataagagagtaaatgggtcggatccaaaggacagtctcgtaactgacaaattcacgccacgtcataccaacaaactgttgctgatccaaacacacgccgtcatttagcccggaagcgcgtgacatttcacgcgccttctctctatctcacccaatcagatcgttttaatggttgtttgtttaatcgatcttcttcttcgtcaagtatctcaaaatcaaaaacaagtttgcttcattcatacttcaaattctctcttcacattctccactctctgcttatgttaacgtagagagagacggcgacgtagaaggagtaggaggaggaggcttcgtcgacaatgcgaga

SEQ ID NO: 8897 - DNA, 3000 bp, Unknown
  misc_feature (1)..( 3000): cDNA_ID_3085127_gDNA_ID_1971919_Annot_ID_177169 3000 nt of promoter + ATG
tgacctgcaaatttaggctcccactgttcttctccatcaggtttatcctccatctgtatgtattgtaaggagggtgcagcaaaattttgagttttcaaaggctcttgtatttgttgactggaattcaacagcttcatctcacaagatacgcctataagatttaaacaacaagagtattctgagtagcaagtacccagaatatgttctttaactcagctaattataacacattacctgaaaatctgtgacttcgagctcttctttttgcatcagtttgcgatgttttccccgacttaccactaagaagagaagacttcccacgtgacctttttgaagtagctccatgaaccttttcaattttctgatgcttggtcgtggaatgaagaaacacagatgcagtctctttgtgagattcttcagcaccatcctcattgtgcctatgactatctttgtgtgattcttcagcaccatcctcattgtgcttatgattatctttgtgtgattcttcattttcatccccatcatgccccatgtcaacatattcatccccttgagtatcatgagaatcaatcgaatcatcttcattagattctgtatcaaatggctgatgatgcccatcattctctttcaacgattgaccaccttttacaagagaagcctgatactccacttcatacttcttcagctcatcacgtccagcttcattgtaaaaaccaacccccttccaatccgaacccttcaaaggattccgaagcgatacatcctttttcacttcagacactgacctctcctcaacaacagatttatcctctacatcatcctcattataatcttcatcccttcttctatcatccttatcccaatctctcgaatctcttccatgtaacactgaaccatgaccaaacttaagtattttcaaaggatcagttcttgacacattcgtaagaaaatcaccttcagctgtatcaattcctgcaacataaaacgtaaaacaacgcatcagcttctttatcctattccaaccatcaatttctcgaatccaattcctatcagctaaacattcatactcaaatcaaggatctagctcgagagaaatcgaacactgacctttatcatctttgccgaaattagtataaccagagaaataatagtaagctgagacacaaacaacgagcacaacacaaagaacaaacaccaaagagccaacaccacaacgacgattcctatctaatcgagtagatcgccgccatcgactagctttcccgtgctgagttacaactccgaaattactaccaccgccgttacggatcccgatcgctacgtgatctgacgaagctccaccgttgacataaggattgtaaccgcttcgacctcccaaaaacctctctgttcctgattgtctatactgagccattctcgcattgtcgacgaagcctcctcctcctactccttctacgtcgccgtctctctctacgttaacataagcagagagtggagaatgtgaagagagaatttgaagtatgaatgaagcaaacttgtttttgattttgagatacttgacgaagaagaagatcgattaaacaaacaaccattaaaacgatctgattgggtgagatagagagaaggcgcgtgaaatgtcacgcgcttccgggctaaatgacggcgtgtgtttggatcagcaacagtttgttggtatgacgtggcgtgaatttgtcagttacgagactgtcctttggatccgacccatttactctcttatggtgggtgtgggtaccattttccccaatgtttgttttttgacaaatttattgtttgtgcgcatttatttagaaattacaaaattttcatttaattttatctccttcatataaagtattattaattataactaattcaatcaataattaaaatatatcataaaatattattggtcaaaaaatattatatacatttaaaaattaaaaaaaatcactttaaatgaaactaaattttttctctaaaatatcatttaaaataatatggagagagtatgtgttgacatatgattaattacttcaaagtagatgcatattataagttgtagataaccaaattatatatcagtctgtgttatactagacttggactgttcgtcaaacacaaatggagtaaataaaatcataaaatttaaatttattcaaactaaatttatgctggaggtttctctatttttaaagaagttgtttcagaaaattaactaaaatgttttatcaacatcatttaatttaaacactgaaaaactagtagaaactatgaattctgtgttccaggtttttaaattattgaatacatacatttactttattctttatatgcacattgattattatgtgtgtatatatggtcaacgattcatgtgcagattattaataatgggttttgattgttcaaatattggtgtttgtagaattaaacatgatcaaaaattagtcaaaattattttttaatttagtagactcgttaattattgtttttcataatgttacatcattgagttgtacattcataagaaaattgatttttttataaggatgatctatagtatatcgtattattttgtttaatttaaatatatggtacaatatttttataactgaaattttaattgtatttgtttagttaatattatttattttgtttattgtttaagattgtataattgtatattaattgttaattttagaattttacctgtaatatatcataatatattaatattgatttaaacccgttaattgtatattaattattgttttcaatagtcactactccacacagaaaaaaaagaatagtgttttataattatgtcattagtgatttagtaaaaaaaaaagaatagtgttttataattaggacaggtgaatggtattagtgagttataatataggtacaattatgtctaaatctgaatgattacgtaattgtgtttttataatttatttgtaattacaggagacgatg

SEQ ID NO: 8898 - DNA, 3000 bp, Unknown; identical to SEQ ID NO: 8895
  misc_feature (1)..( 3000): cDNA_ID_1692104_gDNA_ID_1971919_Annot_ID_177167 3000 nt of promoter + ATG

SEQ ID NO: 8899 - DNA, 3000 bp, Unknown
  misc_feature (1)..( 3000): cDNA_ID_2179369_gDNA_ID_1971919_Annot_ID_177166 3000 nt of promoter + ATG
ctattcgggtttaggttcgggtttttcgggttttgaagtttagacctgttcggtatttgaaaattttaggttcgggttcggatcgggttttttggatcggtttttcgggtttaggtattatgcctaggcctattaattatgttttgttaattgttaattatttttaatactaactaggatatagatttgatatgtcataaatattattttgatatgaaaatgttatcactcaatatgaagtgtgtataatttaaatcgagtttattatgatgacatagatagttaaactgtattacaaaattgaatggtgtaagatagaaatttgtttttttctttttcttttctagatactaaattaattatagaataatggtcggttactttttagaattaaaatatcattgataagattgagtgtatataattaaaatagaatgcataagactgaaattttgtttaaaccaataattattaaattaaatatcaaaataaatatatagattgctatacaatattcaaatactatcataaaaatttatttttgtatcttacacccgcctaaataggcgggccttatctagtacaaaataaagcttagaagtcagaaattcatcagatggaaaaaaaaaaagtccgaaattcatccatcaatgacactcctaacttcctatgtgacctttttaagttttagcatttgagtttgagcaacgtcctcgacatacttgagctgcccactagtactatcccttcagacaacatcttgatgaaatctgcaataagcactaatacataagtgtaattttgaaataaaaaggcggacaaaggcacaaaactataccacttataatcatcagtatacatactaatcatagtttcactctcactctctccatcactcatacatcttctccatccatcacacgacgaagcataatggcaaagtattggaatagattcgtttcctaatcaagaaaaaggaaattcaagaaaagaagaaaatcaagcaaccaagaggattgaccaaaaaggaaatcatgaagaaaaggcaaggcacacaaggaaaagggaaattgtcacaatgtgaattagcaagttactatttttgtgttagaatgataactctataaattaggttgcttgtgttagagttcaatcatagaaaaagagaaatcccaacacaaagccgtaaatacataataccaatgacgaccaaagagtgcggaaaccacggtggtggcggtggaggaggcggaaccgcctgtagaatctgtggagcaatcatcggcttcatcatcatcgtcttgatgacaatcttcctcgtttggataatcctccaaccgaaaaacccagaattcatcctccaagacaccaccgtctacgcctttaacctctcgcagcctaacctcctcacctcaaagtttcagataacaatcgcttcacgcaaccgaaactccaacatcggaatctactacgaccatcttcacgcctacgcttcttaccggaaccagcaaatcactctagctagcgaccttcctccgacgtaccaaagacacaaagaagatagcgtttggtcacctctcttatatggaaaccaagtccctatcgctcctttcaacgccgtggctctcggggacgagcagaatagtggggttttcacgttgactatatgcgttgatggacaagtgaggtggaaggtcgggactcttactatagggaattatcatctccatgttcgttgtcaggcgttcataaaccaggctgataaagccgccggagttcatgtcggcgaaaacaccgttaagtacacgttgatcaataagtgcagtgtcaatttttaggaggtaaaaggacacaactttgacgacgtcaatgtttgcttttactctttcttcttcttttcatttttcttctactcagataatgtttttgcttctatatcgtttaattttctacctttttctgctgatcatataacatacataaaatcaaaaaatttaatatgataaattcatgttagaagaacttgccaaataaaaaccgatacagaattttcttgtaaaacattcttctttcttttttcttttttttttttaactttaaatttccacttaaattaaaataaagaggattacaaggttaaaaacccaacatggccgcaggcctaaaaaaagaaagagaaattcttcaaatttatagttacgtaaaccttcaaatttaataaatttttaaaaatcagacataattatgttgacacaggcggccctaggttctagaacggtataaccgagaaaccaacgtacgacgagagaccaaaaagtaatactaacatatacgatcttacaaaaagtactcatatatatacttttgtttgttagaattcaaaaatattattgtggctaaatggtttacaaactcgtattcgtttcatttgtcagcggttggaatcagttttttgctaaaacgatatcgttattgtaagaagtgactcagattttagttttcgggtttaagtgtgggagaaactcggtgaaagagaggattcgaagtctgttgtgattcgagctgactaaagtcataacacgtgaggcgagctgactaaagtcataacaagcttgagggcgttttggtcttttcgcatgagctctgtaactatatcttcttcttcttctctgtaattctgttagatcgggataagaatttgttgagatcaaagagagagaggagtgtagtgagagaaagcttgaaagcattgtaacagagactaagtttccaagttctagtggatttccggagaggtttctccggcgagacgtagcgttccggtttggaacgtgaactcgttaaattctctgtgttcagcttttcttttactttctttcagttctggtcaattcgattcttagtgctaagttgattcgtgtgtttgtgagattgaagtgaagttagatctttacaaattggtatcagagctcacggttgttgagcgagtgcgaatctaag

SEQ ID NO: 8900 - DNA, 3000 bp, Unknown; identical to SEQ ID NO: 8894
  misc_feature (1)..( 3000): cDNA_ID_2106879_gDNA_ID_1971919_Annot_ID_177160 3000 nt of promoter + ATG

SEQ ID NO: 8901 - DNA, 3000 bp, Unknown; identical to SEQ ID NO: 8893
  misc_feature (1)..( 3000): cDNA_ID_1989267_gDNA_ID_1971919_Annot_ID_177159 3000 nt of promoter + ATG

SEQ ID NO: 8902 - DNA, 3000 bp, Unknown
  misc_feature (1)..( 3000): cDNA_ID_3085140_gDNA_ID_1971919_Annot_ID_177156 3000 nt of promoter + ATG
tcttcaatatttactcacccaagtctttaagtgaaaactgatagctagattttgtaaaatattttcaaatgcatccaaattgtttcatgtgatgattatgtcattaacatagaccaatgaatagaggatggtataacattttgtatgtacaaataaggaaataatgcattcagacacttagtttctaaaactggatttgatgagataattattgagctccaaataccaagcccgtgaattgctataaatatctttagcaatacattcttaacaatattttcaacaatgtatcactcacacaatctttaaacaatttttgtgctatagcaattttataaattataatgttataattatacaaacctcaaaaatttgatagtggagctactcacatactctttttaaaaattctgaagaataacctactcgaactattagctaattcaatatactattatttattccatattttaagttaaaattataaaaattagcagaaaatcctagagcatgagaaaactaataaaataattttaaatattaatattgatacaattaaatatgtaaaattaaataatatgtataattaaccattatttacatttactatttagagaacatgtgataaatgctaaaatgatgatgtatcattcacatgaaaagttaaccaactttcataaatactagatgaattcccacggtacgcgtgggtttgttttgaaaattgtttagataaaaatatgttaattatttttgttactaatttatgttttgtttgttattttatacttagtaaaattagattcatcttatgtacttgcattttttattgttatattcatttttgactctaaatattaatttctatatactttcatgtataatctgattatttttatatccaaaattctaaaatctgttcattatcatgaatatatcacaacaagaatataaggtatttttatttcaagaattttcgtatgaaagaaagaagcaaaaattaaagagttattttagtaacactttttagattttatgctattgcatatagccatataagacaaatggatttattttaaatttcatagtatgtctaacgtctcaaaagactattacttgaaaatgttgaatgtcaatgttacgaaattaccataagatataaaaatgaaaagacagaatttcatatgatacaatatgaaccataacgtaataataataaaaaatcaaggtaaaataaataaactattaggtagcaaacaactaaactacaacacaaataactatttagtcattatagagtgatgaccattgaccattaaattttttaaaaaataagaaataataaaagtaaaataaaagtactaattgatttatttaaataaataattttataattttatttttattttgaaaaaatcatttaaaaaatgaattaatggaggatttaacacaatatgagacttttgattttctctcaattaattttgctgattttttatttaatcaatattcaatgatacatgtcatttttttgtgtgatgatatgtcacccatatggagaaagttagccacctttcatatatgatatatgatgattatcatttcgtaaattatttcaaaagcatataataaaataaatactatacaaaatttcttcctaagactattgttcttcgaaagccataaatagtcatttggactggtcaaatggacaataagccaagacgagactataaggctataactttctaagatggttgatataagtttgtcaaagacaatggtctcattgacaaatattttatctttttcaatggttctcaaaggagagcgaagttagtaagataaccattcaagttgacagaatggtcaatggactctatccaactagttgcatcacttaatctgagttcaatttatgtcggtgcagtggatactaattgtcttccatttaatatgctttgataccagatccatagaaactataggggtagtaaactaataatgataacatttgttttttttaagaaatttgatattgcaaaatttgatatactaattaaaaataaaataatggataatttggatatatcctcttatatttaacacgtttttcgttatattggaataaaacaaactaggtgttttcaatggataattattccaagagatatgagtatggagtatggaccatggtcctagaaatttgggatggggattggcgggtaatccttccggacgtggacaagtttatttttatgatgcatatgcttaataatctattactccagtaatttccttaaaatcttaaacaaattcaaagaagaataattcaattttacttgttaaaacattgaatctttgacaaacttgaaaatcatattaatttattttattaatagtattaaaatattaaacgtcaaataattttctcgtttcagattttgtggtccacaattgctcacaattacatatagaaaaaaatatttagctattatgttagtcaacttatttgtaatatttcaccagattactgtattactatttaaatcttgaactaattagccatccataattcataatcggaaatttatttatttgacacacatgactggacaaatgttttcccaaaatcagcaatatgtaatacttttttttttgtttgggcaaagcaaaatattttgtttttcatgtgaaaattattttaaggtcctttttagcagaaaacaaatgttttgggtacatttcgcaataattccaaagttaactgctgtaaaccaaaataaaaacaaaaaataattattctgaacaattctagatattctcttcatagtctctggtctcttaactcgccttctatggaagctcaagtgtttataatcttccattaaaaccctaaaatactttttcaatttcttcttccaatttgcttcttttctcttccgatacaaatattcatttttgggttacttcgattcctttaaagctttagaaaacatg

SEQ ID NO: 8903 - DNA, 3000 bp, Unknown
  misc_feature (1)..( 3000): cDNA_ID_2154004_gDNA_ID_1971919_Annot_ID_177152 3000 nt of promoter + ATG
actcattgagcggcgaagaaaagaacatggtcatactaacaaacaatattccctacatttcataatattaaatgttttagataaaagcataaagtttaagaaagtaattaattttgagttttataaattaaaaatacaaattaatatctattaaaaataattagggttcaaaagccgtttaatataatgttttgcatagaaacttgaactgtttcttcaaaacatcatataatatgaaacataaggagtacaacataagaatatatgaaaatgcatagagattggatgaagaacaaaagaaatttacctatgttttacttgtaattcattttttgttttgcttatattttacttactttttttcttaaaaacaatattattattaacaaaatttatattttgtgtaattctagaaaaactataacgtattaacataatcgtaaacaaaatctcttattacaaatacattataagcctacactaaaatatgggattatagttttgacaaagaatgtgatttaccttttctaggaatggaacttggtattgtttttcatttttttagctggaacatagcaaaaagtaatcgaaaataaaattagagagattcttacatagaaataatcaaacaatttacaatcaaaattttaaagaaaccaagtagcatatgtggctagtcatctaattctatatactaaattaatattataatttataacaatgtaatcatttttccttaatttgatatagctattaatttttttttatagtttatagcaagtaatcatttgttacaacaatgtaatctatctaagtctaaattttccaatgaaattaaatgatataatattaatttactgtaaaaaaattgaattagacaaaaagataatcatttatttcaatttgaaaactgtattaaatttcagaaaaaggtaaaccattccaaaaacattaattcattgacaaaaagttaaagagaaaattcgctaaacaatttttaattggtttttcatcttataatttggtattaaatgtaaaatacataattttgtttatagaaataaataaactacataatttattgttgacagtgtatacatttatttagatgtgtttctatataaggtgcaaaataaagaaaatagaaaatcatatatatgaaagttggcaaactctctccatatgagtgacacatcatcacaccagtgagtgtcacatgtcattctaaattaatatcattaaaaaataacaaaacttagtgataaaaattgaaaagtttcacattgcattaaatcatccattaatctcactcttaacaaaatatctttatttataagaaaaaatacaaaaaatcatgttaatgtatcaaacactactttcattttacttttcttattttgctatttttataatagtcattacttgataatgactataattttttgtgtattacaacttagttgtttgctacttaacctttcttagtttagtaattttaacttactcttttctttttattacattttttggtttacatgatatggtttttttgtgtgtttatgataaattggtaacattaataatgacatgcatatttttaagtagtgatcttttgagacgttagatataccaaaaagttcaatatacgacgctttctctaatatggatatatgcaaaggcaaagagaaaaacctaaaactgttgacttaaaagactatttaatttaagctttcttttttctctttcatgggaaaacttttaaagtagatgagtagtttatatatttgttatttaaattatgtcaatccaatatttagccatgagcctatcatgatgtgattggaatactagattaggagagaatacatggaacaagaaattgtttgcttagaatcaagttaggcaactttcaaaccaaataagtagtataattgcataccattgtatcatattgttgatgtaagtatttcatgatagttaaaaaagtttagaaacttggatatatagataagaagatttatacatgaaaaaataataattgatatttaaatcaaaagtgaatctaactatacaaatataattacataaaatgaatataactttattaactacataataacatacacgaaaataacataaattagtaataaaaatagttaaacataattatttttaaacaaatttcaaacaacaacccacgcgtagcgtgggtactcacgtagtaaatacaaatgagcaaaatgctggaaaagtagtcgatgtgtgcacattctggatatgctttggtgtttctgtccatttgttacatggttcttggtgtaaagaagaaatcaagaaatctcttccataacaaagaacaatacatagaatatagttgatcttctcgcaggagctaagctaattggactaaaatggatgtttaaaataaaaggaaactcgtatggaagcatcaacaagtataaagcgagacttgtggctaagtggtatgtgcaaaggcatggtgtagacttcgatgaagttttttactctagtggcccgcatcgggacactatactttattattgcattggcagcctcaagcggatggaagtaaatcatcttgatgtaaaaacggcgttcttgcatggagagttaaagaagctagtgttcacttctcagctagagggtttgtgaccgaagaaagtgaaaataaggtctacagattgaacaaagcattatatggactcagaaaagggcctagggcgtggaataataagctgaacaagatctaaaggaattaagctttgtcaagtgttctaaggaaccttccttgtatcggaagcaagataaggagcatctccttcttttagctatctatgtagatgatctacttgcacatagtctagtcaaagtcaaattatcgagttcaagaaaggaataatctccaagtttgagattagtgattttggtctgctaacatactaccttggcattcaggtgtttcaacacggtgagggtata

SEQ ID NO: 8904 - DNA, 3000 bp, Unknown
  misc_feature (1)..( 3000): cDNA_ID_3085115_gDNA_ID_1971919_Annot_ID_177180 3000 nt of promoter + ATG
ctattagtttatgtttgcataatttttggtgttactgaacggatgttaatttagactcatttattgctcctgagtagtctttcttcagtttccagtggcatatagaaaactcacttgtccattgataaattggttaataatatgtgacatccattctctctcttttcatgagtttcattttcctggtttagatgacggatcatcaacttatctttgctggacgagtggggaaagagcgtttacaattcttaggctgcacgaagagttacctgaagaaaccattgatgtggtacagtggactagaagatacagcaactggggcaccacagcttaccatcttgaccaaattgttcgggttcacaagagaatagtgatgaagtgcaatggatcacagattgacgtactctttcaagacatcaccattgctgttacttcagatcaacttctcaccaaatcagaggataagttcctcaagtggttgatcctaaatgccattagcggccccatatgggtatatgccccaacctcttttatcatctcttaagtttattggacttttattattccagaacattaaacggtcctacctgaagaattaaccgacagaacttactgatggttctctcaggtctcagattgtcttactgtgtgagaatagatagaaaacagaggatatgttgctacgtgttattaattttagtaggctatttagcgggtggacaggactggaatcgagtagactaatcattttaatgagaggataagactattacaacagttgtctcgcgcatcaaaataaggcggcatgcttttctaaacccaatgactatgtcttgtcagtttaatatttcattagttgcacaactgggtgttttaataccaagttagtagtactcggtttccacttgtgatcttggaattgatcttcattgttttggtttaagcaggaagttgccgcgagctcaatggacatgaaaatgattgagcatttggagagggaacagtgtgtggagatggagacatcaagatataatctgcagagtgtttggggtaatgaagtatgccaagtggatccgttggtccgagcttggagcttactccaaggtttgctaaatagctgatcatgtagtagtcaaaaacattcatccaccagtcggcgattcttcgtgtccatacatcaggagagaacgacaatttgtcgaccctaagaaggatgcgctgagatgaagcaagtacttgatcttacttatattaatgtcatgagtgtagacaactacaaaatcattcacaattttgagcttttaggcattctttagtatatcccaaaacaaaacttcatatgtacggatccacataaacgatttaaagtaatataagatggtaatgtgttaaaatctattcattagttaattttgaatttaaaactcatgattacttaacatgtttcaaacttcagagtatggttattgacccaaagaggttgacaatgagtcgtaagaattattagagaaagtgtgatctaatttcgaaaaatataataaacacgactcaatctagttatcgttatttggttttgaactagaaaggctatgaaacttaacattgtatctagatacaatttgttgacttgactatgatagtttggtcatgatttctcaaaaataagaaggattaaaactagaaaaaaaatcgataattctttagtcgaaatggtaacatttaatatttggtgggaaaactgcattaagtattattgtaattttaaccacaaccaattagaggttagtaattgggaaaaatgttgtttaatacgtgaactttcaaaacgtggtcatttaatatgtgaaccttttatatagtcagttaatacgtagaaaaatgtaattactctaaatggatattttctctaagtaacttatcagtataacgccttcgtaaatccgttagtaaattaccgatgacttaccgatgaattttttttactgacgttctagaactgattgacaaacctttgaactatttttttttgcagcttttaagctggtatcttgtagatttctcctttttatcctatatgttttatcagactggttaactgataactaatatttatggttaagtgagttggagcaaaacatctcagaaacacttcaaacgaatgtatttttcattttttaaatctaaacaataaaatgattaaatgattgtaaaacttttacaatcatttaatcattttattgttttagtatttgtttgacgattattttatgcgttagtgaaataaatagatttatatataactaagaaataaccatagttactacttaagtaaaagatatggatcatgaagtatgaatttatacataatcgtataaaactaaccaaaattatttaaatcatctagttgccaatagaacaacaatcagtggcggctgagatgggagggtgagcggtgcgaccgccccgaatcaaatcccatattcaataattaaggggtcgattttcgaaaatatttttataaataataataataattcaattaataaaatgaaaataagattgaaaaatgtcatgattatttatatgtatgttgtttttagtaaccatttcttactaaaaatatcataaatttgtttttatatagttaaaagtttaaatcccaaaaaacatttggcattggcattttttttttttgccgtggggtctacgatagtgttgagccggccttgcctacatttttatatctgacaattaaatggtttcgtcaactaaccttatgaacgtgatctattctgtcattgaaccatccataacaattatatttgaagttttaaagaaagactagcaaaagtctgatatgtcaccgacgacttttgagaaaagagagaaagagattttgaaaggagcacatcttgaaatctcagatccaacttatttcttcttttttcttctgcttctttttctttttcttcttcttcttccctttcttcttatacaata

SEQ ID NO: 8905 - DNA, 3000 bp, Unknown; identical to SEQ ID NO: 3227
  misc_feature (1)..( 3000): cDNA_ID_2158031_gDNA_ID_1971919_Annot_ID_177179 3000 nt of promoter + ATG

SEQ ID NO: 8906 - DNA, 3000 bp, Unknown
  misc_feature (1)..( 3000): cDNA_ID_3085127_gDNA_ID_1971919_Annot_ID_58538 3000 nt of promoter + ATG
tcgtggttctttaacaagctgaaaacagttataccagatgaaccaggtttggtttttgtgagtgatagacatcagagcatcatcaaatcaatcatgcatgtgtttccaaacgcgagacatggccattgtgtttggcatttgtctcaaaacgttaaagtacgagtggaactgagaaggaagaagcggcggctaacttcattgcatgcgcacatgtttatactcattttgagatcacgagagagtatgctcgatttaggagaagatttcctaatgtcggtacgtatttggatagatgggctcctgtggaaaattgggctaggtgctattttgaaggggataggtataatatagacacgagcaatgcgtgtgaatcattgaacagtacgtttaagcgtgcaaggaaatacttccttttacctttgcttgatgcgataattgagaaaatttcagaatggtttaacaaacataggaaggagtctgttaaatattctgaaacaaggggtcttgtgccggttgtggagaacgaaatacactccttatgcccaattgggaaaacgatgccggtgaccgagcttaacagcttcgaacgtcaatacagcgtcattggcgaaggtggtatgtcttattctgttgacttggtaaggaaaacttgttcttgccaacgttttgatgttgacaagtacctgtgtgtacatgcgattgccgctgcccgaaactttgtggggaccgaatggatatcagatagtctcgaaatggaagacctaacttcgcattattaccatatgaatacgtggatattggcataccacagaaccatttatccagtcccgcattcatcagtttggattattcctgatgagataagacaattgatagtcttactgccggataccacaactaaaccggggagaaatcaagaaacccggtttccatcaacaggagaacgttgtcgaaggaggactaacaacaagaagagaggttagggtcgatgcgctgcagagccagcaggatgccacgtggcagagagtggccacgtgtgcggattgttacaaagattgtataattgtagtttgattgttaattgtaggattcatccataatataccatattttattaatatcgactcaaatccgtcaattctaaaactgcaacaaaagtataaagtttaaatgtttatacaaaagaatcgagatacgttttaaaaaacaaattaaattatatttattttgttaattttgtttattttgtttagtatttaaaattatataaatatattttaattattaattttaaaatttcacgtgttctgtattattatcgacaaatgaatacacaaataatagaaaacaatggatacataaatcgtaaggtgataagatttgtttgactggaattgtcaaataaaatgttgtgcatgcactaaataattttttttgtagtatgtacaaaacaattaagttcacaaaaaataattaatttatagtgtaaagaccataaaaactcagcttcatcattgtggaaataagagattcttgtgtgggatgttgaaacatcaagaacactcacggtagattcatagtgtaggaggtctccagctactaaaagtggaccagttctcttttcacaacactgtaagttcaaaccggtttaaatagccagtccggtttaattttgaaaaacactaaaccgtgactattggaaacaacgtaaagacgcaattttttctgaaagcgactttttgtttttgcctctctatctctcaacgagacaatggttggttcctaaatctctcacctcaacaaatcttctgatcagggtttctcagaatctttctactttgttgactcggttgcttatctgactcagtgatttgagttcatcggtgaacgagttaagagtatcctcgcacactctaggcatcttttctccacttgcgtcaatggtattctctcaatcgttgtttcaatgcttctctgttcacaatttgtgatttaccttaagttagattctcgaattcgattagggttacacaaaaagtttggatttttattaaaaggggattctgaattggtttaggacaagtcattgtcgatttatatttccattatgattttgttcatcaaatctctctgatttggatcgaaatttgaacatatcaagcttatgcttctgttcctgtcaagttccttaacaaattcacacaaagttttgtcctttatgatgttctctatgatttgtacttagattctattggttgttcaatgctcatttgtgattcagaacactattacttcttcacttactattagctttactcttcttgattggtatgaatgtatctgtaaattagttagttagagggtttagagaggtgttacttgttagtatcggatcagtacttcgtttgatcgcgtatgttacacatttgtacaaactcttatatagtattagagaaccacagcgaaccaatctctctcttttctcttccatatgcagaaatttgcacaaaagttttatcctttataatattctcgtatgatttgtacttagattgtattggtttgttcaatgcccatttgtgattctaaacactattacttctttagttactattagcttcactgatggatatgggtatgatatgtatatgcaaatgagttagatagagagctctagtctcggatcattacttcgtttaatcgcctgtgtatagacacatttgtacatgtttacacagctaatgaaatgagttttacagattaacaaactgtagtatagtattaaagaactaaatctctctctctctctctctcttttctcttcaatttgcgaaattttcgttcgattcagattaagtcatggatctagagcttgactatgcgatagtcttgtttgctaattgatacacacattggtttggatggaattgctgatttcttctgcattatagtttctctcctcaatggttactttgtggtttgttactgaaacaggagatg

SEQ ID NO: 8907 - DNA, 3000 bp, Unknown; identical to SEQ ID NO: 8896
  misc_feature (1)..( 3000): cDNA_ID_1989265_gDNA_ID_1971919_Annot_ID_58539 3000 nt of promoter + ATG

SEQ ID NO: 8908 - DNA, 3000 bp, Unknown
  misc_feature (1)..( 3000): cDNA_ID_1989264_gDNA_ID_1971919_Annot_ID_58540 3000 nt of promoter + ATG
ggtgaccgagaggaagttgatcaaatcatcgtcaccaagataaaatgattggacactaggtcaatgaagtttttagttttagtttttaaaagttcaattatgaatattttaataaggttaaatcaatttgttaatagaatatttatttttggaaatttttggtctcgtagtttatgattaaaaagaatatgaaaaattaaaaaatttatgattttatgaaaaataaaagaaaacttattaggtggaaacaaaatattagagcctcgtttgttagtctaagtagaatggcctaaaaaaggatcgattaccggtcctaaagtaggatttatcatctcatgggatgtgttaagattctacattggaaaattgaaggaaccaacacatatatctaagggatatgggtaattcactgattgtattgtcaattaattttgagttaaaacaacatgaaacttaatcgtccgcttttgcggtctgattctaatttatcaagatttaaaaaaagattaaaattttaactaaatttccatcagtattttcttatatagaaaaatgagtgataatggagttaccgaaccccagtggcggatctagaccaaacttttgttaggggcaaagttgattaattttaagatgttgggggcaaaaggagaaaatgtaaacagttgtttttattatttctcaaaattacattagaatgaaggtttataaaattttgatggtggcacttgtaaaaatcaatagcataaaaaaataagcaaaatcaatagcaaaaatatttctcaactagaaaagtaaaagatcgagagccgatgatcagagataaaccatcaattcatcattccaaaatagtaataaataaacaaataatagagagtagtaaattaaccaataacatggacaagagtgagagaggccagtctccaggatatgcttaaagcttatcaacccctcaattcacgccaacagaacttggagtagaagcagcacgccgttcataatagatttttctaagttgtatcaaaagaatctctacactgttttcaatatctactgaatttgagtaatcctccaatgatttagcagacttcatcagtcaatcctcaagcaaggttgcaagatgaagaatctttttgttggcatcatcagtccttgcaacaggaagcttgtgtagtaagctagcatatgttaaagtagcttaaaattcttacaaatcctgaattagggtttagcaaatcaaaataagaacaagccactatcaagacacatcatatgttaaagtagcttaaaattcttacatccttgttcgcatagctctccagcgctacttgtcaaagaaactattctgatgaagggaaataacatgagccgaaacagcaacagacttgtgagaaacattcatagacgactcatcatgtggagcaaatttgaaccccattgattatgatttatgatgatttggcctgaaagtgaaaaccatccacatgaattatgaatcaaaacaagatctaataaacctctaaatctaggagggatacagtcgtaatattacaacacgaggcctaggtatgcgattgatcaaacaacacaaaccctagtgaacgagaaaaaccctaaacctataaaatgagaatgatcgatgtcgcaaacactcatagagagaatttcaattcgatattgtcacggaacaatggatgcaaaaagaagatttgtattaacacacaatcgaataaaaccaaatctaattaatccttaaaacatattcacttgaacaaaaacaatgaatattggtttgataaaaccaaaaatcaattggacttggactgtatcgaattgaaattcaaaccctatttacatttgctttaagattttacattttaggactctttttagcctttttcttattaattgtttcaacaactattgtagccttcttctattctatattttttttagaacaaagacttcatttcattaagttaaacggatatatataaaaatttctatagagagccaaacgagtgaacttttatggaaaaaaggatacattctatgtaaatatacaatatttttttttcaacaactattttaactttcttttattctttttattttttgttttacaacaaaaaatctattttattaaatccacggaaagccaaacagaaacagtaaactttcatgaagaaaaaaagtataggttttcgtctctctaaataaacatgcaacctagaaatcgttacaacgaaacacaagcttaatactataagataaaaaaaaggattaaaagatatttaaagtggcaaaactcaccgcaaaggtagaccactcaatttggtggcaagctaaccgttgacaggttgcaaaccaccctgaaaagaacaaataaatgggaatgatctcatttccaaaaggagaaaaattgacaagagaaatcacctccttacatttttatgtctattcttcattaagaagtatttgtactgatcacctagcaagagtgacaagagcaccaagtgtgacttttctctaatgtaaatttttgggttttaagattggcttcgtataaaaagataggatcttcactaatatcgaagacgtgtaaagtggaagacaaattaaaaagagagagcttccaaaggagttactttttctcaccacttcactatgcaattgcaaacacacgcaaacgcttatctacctttctcttcttattggattcttgggttgttacgcgtcttcttagattcttcatcacttcactttcttcttccttctctcccattgtctctttttgttgtgatctacaacatttgctctcgaacccctaattcatctccttacccaaagccaccgacttgggtttaagatctgaaagctttcgacttttcactgtaattcgccgaattgagaatacccagtagccaaagctcaggtctttggccttgtgggttaaaaatttaggggtttagggttaagttttgttctgtagaagcaatg

SEQ ID NO: 8909 - DNA, 3000 bp, Unknown
  misc_feature (1)..( 3000): cDNA_ID_1825410_gDNA_ID_1971923_Annot_ID_58543 3000 nt of promoter + ATG
tctcaatcctatgcctctcatcgctcgtcaccggaatcgaaccactcaagtttctctacgcaacatcgagctcaacatacgtttgcttgcagatcctgcaaaccctaggctacgtcttctacctcttgcttcttctcatgtacctcgttctcgtcttctccacggattgtggtttgggccttaaggtattgggcttggcgcagacctttgtgggctttgctgtaggtctgcattattacgtggcggtgtttcatagggtggtgcttcgtcagcctccgaagacgaactggaagatacacggtgtgtatgccacgtgtttccttttgatttgtctgttatctaatgctgagaggaggaagaaagagtacttggaagaaggcggtgacgaagggaagaaaaattgaaattttctttattttattcttctctatctttgtatttttatattttaaattttgaaaaattcggcaaaattttagctgagaaatgcaatagaaagaacaattactggtggatggttggaaactttttttaaaaacttcaattgtatttataataaatcgataaatgtggaataaaatttcataatctcattataattgtctcttttttttctttgtaaaaattacaaatatgttgtgaaatgtggacggcgagaagaatgaattaattaaatgtttttcttgataaccgcgaaaattaaatgtttctgtttgaaataaaaaaaatatgagaagtcaaaaattaaataaggtggggtctacggaatcgtagagtcgacgactttcgtgaggatggggcatttcggtcattgaaggagttaccgacggaactgggtgctgtagtgttttattgacttgtgtcggtggattggcgattgagtgtggggcgtatggtgagaaaaatggggcttttgtgtcctaacgtgttgttgtatgggccactcatttctcaaggcccatcacctcacctcatattgtgccggaatgttgttttaactttatgacgtgacgtgtgtattatgaaactgaaaatagagttcctccaactttgaatctattttacaattttattattattttttttttttgtcaaatcatagaaattacatgcacaactatcacgacgatagaaatttataagcacaattagccaaataaaaaaatcgaggaaaaagtttctaaatgtaggcaatgcccaaatgtcataaatagcctacttattttgtcaatcttgtcacttagaaactcggcacttgtataaaaacgtttcattcaacttttggtatcacatgtacattattcaattgtgaattcctaaatttattgtgtgctgtgataattcaccagatcaaccagtttaaagacccgtgaacaaaaatgcccataacatttttttgtattgggtttcaatcaagttaaggcccattttggtttagtatacggattgtgttgggcgaaaggagtgatgtaatatgtacttatcagaaacaaagtaggaagacatcacagtatcacaacattgatttgtgtgcttcaatcatgcggtgtacaatttgcacttttcccacttcacaaaattcacaccttaaatatcaatttgtgaaaagtattgacttttaactttaccaaattaaactcttttagtgaacaatctttaacaaccattttatttcacatatctgatgactcaataattcgtgcaaatttcaaatgtccttgtatattatcgtgtttgaatttcaactttttttccaaacatgaaataacaatccatgattttattgctaatatgtctatcatatatttaagtttacagaccaatcacaatttcctcaattagaaaaaacaaacttaccaatggaaggatagcagtgtatgtccataggactcgacacttctatacatagtactatttgtattcaaattatacataaaggaaataaatctgtctatacatggttttagtaccaagttttttaataagaaaaaagaaacaattgatagtttgatacattaccaactaggctaagatattttatttatttttacagtacagcgttaacattttttttaacgagaatgaaacggtggctagagttacctgagtaaaaaatctaaaaaataaggtaaaaatatctgatagcattcgtaacgaaatcaattagtactagacaagaagatggtataaaaatagaagaaaagtaaaaaatggcacgagtgaatatgttcgcacgtgtaaaataagcgtcatcatcttctcctcttcccaagtttcggctctcactttctctcgttctctctctctctctctatctctatctctcgatttgggggagttccgtcacggtggactagtacgtctcgttgccgttggtggcgtagtcggaattaatttcctcggcgttgagattcacatggtctagaattctagctaagtggttgttgttgttgttacgatttccgatttctcgagttttttttttatatttagcttctgtttcgtttatccctcccggagacactccttggtcgaatctctcatgctgaggtaattcgtcatggatttgtttaattgcataagcttttttgcaattgtctaagcttttatcggtttgttttgttttttgatttacgaatctagattttgcgctttcttatgtatgtaatcaggatcaaatttgctgggttgttaaacaatttttgtctgtgttaggattctaattacgcgtgttactatacatgaatcattttcattgtttttcttcttgatccaaaagtgtgagaatcttactttaggcgtaattcacattttttgcattaatttcaacggttacacgttttttttctttgctttagatttgttataatttggttgttctaatattcataaccttggagttttggtattacttcaggtgttttggacacttgttgtcaagaagaaaccagttttggttctgattaatcgttggttggaaaatatactcaattccaggcc

SEQ ID NO: 8910 - DNA, 3000 bp, Unknown
  misc_feature (1)..( 3000): cDNA_ID_2686597_gDNA_ID_1971923_Annot_ID_58545 3000 nt of promoter + ATG
taattttaaggtttgcaaataatgttataaatatattgatgtatgttaaaaaatttatcacttaattttagacataatttaaaatcttaacacttatttcttttatttaaaaacatttatatatcaatatctaaactgtaaagtttttttttgtttttaacttaaatttagataaacagttttattttcttacataatatttttgtttttaaaaaaaagttgtaagtatttttgtttaaatgtgtaaaaagaattgaatgataacagattctttactcacagaacaagagatattaaattttctttatgtttatagtatttaataaagtttatagtatttatttccatatatacatttgtttctgtaagaactatccatttgatactagaataaatttcttcatttggattagattgttcagtacaaaactctatttctggcatgtcaataaataacaaatgctaattttggctcttaatcttgttgatagaatactaaacttgcaatgctttttacactaatctttatctctttatatatttatttttaaaaactcttctttcctttttttctgatttaaagtacaaaaaaaaaacaatacatctttccattgaactagaagaaaacattttcactgtccttttgaatcagaagaagaaagagaaaaaaaagagatggagagaaacacgccggtgagaaaccctcacacttccaccgccgatctgctttcttggtcggaaactcctcctcctcctcaccactcaaccccttccgccgctcgttctcaccaggtccgtttcttcaacaaatgttctcactttctctttctatagagagaagctgaggttttttcttctttcttctttcattttcagccgtccgatggaatcagcaagattctaggcggtggtcagatcacagatgaagaagcccagtcgcttaataagctgtaaaagattcatttaatctctatctctcattgcattaccagatctaataagtatacctggatttgttttttgtattacaactgaaacttaaagtttaaagctttgatcttgtgattcaccaaaatggtttctttgaatgatgaagtcacttctttttcttagtgataaatttttatgaaagggattggtcaaatgctttttggcttttctgagaagttttagtgttaatagtattttattacattctttgttcatcaaagccccacaccatttacatgtcaaactactactgttcattatctaatgaggagatctttgtcttctttgttatttttgattgtttcattaagtgacttcatcattacatgtaaaggtctttaccggtctctaatatggcgctttttggtacagaaagaattgttcagggtacaagttaaaagagatgactggtagtggcatatttactgataagggaaaagttggatctgaatccgatgctactactgatccaaagactggactccgttactatcaggtagcttacttgtgtcttgtcttatgtttcaacagatttagacaagtgtaaattgaaacgattgttatgtgaattttgcagcagactctgaatggaatgagtcagatatctttcagtgctgacggtaatgtttccccgaagaaaccaaccactttaaccgaggttgcaaagcaaagagagctgagcgggaacttgctaaccgaggcggatttaaagagcaacaagcagatatcaagtgctaagattgaagagatcagcggtcatgacatctttgcacctccatctgagattcagcctcgatctttggttgctgcacagcaagaagctagaggtaacagagacatgggagagcctgcaccaaggaacttacgcacttctgttaaagtttccaacgtaagtcttgccattgcttttgctttgagaggaaactcaaacttagtgcccaaccaaatcagtaaattttctcttctattccaacagcctgcaggaggacaaagcaacatactattcagtgaagaacctgttgtgaagacatcaaagaagatacataaccagaagtttcaggaactcacaggcaacggcattttcaaaggcgatgaatcacctggtagtgcggataagcagttaagctcagctaaactccgtgaaatgagcggaaacaacattttcgcagacggaaagtcagagtcccgagactactttggcggcgtgaggaaacctcccggaggtgaaagcagcatttcattggtctaataagtaagactcggggctgtatggtattatccgcgcatatgctcaactctcacatttcagcttctttagaatttagtttcttagagtctgaagagagctcattgtacggatcctttaaaaccttttggtgttgtctctaatacttgaagtttcttaactgtttctgcatttctcctactcttcacttaaaaaacaagtatggtttcaatacatcatcgttttcgtgttgaaaagagaaacgactccactggggatcgaacccagaatctctggtttcgtagaccagcgccttatccattgggccatggagtcttatttgactaagaatttctacaaaaggtatttatattaaacaactggtttaaaagggtgaagtatacatctctcatcatagctcgtcgccttctcttaccgaatatgatcgtctttttagttaagctgtctcaaaaacactcggcataaaattcagctctttaagaaaaaaattcagaggaaaattaaaaaaagtggatataatagagaaaaaggtaaaggaaaggaatagtgagagagagagagggagagatggtcttcttgtttagaacatgttgtttccaattattctaagaatggcgttttaggtaaatgatcacagcttattacagatggaagagaagctgactcaatttgtggtttagatttgtcaaagaggatcgtgtggaatctgaaagttttcaattttcactaaaaataggattagagttaaaaaggaggaagaagaa

SEQ ID NO: 8911 - DNA, 3000 bp, Unknown
  misc_feature (1)..( 3000): cDNA_ID_1825394_gDNA_ID_1971923_Annot_ID_58549 3000 nt of promoter + ATG
cttagtatttggcttttctctatattcaagatcaaaaaattacctccatgaaaccaactccaagatcacaaataaaggcaaaatatgtaaagaagcaacattctttgggaacacacaatcataatcgaatacaaatcgacttgtttaaaagaatgcctgatgatttctcgtataaatgttcaagctttaaggtaattttggtacctgatgattttgatcaagaatccccggaaatggtaagcaaagagaccctttcttcttccggcaaaagtgaccaattcggcgactgtacagctctcagccaccggaaatcatccacattggcccagttgttagtctcctcctccaaaccagccgtcttcaaatcttcatcaatccctttgtaatccaaacaataaggagcaaatctgacaccgttactgtcttcaattatgggacgactcctcactctcaggtagaaatcactcttcctagcgcaatggattctgatctgatgcgacgccaataccagaacacaatcttctacgtcatcaatcagaatcgaaccaatcactggacctgtgtagacactacacttcttcagtcggtgaaggaacagagcgttgaccgttcctgttaattttacttgacatgaatcaagatccgacaatgtgaattctccgatcgacgagccttcgaagcttttcacaagagtctctccgtgtttgtttctcaatcccggagaatcgcgtacggggacgagtttcggaggtaaaacgacgtcgggtttctgtatctccgggagttttgattccggctttttggtcgttgatttgctcttgaacgagaatttcttcttcgggactaactcgccggagagaatgtcgagactctgtttgagatcggatacgattttcagagaggatcgaacctcgtaggaaggaagaaaatacgagttctcagcgagaagcttctcgagattgtcaatggctacggagatctcagcaagatccgacttaagctttgacgaatccgtagaggaggaagcgagtcgtgactcggcgatccgagactcgatggatcgctttgaatcggagaatttagcgagaaacgaggaagtcgattcaagagtggaggacgacgaagaggaagagtcaggtgaatctgattttcgagcttggtgacgagcggagagacgctcgagcatatcatggtgcttcttctgcaatgccggatctagggtttcggcgacggagctctgaccatcgtcttccatatcgtttttacccagttgtgtgattgggacggcggcgttcccgaatcgaaaactaagaccaagattaacctaaacggtgccgttttaatcaaatgaaaatactatgatcaaacagtgctattgtaattcaggttatcttattacaaaatagcccaaaatcaagagtagaatgatgataagtgataagaaaaaatgatatcaattgatttctctaaattatttcttatctttgaatatttgttaatgatcatacaaattgagaacaatataaaagcggttttagttgttcaattgagcattttgttcaaagatttgatgtctcggtggtttgcaacaacaactcgacttggttctaaatgatgcacaagtccagtctgtgtaacctttcgacttgcaaagctgctggcaatcgtcattgcacggtccaatacaatcggcttgaacagtaattgcagttgcttgatctacaaaaataataaaaagtactaattaaaaagaaatgtaatgtataaaaccaaaggaattgtaagctttaaaatataatatacatgattatatctaagaacgtattttgaaaatgagaaaaataagagtgcttgattaacctgcaatcaccaacaacaaaattattgcgacagtaataacatctaaagatttgatcttggccatttttttgaagtattgttctaatgtataatgtattgttgtaaaatattttcttatgttttgtgttgagatctaatgagtttttatatagataattggtgacacaaaatccaaccaaaatcaaaatatatacactgaaccaacttattcttatagaaaatttgactaagaagtaatttggtaaaatataatatgtcatatagtaaatttggtagaaaataattatatgtaaggaaatatatcaccaagagattaaacatggattggtcaaaataataacttgattatataagtgaaaatgaaaataaaagatggactgaatatatttaatcaagttgtacattaaggaatggaataccatatttattttatttttgtttcaaaatatcaaaagtattaataaagataaaatttcataccatataattaagttatggccttttaggtgataaaaataaaagtaatgatacttcactatatgtaatattaattaatagagataaaatttttataccatataattaagttataaaattttaggatgtaaagataatttttataatatgaaatttatgtgatattaaaactaatttttttttagaataagttctttttgtttttgtttttgggcacaacatagtatgtattaagttttttgttgttgttgtcaagagtatgtattaagtttaaactatcaaaaagacgaagtaaggtgaatcagagaatttgcaatgcatgacttgggttaggtatataaaataagtttcaaaaactaaaagttaaatgtcgtaaagtttacaaaatttggaggagtaagttgcaattttgactcaaatagtttttgataatcaaatccacatcttccttcgttgcttcgtcgctttggacagaaaagaagagaaaaagtttaatagtaaaataatcgatcctcttctcttctcttctctgaggctcgttggaaatctgaattctccgatcgaatcgaaccaatcgcagaggctaagaagaggacctttgagagaatctccgagtcaggatcagaaaaaacggtgatacggaagctagttctagggctaatg

SEQ ID NO: 8912 - DNA, 3000 bp, Unknown
  misc_feature (1)..( 3000): cDNA_ID_1807488_gDNA_ID_1971923_Annot_ID_58552 3000 nt of promoter + ATG
tttggaggaggagactaacaactgggccaatgtggatgatttccggtggctgagagctgtacagtcgccgaattggtcacttttgccggaagaagaaagggtctctttgcttaccatttccggggattcttgatcaaaatcatcaggtaccaaaattaccttaaagcttgaacatttatacgagaaatcatcaggcattcttttaaacaagtcgatttgtattcgattatgattgtgtgttcccaaagaatgttgcttctttacatattttgcctttatttgtgatcttggagttggtttcatggaggtaattttttgatcttgaatatagagaaaagccaaatactaagagcatgtatatgggtgatacccatatagtatcataaagaatgttttagtattatttataatatttgtttattgtttgagattttttatgatactcttattaaatatgtttacattgatgataccacatgtttaagtatcatgaaataaataaatttgcaatatggattttagaacatgagattattctttgaaatacattcttcttttttttatctattatcatctttctgtcgttcattagattatatatagagggatgacctgaatcaagcctcaaagttcgatcttattctatgaacacaaagtgacaacacacaaaacaagatctaatccttttgtacataaagaatgcatgaatttatcttaagcttcctatgaacaaaataaagcacactcacacaaatacaaacgctcacacacacaatcccgagtttcggatgattgccatttgccacagtagaaacccgacgcccatgattccttaaggtccctcatgccatgaactccagcgatgtaaataagctgggtgactgagagtatgatcaagaacgcctccatggttctctacatagaaaaatgagagaaaatggacgtgtcatgaaggcaacaatggtgggatttccaaattttaatctataatttggtcacagtaccatttctctcagaatttaagaaagaacctgacagagaaatgatttcaaatcggccctgcaacaacaacacatccaatacagctcaatacaagatttaaattccagctccattcgataacaacaaaggtcaaaatgaggccaaggagcaagcaatgcacaaagcacatgagtaaatttatacctcatacttaacagttccagtaggattgctattgttagcttgacgaagcatcacattagtagattcaaagatcacatgtcgagaacatactagaaaactaagaagccaaatctaaaggcaaaacagagactaatgttgaatcagataaatatatgaagttttttaaaaaggaagtattttttctgttcttctcattacaaatcttttcattctctagtcatatttgtacataaagaatgacaattgaaattgaacaacttctacaagaaacaaattcaagaatcatcaaaacaatgtgcagagagaggatatgtatactcaccaaccttcaggaatgaatactgcatcaccaacgttaagagtaacctcctgtgactgcttcagagaatgctctccccttaagatggtttctcggtgctttttctcacctgtcacagtctgataacacaaaatagcaacgatacactcaatctttcaataatcgaagaacaggcagaagaatttcaactatccggatctgagcttacttgtcgagaaactcttggtcgacgacggcagagacgacgaggagtgggtttctcattcccaagaggattccatcgaaatcagaggaagccatggatgatgatctgagaaggattttcgagaaaagggaagagattcagaaggaatcgaaacagaagaaaattgatcggcaaaattagaaggaatcggaaaattccccacgagagagaatttttttgagagaaacagaaggaattttttttcgacaaaaataaatggacgaccaatcagagcctgccacgtaatatgagactgagtatcagaagtctcaatagactgatacggctcagcccagttttttgtggttggtccattaaaaaattgtaaatgggctactgatactctaaaaatatgagctatgtacatggtctaagttgagtctgccacaaaaaacctagtacagttgggctacaaggcccaatataaatgtaagccctttaacaaagagggaaccgcctgctttgactgttgagaacaacttgctggattcttttttcttcccggtaaattgagaaaccaagaaaatcaaacaagtactgcaataagaaagtgttgaatctgattttggaaatattatttgactccattattcccttcataaatatatacagtcaagcatatttatttgaacaagaaaataaagtcatactaataagcatagagataaagtaagatcataaaataagtataaagacatatagcttattaaatcacatgggtctctgaatgggtattggtaggttggtagatggaacaaaatcagtcatacaatcattttcccaaaagattggcctccatcatcagtgattcagtgattcatgcacacataccaaaaccactatatagttttttttttattattattcaaattacacaaataaataaataaaccttttttattaaccggtaaaatattcccatacctgtttcgtcaaaaaaaataaccggtaaaatactaataatttgttctgttttgtgtaaaaaagaatgtatgattttattttgattattttttttgttaataagacattaagactattgaaatgatgttggaatatggtcatgtgttttttgtggaggaattatatagttggtagtagtagtaccattactctccttctcacctgttttcttcctcttaaagtcttctctatatattttcaatataatccgtctttcttatacataaacttattttgtacgatcacataaaactgtaaacccccacacagttattggccgtcggattca

SEQ ID NO: 8913 - DNA, 3000 bp, Unknown
  misc_feature (1)..( 3000): cDNA_ID_1825387_gDNA_ID_1971923_Annot_ID_58553 3000 nt of promoter + ATG
tctatcatgaacttttaaattatgactttaatcaaatatatatttaaaaaaaaaagtatcatgcaatttgtgaaatttgacaggtgagatttggcggatggagcacgtttttatttagtccatgctatatatacaaaaataaactacccttggttggcagagacatggcaaaaataatccacatgcatgattggttaacttttttcccatcactaagataaaattacatacatttatataaaattcgaaataaagaaagcaaaaaaaaaactgatgatataataagcttttattcatcaaagtgggtatggtgataggactacactctctgggttgtgttttggtattactgtgtaagacttcctagattcatgaaaaagtatcgaaagttagaatcgaattaatccaaaaggaattattgtggaattaactaaagcaatccatacaaatcacaacaaaagctcgtcaagtatatataatcagaatagtcaataatttagctttgaatgccgaacttgactaaaactcagacatgttatagtaccaaaatatttgtaatttagggaatatcattgctaatacaatataaaaaagatcatagctagattcaaaatgttgaacatgacctacgacattgttgaattcattgatctggtcttgctaaaaactttaaaattgatgagttcaacatcttcaaatgcatgataacgggtccaacggaaattgacttttttttcatgctcctgatatataataatatctaacgattacgggttccactaattgtcattactcattaacattcctatttaaaagttgtgatagttttagggttttacgtagtcgtgtcatatagcgattaactacgtacttgtagatttatcaattacttctgttgtttacgagaacctaaaaaaaagaagcagatgcctagtttatagagcacgtgtactgtcttgaaaacttaggtaggttggtaaggttaccaaaagaccttaaaggaatataaagttactaattaacttaagtaaagttggtattgcttatatattgcaaagtattacaaaccaatcccctctgtatattgttttaaaccatagatttttttacaattaagtttatgatcaatcaattatttcaccatttctattaaattatgtaaaaagaaaaggatatatatatatatatataattaaataagaataaatcaaaataccgaaattttttattatccattctttgtggacatcgcccctaatatataaaaaaaaaaaactttcgtataactgatttatatttttttgtaaaaacttaaaggaagcctaagaaatatcttgtgatatttttgacaaaatgtggtatatatctttttataatatcatttataaagaaaatattgattacatggtgaaaaacattttgctagcgatcaacaaaattaaataggcacatgttaactgatctcatacgaccttgaaattttaatctttgtgtcgagagaccgatctttatgcaaattatgaaactacacatggtttatgcacggaagatcacattgcatgtataccatattataaaccaaaaatgatcaagaagaaggcgaaaacatttgggtaaattttaaatttcgatcatgcgattttttagctcatcatcaacagacaagaaactatcttttgtactgtaaatactaaatacaaaataaaatcttcatcattttttgcatgtgtcaaataaattacgcgaactttttttttttatcgactattaatagagaaacctgttttatttgccttgatttggaaaaatggagaaattgacttaagacttagtctcggtcacatcggcaacaacggagcttaaacggcgtccgcaacatggaaactcaagccacgaatctgatatattgactatagaagtagtaagtaactttgactcgtcccacatcagtttcaatttccacgagggtatttggcaggtgaactctctacgtacccaaaacataatggctattttatttcataactgatatttagcaattaattattcgtcctttttaaaccaatttctatagttgggaaaataatcaatttttacactttcaatgtatacgttacagatttttttttattagtcatgcacatattttcaatttttacactttcaatgtaaacaatcgattcttaattgttaaaaataggtttacgtaaggaattaaagatttgtttaaaatatgttccggccggtctaataatttacttgacgttaatttcttaaacacttttagataggaggctttgtttatcccaaatgattttgtaccactgcgacaatactagctagacataaaatgttaataaatttttattaagtaatataatcgaagtattagatcaatgtagtagacagttaggttaactaaaacaagagtaaacacttttttttttcttttcaggataggtaaaacaaatttcacactattttgcgtatttccttaaatttgttgttcgttttctcagcaaagatgaatattttgtttcatagtaattcacaagtataaactcgccagaactcctcaaacagtgaaatataatatagcttttaactgtttttcggctggaccgggtttttaagtgcatatataacacgaggaattttggcaggtcaccaacaaaacttttaaaaatattaaaaattcccatcaagaatagaaattaataaacaatgatatctctaataatatagatattttgaaacgttaggaataatcgtaataatgttcaacgttggtggtggtactcaagatggaccctccctcccacattttcctcactccttcgtaagtcctttccacgcataagggtattatagtcatttcacataaactaacgactactagacttgtatataaataggaaggtgaagctctctctttatccatgcagagacaacagaaaccacaacaaaaactttgagtcctcttcttctctatacacaaac

SEQ ID NO: 8914 - DNA, 3000 bp, Unknown
  misc_feature (1)..( 3000): cDNA_ID_1375813_gDNA_ID_1971923_Annot_ID_177222 3000 nt of promoter + ATG
ttacaccacattttttctgtaaaatatattatttatatgctaaaaaaagtcgtagatatttatacatcagatagattacaaacttgattagctggtgacccgtgcgtggcggctcatacaccgtcaacgtcgatcacctcccttgttttcttgtttagattttcaattttgtatttgtcttttctacttatggaatcgtagagttttaacgttgtggtttggtttgctttcgtgtctcatatctgataagacatggtattgagtgtttagatccgttaattctgatggtcgatggtgcttaaagttgcggatccgctccttgcctcaaagtggagtcacaagtagcttctgttctgtctgagaattctcttcgttgagtcaacgcctccattgaaggctctggctttccttcttgattcgtttatcttcttcccttgatgaatctatgcaacatcagataggctcgtggtatctccctcgtcgtcttcctccaatgtgtctctgttggcgagttgcgttagatttgtttagggattttcggagtctctcttttgcggatctttgactgttctgaggttgagtcttgtttgaatgaagtttcggttctagccatctgctttgtctaccttggtgttgtgtttgacatcgatggtcctggaaaatctctccttgtgatgagacggactcgatgctttttgccattggctcttggataaaaatttttggttggttcttctatctctttaagatctgcttcgtttggagtatgtgggtcactaatttgccatcttaagttgtatttcttccagtttaaggttatcgacttctcggggttggtttggaacgtttaatactattcaatgctctatcaagtctttcagtagagagaagagctattcaatgggttttgattcggatctttccacaagacaaataagacaattatgcgtcgatctcttagtttcaagttcagtcattttcctttcagattctcatgattcttagttcactcattgaaggtttttctgcttattttctaagttttagcttatggtatttgtatttttggttatttatacttttttttttttggttcttgtttttagagatattattttgttctgccgacttattttaccgagaattttagttccttctgctggtttttgtaacttgtactccaccatgtatcacccttagcggttgctatttcatgaataattcagacagaaaaatataataattcaaatttgatatggataaatgagaatttccgaatcttccacacttgaacttataataatccatagagacatacatggcagaatttaaaatctctttcattctttttcatcatctttatatcttcaaagtgcatgtgctcgggcatcatcatccaaattccgtttatactaatattattttcgaagctgatcgagtagctatatacatattaaattgtaacatgtatgaaacgtgtacgggaacgttgaattcgacctattttaaatttaaacctgataccaagaccaacaaaaccggtcttatacaataaatggatcaggcctcaggcctataacaaaaaactacagtttaggggtccattatctgaaactgggtcataatgcagaggcctgccttgccatctctttatacctaagttctacttcttacacatttcattttctctcatttagataacgtttctcgaaattgatcacaaatgaaatgaatatgacaaatctttaaaattgaataagtgatgacccaaagcctttaattgtgttctaaaaacatttcattgtctctcggaaaagctccgtttcaaagagagaaccgtcataggattgtttctttggtttgcgttatgtactttcacttagaagaacgcaaatgcaaaattagaagaaaaaaaacaatcaccaaatatagtattgaacttttctataaagcttcgatttgagttgtgacatatgctatagtatattgtatttatcactataccattttaaactttcctgtatgttttttacaggtcgttcaaaacaagaattgatattttttgacggtgccgttcgagcccatagtttttggacaattcaatgaaccaaacccaaattgcgtcagtcttgttcccccacccacaagtctttctttccactcccctgcgttgccaacaataacatataacactaatgtttttaataatatatcccacatctaatatatgggattaaatatgccatccgtataattttataacttatcctatcgaattttaagtttgctcaggaaaattacatttggtttcattaatcaacaaacaaattatagtttatcattttgtcatcaaatcttctgtgacgtaccttctgacgtttttcagaggatgttatattttaaaaatctactttttaaatgcatcttacgtatctctctactatccgctgtttattaatttctctgaatttttaagtttaagaaaatagaaacacccttaaaaaaaataaggttaagcattaccaaaaataaacccatacggtgacgtatcacagactccaccacttgttctaagccgagccgagccaagccgtataactattggttcaaacttaaccttagttacattttaaccctttctctaagtttggtttatttaaagaaagataagtttggtttatttaaagaaagagaaagtgtgaaaccaacttgttcatattgaaaagaaccattgctctctagattaaaagcttctctctctctctctctctctctctctctctctctctctctctctctcttttggactttctcaatccatatccctctctctgttttttctaatttgagcctctaaagtctcctcgttttgttcatgttgttgttcaagtgaagaagctcaattatgtttacaacattgttgtaatttcaaaacttcataagaatttctctgataataaagaaaaagctggagtagaactattttaaagtgtcatcatg

SEQ ID NO: 8915 - DNA, 3000 bp, Unknown
  misc_feature (1)..( 3000): cDNA_ID_1007791_gDNA_ID_1971923_Annot_ID_177216 3000 nt of promoter + ATG
actacagatacatgcatgaatgtacatttgagcttggtatcaagtttggtgtgaattcgaacatggtttaaaccctcttcttgaaacactgaagaagaatgtcttacgaaccagttcaaatctcaaagttaacacctcttatgatccaactcgaagcaatgcattgatatatcacaatcaaaagcaatggcgagaatcgattaaagttatttcattgagactttattaagcttaagttatattaagaagagacactactttttagaggaggatttcttcttggagctaacaacaacaacttgaggtttaggatgtttctctgcttcacttggatctaaccacttaagatgatgacgattaaagcaaggccaattaggtattgtgatcagagtcgtcagaacaacacctccggcgtaaatcaacatcatcatcctaaacgacgccgttgtgtaaccaacaacgaacgacacaacggcggcgatcagaagcaggatctgcattaactgctccgccaatttctgcccttgccaatccatatctgaagaagaaaaaaaaacacaaaattacgatttagatccgatataacaaaatttgaatcgcacagatcgatctctttggagattctatacctagaaaatggagacgattttcaaatctctgtaaaaattctggtttcttcttgacggaagaagacgacgactccaatatttcggttagtactgaaccggaaagtttgactggtgcaaccaatttaatgtaccgtacgtaacgcaccaatcggattttgtattcaatgggccttatctgtgagcccattaattgatgtgacggcctaaactaaatccgaacggtttatttcagcgatccgcgacggtttgtattcagccaatagcaatcaattatgtagcagtggtgatcctcgtcaaaccagtaaagctagatctggaccgttgaattggtgcaagaaagcacatgttgtgatatttttacccgtacgattagaaaacttgagaaacacattgataatcgataaaaaccgtccgatcatataaatccgctttaccatcgttgcctataaattaatatcaatagccgtacacgcgtgaagactgacaatattatctttttcgaattcggagctcaagtttgaaattcggagaagctagagagttttctgaggtacgattcttcgatcctctttgattttcctggaaatattttttcggtgatcgtgaaactactggaatcgctcgataggtggtacgaaattaggcgagattagtttctattcttggccattatcttgtttcttcgccgaatgatcttccggataaagattttaggttagagatgaatcgtatagctagatttcatcaccagatagtttctttgtctagaatctctgaaattctcgatagttttcacatgtgtaaatagattgttcttattcggcgattgttgattagggttttgattttcttgattatgcgattgcaattagggattttctttggttttgtgttgatcttacgatacattccggcaattgaatacgtatggatctaaatcttgttaatttgttgaacagatggctcgtactaagcaaacagctcgtaagtctactggaggaaaggctcctaggaagcagcttgctacaaaggtaagactcgggctctcacatgtgatctgagtagcttgataaacacatttctagatttgttctaattggtggatgttttaatttaaggctgcacgtaagtctgcaccaaccactggaggagtcaagaagccccatcgttaccgtccaggaactgttgcactacggtatgcaatctgtttcttccccaaattcaattgtgtttttactttattgatatcgtcattgattaaactctgtttctctgttttattgatcttgattgacagtgaaattcgtaagtaccagaagagtaccgagttgctgatcaggaagctccctttccagaggctagttcgtgagattgcccaggatttcaaggtaatgtgtctgttcgtctgattcagtctacaaatggatttaactttttacttgttttgtcataaccttgtgttcttatcttgtctctttgattgcagactgacttgcgtttccagagccatgctgtgcttgcactccaggaggctgctgaagcataccttgtgggtctctttgaggacactaacctctgcgccatccatgccaagcgtgtgaccataatgcccaaagacattcagctcgctcgcaggatcagaggagaacgtgcttaattgtgattgggaagtagttggattatgtgaatgtgggtggttttctaaatagatagttggaattagataatggcttaaaaagcttttgggtgtaggagacttggaaacaatggtgttttttttttcttttctttctgtttcttgtctagtcggtttatgatttgcttgtgttcttcttagctacgttttgtggtgtgtattgctttcttctttggcaatgttgaacaccttttgttgttgaattcatctctgaaacatatgaatatgttaaagtttctgactcttgtttcatctgtatctgttcgatattgtatgattgagttttattgtttatcaataagctttctgtttcaaagttcttttcaatatcaacaacttttacgttcacgaaattggtaatccgtgtgacacttaaaatctctaatcgtggccgttgggctgtgttgagaaaacacaatgtacaatagtttgaaccgtaggataaagaatgtgagaaagcacaaaggagcgtatcgtgataaccctttcgtgagtattataaataataattcaactacattgcggccacaaccactacttcaatcatcccctattactgcttttgttacgaaagacaaaaaaacaaaacaaaacaaaagtcagctcaggcgaagaacaggtatgatttgtttgtaattagatcaggggtttaggtctttccattactttttaatg

SEQ ID NO: 8916 - DNA, 3000 bp, Unknown
  misc_feature (1)..( 3000): cDNA_ID_1825373_gDNA_ID_1971923_Annot_ID_177213 3000 nt of promoter + ATG
gagcaagaaggagaagaaagaacatagcgagaagaaagaagacaaggagaagaaagagcagacacatcagaacttcgataagaggatgattgggaaaacttgtagtttcagtatcatgaagctagctcatcacaatcacaaccacaagcacaacaaagaaacatcagaggaagagacaaaaaacgcaaacggtgggaatcatcaagagaatagtgacgaaagtggtgaaggaaactctccaagttcagattcatatctattcaaaggttcgatctttgatatagcagagacgccacatgcacaaatgcatcacaaaaggaggtcttcgtgtacgtttttggaagaagtagagacgataaatccagaggatttggagaatttggatgggaatcatttagaagaaggagagttaaatgacaaaggagcagtagcaaggaagaagaaggcgtttatacgtagatttggtgatcttcttgttaggaggaaaagcttaagtttctcacacaagaaagaatcttccactgattcacaagataagcagcaacctcagactcccacgtctccatctccgccactaccgccgatgtctccggagccctgaagagcattgtgttaatgatatgccattgttgtgttttcttctacagtttgagttttgcaggaacttttcttttgtacatagccagccaaacgtttgaatgtgttgtaataaggacttgatcattttaatatgtgcaggttttgtctttcttaacatgttgaatcgctttatgattttaccggaacgaaccggttgctatggtttcggtatgatttgatttctcgttataggccttagtcggcccaataacgaagattctctataaataaatgaacataaacaaggcttattttgttggaaatatatttaacttgtttcactatttgtctatttatatgggccagagagacctttttcgattttcttatgtaaaacacaaaatgaaataaaactgaaaaagctcaaacaatgtggtaaaggtgtcatagttgcaacttacaatgaaaatattttaatacattaaaaaagaaatccactttatttgaatatagaaagtgaaatcaaaatgttttgttatataaaatatatgtagaaaatcaattttttattagccaatttcgcatttgcactcctcaaatcctctagtgcgattcttttattgccttttctaaaagccttgaaaagttaactttttactagaaaaattcccatgtgtttgtatgctatagctttattttctatttatgctaataaaattgacatccttttcgcatttaaccagattacaaagcgaaatgtaatccatattgtgggaaaaaggtatacaagattccaacaaattaagaaatttcattattataatagtttttggtctcgatatttgggaaatcataatgaaattcataagtttttcaaatgtataatagccttccaataatagcaaccaaaatgtggggacaattctgctatcacccaaccactcaacggtgatgggcttttacatcacggcccaatattaacctcccacgtaacctttttccattacgccctgacgcacaaaacaccacttccacttggcatctagttttgtcacttgcttcgaaattgccacatgtacggatagtatatcgccacgtatacgaatgctttggtttaccttattaattctactatttcgctttctcaaggcgttgacttcttaaccctctatatctctattccataagttcgtgtcttaacaaattgtttagattaacatatctcaagtcttaacaaaataacatatgaaggatatgtataagataacactaagctggataattttccttaagatcacaagagatcattgagaggattttgttaagcgtatcttaaaaaaaacagagctgtttgaatcatcacgaatatagtatttgattatacacacattatttatatgcaaatacattatactaaaacgataaaaatgaaagaaaaaaacaaaaacattatggggggcgactataacgaagtctgctaaacattttgcttacctatctataaaaaaaaagcaagaaaaagattatacacaatgaaagaaacaaacagaaggatcaaataatgatctaaggcacgcattgtttaatagaccacgtaatttgtttaagcaacattttttattggcttttagcttttgatcatttagccgttgacctgttaatttggtcgacatctaaaattttgttttgtaaataaagattaagctcaattattaattcatttataatatttagatgagtttgtttgtttattgggttgcggaaaatgatcacgaaatctaaaatgtgggccattctttatgttttctaagataagaaaattaggtatctttatttaattttaaaacaggtaagtttggtagaaaacttcaatttaaaagattgaatatattactaaaaatgggtaatcgcatttattaatcaggtattcacttttcaatctctgagatgttgatgaactatataacatacaaggattaattatatgtattgacaatgaattatttttctcttgcgagaaaacgtataattcttggtctcttccgaagaaggtacacatcataaatatcgatgaagagacaaaccaaatttaacggtttgcaagttcaccaccttgttcctgtccttgttgttcatgtttttgagagatgccacgtgtcaaatgggcctatattcaacaataatattgacggcccaacagtctcgtgggcccataaaggtaagttggtgctgactgtatctgtacgtatgtctgtatataaatatgctaatatgtgactgaaccatgagagaaaaaaagcttaaattctttagcatcttgctttaataacctcgaggaagcaaaacgacatagtttttgatagagacatagaacaacaatattctctttcttttctctgttctttgatcctccgatcaatg

SEQ ID NO: 8917 - DNA, 3000 bp, Unknown
  misc_feature (1)..( 3000): cDNA_ID_2179563_gDNA_ID_1971923_Annot_ID_177208 3000 nt of promoter + ATG
gcagacccatgtcacaatctggcctgatctgcggactgctctgatcaggtggggaagcttaactctcatgttctcggcacccattctcacaattacagtgattcttccaggcttgttattaggattcaggatttctactagcttaaccagctcaaagggatccattttgttgctcacctgcaacaagagttttggttattcaatcgattccgcttaaaactcaacttaataaactctcgttattcagtggcaaatcaaaccagctaccagtctctcactgaagaaaagacaatcaaaatcaaccgtctgatttgcaagataagagaagaaaaaaacaaaaaatgctacgagaccaagcataaacctctcaaatgttactctgttttgctttatcataaaccaaaagtaatatctacctaatcattggtttaagtatatcagtaagaagctgcatattatcgctctacctacgcgttgaattttgtatttttctttgaaaaagttaaaagtaccttaatgcccagaggattagcaatccccctgagaaactcgacatgagcgccatccaattgtctggtacgctctccgcaccagaccatgtgtgcagaacaatcatagtagagaccagaagttgaatccaaccttgtaagggactgttcataaggcagaagcaaacactcatgggatgtgtagaaatcagttgtagtcataagtggatgatccgtgccaagtccacatgcagacatgaaccccaaggcctcatcaaccctattagctaattcctggtacctgtacagcaaaacctttagcaccttacataacctaggatagctgctatcaccatcactaattcatctagaaaagtttgctttcaaaattgagttgatgagttgggtgtacctgtcagcttgctcactttgttcaacaaaatcaaggttccattgagtaactctttgaatagcagcgtaacctccagtggcaaaggctctaagaagattcaaagtagctgcagattgagtgtaagctcgaatcatcctattaggatcaggaatcctggatttctcatcaaaagtatcaccattgatgttatctcccttgtagcttggtaatttcactccatccttctcctcaaatgcatcagatctaggctttgcaaattgaccagccatcctcccaacctaaacacacaaattctctcaaattccgctcaaaagaaaaaacaagaaagattgaattcatcgatctgaccttaatgaccggaacctggccaccgaatgtaagaacaatactcatctgaagcagaaccctgaaggtgtctctgatattagtagcattgaactccttgaaactctcagcacaatcacctccttggagaagaaaagctttaccaacagcagcatcagccaatctctcttcaagattcctagcttctccggcgaacacaatcggaggaaaagcctctatcgttttaagcacagactcaagctcattggcgttaggataatcaggaagttgcagagccttcttcagtttccagctctctggagtccatttcaatgcaccagacgaagaagacgcaacggattctttgactgaaacagcgtttctagctggctcagccgcgtgtacagccgtgacgaggttaacggatttaggcttggtgttgacggcgggatgaaatgtgaaggatgattgacggttgcttggacggtgagaaagatcaccgccgtagatagatctggtggagagagaggaggcgttggaaagagccatcacagattttctctgactctggatttggttttttagagagagagagaatgagaaatggaggcggttttgatgtgaggagagagaagacaatgtggaaagagaagaaggtatttataagggagagggttggtttcgacttttcagagttttttgttttgcagacagaacactagtgtaccaaaaagagggttgttggccgtcgtaggggtatttatgtaaattgtgtgctttgagatatttttcaggcgacgtggaagcttttgtctcttttggccaccgttaaaggaaacgtttttcatgtaaaaaataaattttataatagatgatgctaaaaagtaaagaatgattcaatttgattgaaccgatccaaaatttggtagatactagataacatttaaaaacttttggttgttgatttacaaagctcaaaacaaaacaaaaggttgaaaaaccagaatttggaaagtataaaaatatattccaatatttatgtttgttaacttaatttatgccacgttacgtataatatttcttttttaggtagctcatttaaaacattcgaaatttgatgccacttatcaaaatttggatgatgacaaaaaaaaaatttaaagggaagtccggaaattgggctaatgacaaaaaaagccttcaccaaccaaatctaccaccactcatcaagttgcatatgatctaaagactaatttgtgtttatcaccacctaacacacacactgaatccttttataagatatgatgaattcatggaccacgcccttttaatatttgtcaccatcttatactaacttccctttatatatatgaaacacaaggattttaaataaaattaatgtgatagaaaatcgaatatcaacccctaccaaaatcattacaataagtttagagcatttaatggatcatagttttggaaatgcttgattgcttgatttttttcttataaaaaatctgtctttattggatgatgatagttttttatatctgcaaaaaagtattattttacagaatcttattcaaaatcctataatattcatcaactaattatttgaacaaaaatacaaaaatggagcggtaaaagttagttattgaccgttatttgtaaagaaaattaggttttcgcaaattatagccaccacagattgttttttttttcattttatcttgagaagaaccacacacacccagagagagacagagattcatcgatatg

SEQ ID NO: 8918 - DNA, 3000 bp, Unknown; identical to SEQ ID NO: 8913
  misc_feature (1)..( 3000): cDNA_ID_1825387_gDNA_ID_1971923_Annot_ID_177204 3000 nt of promoter + ATG

SEQ ID NO: 8919 - DNA, 3000 bp, Unknown; identical to SEQ ID NO: 8912
  misc_feature (1)..( 3000): cDNA_ID_1807488_gDNA_ID_1971923_Annot_ID_177203 3000 nt of promoter + ATG

SEQ ID NO: 8920 - DNA, 3000 bp, Unknown; identical to SEQ ID NO: 8911
  misc_feature (1)..( 3000): cDNA_ID_1825394_gDNA_ID_1971923_Annot_ID_177200 3000 nt of promoter + ATG

SEQ ID NO: 8921 - DNA, 3000 bp, Unknown
  misc_feature (1)..( 3000): cDNA_ID_2994902_gDNA_ID_1971923_Annot_ID_177196 3000 nt of promoter + ATG
tagtgcttttgttagaattggaggatttgatttgattctagatatatataaatgtaggcgattgaattggtggagcattttgagttctcctatggagtatggtcttagctttgaacaaacaaagaatatagtgatcactcaaataatgtacagttcgtttcaatttcctttgttgggattagtttttctatcttataattaaaagaatgaaattgaagtggttgaatctttgctcggttacttttgttgccgatatgtattcaaactgagtttggaatggttcaagagatttgtttaatatttggtatttgatttgaaattgaatggttaaaggaacttataactttaacactgtcgtgccagaaaaaaagcttggtaactgaaaattattactatatacaaaatgaattcacaactgattggctttaccttagagaaggaactagcttcccagagtaggtctattttgaaacaagaagaagatcgttttaagtgaagtatcaatgatttcaagtgtaatcagagtcgagagttccggttatgttgatgctacagcgatgctagtaccgagccttgttcactcttgtattggttaagatatagatttgaaagaaaaatcttacagcctatgtcaccgcaccataaactatttctctttttgtattttttgggtcaaaaccccaccacagactatcttcgataatacgtgcatgagccaatgggcttctttttttaaaatataaataaacaaaaaagaaatctttcaaatttgtgggtatgtgtagttgaagatgttacttgtgcatggcgacaattaaacttgagaaagatttattatttggtatttggaagagagttacagttttataacaagaattgggttagagaaactttggaaaaattcttaaaccctaaacccatggagctaataaaaatctttgtgacttgctttctcctcaagaaatataattgatgttattgtatgaaatgaatacaattaattattaataagattatcaactcccgtttttctcttattcttcttctagtgtcttctaaatacatttgaaatcgtaaataaaacaagtaaacaactcgttcccctagatatatacatacgcttaaaagtaaacgttgtatgcaacggtaactttcgtaatagtaatggggaatatgtaattattgtaatgtaacggtaatattttgttttatcaaaaaaaaggaaaataattaacccacacgactctttaaatacggcctttgcttcttcattaacagatcaaaattctcgtactcaagagagaaaaaaaaaccctagaatcgaatcctctctacaaaagtcctctttgtagaaaaacctatttctcaatcgatcagtggttcagagaatctcttacggttatggttctgttctaatttaatcgtcgtagctagtgcgaagatccggcgatgaagacttgcatgaaagcgatggcgttgaagaaactcgctacagaagactcatcgatctgccgccgagtcaccaccgagattcgctctgttttgcggttctaatgattaattcaagacaacgttgggcttcgtgaatcgtgacaatcgacgacatagagagagcttcccgatcacggtggtggaggaatgctttaccgcgatacagatttgtcgtggattagggtgcaatttttcaaagcccaacaacatcaattctagcccatcaaaacaggtcaattctcagcccattcatcttttaattttttctcatcccaataacaaattcacattacaaatagggttttatacacggattttttatatataaataatacaactttttattcaggtcttcttttttttggaaattttagatagaaaaactttaaagtctttttcttattattttaaataaaatattagataaacagttttttaggtataaataatatttttattttttattttttgaagtgttaaattttatatatgtgtaaactaatcggacacaacatcccgtccataatatgaggtccttcagcggtgtcataggttcaacatgtttacacatcatttgaatttaacactttttttttttttttttttttactaaaaatactttttttgatttttaaaataaaatattattttcttattaagtatacataatatttttattttttatttttaagtgttaaattttagatgtgtgtaaactaatcggacacaacatcccgtccataatatgaggtccttcagcggtgtcctaagttcaacatgtttacacatcatttgaatttaacactttctttattttcatacttttattaaacttaattttaaggtttgcaaataatgttataaatatattgatgtatgttaaaaaatttatcacttaattttagacataatttaaaatcttaacacttatttcttttatttaaaaacatttatatatcaatatctaaactgtaaagtttttttttgtttttaacttaaatttagataaacagttttattttcttacataatatttttgtttttaaaaaaaagttgtaagtatttttgtttaaatgtgtaaaaagaattgaatgataacagattctttactcacagaacaagagatattaaattttctttatgtttatagtatttaataaagtttatagtatttatttccatatatacatttgtttctgtaagaactatccatttgatactagaataaatttcttcatttggattagattgttcagtacaaaactctatttctggcatgtcaataaataacaaatgctaattttggctcttaatcttgttgatagaatactaaacttgcaatgctttttacactaatctttatctctttatatatttatttttaaaaactcttctttcctttttttctgatttaaagtacaaaaaaaaaacaatacatctttccattgaactagaagaaaacattttcactgtccttttgaatcagaagaagaaagagaaaaaaaagag

SEQ ID NO: 8922 - DNA, 3000 bp, Unknown; identical to SEQ ID NO: 8909
  misc_feature (1)..( 3000): cDNA_ID_3044026_gDNA_ID_1971923_Annot_ID_177194 3000 nt of promoter + ATG

SEQ ID NO: 8923 - DNA, 3000 bp, Unknown
  misc_feature (1)..( 3000): cDNA_ID_1824406_gDNA_ID_1971923_Annot_ID_177192 3000 nt of promoter + ATG
ctctcaacgggaatattcaactcaaaatacatggctttaaatatttgatttacccaaaatctctgtgcataggaagagttgcaagaacacacattcttcattagtggttaacggcaaatgcaaaaaaacgttataagaagatgaatatgagaaaacgaatgcaggaagttaccaagtgtttgggggcaacaaaccatttgctagcttacacaacagaaaactacaacgaatttgaagccggtaattgcaacaacagagtctccagctgaggccaaacccaccaagatttgtttcatcattgaagacataaactctttgactaattacctttgtttggaatgaaaacctgcaattttgaatgctagatgatcaatttgcatacctccaatggaaattatatgaaaccaaaacagagaacaagaagtttagggcgctagagaatatcatctctcttatctacctaaccagattgtttcatattcttaagacttcacaatttatcgaagtcatcataacatcaccaatcagttcttagacatgccaaaacctaaaaaagggaaaaattcaagaatgaaacaagaacagagacaatacctcaaactctggtacaagatgaatcaaagtcatcaggagcaacacgtgcaatccaattgtttaacgtccgcttaacatcagtatgattaacataagccaactcatacatactacacaaattcaccaccaagctctcgttcaaagccgcggttggcactctctccaatgcactttccatcaccttaatcgcatccgatagatctctcaagtacatcaaacaaagagccttattgttgacagcgataatatcagagttatccctttcaatgcatttgtcatactctctcacagcagaaacatagtcctttgccacaacataaaccaaagccttattcctaccaacaagattgttgaactgtatctcgttcaataaaccattgctctttccttcattcaacatcttctcaactctatcaaacgtagttttagctccttctacatcaccaaactgcatctgaacagaccctagtttcgaaatcaaaaccgggtctaacggatcacgattgatcaattccttcatcaaatccaaagacaccccaaattccttgtgacctaaatgaaaccctagcaagcaattcatcacaaatgtctctcttttcttccacaattccacagaactctctaaactctgagattctttctctctgattcgatctcgaacaaagtcaagcaaaacatataaacgatctaacccttcctgacgattaccaagcttagtcgggatcaaagcgtagagccatcgtaaagagaaaggaaccatagatcctctccgattagggtaaatctcagggaacgattcgtacctgtaatgcgtcccgtcgaaatcgtgcaaggaattaagctcatgagaagcttcatcggagcgacgaagcttcgcgagagccataacttggtaagtgagataagtgagatgctcgtgaggctttgtgaggaggaagagagctctggcttgagatatcttctcgaggatcgcttgccatgagccacgggtcgaaagctcgtggagcgagccgagatcgtgtgttaattcgtcgagcgaattgaatcgttccggtggtagatcggcgacggatgtgacttgggatgaggctaattcgaatgccgtcggttcccctgcatcggttgactctgccatggcggtggaatcagtggaggagggattgaattcgggtcgggtttcggattcgggtaaatccggatccattgctggagatgactccgtgaacattgtggaagtaacctggtttggtctttggatttgggtcgtctttccaatagataccattacgctaaattcttctttttggcataaaaatttagattattttttattaaaaaaaaacatttgatatgattatgattttaggcggtttattaagatttttttataattagatcaaaaataattagatcaaatactaaaattggaggagaatccaaactttggatttcatatattttattttttaattcactagaaatgaaacaataattaaatccaaaattacaattaacttgtctcggatcgattgatcaatgttgattttttgtcttatgacttttcttcgtgtaacgaaaggagttacttaaatggtggagtaatggtaataaataccatgttataatattgttacatactgataatattattttccccatgttacatgttacatcattgatttttacgtagatatttaatataacgaccaaaaaaaattaagctctgacttggtccaagagattttttctcgattcttaccattgaccctgagctaagacttgaccaaattaaaagtctatgtggaatgtactgcaataagtaagtctttttaattaactaaagaatttcagacctaaccccatatttttttcggataaggggtatgaacatgtaaattattcaattttctattgtaggtatttaaattcgagatttttaaaaaatgaaatgagtgactaactagctagttcaaaccgtaaaacctattattcatttaatgatttgattaagtattttgttttaacaatagtttaggctttaaaaatcttacaatcaaacatcaaaatataatgtggttttactacggaaaaaggaaaagcagtgtagaagcatcgaacatacttgacttttatgacttacaaaacacatgaggtacacagaatcatatactacaattttactttgctaataaaagtcgatgtattattattagaaattatcactaaatcgtagaaaagtgaaacgcgttttctctccagtttttctccaaaagacaaatgagttatctgtaaacacatgacatgcaatgatctatcgttatgtatatatgaattgattaatctcgaactatatattgaaatctcagcttcttatcttctttgattcttggagacacgattggaaaa

SEQ ID NO: 8924 - DNA, 3000 bp, Unknown
  misc_feature (1)..( 3000): cDNA_ID_1841858_gDNA_ID_1971923_Annot_ID_177188 3000 nt of promoter + ATG
aaaatggcacacttcttctaagattatgacaagaagtcgaaggaattaccaaatagcccaaagggcaatgccttactcgaagggtagtctcgagaaggtaattgtgtttttttcccctctcttcaaatcataaagaatttaaattgccgttaaattttgtctttcttttaaatgtttttgtttaatacagatgacacaaaatgtgaagaatctgttaagcaaagctcaaggcaatcaaactctccaaagcttgatcaatcattctcattctttgcttagatgattactgcatccctcctaaatgttaatttttttataaatagtttgaagaatgaatttaattgtatataatatttataccttcattgactctattaccaaataattcaattgatattgtttatattttgtcactaacaactttttatctgatttttacctcaaacttttatgaatacatcacattggtattgtttgtcatctttaaatatattttcttttgtcgtattatctacgacttattaatatttcaacgtaatagtttttaatatttttgtcgtatttattcatttctatttagttttggataagctcttgatcttattttataattaaatatttcaacgtaaaagtttgtccaacttataatcagttgtttttaatttaattttggataagtttctgatcaaatatttaattcttattctgtttaaattggaaacagtttatctgttattaatgtgaaacgaaacaatggataaactgttcccaattgacaaaaataattgattactttattaatgtgaaacgaaacaaagtttgtcaaaaacaaatatgaaacgaaacaaataaaatatatctacgttattgggaagaagaaaaaaaaatatctacatagttgcaattaaattatatattttaatacaactgttataattaagacaaaatatatatgtatatatatatatttactgcttaatatgttttgtttgtcgtattatctattattcgtttgtgaattttattttggatagtagtcttttcatttacttaaaattaaataattcgaaacaaaatagttggacataatcaagcgtacgagaaacttccagcacatcaacatcaccctttatacaaaatgatttttgagtgaaaaaaaatgaatgtgaaacaaagagaagtatgtggcgtggaggaacacagacaaagagtttacaaagggaaacaaattatcaatacacaaacgtacgtatggccacaaccatgcctatcaaactttttcaaagccattccatttccaaggtgtgtccaaaaaccattttttttttttttcatcctccataattagtttttggattcagtttttgaaacttcttatgtcgactagagcaagagcactatatttttatgtagtttttcaaaaattagcattgctgcaatgaataggtgatacgagagccaagatcacacgtttaacctttaacttacaaatcatcataattaacaacacaaagataaaaagagaatgatataaattcaacagataataagagatcttttttaacatgccacacccaaatctgaatataatgcaacatctttaaaagaaattgtattacaaatcagttcatattggtccactaatgaaatgattcattggaagaccgatgtctagaataattttcaaggcatgtgcaaaaagttggattttctttccatctaaacctttcaaatgactaatcattattgaaatagaaatgaaagaatcccggttacaaaaggaaatcaaattacatattttaggcatcatataaactagtgtaacttggaaaagctataacaaataatttaaatttttaacaaatgtttcaatttgtgttaaaatattcaaatttgaaagtaaaatgtaactgatattttccttatgacacattgctcgaccataatcaattaaataatatattcagaataacgtctttctaagacatgaaaaacacgtgaaacagagcagtagaaaaagtgtgaagatgttttacagacaatgataatcagtgttctagactaaatctttttgtttcatatagattcatagttatcaatgtctggttatgatacattactcaaatgtgaaatcacaagtatgaattaatattatatttaaggtattttaaatttcttagatatgtgtaaaaatatatttaaaacacaaatctttaaaaaaaaaaaaaacataggtaccttgaaatcatcggcattttgaccaattaattagtgcaagtatcaattaataacataaaaaatcgtaattaaaaaaaggtaattcacgtgtcaaacccagtcaacaagattccataggacccacttttaaacggcgacaaaaaagtctttaaacggtcgcacttttgttccaaacgaccgttaacaccgatattaactatctcacgcgccaaacgctacacgtgattcctacggcgaccaattgacagctaaacgtggttcgtgttgtgcactctctttccttcgtaactgacaaaacactatctttttagtaactgtaacggaacaaaaggtcccatgttgacgaaacactgtcgttttccaccaaattaacggaactaactaacgttccccacaaaaatgtgggacccatgaaacaaaaaaaccaaaccagactttgctatcatcataacaaagcgacgccacgtgtatggaccagatatctgacgtgtcaattactatttttaattttccgctcctccctcacgtgtgagaccccacacgtgtggctcactatgaaccagaagcatcactagctcacatgcattggacaaatagggaccatcaaccagtgaagtgacgccacggtgtctctatctcccttgctgtctcgtctatataaacttgcacgtctccgctgattagaagcacaaaactcacaccccaaaaccgatccaaattccgagaaagacaaccaaattttccttttcctctgcaaaaatg

SEQ ID NO: 8925 - DNA, 3000 bp, Unknown
  misc_feature (1)..( 3000): cDNA_ID_1825377_gDNA_ID_1971923_Annot_ID_58558 3000 nt of promoter + ATG
ccggtagattcagcgaagacgaagtataactttaattcatcattagcgacgattaatctaataattacattgataattaacttttgctaattattgttttagggaagatattatttcaaacaacttatctcgggagttagctattgtcacgctatggtacgtttagtcttctaatatgaataatctccaaaagtgatatcataccattgaaactactgcttactgaattttattttgttcattttgaatgtagcaaatatgtcacagagaccttaagctcgagaatacactcttagacgggagcccgtcgtcgcatcttaaaatatgtgattttggatactccaaggtataactatatgtacaccatgtaatctaagtaaccttcagtgattagacacaattcattgagtataattttgattttgaactgtaattgcagtcatcagttttacactctcaaccaaaatccaccgtgggaactccggcttacgttgctccggaagtcttgtcccggaaagaatataatggaaaggtacaaattaaattattaattaactacaataatagattgattaaagtaaattaataacaacaacaacttgtttgataaagaaggtcatataatttatattaacatatgatcttaaatgtatatagattgcagatgtgtggtcgtgtggggtgaccttatatgtaatgttagttggtgcttatccctttgaagatcccgaagatccacggaacattagaaacaccattcaggtactgtaagattaaccccttaaattatatcaaacgttctttccactaattagcattttatatataatctttttttggtcactaattaaaatttatttaagaataataattaatgtgaatgatcaatattacttgcagaggatattaagtgtacactacaccataccggattacgtcaggatttcctccgagtgcaagcatctcttgtctcgtatctttgtggctgaccctgataaggtaatcacataataccctaaccagtttatgtaaattataccataccggttccgataattggtttaacaaatgtttcatatggattgattctacattggttactacttttaaaactgaaatttgaactttgaaaccatgacatagagaataactgtaccggaaatcgaaaagcacccgtggttcttgaagggccctttggttgtgccgccggaggaagagaaatgcgataatggagttgaagaagaagaagaagaagaagagaagtgtcgacagagtgttgaagagatagtgaagataatagaggaagcaagaaagggagtaaatggtacggataataatggtggattagggttaatagatgggagcattgatcttgatgatattgatgatgctgatatttatgatgatgttgatgatgatgaggagagaaatggtgatttcgtatgtgctctatgatttcatatgcatgcacgcgtgagtatgtctatgcatatgttttacatgtatgccgcttgagaatatcagatgatcttgtgttgtatgtttgtatgatgaagtggaaatcattcacctctaatcaagttaaataaagtacgtataagctttgtgcgtctttatttatgttattatgtatatgtctataatctattacattactttcctttattgcaatacttctcttgtttaactagaatccaaagatatatgtatataatttattttgcactttagaataatccatagaaaaatatatatgtaattgtgtcttctgattcctaaacttttttttttgttgataaaaatgcaaatatttcataaacaaaaatgaaaacataataggttcacaatcgatgattctcaacctaagctaatggtcccttaaaaaaaaaaaaaataaccattgattttggtctatccactcgactataacaaaagatgtgtgtttttcagagactctgcttctaatgagcacaaagcttcgagtgaagaaacaagtagcgaagttctcgccgttgcttcttctacacgatctgattccatcggaagaaccccataagaccggttttctttgttgttgttgctgtggatctgtgcatttaaggtagatcttcacgatttttgcgcattcagtgactagaagagactcgagatctagttctttggagacgtttggattgcaagtaaccatgtattggaggaacatcatgtaggttttgtaagcctcgttctcgaagttaagtagttgaggctctgttaggttttggagagactagagagcatgctctcttgaacttccttctaaggactgtgtcggtgtttagttgctgtgcgtgagacgcaacgcaagagaaaatgtctgcgaggatatccacgtgtgatgcggacaatgagaactgttttttttctgtaaaagtcactcacaacatgtaaaagaaacagagaagtcaaaaaacagagtcattggcttaaaaagcaagaaacagagaagtcaaaacgtattgggcttttcagtgttaagacggctggaagatatggttatcggcccagtcgtaagcccaaagcatgctttatgtcgcgtgtcttatttatttattttcttctcaaaagcaatgtaaaccaaaccgaaatcaattttagtttaaaaacccataaaacccatcggcgctgtgacgcctccggcgaaaacaaaaaaactcggcgacggtaacaacaaaaatgggaagagggagacgacacagaggttcaacttcgaagagaaatcaaatcgaaaatagcaacgacgacaatgttcgaaaacccctcaaatccgaagcttcctttgattccaacaacttgcaaaagcccatctgctcaaatcttcattttgaggagtattacaaggtacctgtatagaatcaatgacacttgcatggatttggaaacttttcttctaatcaacattgttgcggtgtgtataaggaacaaagaatagtgaaagctcaagagtgggattcgtttatg

SEQ ID NO: 8926 - DNA, 3000 bp, Unknown; identical to SEQ ID NO: 8916
  misc_feature (1)..( 3000): cDNA_ID_1825373_gDNA_ID_1971923_Annot_ID_58559 3000 nt of promoter + ATG

SEQ ID NO: 8927 - DNA, 3000 bp, Unknown
  misc_feature (1)..( 3000): cDNA_ID_2109542_gDNA_ID_1971923_Annot_ID_58561 3000 nt of promoter + ATG
ggcgtaaatcaacatcatcatcctaaacgacgccgttgtgtaaccaacaacgaacgacacaacggcggcgatcagaagcaggatctgcattaactgctccgccaatttctgcccttgccaatccatatctgaagaagaaaaaaaaacacaaaattacgatttagatccgatataacaaaatttgaatcgcacagatcgatctctttggagattctatacctagaaaatggagacgattttcaaatctctgtaaaaattctggtttcttcttgacggaagaagacgacgactccaatatttcggttagtactgaaccggaaagtttgactggtgcaaccaatttaatgtaccgtacgtaacgcaccaatcggattttgtattcaatgggccttatctgtgagcccattaattgatgtgacggcctaaactaaatccgaacggtttatttcagcgatccgcgacggtttgtattcagccaatagcaatcaattatgtagcagtggtgatcctcgtcaaaccagtaaagctagatctggaccgttgaattggtgcaagaaagcacatgttgtgatatttttacccgtacgattagaaaacttgagaaacacattgataatcgataaaaaccgtccgatcatataaatccgctttaccatcgttgcctataaattaatatcaatagccgtacacgcgtgaagactgacaatattatctttttcgaattcggagctcaagtttgaaattcggagaagctagagagttttctgaggtacgattcttcgatcctctttgattttcctggaaatattttttcggtgatcgtgaaactactggaatcgctcgataggtggtacgaaattaggcgagattagtttctattcttggccattatcttgtttcttcgccgaatgatcttccggataaagattttaggttagagatgaatcgtatagctagatttcatcaccagatagtttctttgtctagaatctctgaaattctcgatagttttcacatgtgtaaatagattgttcttattcggcgattgttgattagggttttgattttcttgattatgcgattgcaattagggattttctttggttttgtgttgatcttacgatacattccggcaattgaatacgtatggatctaaatcttgttaatttgttgaacagatggctcgtactaagcaaacagctcgtaagtctactggaggaaaggctcctaggaagcagcttgctacaaaggtaagactcgggctctcacatgtgatctgagtagcttgataaacacatttctagatttgttctaattggtggatgttttaatttaaggctgcacgtaagtctgcaccaaccactggaggagtcaagaagccccatcgttaccgtccaggaactgttgcactacggtatgcaatctgtttcttccccaaattcaattgtgtttttactttattgatatcgtcattgattaaactctgtttctctgttttattgatcttgattgacagtgaaattcgtaagtaccagaagagtaccgagttgctgatcaggaagctccctttccagaggctagttcgtgagattgcccaggatttcaaggtaatgtgtctgttcgtctgattcagtctacaaatggatttaactttttacttgttttgtcataaccttgtgttcttatcttgtctctttgattgcagactgacttgcgtttccagagccatgctgtgcttgcactccaggaggctgctgaagcataccttgtgggtctctttgaggacactaacctctgcgccatccatgccaagcgtgtgaccataatgcccaaagacattcagctcgctcgcaggatcagaggagaacgtgcttaattgtgattgggaagtagttggattatgtgaatgtgggtggttttctaaatagatagttggaattagataatggcttaaaaagcttttgggtgtaggagacttggaaacaatggtgttttttttttcttttctttctgtttcttgtctagtcggtttatgatttgcttgtgttcttcttagctacgttttgtggtgtgtattgctttcttctttggcaatgttgaacaccttttgttgttgaattcatctctgaaacatatgaatatgttaaagtttctgactcttgtttcatctgtatctgttcgatattgtatgattgagttttattgtttatcaataagctttctgtttcaaagttcttttcaatatcaacaacttttacgttcacgaaattggtaatccgtgtgacacttaaaatctctaatcgtggccgttgggctgtgttgagaaaacacaatgtacaatagtttgaaccgtaggataaagaatgtgagaaagcacaaaggagcgtatcgtgataaccctttcgtgagtattataaataataattcaactacattgcggccacaaccactacttcaatcatcccctattactgcttttgttacgaaagacaaaaaaacaaaacaaaacaaaagtcagctcaggcgaagaacaggtatgatttgtttgtaattagatcaggggtttaggtctttccattactttttaatgttttttctgttactgtctccgcgatctgattttacgacaatagagtttcgggttttgtcccattccagtttgaaaataaaggtccgtcttttaagtttgctggatcgataaacctgtgaagattgagtctagtcgatttattggatgatccattcttcatcgtttttttcttgcttcgaagttctgtataaccagatttgtctgtgtgcgattgtcattacctagccgtgtatcgagaactagggttttcgagtcaattttgccccttttggttatatctggttcgataacgattcatctggattagggttttaagtggtgacgtttagtattccaatttcttcaaaatttagttatggataatgaaaatccccaattgactgttcaatttcttgttaaatgcgcagatg

SEQ ID NO: 8928 - DNA, 3000 bp, Unknown
  misc_feature (1)..( 3000): cDNA_ID_1977105_gDNA_ID_1971923_Annot_ID_58563 3000 nt of promoter + ATG
gacactttggtcttgtctaaagccaatttgacacggtttatcaaccagtggtcctaactcccaatagtttgagtcggcagttggagtcaaatattggtttttcacttttttgttttccagatattataaaagtcaaattatcccagaagtaaaaaactgaaattattactactgaatatatcaccgaacctttgttattttcgtttgatctctgagacagtctctgactctgttattgggacagacacaatgtagagagttatctcaaggtcacaataagtaaatggctattagcaaaataattcgtatgtttatgtagtttgtaaagttttttaaccactggatggatttcgttaaatacgtttgacattcaagaaaacggcccaattgtttttcttattaagctgttcggcccaaagaaagacccaatcttataaaatatatgcaaacacattattactttttcatttacattcaaaccaaacagtacaaagataattaagaaatgtgattgcaaggtaaaatattttagttgtaagaaaaatacattactttataaatatagcaacctttactttactcttcatcattaagtaccttcttttttatctggtaatgcaaaagctttccaatctactttgtgcccaactcacaaacaaatctgttgacattataaaagaacaatctttacttctttctttttactttttacttttttttttccttttctcttctactttgacactaatagatttggagtcacattttcctttcgctctttatatttttctccatcttttctttctctctttacataatggagtagtgttgtctcataggaaattcattttaattatgaaattagcatatataccaactgtttattttgttgtcacaagactgcgactagtcagacaatcgagctgaattttcgaatattcataacaaagataacacattaaactttgatattctctcggttattcgtaagaccggatgttgaacgttccaacatataagacaaataagccatagttttggactgatatttaaaaacaattacgaattttttaattgacttttttgcttggaggttcatgtttgttttttagtccaacggaatgtaatcatgtgataggtcacatataagaaattaaaactaaaacatgtccaaagtagaggtacattttgtaactagcaaataaagtttcccacctaataatgcttttagcttaaaaaggcgatgtaccatttgatctacgaaagcaaatgaaaaaattaatttagacttttatatttatttgttccatcttccatgtatcaaccaagaataagaccggcatttaaatatggatattcagaagatacataaataaaatagagttcagacaactaacatctaactactacgataataagttaatggaaatgtgccccactggtattttaattcgcatatgtaaagacaaattgtgtatatgacattttcatatattcgtttttctttataactatacttatatcctcgttcttacctattggttcttgtgtgtgtgttaatcatctatagattctcatctgagtaatcactagataattattatgcatggctaagatgaaacgtagcaccttaaatggttttattgattcatgatcatattattaatcccgaccacttaaaatcgatttcgttatcatgttaatgtactcaacaagaccggaataaaaatgagcattagcgacgggacatgtcacctcggtccacctttaaaataagttttagtagatgtgatgattacagtgctattacatgaattatatagaacaacaatccgaaaagcaaaaagaccactaatcagtgagaaaaagtcaacgagttttttcttttttgcatttttatcagttaagaattttcaaatagtgaatctaagtttcattccacatattgtgaaagacgaatgatgtatggtgatgatattgatagaaatcattatactataaactctaatttgtgaattatggttttgcaactactaacttacacggttgtatatttatttccatatttaaagtcgaaagcaaccgattgaaaacaacatttcttcttctctaaccattttcgacttactgtattataacacttattgtttccctaggattctctaagtaattatagctgttgcgtgctgccgattaccgaatcaatctatcatgagttcaacacatatacatcttcatataagttaattaatcacagataaaagaatcatatatatacacatggttatgaaaagggttcttcttgaatactaatcctctgtcttaagctatgtacgtacgatacggacatgagttataaagtatacatgtatttatgtgtgcgttgatgccagctcgtctcacgatcatcacacaacacaaacgagatgtactagtattttatgattgtgcaaaattcttttgtgggttcgtgctcacatgcgtttttgctaataacgatgcatatcttatatattaatccagcttaaataaacaatgtttagtgtttacattgttgctaaacgtcaattttaaatataaaaaacaaacaatatatatgctactaattacttacacacatttgcaatgtaaataagatcatttgtagtgatcatcttataatatacacaatttcatagaatttataatctcttgttgtttttttctctcaaaattataggtacgagttaacaatattattaatcccaagctttttttcttcaactgcttttagaaaggtgatcatcaacaaaacaactcaacgaggaaaataattataaaaaaacagagtggaaaataataaaacaaagtaaataatatcatatttatctctctctctctctctccaccgtcgtttcccattgattagtttctctctctctcttttcctttgtctccagagccgatgataaacgacggcggttttcaccggaactgagggaaattaagctggtaaacatg

SEQ ID NO: 8929 - DNA, 3000 bp, Unknown; identical to SEQ ID NO: 8914
  misc_feature (1)..( 3000): cDNA_ID_1825365_gDNA_ID_1971923_Annot_ID_58564 3000 nt of promoter + ATG

SEQ ID NO: 8930 - DNA, 3000 bp, Unknown
  misc_feature (1)..( 3000): cDNA_ID_1382581_gDNA_ID_1971936_Annot_ID_58570 3000 nt of promoter + ATG
gtgaattcgttgagtaaggctccgtcccgagggacttctccttctcctactttgaattcgtcgaggccgtggaaaccaccagagatgcctggtttctctttagaagctccaccgaatctgaggacgactttagcagacagaccggtctcagcttcaagaggcagacctggagtagcctcagcaccaggttcaagatctggttccatagaacgcggaggtggccccaccagcggcggcagcggaaatgcaagaaggcaatcttgttcgccgtccagaggtcgggctcctatcgggaacaccaacgggagtctcactggtgtgcgtgggcgagcaaaggcaagcaacggcggaagtggctgtgataacttgagcccagtggctatgggtaataaaatggttgagagagtggtgaacatgaggaaactaggtccaccgcggctaaccgagaatggtggtcgaggatcggggaaatctagctcagcttttaacagccttggatatggtagaaacctctccaaaagctcaatcgatatggccataagacatatggtacgatcacgtctcacaattttagtcaaattttctttgttgagagtagagtagcatccgaaaatcttcgattgagagtttctcacaagctcgctatagattaaacattgggcccaagctggatgatctgactcgcaagaagagtgtttcttaaagttctctggtaataataacacaattgtcgatctttggtgtgtaggatataagacgaggcatgactggaaacctccggccgcttgtgacaaaagttccggcatcatcaatgtacagtgtgagaagtcggccgggtagtgtctcaagctctccggtggccacgagcagcactgtgagctcatctgacccgagtgttgacaacatcaacattctgtgcttagacggaaacgaagccgaaaatgatgatcttcttagtgaaagaagctatgctgcttctccgcggaaccagtaccccaagttcacatcttgacccatattattatgtaatctgtgttcttgttttttgttctcacgcttcgaagcaacttgtttctaagtgatcaaccgtataatctataaacctcaggcatcaaatgtcttttttccttcataaatgttctcccaaagcaattgctaaatgctgtgtctgatattttaaaccaagatatagaacaaagtgagaatcgagaaacagaacaaaacatggaaatagtaaagaagacaaaacagagcatagaagaagaatttaacgagtttggtacctaaatctcgcgggacaaccctctttgtaaatccactaaattacttgaaaatttacagcttttggcatgtaccaaaatggttcattccaatatgaccgatacaaaaaaaaaagttgtacgataagaatctccagatatatatttgaatcttttatactatatgaagggacgaaacagagacatgtaaatgggtttcggttttcttacaagtgtaaacaaaggaacatattcataaacttgtctcgttaggtttataagagagtcaaatatacttgaagaacatgtcgttgtgaggatttggattcggtgaatcgtcttcacgtttagagacaacaagaaatcagacctttaagtgacgagtaaagtaagtagttacatgccacaactccaccaaaatcgtgtttatactttttttttttataaatacttttattactacaattttataacgattactatttcttattgaaaattggtcaaaaacattttagaactttattttactttttttgtcaacaaggtggacttttcaagttttgattttgtggcgcaaataagaaataatggaggattttcgtggaacgatgatgtcatgtgccaactgtaaattcaatttcagaccgcaatcgatagaaattaacaaacgattcgttttaagaaagaaagaaagacgcaaggcaatgtgaaaacaaaaattcctttttggatcattgagttgggatttgagaattcgaactttctctttggatgattgaatgtcagcgtagtgatgacgtcaagtaaaagctcgtttgatgacgttataaaatgttggcaaaaatttcttttttaagagaaaaatataaatgcatggttgtctgaacggcgagaagaacttggtcaaattaaatgtgccgtgtagtttggtcaggtaaacaaaactttattagtaactatcgctcttaattcatacgtatgtacgtatgagtctatgagaacctttcttagttaaacggtacgaggacaattattgtaaaatgtaaaaaaaaggtaggtaagtgatagaatttgtttggcgtatttgtgtgacttaaattgtaataaacaggtctataaaatccattgaagttgaattcttctaaccttgccttagttacaggcagaagaaaataattaaagaagaaatctaatcagtgcgacttttataatagtctcgtcgtgtgaaaaaagtaaaataaaatatagtaataaaagtctcgtcgtcgtgtagctgtcactttcgtttgtcactttcgagcatcagcagccgaacataaacaacaaaataaaattgaataccttttagcgtattcactgttcatgagttctgggtttggtttgctttgtatgctcaacaatttattgacatcttcacgaaaaagtttaaattttaaatcagacaaaagcagtctcatgatttctctttgattaactcaatatagatttcttcttcgcactagcaaataaacacattatcttcttcttcttcttctctcatcgttactttatagatttagtatcgaggagacaggtcgaaattgaggttcttttaaagaaaagttccatttcatatctctatcaaacccttttctgaatattattttgcttgtgaatttgaatttgagcttttttcctctgttcttgggaggaatttttgtctgtgtttgtgatgcgttataattgcttcggacttctagat

SEQ ID NO: 8931 - DNA, 3000 bp, Unknown
  misc_feature (1)..( 3000): cDNA_ID_1989278_gDNA_ID_1971936_Annot_ID_58578 3000 nt of promoter + ATG
agagatgattggactaatgcatccccttagttttggggtcaattagtccatttcttttgcagaactttagtcttaatatttctcttgtggtaaaacagggaaaatttgcaactcttgaggcagcggtactattatgcaacatggaaagctgatggaacgcgatatatgatgctgctaaccaccgatggatgttacatagtagatagaagctttagattccggagggtacagatgcggttcccctttaggcacccaactgaagtgagtaatattcctgctttgtgggcgagattgtgtgaactagtggtttttcttacttatttgtttttggttgccagggcatatctgataaagtgcaccatttcacattacttgatggagaaatgataatcgataccttgccagataaacaaaagcaggagaggagatacctaatctatgacatggtagcaatcaacggccaatcagttgtagaggttggaattgtcattatttatttatgtaatcaataatggttggattggtggctcttttgatcaagatctgagtatttactgaagcacattgtaaatactgtagctgccattaccctcattatagaatattagaacattcgagaaattaaacacattatgtaggccgggcttactgtcgtaattagcttagagtgtttgttgtttgtcatgtctgactttctcgtggtgcaataaatattttgggaattatgaacatatacaattcctatgctcatatagagcatctgactccgatggtgcatattccatgcaaatatgttatatcgtttttcgcagttgttcagtattctttgttgctgacagttaaaccttgacgtaatctggttaccagcatacacatcttgtcagtagtatagagtatcaatgagttgtatttggcttgctatattatgtgttaatttcttaagatactaatagaaagttgcacaattcaaaaatggagcagaggcctttctatgaaagatggaagatgctcgagaaggaggtgatagacccccgtaatcatgagaaggcaagaagtcatatctatagatatgatcttgagccttttagggtgcgttataaaaaaattcatgccacttttccatttttatatttttccttgtataaactgtttatggagctgttaattattctttcacctaggtgcggagaaaggatttctggttgctttctgcggttgagaaggttttgaagggtttcataccatcactttcacatgaagccgacggcctaatctttcaggtaaccatgcgactgaagaggatctttgatgttaaagcctatttttcatacaaaggcagtgaagttttagttttagtacagtgtatattgtcttccaaatacatatctgagatctaaatctctgttaacagggctgggatgatccttatgttccccgcacccatgaaggtctgttgaaatggaagtatccagagatgaactcggttgactttctatacgagcaggatgagagtggccgtggaatgctctccttgtttgaaagagggaagaaaaagcatatggatggaaattctgttgtttttagaggtgtgtatctccgcttataattatatttataactcgtaataaacacagtcaatcataacttacattatttctaagaactacaagctactaatgctgaaactgcaacagatgattcagaccctgctgagtactctgggaagattgtagagtgttcttgggatcaggatgagaaagtctgggtaagcatgcgggtcagggtcgataaatcaacgccaaatgatatcaacactttcagaaaggtcagtaccataatccctctttatatacttgagttgttgcattattggttgacgatcatactttactaacttactttcctcatgtaaataactgacatttctttctgtcttttgagttccggtgtgattgggttaagtctaaaccattgtgtatgtcaaaataggtgatgagaagcataaaggacaacatcacagaggaagtgctactgcaggagataagggagatcatccgtttgcctatgtatgcggatcgtattcaaatggatagcaaagctgcgcgccgcagatgaaacgtctgtttgtttctctcaatatacccaagaagctgagtcaagaaaaagacatgtctgggttggcagtaatgcttttgcttctcttctttgcaaatcccggggtgcttctatactaacattgtacgtaagaaggaaaaaaaaagaacgctgcatttctcgaatgtgtaagaatcccggtttcaaggaggttttagggtgggtttattatgaatcaaaattccgtttgggggtatgtgatgatggttttagcttgataagatgtgtttactcttctaagtgattcatatgtttagatgaaggtgtttgtaatattactagcaatagtacttaggaatgttgtaatcttttagtattagtatcatattattattgttggttccattatacttcagaagcaaaagaatgttagacacttttatcattgagaaagtatcaccactccgattctcatatcatatgtcaatcattttgatttgaaatcttttcatcgcattttacatagaaaaatcaagaacggaaaaggttaaaaatcttccttcgatcattcgaagtgatagggaataattgacgtttctcatatttgtaactaaacagcgagctgtgtcgtgcgttttacttagatcaaaacggcaagcagtttactcttcacagcgtcattcgatttcgccggctgcgatctcccacacacacagagtctcagcttcgtctcattctccttctcgatctctcctttttattcaccattccaaattccctaaaccccgattttggggaggttttacaaaatctatcgacgtagttggatacagttcttcgattctgattcgattttaattttatgtcaagggaatttgcctagtattcgcagagtgtgatcatatg

SEQ ID NO: 8932 - DNA, 3000 bp, Unknown
  misc_feature (1)..( 3000): cDNA_ID_1989272_gDNA_ID_1971936_Annot_ID_177272 3000 nt of promoter + ATG
ctggtggattgggtggcagtgtgaatggaacaatgagcaagtcatcatcactgtctgttgaggtatctgtcaccgttgctctgcttggaccagccttccctttcttcccaattgggtccattattcctttccctttgtcagtagggagacagtcagggcttttaaggcggatgcattcttcaggctctctaatactgattcctcctgtagggaacagctctcgcctggtacgacggtgttgttctgtctctgttgtagcagcggttggctctagtgtaggccccaacacggcactatcaagtgcaaattggtgaagttcctcctctgagtcataatctgaatcgtcactgtcctctgaattgaagttcttgtccgtaacagcaaccggagaacttggaatagtgtgttggacgacagttacacatagattgacctcctctatatgccgccgcatttgaatgaacattgtaacatcactatcttcgctgatgtattgaggtggagaaccgttgccttcatctatcgccatccactctggaaattggtatgccattttaactgtgatgcctcttccacgcaagccaagtttatctttcaccttctgagatagctcttcatacgtcatgttagttctgagtcggatgaatgacgatccttcgacagtcttaggttcaaactgccaggctagattatccaccctgacccactcgccaatcaccaacaatacttcatcttgtcctgcggtctacatggattatggaaatagttcagtattatttagaaagaacataatgaaaattaaatgtaaatatcaatcaataataacagttttccaatttaatcgttcgtagcttttaattacggaataacaaatacagcgtgaatcacgatctaatttaagtaaatactaacaagttgtttagcagatctacaatctaggtaagtggtatattcgaacgtaaaagtgagaatttttaaatggaaactttacactaggcaattaaatcacgagagactaaaaacagaaacaagaaagcgatggttttgtacctttcccttttgattccctgtatttactgctgtactattttcaccaccatccatactgttctgttttgcaggttagatctctgcgtaaaaggtatagcatttactggcaataaatagaaaacagagcatcttctgctccgatatttttggggggaatattttattcaaattaatgtaaaaatctgcaggttatgttactgatgggacaattctcaagcggtgctaggataatttttttactggcttcgaaaggagacacgtcagctggtagaaagaagctcgctcttaccctcacgcgcgtacaagaaatcacagaaacgtggcttagggagtgggttgtaacttcacatacccgtagcgtcactctctcaattccttcgtttatggtgttagttacttaatatttttatggaatatggttattgagctaattcaccctaaaaaaataccgaatattacttttggataaaaagaaaaaatatttggcgataaagtttatgatgggtcaatataatatacatttgtcatgataagatttcacgcatgacatgcggttttatatcaagctcatctccgtcacttatttctgatattagaaatcacttatttctctaaaaatctaaaccctagtatctcctcttctcacaaatacttgagttgttcttattcaaaaaattacacgaaatacaatggttcggatggttagatccaattgtacaaacgttggtgcggtggtgatggcggacgtacaaagcgtgtcgcggaacgcaacctttctctttttctcggagtatggtgttagagcagatttagatcgtaagcttcttgtagaagctaattcttgccgaattgaaccgttggtcgtcgtagggcgttttgaaccggtttgagtggtcagaaatggaaggttgagaaaagtagtgtttgggatctagcctacaaggatgagtcggttggtgactgggatcaaacctctccagtttttgttcgaatgaaaatggaatttgattcaggtgcgtcgaaatgttgttgttcccgacatccatgcttgtgagggtagttcatattaagaatatattatatttagtatctgagagattatatatgtatttaaaagtcatttacgaaaatttttattgcctcagacactagctgctttggagaataatcaataaagaattagcaattacatgaagcttacgatcaaaatatgttcaaacaccatattccgaaagatagagaaaagttgcgttccgcgacatgctttgtagtttgtacctccactatcacgaccgcataaatttctggatgattagatctaaacatcagaaccattatattccatatactattttgataaaaacaactcatatatttgcgaaaaaggagataataaagttttaaactgttaaaaaaaaaagtgatttttgatatcagaaataagtgacggagattggcttgatataaaaccaagaaaaaacgtattagtaccaaacaacaaaaatagattttaagggctacacgtttgatccaccaaaatcttttgtaaaaatgaaaagactagcttaattttttttttaaattggtttacaatttaaatctgttagctaatcataataattttataatgattttttagtctaaatgtatgaagttgctttatgaaaaaagtttaactgtatgaaatttgtctttaaaagttaaagagataaaaatatgattcatttggtttcaaattattaaaatatttagttgataccaaaaatatttcggtctctataaaaagaaaataacaagtatactatgtccgtgcatagcaagctagtaatgattttttattttatttttaaaacacaattattaataccttgttcaaatcagacctaaatctctaaaaccgtaaaatatctcttaagggttatcgccggcgctcttgtcaacttatccatg

SEQ ID NO: 8933 - DNA, 3000 bp, Unknown; identical to SEQ ID NO: 8931
  misc_feature (1)..( 3000): cDNA_ID_3044034_gDNA_ID_1971936_Annot_ID_177265 3000 nt of promoter + ATG

SEQ ID NO: 8934 - DNA, 3000 bp, Unknown
  misc_feature (1)..( 3000): cDNA_ID_3044046_gDNA_ID_1971936_Annot_ID_177256 3000 nt of promoter + ATG
caggagaaactttgtagacaaggaagatgattccaagagagggatgatttcgaaaattgaagcaggaggtgaccggctctttgtttctcgggaatgtatggaaggtgtggaggtctgggaaacttctagtttctccggtgtggtatccgtcgagtaatggtttcccgaagaacggtgatcgatcaccctctgttttcccgggaaaatcttgttaatttcgcaggaaagtaacaaatcttcaaactttccagggtctagtagaagactagtagtactgattgtctctacccaggtccacacttgaacagaatgaagaacatcatcaagattcacactttaccattatataaagtactagagaacactctcttatgttgtaaattgatccatagatattgtctttgtaaagttttggttctagtggataaataattatagtcacaagtaactaacaaatccagtttagagacagaagcttaaaaaaaaaaaaaagacactaattgttgcgggaaaattttgtttaaaaacaatgtaaaggtatgatggaagtgatgtcggtaaaaggagaaaaaactaaccttccttgttcatcttcattgtatttaatctaattgatctatgatttctccatattttaatacccttttaagtactcaacattatctcagcgtaatgattatatctcttttagtttgcaaagcaagtttccattgtatagctaaaattcaactactctttttgtctttctcaacctactctacctaatactcttcgttcttttcttttttgatgaaatgtttaccttttttaacaagacaaagaatctttctttatgtattgctttctttgccaatgtaataaaaccttttgttgcaacttctgtgtagtgcattccacacaaggtcttgaaaggagagaggaacccacatttttaaatgcaagtccttcattggattctttagatagtattgatacattatgtttttgttaggtcagattttggacctacaatttccgaaacgcttaaagtttgttatgatgaaaaaattaaatttcatccttcttttaagaaatgtcttggaattttccttttgtagtatatattaacaagaaataataaaattttgattaatgtaatatggggtcaaaaaaagaagaaagccaagtggggatttcccatgagctttcttgtctttggtcctttgacgccgacccctccttttgaatttaaacctggcttctctctctcttttttatttttttggtcggttacaaaatatcaacgtaacttgtttaaaacaatggaaagttaataaaaacagtgtgatattttattttattgtaaaaaccttagtttgctcaatgaattttgaaaagaagatcaagaataaccatttctagtcaagaacgataaatatttctgttatcgaaaataagaaatttaaaacactcctatacaattctctaacattacagaaaaaaaaaacagagaataggagctctctgtttgaccggacgcaaatccaaaccgggtaaaatcaagaagaagaccacgttgagactgagtttgatctcgacagaggaaaagaagagttcaagaactcaatgcaatcttcaatagcttctgctcgatgagactctgtctcgtttacagactttgacctcttcatataaatagctgacgaagaagaagacgacgacgacgaaggcaacaaaaacgatgacgtttttcttctatcagtagtatttcttctgaaggaaataaaacgcagcgttttggcgaatcttgctccaatacgttggatcaatttcctcgcggccggcgagctccttagaccaaaactgagaattccgacgagaaccacccttctccggctgtgatgtgacgagcttaaaccgtcgtgttttgggaatatgggttcgtctgtggcttctgggttcgggttaaagcttactcttttgcatgctcttcgtgacatattttttgttgtctgaaattgcggtgaagagagagagagagacagggcgaggagaaacagagagagagagaggggttgagagaagaccaaatagcaaatactaaagagaagcaaatgggatattttgaagactatttatggggtgttgtctaatgacataaaagacattggggtgaaattgtaaagatataaatatggtggggtcagtttaacaaccttactaaaaattgaaacttgtaactcacaattttctactttctaattgtataatgtggatttagtgtgagagtggttatatggaaatatttatcttatcttttctacagtttttccttatctataagagctacctactactacatgtgtgtattaatgaaaaaataagagcaacttaaacaaatgctgatcatgatcatggggatgagtactggctcgtcaagggtattgttcgctcgtggaatgagttataagtttttgctcatcttcttaatgaaaaaatagaataaacacacattttgttatactactaggcttttcctaaacccatttcaaactctttaaggtaagtttattaaccaaattatgatccgtcactctaacattaaatggaagtttgttaaccaaaaaaaaaaaaaaagttagtttacattagtactatttatagatttgaacaatcgatctgtccttagatatgtaaataatttatactaattctaactgcgtataagcaaaacttaatggtactaaaatcaaccttagtcagcaaccactactaagacagagagagaaagtgagtgtgtctgtgagggcgaatcaatgtctctgctttctccagaagatgatatttactttttgtgtcaattagctgtataacgtcttcttcacataaaacaagaacactccacttactaaaaaaaataattatttcttcttgaagagtggaattctttctcgaatcttagaaaattccatttagaactaaagaagagagagagatccagtttctcgtcccagttaagct

SEQ ID NO: 8935 - DNA, 3 bp, Unknown
  misc_feature (1)..( 3): cDNA_ID_3042454_gDNA_ID_1971936_Annot_ID_177247 3000 nt of promoter + ATG
gat

SEQ ID NO: 8936 - DNA, 3000 bp, Unknown
  misc_feature (1)..( 3000): cDNA_ID_1989277_gDNA_ID_1971936_Annot_ID_58579 3000 nt of promoter + ATG
ggagaaaaacagagttattttggctgaagctgggaaggattttgttgatgtgctctgtagtcttttgactcttcctatgggtaccattgtcaggttgctcgagaagcatcagaatccgcagtcttcagtcgttggttgtttacacaatctttacaaaagtgttgcagacatggacgttgataatttcgagtctcaagcttgtaagcatttcttgctgcatcctcggagtgcgaaggggagtcatggcagagatctaaagctcaacattgatgacaccgaggcgaccaagttctttgtctgcccaaattttgtttctactgaagcatgccgtaagttattcagcaatgttagtaccatgaagtgtcgttgtggaagctctatgcaccgtgagattccggttgaagaacagcaagctgatggagtatttcccagctgcagaacatcatttgttattacggatgatctcaaagtggcattgaactctatgggtcttgttttgaatgtcctcaatgattttggttactctggttttgataagctgcaagaaatgcttattgatgttggttttgaagaggtacttgaactttttatatctacccttgatgacaacttcttaataacgatctttcttacactactttcttttgtaaatgtagattctaactttgctagggtgtttgttcacttcggaagctccattgacagacaccttcctgaggaaacattgcatgtcaaggaaacgtaaaatgttgacaccacttgtacaagaaagcagtgttgcaggagctgcagacaatctcttaactttgaaagtttatgttagaaagacagacagggctgttctctatgctgagtgcagagaagaattcgttgattttcttttcacttttcttgccatcccgattgagtttgcttgggaactttctattgacattggtaatatgggctgtgttggtaatctgtgcagaagtgtgaaagatttgagctttgagaagcagaaagcagccacagtttctcaatgcatgcttccttatttctactggaagggcacaacctcttgatgttgttatccaggaatcaccagaatatgaatgcttggtcacccattatggtcataacatgctctgtaaaaagattaacaaggctgtgctttcaaacggtgaaataattgcaaagttcacttcagcttctgctagtattggacttgtgaagggagaaacaaatttcatagtgtcagatgatctggttgtcactcctatgaactcgtcctcaacaatttcattgttaagcaagctgcagatgaacattggtgatattgaggagcaagtaattagcattggcaaagctgaggtatggtgcctctaccttttaatttatagtctttgattcttgagttcttaatatttttgaaactacttttgtgttacaggccactagcttacttagagcttctttgatcacaacctctgccttaaccaatggtctctcaaacttcctctcaaagatggacccggacgaagtaactcaatctacacctaagattcaaaagtctgacaaaccaaatgaagcttggcagcttctgtagctatgttcctttttcttgttttgctgcagacagaatctttgagagcatggcgtttgtttgattgtactccatttgctctatgtaaggatttttctgaattaacactatgttgaggatcttgacaactcttattaagaaatcttacagagaaatgtctcaaatgtatgacgtgattgtattatctttgttattgtgatgtttcttgaatctattttaaactggaatatctctttttaaatgatattcaacagattcagacaacgaagactagatgaatcatgaaggtagagtagaagaaacaaactttctgattcatcttagaagttagaacgattacataggagcctcttatatacgtagagcgttctggtttacaaccacttaaccgagataaattatatggttgtttcaacgtggataatcttatagagattttttttctattttaagaagaaatttgtcattttccaaataataacttgtccaagccaatttttttttttttaacttttgcattaaaattacaaaaaaaaaatcgtcatttttcctccacatcattacatccgttgtattttcttttcactatttttattttttaatctctgcaaattggtaaatgaatactcataaaatgataaaaacgtgaaaaaggtaatgttttttcctccacgtcattaaattatcaagggattatttgtattttctcatttgtatttttttgattaccaataagtttttgccttgactcgactggcctcagtatataaggaagacttggtctttctctctctcctttctcaactactctctatctctctcttcctttcgtgaattttctctctctagggtttcgatttcaattttttccactgaacccgcgatttgaactgaaccttcaccgtccatcaccatctccggtggatttcgtaggcatctacggagcttacttgtttcaaagaaccttggatgttgtttccgattctccgaaagctctgtgttctttagtttgatacctcagatattggatgcccttggtgagttttcgcacttattagtgatacgcatgattttgatgtccatatgttttcgagaagaggacgaatttcaaatgttcggctgagatttcgttgattcgtagcttctagggttttattttcctatggtagtcgagttaagttggagaaggataccgagagtatatggatctcttgctctgctttggatcttatttgcttcaattttcggctttgttactctatattgagagaattgggaaatgattttgagtttgcattctggtctgtgttcccgaggttgataatattgtgctttcttcatgcttcagatataacttaggtagcttcttacagaggaaggatatgttaggttaatttctgttcatttgcccttggatg

SEQ ID NO: 8937 - DNA, 3000 bp, Unknown; identical to SEQ ID NO: 8932
  misc_feature (1)..( 3000): cDNA_ID_1989272_gDNA_ID_1971936_Annot_ID_58585 3000 nt of promoter + ATG

SEQ ID NO: 8938 - DNA, 2079 bp, Unknown
  misc_feature (1)..( 2079): cDNA_ID_1989269_gDNA_ID_1971936_Annot_ID_58588 3000 nt of promoter + ATG
ggcacgccaagttcatcctgataagaaccctaatgatcctcaagctgcacacaattgatctttaccaaaggtgacctcaaggaagtgagcgaggaggttgctaagtacaaggtttgttaattgctcttgtttcatatcttatttacaaatgtgtgattatagcttcggatagtaagtatctgatgcatagaggaatcatttcatgcttacattagtttatacatgttctgaatttacttgtgttgctttcgatggtatctgatgtatagtgtaatcatttcttgcttacgtttctgtttatattgcctgtgttcctatgagtattacagtcatcccaagtagagctcatcaattgtgtaaaaagttgatgctttctcaatgcgattgacttatgtataatgttgttgctttctcaacgtgattggattgtgtaatatgttgatgcttttgcaatatgattgggttaaaatgttgatactttttcaatgtgattcgattgtaatggaacttttcttattatgaatcaggttggtgcccctgctcgtgtgggtttggtggctccaattgatgtggttgtccaacctggcaacactggtctcgacccatcccaaacatctttcttccaggtttgttttaaacttacatttaatgtttgatttgattcgtttgacgacaatttgaagttaattgaacatgtatgtgttttggattgttttaggtgcttaacatcccaaccaagattaacaagggtaccgtcgaaatcatcaccccagttgagcttatcaagcaaggtgacaaggtcgggtcttctgaggctgcgcttctagccaagcttggcatcaggccgttctcatatggtcttgttgtccagtctgtctatgacaatggctcagtcttcagcccagaggttcttgatcttactgaagaccaacttgtggagaagtttgcttctggtatctccatggtcacttccttggctcttgctgtgtcgtaccctacccttgctgctgcaccgcatatgttcatcaatgcgtacaagaatgccttggctattgctgttgccactgagtacaccttccctcaagcagagaaggtcaaggaatacttgaaggttagtatgcattaaaactgtgcatctttttcattttatttcggaagtttggagtactgattttgtttatgttaactctctggaatgcaggatccaagcaagtttgctgttgcttcagtagctgcggtgtctgctgatgcaggtggtggtgccccagctgctgctaaggtagaggagaaggaagagtccgacgaagaagactatggaggtgatttcggtttgttcgatgaagagtagattttgtcggttaagatcttacctttttgtcgtggattataagtgttgctttgtttttagtatgttggacctcaattttcttggttttagccaatccagttttatgttactactgtcttttattttttggaaagatttcgttttcttatggttgctttaatatttttcaataatgtctggacgatgaatttgcaatttatctatccgtcgagaaagttaagagcttcttatacatgactttgataaaatttgtatgaagcagaatcttcttagatctacaagttgagtcattttatttcttagaaagtaggcacaaatgtcatattctaaaagtaaatgaggctaaacatgatagaatgtaataaaactgagatacaaatcagaaacggcattaaccttagtcagcaaccactacgagggagaaagtgagtgggactgagaacgaatcaatctctctgcatgtgttgatgatatttaacttcttcctctgctttcttcgcatagttccacacaaaacaacaaacttaaatacttcttgaaaaaatggaagtcattctcaaatcctagaaattccatttttagaaggagaagagtgagtgagtgagtaagagagagagaagagctcgtctctgtagtcattaaatcagagagaaccaattttagtctcagtatagctatggcgatattcaaaaccctatcttttctggtccttttatgctttgagatacatg

SEQ ID NO: 8939 - DNA, 246 bp, Unknown
  misc_feature (1)..( 246): cDNA_ID_1989303_gDNA_ID_1971948_Annot_ID_58590 3000 nt of promoter + ATG
aagcttactgcttctcacaagcctctcatctccagtaccaaaatatctgaaagggtgattacactcattaagcacctattggcttctccagctcctcttcaggttttgtctcgagcacttgttttcctctgttgacttcctttgacaaacatgcactcttagatttctgctatatggaggcctctttgatgatccagttcttatttaaactcatggtaaaaacattctcagcatgtagcagtgatg

SEQ ID NO: 8940 - DNA, 3000 bp, Unknown
  misc_feature (1)..( 3000): cDNA_ID_1989302_gDNA_ID_1971948_Annot_ID_58591 3000 nt of promoter + ATG
atagcggtaaaaacagaggatcaaaaaacaattttttggaatcagcaccacagaggataaacgattctgttttcatagcatgtcagattctatacttgtttaccgttaaaacactttcatgagctcttcataaatctcaccttcagtggtgctgattgcagcctgcagctttaagtaatatggtgaaatctttctgcagcttctggccttctgctttggctatgtcatgcagcatgctagttcatccgaggaatatgtgctttcaaaagtatcttctgtggctgcacagctgatgaaaagaggctggtaagctgcggtgggcttcttctgcttctggtatctaaatttttaacacatgcacattagatgttggacgttagctttcacttctgatgctatgcatatgagaggattcatgaaaaggatgttgtcgttcacagacaattatgatcggtagcttctggaaaaatagacaaaattagttagctacttctgttttcttgcttgctttgttcctctaatggaacctctaatctgaacaaattactcttacaggcttgagtttactccagcccagaaggaagtcttttttttatcaggtatctacattgtttgtaatttttcggactttcatttttagtttctgtatcctatagtttgactagcattaggtgcatatatgtttctctctgatactggccatatgttctaagaaatttacctggtacttcaaaatctttttaactgtaccttaatatatggagaagaaaggatttagacgctaacctatatccttcatgtggtccagtccatataacacactgtttcattctttgacaaagcactcaagagaagtggctacagaaaaagcaatttcctctgtgaaaactccagcttcacatgctatggctcatcatctttacatacttatagccattacacaatccacatacggacgaggaatctctccccgcaaagctttcatgtcataggcagaagtttttgtgctatgtatgtcagtctttgaacaatcggtgaatccgtgattttacaacggaaaggttggagtctttattgtcaaataacgtactagaaagaaactcataaatatgtatgtagtaccttctactagtagtatgtaagtaatatctttctctttaacttcttcaacgtggatttttatatgatgattatatttaactaagaagaacgttgtacttgtatattattatactcaattagtcacgtagatcgaatcatcgtttcattttgaaaatgaaataagtactgtatattatattcacgtagctcgaatcatgagttcattttgaaataattgtttaccatgcataaaaaaggcaattggaatcccgtgggtaagtgacgacaataattttgacaaaataaataaacaagtgacgacaatatacatgtgcagtgtaaaagttttggtaaaaaagaaagttgtttctaattcactaatatagtagcacatagtatgaaacctgccaacaatacatgtttcatagaaattttgaggagtctcacatattcttttactcgtggaccgatattgaaaatcatcgaactcaaaagatcacacactagctatgttgtccaaaatgaaggaaacaaaaaaatcgagaaaaacaatgaaaccgccaagtacaaaaagaaaaagaaatcaagagaaatggtgacaacgcattgatattattaaagtaaagctgtaagtaaattcatgagatctccgttgaacacaagacccatgaacttttgtcaccttcttggcttcttctaggtgcatgtccccaaatcaaaaatcaattattattatttataacgattttttcttcttcttgttatttaattattatgattacttatgaatctgacgaaaaaataaagattgcttataaatcatatagtatatttttctttgataacacaaaatacatatatttgttcaaaatattagcatctagtcttaaaatagaaaagaaacaacacgatttatttactgtttttcaaataatgattttcgtaatattttttcatcaaataattaaaaaaattcttgttttgtcccaactgatagtcgttgatacttatcaactgctctggctatgtgctctggagatcatacaaaataaataagaaaaattgttagaaaaaaagaaaatctattgtccttgttattcaggagaatacttgtctacgacgaggtccacagtaactccgaagacatctagagtctagagtgatctagtgaatctataaagccgccaaatcgttaaatctttccttttaaacatttttgatttcttttacgtttgcgttacgaatcatcttctgcctctctctcaacgcaactcaatccaccctacacgtgttcctctcttttcccgtctaaatttctcagtctcgccgtgaattttgttcttctcttgttttccgggcgaatcaaaatccgtctcatttccaatcgcgtctccgttggtattttacatgaacgtttagcggaatctcgggtttagcttcggagctttgcatttgatcttcgtcgtctgtgttgtcctctctcggattttgttttttcgccgctgcaaatcagagaaatctattcctggaagtgataagatcgcttggaagcgtttcaggtttggaaatcggattcactgttttgtgtaatttttggttaaggacttaaggtggtgtttgattgttcggaaacacaattagtgacgattaagttcgacctaattttgtttagcatgctctgataagttaagaaaattggataaatttgccattctagattccgatttggttacaatgttagatgcttacgtggtttatagggaatcttttgctgattgtaacacagggagttgttggaatggagggtccggaaagatgagagattttgaatacgcagttattctttgatttcttaatagattttacacgtcattggtgaagaaaaagggaaaaagaaag

SEQ ID NO: 8941 - DNA, 3000 bp, Unknown
  misc_feature (1)..( 3000): cDNA_ID_1988834_gDNA_ID_1971948_Annot_ID_58592 3000 nt of promoter + ATG
gcgccattgggaccgtagtttcttgcaccataatatctctaggtatcttactcccctctccctgtaattgattctgttgaaagcttactcctgattagtaattgtggatcattaatattcttgtgatgtttgaaacaggtgcaattcagttctttaagaaattagacattgggacctttgacttgggcgattttcttggtaatgtgttaaggagtttcttttatcgattttttgttctagaagacttgattttttttttgcttacttaatcagcaatcggcgccatatttgctgcaaccgactctgtatgcacactacaggtaatgtgattcgccaattagcagaagtacatacaggcccagaatcaaagtgtaattaacaaaaactcttgttcctttggtgatacaggttctcaatcaagatgagacacctttgctttacagtcttgtatttggagagggcgttgtgaatgatgccacatctgttgtgctcttcaatgctattcagagttttgacctcacccaccttaaccatgaagcagcttttcaatttcttgggaactttttttatctgtttctcttgagcaccggacttggtgtcgcagtaagtccattttcttctctctactgctctttcgtctggctactacttgcacgttcctctgttaactacaatttttttgttattcatcttgcagactggtctgataagtgcttatgtcatcaagaaactgtattttggaaggtagataattggctttagctcatatgtgactttatctctattagtcttctgttatgtagtctaattgggtatctttcttaggcactcgactgatcgagaagttgccctcatgatgcttatggcttatctttcatatatgcttgctgaggttagttttgtgaaattttataccactgtcataatttaggcatggagacaatcagttgtatcttaagaatcctttattgataatatattgtttgggttgcagctattcgccttgagtggtatcctaactgtatttttctgtgggattgtgatgtcccattacacttggcacaatgtcaccgagagctcaagaattactaccaagtaatatgacctccattttctcttgaaaacaaattcaaatgttttccatcttcaatacttacttactttctatgcatttacgatgagacaggcatgcctttgctactttgtcgtttctcgctgagacttttattttcctctacgttggaatggatgcattggacatagagaaatggagattcgtgagtgacaggtatggtcactcagtagaaacataaactctctttttgttcattggctatatacataatcttcttatgtttccattgtttggttttggacagcccggggacatcagttgcagtgagctcaattctaatgggtctagtcatgcttggaagagcagcttttgtctttcctctttccttcttatcaaacttagccaagaagcatcagagcgagaaaatcagcatcaagcagcaagtacgaacaatctactttgtctattgaattcaaatttgctgaggattgttgatacttactaatcttctctcactttgtctgtaggttgtgatctggtgggctggtctaatgagaggtgctgtatctatggctcttgcctacaataaggtaaattgaaagtttaatggatagtaaacagcgacatggtgattagtaaaaatctagcagataatttaacttctttatttctctgtgctctctaatgcagtttacaagatcagggcacacagaattgcgcgggaatgcaatcatgattaccagtacaataaccgtctgtctttttagcaccatggtaagatatctccctctcaggtttggactactaaatgtattttctctacagagatgttgtcaatgaggataaaccaatgctgagccgtgagacggatttgcattttctatatccggaaaactgttccctcctatttgatttgttattccaatgttttctggatcgctaacactgaaccctgataccggacatttaacatatgtttttttttttccacggctttcaggtgtttggtatgctaaccaaaccactgattagatacctaatgccacaccaaaaagcgaccaccagtaccacgagtatgttatcggacgatagcactccgaaatcaatccacattccgctcctcgatggtgaacagctagattcatttgagttacctgggagccaccaggacgtgccacgaccaaacagccttcgaggtttcctcatgcgccccacacggactgtccactattactggagacagtttgatgatgccttcatgcgtcctgtgtttggtggtcgcggattcgttccctttgtccctggttctccgactgagagaagcagccatgatcttagtaaaccttgaggagaaagatatatagaaacttaaccaaaaaacttcttcttgctcttccctcttatggtgactagtattggtgatgtaaatgtatttttcgttcttcaaatttacatattcttctgtaaatttgttattattcgatgatgaagaagcttcttacgtttttgagagacgtgtgggggttcatgtgtgttactattagtctttgttttgtttaacaaaaaaactaccaagtttttgactatgcatcatggggtttgttgttgttggtcagaacttagaacttgactaactctgcttcggttaggatctgattggtacggtttggttcgattttcgtcaatagaataaaaaactgtatgaatagaataatccggttaaattggcacgtgaaatgcgaaatgggctgagtcattcattatggaaagcccatgtgattggtagggaacgacgtcgggtgaagggaggggaagagcttataaatgaaagcagcaagcagagcagttcacgctctttgtacactccgccctctctccccatctctttcgacagatctcttctctctctcgtgtttcacgaaaca

SEQ ID NO: 8942 - DNA, 3000 bp, Unknown
  misc_feature (1)..( 3000): cDNA_ID_1989301_gDNA_ID_1971948_Annot_ID_58593 3000 nt of promoter + ATG
caactctgttttgattcggatcatgtcagactacttactttcataattgtgattgattaacctagaagttcctagttctaaaccgtcacactaagactcaagagtaagcaaaacaccaacattagatttttaaactagactctatgagcactcaaccaaaaataatttacaaaacaatcagatgattacgaaccacgtctccaaagacagatgccggaacactaccaacaaatgaagaatcgacataaagatgtgagaaattgaaaccctagaataagaagtcaaaccaccttacacaggagtcagattcacaagaacaaaaaaaaaactaaaaattacatggaacgaataggagacaaattaaaacataacaatcgttgtcttctagaaccttagaagagtgtggattccagacctaattcccaaatcagtgacttcttctgagtttggaaagttggctaaccaaggccgagaagaaagctccactaaaccaaacgatttggaatttggatatcgagttagtttttttttgtagtataaattttttcaaaaagagtttttcaagttttcccaaatgtacgccttttttaaaaatgatatgaaatggagatgcatcaggaattactgtatataagatatcaacaaaaatttacaacagaaaaataaaagtcatttcaaacatgaaaccaagccctcactgtttaaaacaagcaccacaaggctaaagtgtgtcaaaagaacagcaaacagaagcctgcaatgggttttagattgatcagacccgaaggatctatcttccttgaaagtataaagccaagtactcgagctaaatgcagaatcaagccttgacccgaatcacgaaagagcctgtgaggacatgacaaggatagttaccgaactgaagcaacttataatgacaggtaataagcaatatttgaaataattttctatctttcttccctccaatgtgtgattttgagaatatagaagaaagtgaaagaatataagaatttcgaaaacaagcaaagcaagctgtgaactcacatgtgggaaggcttgatatatctgcagagacagcacaaggtatccccaagttggagaggacacctctaatgattccacacgggaaatagaggtacatgctcaccgcttgtgcagctttgctttcccctggagtagaaggatcttgggtttcattctcagatgaagggtcaattgagacacgagacaaccaccggaacttgttgtcttgtaatacaaaagtaccctgaagagaaacattccatctgtgaataacacacacaagaagagttttggtctttgttcaggtaaaatcccagttatcttacccggtgatttgtctttaaattatcaatctgcttcttgaagacctcagaccagaagtctttgcagataaacttgattgcctctagatggtcactgaaccttggtctttccatagtgtacctaacgacataaaaaaggctgaagttatgcacaatcaagtaaaatgctaaatatctgccatcatacaacactgtaaaacagtttttatgtaggcaaacaccttcagaagcaacaaaacatgcctcaacagactaaaatcattcttcgtacacacacactataactaatcagggactaagagaatcattcttctgagacaacaagaaaatttcctaaccaaaacattgcacgattaaatacaaaaattagccactagagcaatgagaaaaaaactcgaatcagcgccatatatcttcccatctatcacattctcagccaattacacacgagaaacgataaatccaatatcaaagagaatcattgctaacgatatacattcgccatcatcttcagatctacaactaatactagcaacctagagatacaatgatcaaccagatcgaaagaagacgatgatcaagtgtaaaacaaacctctcggagagctggtggccgacctgataaccaatggcctcgatcctccgagcggcgagttccggcttgttagcatagaatcggccactgtacatcgccaccatctccattaacatagtgtctacacagctctccgccacttctctccccatttcttctctctctctcagactctttccgtcttctctccaccggtttggggcttatgcaacgaagctccgatctattaacttgtagagtatttacatttaagtccttaatagttttctattatttctgatctgtgacttcattttttaaagagtcatgataaccttaatctctgacatttaaaccggatcgtcttggttcaattttccttcaaatacccgatttatacaattatttcaagtgaatggaaattacttttggtgtgctgaatgctgatcatttatggttaaaaatcaattttacttgtataatatgagatataaatataaataaataaatcatgattattgaataggacttttttaatatctttttggtgggcaaaagagagacaattgtctcccacgttttctaatttaattaaaaagaataacacattattgattattaaatagcacttcaaaaatttacatttcataagattgattttgaaattagatcagcttgtaataagtctttcaaatttaagatacagaattgaaaagaataatatttaaattctttaaacatcacatgtccaataattaactctttaaacatcacatgtaaaatcagttaaaaataaaaaggatgagaaaaatgatagttttttttttttgttttagagtggaagtgggagaagcgatgataattacctataataccctttaacttttgtgtaattactcatgtttgcgtcaagtgtatggatttggtcgccagagagaagaagaaatatacgattcatacgaattctgtatcgcaaaaacatcaaatctcgaaattgagctccttttctggaactagggattgctttccgctccttgcgctaagtctacttggtttctgattcgtacaatttgatgaaatg

SEQ ID NO: 8943 - DNA, 3000 bp, Unknown
  misc_feature (1)..( 3000): cDNA_ID_2991568_gDNA_ID_1971948_Annot_ID_58594 3000 nt of promoter + ATG
cacggatctctatttgtcgacgaatgttatttacaataagtgtttcttattttctttccaagatcgaaatgccaaatgtatacgagagacacaagtatgttacatcataatatacaaggtgtctccatagttttggtattagcacacaagtcaagagtatgccctacaaggaaaagattttttagatatcctattcaccttgtatctacagactgacaagacactaggactcctgttattcccaatcagcgtcgaagaatccagcatctttcatttctgaatagtagacattctccaaattcagatcttcctcctgaagcaaacacaagtgaattttagcaccaaatcatgtggtgatgaagatggtactatggtaatggtgatggtactatggtaatagtgatggcgatggtgatggtactatagttataaagaaggtgatggtgatgctgctatagtgatgaaggtggtgatttattgcatgtttgtgggtacatagatattatgtatagagactagagagagagagagagggagagacaaatgttaatttgagggatttacctggaaaaagtctgcaagaaaagtaacatacaaaagaggaagatagaaggcgtggtaacaaacacttgtgatcccatacaacctgcaagaattttcaatttgtatttcctaatgttagaagcaagaatctgacttagacgatgttactcttttgattgtaaggcttttatctaaagggcttaccataatccaaaatgagcaccgtttgccgtaagagcacatgcaaatagggagagcccatttaaggcgagcatgacagttatatacttgtagaatgcaggtcttgctgtcaaaccggaaaataaaaacatatgggatgagtaatagaagccagtgaacagctattggcttatgcaaccataaggaggatatgagtggtcgatgtattcacctggtaatctctctctccatttggagttgtacatgaagaatatcatcccataaatgccagctagtaagagcttgtggatgacccataagccccatttgaacttatgtatatgttcattgttgtcgataaacaatggtactccaaagccaaacagataaattgcctgaaaggaagaatgaaaaccgtgaagaaattaaactgactgtagttgagtaaccagacaatacaagtttgcatatatcaactgtagtggacacatgatctaatgcagaactaagatcatgtcaatatacctcaaggaagtatatctatctatatatcagaaagtgtatctaacagttatgaacacaaatctaccttgagaagcaaatcgagaccaatgacaagccccgagatgaggaaagttcgtgttaatgcttcagcaccgcttgcatagtttccttggaagagaaaggctaccaagcttacttccagaaacaacattccagatgttgtgaacaaagttaacaaattccaaataacttctttccccggagtgcattcccatgcctaaactcatgaaaagtaaattcaaaacgaaatctggagtaagactaaatcaggtaaaacatttcctgttaagcagcatctaaccaagaaatcaacactaatagcttacacaaaatacaaaagctttctaatcaccagtgtagaataaaaacaatgttgataagatcgcaaagtttctacatttacagagcctaaaacactctaaaaagcattcttcttcaatctaagttctgatctctttacacgcaacataggtatgagttacttgtgaaatgaatcgaagtaaagaagagaactttaacaaacctgaaggcaacaccaagcaagattgagcaagctaacaagccaaagaaaaccataataggcaatcataatgtaagatctccgattagacaacttggacaagctcttcttcgcctcgtacgctaagtaagcgacgaatagaatagatgctaaaaccaaaaccgtgttatgaagaaacccatgacacttcccgacccatccgccgataaaccctccggtggccgtcgaatcagggcttagccgagaaatcacgaacggtgactccgcaatctcgctgagcactcgcatttcatcaaattgtacgaatcagaaaccaagtagacttagcgcaaggagcggaaagcaatccctagttccagaaaaggagctcaatttcgagatttgatgtttttgcgatacagaattcgtatgaatcgtatatttcttcttctctctggcgaccaaatccatacacttgacgcaaacatgagtaattacacaaaagttaaagggtattataggtaattatcatcgcttctcccacttccactctaaaacaaaaaaaaaaaactatcatttttctcatcctttttatttttaactgattttacatgtgatgtttaaagagttaattattggacatgtgatgtttaaagaatttaaatattattcttttcaattctgtatcttaaatttgaaagacttattacaagctgatctaatttcaaaatcaatcttatgaaatgtaaatttttgaagtgctatttaataatcaataatgtgttattctttttaattaaattagaaaacgtgggagacaattgtctctcttttgcccaccaaaaagatattaaaaaagtcctattcaataatcatgatttatttatttatatttatatctcatattatacaagtaaaattgatttttaaccataaatgatcagcattcagcacaccaaaagtaatttccattcacttgaaataattgtataaatcgggtatttgaaggaaaattgaaccaagacgatccggtttaaatgtcagagattaaggttatcatgactctttaaaaaatgaagtcacagatcagaaataatagaaaactattaaggacttaaatgtaaatactctacaagttaatagatcggagcttcgttgcataagccccaaaccggtggagagaagacggaaagagtctgagagagagagaagaa

SEQ ID NO: 8944 - DNA, 3000 bp, Unknown
  misc_feature (1)..( 3000): cDNA_ID_1396989_gDNA_ID_1971948_Annot_ID_177324 3000 nt of promoter + ATG
atacatgtttatgtacattattcattaccattgaccaatataaaatcgttacagacgaatatttctaattaattatttataatttattcatctttattattttcgttataggttttgttaagttttttcgtcttacttcacacccacttataccatcgccttgtccatgaaacaatttatgagacctttagtagtttagggcaaaggcaaaccgcgtgagcatattaaattatagtaaccatgtcaacgtgaaatctatttttctttttataaaaggtcaccaaattatagagagatgttcaaatccactactttgtaccttagaaatgtgcaatcatattgcagggatgttcattgttcaatcccatcaacttgtggctatatcctcgtcttgtcttttcaccgtggtcgtattatagaattttgaaactaaagatatagatagaatagcactccttttcttatgtagtcattgtttgttttttatatcgattaatctttcattttcccaaaatgtactataactaaagaaagataacttgtttacattaccaacaataggaatgagactatttgtaactaacatgttaggtctttatctgagaaaattctgactttgacctctttagttctaccggttgctaaaagaaaattaattgacctacatagtttttgttttagaaacaaaaaattcttttaacctttagcaaaacaaaattccattgtgttgttgttaatggagtgatcagtgattcattaaaagatcggaacaaaagttctagtacaacaagagggcccaaaaagcccaagattagaatttaaagcccaacagttttaaaaataaaagataaaaaatttcggattgtccccgaagttattccttttgctgctcttgacttgaaagttataaaccctcacgattcatccttaaaccctaagcctaaagcagaaacgcagaagccctgataatggcggatccgatgaaccatagcaccgggcatcaacaacagcagaagtaccgtcagtacaatccttaccaacaagtcaatcttccgtaccgtaagctctacgaactcccaacttctcctgagtttctcttcgaagaagaagctacgaaaaaacgcttaacatggggagagaacctcaccttcttcaccggttggggttattgcactggatctgttctcggagccttcaagggtacaattgcggggatgcgagccgccgaacgaggcgaatccctaaagatccgaactaatcggattttgaactccggtggactcgttgcaagacgcggcgggaattgcttaggatccgtagggttgatgtttgctgctatggagagcggtgttacgtatatgagagacggagacgacggttcgttgacaactgtgatcgctggtttagccactggtgtgctttacagagctgcttctggacctagatccgctgtggttgccggagctgtcggaggagttgcggctttggctgcagttgctggaagacgcatcgtcaagcgattcgttccaatctaatgaaagtttctcaatctctcaaggttagggtttaagaactagtttaaaggaggggcttttagatagtgaatcattggtactggatttagggcttatgaattcaatttccactgtataaaagttgacatttttattgatctaattgctcaatccgactcaactttttgctgattttgtcgaattcacgaaattgaaatgatctcacataaaaactcaattgataattttacaaaggagaaaaatttgtcaatcaaagaagaagagaaagattgaacttttaacctcacttggtcataacttcaacgccattctttccagcgataatgacagaagtagccattccgagaaacagaccatgctccaccactccttgaaacttcccaatctctttagccgcagcgaatccatccttcaaaggagtcttaaaatacaaatcaataatgtaattactgttatcagtcacataaggcttgccatcaccatcaactctaagctttgattcacatccaaattccttgaagaggtcttgcaatctaatcaaattaaagttccagcagaattgaacaacttccaccggcatagctaatccacttccaccgagtcctgtaacgagtttggtatcatcagccacaacaataaacttgtcagccacagcttccaccattttctcacggagaagagcacctccacgacctttgactaaatcaagattcggatctacctcgtctgctccgtcaatagcgagatcgattctcggatgtgtatctaacccaacaagaggaatccctaacgaccgtgcttgttcctccgttcgtttcgacgttgggataccgacaatatcgtagagttcaccggaagagagtagtttcccgatctgatcaacagcgaaagctgcggtggatccggttccgagccctagaaccatcccaggtttaattgcctccacagctttctccgccgcgagcttcttcaaatcgtcctgtgaaagcgcgacggattgagccttgacggagaatgaaacggaggttcgaggagaagagccagtgctgcgtagggcaatagaaggagtgcgtagcgtaaggtgagaagaggaaacgaaggataaggaagccattggagagagaggattgagaatggttggagaagaaataaaatgaaatcgaaaggtttggtttttgacttttgagtggaagaggaaggtttagtggcaagttatagagttttgtagttggtttgagggtagtattggaatactagttttaaggttgttgtatttgggttggtgaagataataacctgctaaaccaatcagagtgttaaatatacgatgtcgtttttgtttctttgagaacagagttatataaaaaccttttttggtttggtttcgtggagagtctaattattttcttccactttctcgatctttgagatttctttcaaaggaagaaaaaaaaaaaaactcgcg

SEQ ID NO: 8945 - DNA, 3000 bp, Unknown
  misc_feature (1)..( 3000): cDNA_ID_1395928_gDNA_ID_1971948_Annot_ID_177318 3000 nt of promoter + ATG
tgggaatgcctttaagagcctgcaggtagttaccagggcatttcttcagacactgcagctgtttcaaaacgcccgattaaaactgatcatcatggaaactcatcaattgtagaaaccaatacatgagtagtttaaaacttactatggctctttcagcaacgaggtatcgcggtagttgccttagagtcccgtcaatgtcaccagtttctttgtaatattcccgggcatcatttactacatgcctttgtaaaaagaatcttaaagtcaagaaaaactatgcaatgctgcgtcctttattttcgtagagccaaatatggtattaagagggattagcaattaaagctgagactaggtcatgtaaaaggatatcagtttctcttggatcaagaatcatgtctacagcatctttccactctcctttcaatagtgcagctcctacatggtgggttggtactgaaccacttccaaaacgctgtcacacaattacaaaattcataagaaaatatttctatttgataatattcaagtactactcgataccacaatgcaaaagtgtaagttgaattagctactaaaaactaaaaagagaaaataacatatatatcattacaactcgacaagagaatagtacctgcaagccaaagtagttgatgaagccatctttccccaaggattctgcagattgttttatagtttcttcagaatccgcaaccactcctctgagaatataagaatttatacgtataatgatatttcacgaaaataaagatctttgcatcatttctcagctaaatttgatcaaaatgtttcttaaagaagagaatctggaagttgacagaggatcataagagattcttttataaatgtccagttatattcttaccttaatgtgatagtaaatctgtttcccatgagctgcccaaggagaaggccctctttgacattgctggaaaacggcagcaatcatcattaacactaagaccacataaatatgtccaaatgaaaacattcaagaatatgttggcttaccagaagtcaccaactttgatcccaaacaatctcttgttaagcgcagccaatttgctagcttgctgtttgaacacagttacctaaaaagcccaattctcttattatgtattgtaaccattaaactcatcttacaaagaaaacacgtacagataacttacacgctgagtagaaacagaccgcttatcttttgttccagagaatccgaatgactttggctgtaaattcaaaaaccatttcaatacacagcttatcaaggaaagtacaatggctagagataaaacagcccctttatagatggatagaagaagatgggaaacacctgaacgcctagcatctttccaatcaatcccaaggcctcttgtgtatctttgttctccttgtaaagatggaacctattaacttaaacgactcataaatcaaatgacacataggttgaacgtccaaatgcattaataaaataaaagcactacagagattatgatgtataaaatacaccctttcgttttattgtatcagtaattttaagacgctaatctacatctctaaagtgggaaatccagttcaggtatccatttttcaggatagactaatgtactaggtccaatatatagtaactttaatgtcaaataaatgttgatttaaagatattacctgagaaacttgccaacatgctctggccaatgctctgaacctctgctatcaaaaggcttatcgcctctttcctttcgtttttttgatctattacctctgttgttattggctcctgaattcactcgcacacggatgcattttgaagtagaatcaggaccgtcgacagtgtcagtcactaggaacttgaaattctctttaacaaagttgtggatagcctggatagtagtatacgaaaaagaaaatctagtaagaagtcaaaagctaatgtcgacaacagtatatgtaactctgcaatcaaaacctataccgttctcttggatttgtcagaacttggatcaagaacaactggtaagacttcaccatcagttcctgaggtgacttgattgatcaatatttccaaacgctctgcatcagtaacactggaaatagatttgaaagactcaactgcagaagtataattttggggtacattatcacaacttttcgctttatcctcctccttcacagcctgaacaacacacaacaacgcattggcacaaacaaaactaaaagatacaatcgaaacaaaacatagcttattgaaatgaggagagagacaaaccatctcaggaggcaagtccaaggatgtcaaatgaaccacattaccatccatatctacttcattaacaataaagtctgcgtatctacgaaacataaatacagaaaaaaagtttcaatttttctcctatatggaacaagaacgtttgtgtataagaagaagcataaaaacgtaaactgatctcacgacctttgtttgaggattccacggaagccagggagctgggagataaaacaggagatgcccacgtcagcttcatctactgttttcataccttcaaagtttgtagctatcgtcgctattttcgttgtccagctcaagctcgagtagggttttagcagagacggcaaacaagacaagacagttctacttaatttcattgccttcttcaccggaacggcgacgacattgaaatcgaatactcagtaaaacgcaccgttcgttccccattgacctgacccggttattgatatttcaatcccaacaaaccgataaatatattctcaaccaaattgatataccaatgaatcagatgttttgttaaaacgcagcgtttcgttcgtcaatatgctctaagtttaaaccagatcggtgcgaatattaaaccgaaccggttcatgtcaatgtcttctttgtagaaagagactttcctgatcgaccttccactactaacagatccacaaatttcataaggttcagagcaaatcggagagagagagatg

SEQ ID NO: 8946 - DNA, 3000 bp, Unknown
  misc_feature (1)..( 3000): cDNA_ID_1027928_gDNA_ID_1971948_Annot_ID_177317 3000 nt of promoter + ATG
gtcataattaagcaaagactttttgcacctgtagtatctcaatctagttcgatttgtttttgttgtcttagctaaaagagctgcttgcacattatgtttgttttataaaactaaaatacaaagcgtattcctttatttgtgcagaatggaccctgtatgagcaggtagcaattgcagctatggactgtcaatctctcggtgttgcacaggtgaatttcccttacaatttcaattggtaacttgaaaactacatgatcctattttaagatcacgttttgttgaaagcatcagttatctagggctgtaggtgtatgctatttcttcggtttgagcctcttttctagagttttcttgcatttttgatatattctatgtatcatggatgcattgtgatgtgagttgttttctgaaaattcttttgttatgacaatttcttttttgcagaattgcatcaaggttctaaagaagaaatttccggagagcaaacgtgttggtaagtcaatatcaacccttgacacactgagcaattcttcactctttgttggacatcaaattttactcgtatcctttctctagcctccttggataaaccacatacgatttgataacttaggaacaagaaacataaactccacatcctttccattttctttatacttattctcgcatatgcttctctaaagtaagaacaaattatcaagttataagtaagaacatattatcaagtttaaagtataccagctacgtcaggctgaattcacgtggtgtacatgtgtaagttttgtgtcttcacatgtccgtactcacaagtttttgtttattttgccatttttgggtcttctgggtgttcatatctgtgctcagaggttttctagctatactgaaagttgggctctacaggcacctagtttcttagttaccttgataccaatctgagctgcatcttggtaatatattcaggcaagctggaggctctgctgctagaagcaaagggaatgtgggaagaggctgaaaaagcatatacaagccttttggaggataatccacttgatcaagtaagcttccgcattttttcgtcatgaaactacccacaagctacttccaaatgttaactgttgtaagtcaaactcgatgtctaggtaattcacaaaagaaaggtggctatggccaaggcacaaggcaaatcttccttagccattgaacatctgaacaagtatcttgaagtgtgagtacttactaaccccaagctggactgatagaaagtactttagaagaaatatatcaaacagctgataacttttatatgctcttctttcttatatagattcatggctgatcatgatgcctggagagaacttgcagaaatttatgtttccttgcaaatgtgcgtctctctatcctctgtcctcagattctatttgacaaacaattaactactcaacgattaacaaatgtttttcattttgagggtgctctctttataacccctttaaatttataatctgtaacaggtacaagcaagcagctttctgctacgaggagctcatactaactcagcctactcttccattgtaccacttagcatatgccgatgtaagtcccatcttttatttatttgttaaaaaaaagtaaaaattgttctctggctttgttaaagaaaaaagtcaaattttggccatcaccaaggagcatcaaaatgtcttagtttgtttaagacaatgtatctagtatgcatcctataatcaattttgttgttccttatatcttacactggaagttcattgtcattcatatgtctattaatgtagtagcaatagaagagcgagctattttctggaactttgcattatttgcactgcacatatcaaactcaaaactgagaattctaaaagtttggcagttttttttttatatagttcgaaactctaaactacagcattgatcatgtatgattgtgtaattaacgtaattttcattttgcgttgcaatcgccaaaatcaggttctctacacaataggtggactagaaaacctcatcgcagcaagaaagtactatgcagcaactatagacttgacaggtggtaaaagcacaagagcacttctcggaatatgcttggtatgaaccctttcttcctcacaccagtttaatccactttggttatgcaagtgacaaaatgaccgatacatgttctgtttttgaaatcagtgtggatcagcaatcgcacagatctcaaaaggcaggaacaaagaggacaaggacatggctgcaccagagcttcagtctttggctgcaactgcattggagcgagagtacaagcaaaaagctcccgctaagctcaacctcctcacttctgccttgagaaacttgaaaatcgcttagttcaaagcactagagcccaaacaattttttggtattttggtattgtttaaacttttttacagtcagacttttgttcattccttttcttttacccttataatttttttcttattcacttggctatattgttgaatcactgatacggtttactaaggtgtgtttaatcaaataataaattaaactaattcaatctaaacgttaaacgttaataataaatttgtgaagttttagcaaatcatgcaatttatctaacaattaaataaatatctatatttttcactaattcataaaatacaacttctcatatcctaaaatcatgtatggtatttgttttttaatttcttttcacatatatatagtatggttttataatcgatttcagactcaagtggaaaaaagaaatattggacaccttagtgggccattagatgcaagtaaatacaactttaggcttagtccattactggtaaatttgaaggcccaaaactttgtttatcctgggtgtgaaactcaaaccctagaagaagactttaaattgaagaagcgccgtagcagcattttaggttaaaacttattgttgattcttctctattcgtcgtcgacctattttcctcagccatg

SEQ ID NO: 8947 - DNA, 3000 bp, Unknown
  misc_feature (1)..( 3000): cDNA_ID_1989295_gDNA_ID_1971948_Annot_ID_177304 3000 nt of promoter + ATG
tacatattttaattagattggtagaacaaagaaatccaaaaaaaaaaaatacagtcgtaatttttatgattcttaatcaattctacgtctaataaatatcgatttgatgtgtttttttatatcatcgataattatatcgttacctactaattatgtccaagcagatcatatcaataataatcaccattatttattttgtcagctaatctttagtattatttaatttgagacagatagttggatccatatgcataattaactattcgttaagtgacaacgaggcaaatattgtcagtttcttagtaaaaactaaagttgttttactagtagtaactaattgaggttaggtgattgcttttgggattagcttacactgattatttcagtacgggcaaccacggatcaccagccaagtagtcaaacaaggtccgatttaatcattaattagtctctaattagttcttttggcaatcacgttatttctattcgttattgttagcattagtgcattaccaatattgtttttcatattttttggggtggttgttctctacgtatatctctttctagatgatagtttatcaaattcggtttgatacctcgttctacctagtttagtattaaaaaaaaattagtgtaaaatacaaatgatattcacagttacttgcattaacattaaataagaatagaaaattaacatctatcaaacaaaaaaactttatggtaaagtaaaatggtgtgagaggaaaaggccaaatggataagatttgtggttggtctgattcattattcacaaccaaccaagtctttatttgcttctttttttttcgtttaaaaggctatgctgatcgtgcatgtctttgtattcacccacatgcacatgtgtgttctttctctaatataagattggcccccatcaatctgtttatttccaaatattatgataaatcaaatatttataccctgaattaaatcagacttgattatagttagtcatattgcacatgattcctgttcactgtacgatatgtaaattatgttgatggattgtcgtgtaaatgaaatgatgtatggtcaagactcaagatagataacacgagcaactttaacttaacacgtggccaaactaacctttgttgcctcctttggaacatctagtcgacatgctaatgtatggtctcgctgtctccaatccatttcagaattcttaaattttgtgtttttatttccaagcttctattggtaacatttagttagttatttgtaacaaaaacgaaaacatgagttagttatatagcattgttgtttgatggtagaagaagtagactagtcgttacgatgtagttgtatatgttatagcgattgcaatgattcgttataatgattttctttttagatgaatgtcgtctaatcaaaattttggttccagtttttttttacctttttctaaaaattaattttccaatagcgtatatgaaaccaaaatataagacggatactataattcagattaaaaatgttgtagctaatattttagtatgtaaaatcaacacaaaaagcatgtcagcaaacaatattcaaaactttatatctaaaatctttctaaaaaaaaaagtaactttacctaaaatatggtcaaattcgtagtgcattaggggatgataccattccccaccaatgaacgtaatcatagaacaatgatcatatcctttgatttattcaaacgaacgatgatcatttcaaaatactagaatatcaattatatagttgaaatgatgatggcatatacgctaatacaaatgcaatccgcacaatggaataaacgtatggaacagtctatcattcccatcactcaaaagatacgtacgagagagcacctttctatttccttttctaagatagctgagacctgacacgatcacatccacacgaggcaacccaatattcatatataatttgttttgaatgttgattgttctaattgaaatgaaaaccagtcgaagtttttaatgacataaactaaacctttatcagaatatggttctaaatgtagtaatttgttaatcatatcacacagtttagccggtagggagaattttttttcggcacgttatctcgatgagattcattattttggtaggttcaacatttatttcacaacaatactccgtcggctaatggaattattactatttgcaagcatcatctttgtgtataacaaaacaaaactaaaatcaaaacaaaagaaaggtaaagtaatagtaacatttttgttttctctagcttgtgaatttgtatagaataatcactaaaatgaatcaatcataattttcaagtattcaagttacttttccaccgaacaattgttaatactaccacagaataatttccaataaataattgtcgatagaggacactaattatatataccgtataaaataaaatccgttgcaattatttagaagtatgtaaaaaggtttaaggaacaaaaaaaaggttccataagaagaagaagaaaaaaaatgaaggatagatatttgtttagtttatatcccatttttggaccaccgttccctaaagaaacgcacaccgtctttgtcttctctcacgaggtgcttgtatttctctgtcatcaaccaaaaaaaaaaaacttccattgaactattgaagagagaaaagcttggcttctctgtcttctaagctcaaatcctccttttctctctctctctatagagtttgagtatttattagaatgtaataatgagagagtctatacagatactgttcttatctactacatgagtttcattgccctgttcaactccttttgtcagagaagaacaaaaacaataatatgattatgcagaaattgctataagaagaaacctaaactctctcccatttattaaaagagagacgtttgtattggtagatctattcttatttttccttttgggatttttttatttggttcgtaattgtgagattgaaagagagatg

SEQ ID NO: 8948 - DNA, 3000 bp, Unknown
  misc_feature (1)..( 3000): cDNA_ID_1023490_gDNA_ID_1971948_Annot_ID_177303 3000 nt of promoter + ATG
gaaagattggtaccaaagtgtctgaaaagaacaacttcacttcctgttgatgccattgattcttgattacattctgtttcttcatgtatacatacatattgtttcctattataaagacttttacagtgtaacaagaacaacacacaagtatacttaagagatcctcttcaaattcttttggggttatttgtacaataatacccttcaatctaataacttcaaaatgcaatacgattataattttttttattactgattacttgaaaattttcgtttctagcaagttgttttaaaatcttttcagcattgacatactatagcaaatgataataattgatgacaagcaataatgatagcaaattattgagcgatgtgaagtcagcaatcagtttcggaataaaacttcggacaataaaattactcaaaagtacattaataactttaataaagaaaaaccaaaaaaaacaaatgaattagtgtctactatgttcttaaaacactttggataatgcaaagagaaatcgaatgagaaaaataaaaaaggaaaaaagtgacaaaaatagtcaattataagagtaaccccacatcagcacaacgccatgttccattgccgaccaatcaactagaaatttgggttcatccacatgcctttgtatttatttttcatcaaaaatatgagatatatattgtattaaatataacatggttggtttgtcgttactatgtgattattataggaaatggttggacattttcaatatgacctttttttttcttccatatactagaaaacgattcttcaaatagagacagaaaatattatctcaagctttatgacaaaatggaaaataaaaatatcacacgcatctaatttttttacaatcacgtgtgatttgatgctgtaagccctatatattatattacaagttataagttattgtccaggggcggatctactatcagaggagggtgggcacgtgccccatgctaaattttgaaaaaacataattgatcattatacatttagttaccataattcatttggtaataagaattcatttagtgccccatacaatattaaaatgttgagatcgattcccttctgtagttttttgttttgcttttttctttaattttttttttttgtttgttgctacatccgatacatctttttgtttagttgtttcttacattttgttgtttcttttaaatagttgcattttttttgttttacttttcttcttaatttttctaagtaactgtaaaactttgctttttttctttaattaatctttcgtattccaatttaacttttgataaacttttaagatatgtttctatattgtaaaattagtaactacacttcaattatatattttgtgtaaactagtaaattagtaaaaatacaatttttgtttgcagtttatttaatatttatggttgaaatttgtgaaatatatatatatatatatatgtaaattatatatatatattagcattatttaattaataaagtaaaatgatatatttttaatatctaatatatgtaatttagtatatttaaaaaccaatagctataatacttttaaaacaaatttttaatatctaatatatataatatataccctgtacaaattcaaacttgaaaatttatgttatacgcgtcaagaaaattcaatggaactaaaacgaataaaaaagataatgaaaaatggcagtagggacatacgaagaattgaattaggttgacccattaaaagaagataacaataattgatcttaatagtagataataggctaagaaagcaaaatggtaaaatggtcgttaattgatgacatgcatgtgggtattgaatgtacagatcaacgtacttctattcgtacccaactccaacacacacttgttcagtgccaaccattcttctcatatcttccctccattcattttcttgtcggtccttataatctttccctcaagattttccttgttactttataaatatattattttgtgtctatccattattatgaatataatgcaagagggtctcatcactaccagcaactaataatcaacgaatagatggtgttattaaattttgtcctcatatatatatttggcgatcttaaaatttatacatgttccagcgaatggtcgaaatctgatcagtacaaccttcaaatgatcttttgcggtggaagccaactcattttaacacactcgtggcttaacaagatcaaaacattatattctgttttataatagtttcttttgagctttaataattactcttctttcccaaaagtttcataatatttctttgcaataactccggcaaacaattcttatttgttaaatagtaaaagtaacacgttgacaagacaaaaaatgattattccctacattgtaagtgtaaaacaccaaagcacaacgaataaaataaaataaaagtttcttagccgtttgtgtttttcttttcccaaaagtttatattaagtgtcaaagtacaagttaattagttctaatcagctgaacacaactatacatatacacattaaactgtcatttagtcttaagtgtttgacattggttaattctaactcaaaattgctgaattcgtagcattaatgaaccccagttttgtgttatgtacagaaaatattgactcgtggcgtgggggaaacaaagactttaaccaatgtccaatgacaattgtttgtgacactaggctataaatattttaggcccagtgggcttcgttttattttcccatgtaaatgtttattaatcaaacctagaaaaccaaacggctaggattaagtaagcccaaattaaaagttgaggcccatacaaagagaacacaaaagaaaccctaaggaacttgtaactatataaaagctccgacttcgattcggcgtctctttccttcacctgagcggacgaaaacactcaagcttgcagagatctttcactttaatccttgagaagtagcaaaaatg

SEQ ID NO: 8949 - DNA, 3000 bp, Unknown; identical to SEQ ID NO: 8943
  misc_feature (1)..( 3000): cDNA_ID_2991568_gDNA_ID_1971948_Annot_ID_177294 3000 nt of promoter + ATG

SEQ ID NO: 8950 - DNA, 3000 bp, Unknown; identical to SEQ ID NO: 8942
  misc_feature (1)..( 3000): cDNA_ID_2037739_gDNA_ID_1971948_Annot_ID_177292 3000 nt of promoter + ATG

SEQ ID NO: 8951 - DNA, 3000 bp, Unknown; identical to SEQ ID NO: 8941
  misc_feature (1)..( 3000): cDNA_ID_1988834_gDNA_ID_1971948_Annot_ID_177291 3000 nt of promoter + ATG

SEQ ID NO: 8952 - DNA, 3000 bp, Unknown; identical to SEQ ID NO: 8940
  misc_feature (1)..( 3000): cDNA_ID_1989302_gDNA_ID_1971948_Annot_ID_177290 3000 nt of promoter + ATG

SEQ ID NO: 8953 - DNA, 3000 bp, Unknown
  misc_feature (1)..( 3000): cDNA_ID_1988787_gDNA_ID_1971948_Annot_ID_58598 3000 nt of promoter + ATG
gtggcatatgcgaaaaaactctaattatttttttataacgatgatattatttttttcgcaaaaatagaatcatataaagatgagaggtgaactataataattaataaaaaattaatatgataatttagatatcaaatctaatttgttgattttaattggttacttttttggaaattaaaaatgtatttcgtttttgagttaaatttaattaattaaattagtatttgactttttaatttttaaagaaatgaattaatttactctttaaaattttatttctaatggtatacctatgtaattacttacaaaaaataaggttacattttaaaaattaatatgataatttagatatcaaatctaatttgttgattttaattggttacttttttggaaattaataatgtattttgtttttgagttaaatttaattaattaaattaatatttgactttttaatttttaaagaaatgaattaatttactttttaaaattttatttctaatgacatacatatgtaattacttacaaaaaataaggttatatttaaaatgtactttcccaaataatatagtaggataagtagattctctatttggtatttatattttctcttatagaaagaaatctaatcatttttatgatatttagattttctatttgtactgttgttactcacttcttactttcaagtttcaaccaacaagtttctcaggattttaatatttttttttggtcaaatattttttggtaaaaaaaaagaacattattccattttaaaaataaaaataaattattgtttccgatctttgaaacgctgcgtttaaggttcagggttttggattccgacacggtgaagaacaatgggatccattcctgctatcttcttcctctgctacacctgagaaaccctgaaaccctaattcttcagtaattagtttccaaagcagttaattttgggcggaaaatgtggtcttcgagaactctcaagtatattttcaggctaagacctgaaccaatttcttcctcatcgtcttctgcgtattcgctctctcgcatcaccggaggttctccaattccgtcgcagcagcaacgatcgattacctccacggcgccgcttaatggatggatggattcgatcaaaggtgtttttaccgggaacaaggatactcctttagaagaatcaaatctacccgttgaagctttcactcttctccgtaagtcttacatggatacgtgtgattgactgtaatggtggatagatcgatatactcatcaaagctattctctttggattgaaaattgaatttaggatttgctgatgaattgaagaatgctagacggttagggaaattcaagcagtacattgtgggacgaagcagcgaggccacttttgctgatgcatttgagaaacaagaagctgttattagatatcttggagctcttgatgctacaggagaggttggtttctttcttagcatactagagtccagctatgtatctgtcgtttctatcacacacacatgacttgctaacaatttgcagaatccttgaaaacaagaatttttttttggtacgttagtcaatgtctgactgtggcactaggtttcttgatgtgtagaatctccaagcgagtcaaaagcaagatgcggctaaacattgcaaatgcactataactgatgtggagaatacgctgtccaaatttacttgggccaggcaagctcacaagaagatgacagagttgaaagaaggaggcaaaccgttaccaaagaatatgggagaggtattcttctcactttgtatactcatatgcttttttagctccataagctcctatgtatgactgtgtggtcacgtttctcatttcttagacttagaatagtgtctaatgagattttgcaataacacgctcttcttcgttttgatcatcctctaaaaaaactttaagtttctacacctaactaattcccggctcaagaacagggttcccttataacaagagctcgtttgtaacttggtgtttttggttagatttgatgttcattggttagaaacaggagtcatcttgcactatgttggtattcttaagattttagtttacatttaggcagtttgttacttgttggtttactgtttccctttgtcctgcatccatttagctagtagttatgatgacactaaattgttatattggtctattgaagctgcaaaaaatgatggggtcaacaccaatggatctggcgagatcaaacttagccaaaagtgggcagatcagccgcaatgcactttgtccctgtggttccaaaaagagatataaaaggtaaaaactttgaagagctttcctttttcccggcaaatacataagactgttaatcaaagttgcacttctatgtaaattcatcattttgttgcttttccatttatcgttgtgttgatatatttgcactctcttcttccttgaagatgttgcggaaaggattgaagaacacagaagttgatccaaagcatctaaagatacgagctttcttttgtttgactcttttcttggcttcatttactatttaagattgtagtatttgtatttttttaaggttatcccataatcagttcatctgaatactttatttttgaaaaatagttcataacctaagttaaagtcacatgtttgctaagtatatcatttcgttgaaagaaacccaatccaacggctacaaaacagaacgtacaatagtgaatagttgatggtcaaacttgagagcagtctaaattcaaatccaacggttgagatctcttgaattgatctaaggctaaaaatcgaagtcatacgtcacgaaataagaatgctcagtgaggttctttctccctcccatttctggtaaaaattgtctctttctctcttcttttctttctacaaaaacagaaacaaaaataaaaagtaaagctttctctaaaaaatctctcctttatcttcttctagctcttctttgtgcctctttcaccatg

SEQ ID NO: 8954 - DNA, 3000 bp, Unknown; identical to SEQ ID NO: 8948
  misc_feature (1)..( 3000): cDNA_ID_1023490_gDNA_ID_1971948_Annot_ID_58602 3000 nt of promoter + ATG

SEQ ID NO: 8955 - DNA, 3000 bp, Unknown; identical to SEQ ID NO: 8947
  misc_feature (1)..( 3000): cDNA_ID_1989295_gDNA_ID_1971948_Annot_ID_58603 3000 nt of promoter + ATG

SEQ ID NO: 8956 - DNA, 3000 bp, Unknown; identical to SEQ ID NO: 8946
  misc_feature (1)..( 3000): cDNA_ID_1027928_gDNA_ID_1971948_Annot_ID_58610 3000 nt of promoter + ATG

SEQ ID NO: 8957 - DNA, 3000 bp, Unknown; identical to SEQ ID NO: 8945
  misc_feature (1)..( 3000): cDNA_ID_1395928_gDNA_ID_1971948_Annot_ID_58611 3000 nt of promoter + ATG

SEQ ID NO: 8958 - DNA, 3000 bp, Unknown
  misc_feature (1)..( 3000): cDNA_ID_1989291_gDNA_ID_1971948_Annot_ID_58612 3000 nt of promoter + ATG
aaaacagaacatgtatcggtcattttgtcacttgcataaccaaagtggattaaactggtgtgaggaagaaagggttcataccaagcatattccgagaagtgctcttgtgcttttaccacctgtcaagtctatagttgctgcatagtactttcttgctgcgatgaggttttctagtccacctattgtgtagagaacctgattttggcgattgcaacgcaaaatgaaaattacgttaattacacaatcatacatgatcaatgctgtagtttagagtttcgaactatataaaaaaaaaactgccaaacttttagaattctcagttttgagtttgatatgtgcagtgcaaataatgcaaagttccagaaaatagctcgctcttctattgctactacattaatagacatatgaatgacaatgaacttccagtgtaagatataaggaacaacaaaattgattataggatgcatactagatacattgtcttaaacaaactaagacattttgatgctccttggtgatggccaaaatttgacttttttctttaacaaagccagagaacaatttttacttttttttaacaaataaataaaagatgggacttacatcggcatatgctaagtggtacaatggaagagtaggctgagttagtatgagctcctcgtagcagaaagctgcttgcttgtacctgttacagattataaatttaaaggggttataaagagagcaccctcaaaatgaaaaacatttgttaatcgttgagtagttaattgtttgtcaaatagaatctgaggacagaggatagagagacgcacatttgcaaggaaacataaatttctgcaagttctctccaggcatcatgatcagccatgaatctatataagaaagaagagcatataaaagttatcagctgtttgatatatttcttctaaagtactttctatcagtccagcttggggttagtaagtactcacacttcaagatacttgttcagatgttcaatggctaaggaagatttgccttgtgccttggccatagccacctttcttttgtgaattacctagacatcgagtttgacttacaacagttaacatttggaagtagcttgtgggtagtttcatgacgaaaaaatgcggaagcttacttgatcaagtggattatcctccaaaaggcttgtatatgctttttcagcctcttcccacattccctttgcttctagcagcagagcctccagcttgcctgaatatattaccaagatgcagctcagattggtatcaaggtaactaagaaactaggtgcctgtagagcccaactttcagtatagctagaaaacctctgagcacagatatgaacacccagaagacccaaaaatggcaaaataaacaaaaacttgtgagtacggacatgtgaagacacaaaacttacacatgtacaccacgtgaattcagcctgacgtagctggtatactttaaacttgataatatgttcttacttataacttgataatttgttcttactttagagaagcatatgcgagaataagtataaagaaaatggaaaggatgtggagtttatgtttcttgttcctaagttatcaaatcgtatgtggtttatccaaggaggctagagaaaggatacgagtaaaatttgatgtccaacaaagagtgaagaattgctcagtgtgtcaagggttgatattgacttaccaacacgtttgctctccggaaatttcttctttagaaccttgatgcaattctgcaaaaaagaaattgtcataacaaaagaattttcagaaaacaactcacatcacaatgcatccatgatacatagaatatatcaaaaatgcaagaaaactctagaaaagaggctcaaaccgaagaaatagcatacacctacagccctagataactgatgctttcaacaaaacgtgatcttaaaataggatcatgtagttttcaagttaccaattgaaattgtaagggaaattcacctgtgcaacaccgagagattgacagtccatagctgcaattgctacctgctcatacagggtccattctgcacaaataaaggaatacgctttgtattttagttttataaaacaaacataatgtgcaagcagctcttttagctaagacaacaaaaacaaatcgaactagattgagatactacaggtgcaaaaagtctttgcttaattatgactcttcatcagctaaaactatgtttaatttcccaactaggaatgaaacagtgaacatataaatccaagaataccagatttagcattgagcagatataacgtagatcaagtatcagtaagcactggaagtagaacaatatcaaactgaatttcaagtaatttcatttaaatgaaactcatgaattgaagcaattgagtggagcacgatttaggaaatcaacaaacaaagacactctcaatgagaaacacatcgaaatcaaggaactgaaaatcaacataccatctggaccaagagcggatcgctttcccgaatcgttcaagatcgagagaccatgcttgagcacaatctctgatcggcgaaccttgagcttacgaacgaggcacagatactcccaaacacctcctcctccattctcaacttgattctcgagttggtttaactgtatctcctccgttttcgtcaccatctctctctctccgatttgctctgaaccttatgaaatttgtggatctgttagtagtggaaggtcgatcaggaaagtctctttctacaaagaagacattgacatgaaccggttcggtttaatattcgcaccgatctggtttaaacttagagcatattgacgaacgaaacgctgcgttttaacaaaacatctgattcattggtatatcaatttggttgagaatatatttatcggtttgttgggattgaaatatcaataaccgggtcaggtcaatggggaacgaacggtgcgttttactgagtattcgatttcaatgtcgtcgccgttccggtgaagaaggca

SEQ ID NO: 8959 - DNA, 3000 bp, Unknown; identical to SEQ ID NO: 8944
  misc_feature (1)..( 3000): cDNA_ID_1396989_gDNA_ID_1971948_Annot_ID_58616 3000 nt of promoter + ATG

SEQ ID NO: 8960 - DNA, 3000 bp, Unknown
  misc_feature (1)..( 3000): cDNA_ID_2993985_gDNA_ID_1971952_Annot_ID_58618 3000 nt of promoter + ATG
gatttcagtctataatgcacgccgtcctatgaaacagaggtaattctgacacatttgaatgttttgctcatctcatttcgggagtataaaaggtttgaaccctcactaatcaaatttttctttctagctgaccagtcactctttattcctggcataacatatggtttaaggctttgcatttattttggctttagttattacctatttgggttagatgaataagttgggatgaggaagaatactgacttatatcctaatgtattgttagaaatatttgtttattttggtactttacatttctttgcataacgggtcaatctttattgctcttgtagatatcattacaacgttgcagacttaagacttgcacagcatgttgagaaaggtaatgaggatggccttttcataagctgtgtagcatcatcagctaatctctgggccatcatcatggatgctgggactggtttcagttctcaagtttatgaactgtcctcagtcttcctgcacaaggtaaaacagctgaagcattaggatccatctatctgtcatacctattctctgactgtagcagctcaccatttgtttctggattctttgcaggactggatcatggaacaatgggaaaagaactactatatcagttccatagctggtgcaaataatggaagctcgttggttgttatggctaaaggtcggtagtcacgtctcatgataactttgccaatgaacttattgattcataaagcatgaaagccgttttacttattccacttcatgtaatgcgataggaactccttatacccagcaatcttacaaagtcagcgactcatttccattcaagtggataaataaaaagtggaaagaaggttttcatgtaacatccatgaccaccgctgggagtcgttggggtgtagtaatgtccaggaactcaggctactctgaacaggttccgatctctttacctgaggcatttcaacttttctttgtttcctttttgagcactataatgtattaacgaggtttatgtggtgtatattataggtggtggagcttgacttcttgtacccaagtgaaggaatacatcgaaggtgggaaagtggatacaggataacatcaatggctgcaacagctgatcaagcagctcttatattgagtatacctaaacgaaaaataaccgatgaaacccaagagactctccggacttctgccttcccaagtacccatgtcaaggtgtgttcttaggaaacaaatgaagcatgttggctacatgaaactacaaaattcggattcttctccatttgttctatgtactgacttggacctgcattttctatttcaggagaaatgggcgaaaaatctgtacattgcatcaatatgctatggtcggacagtttgctgatgaaacatggagtatactgtttcaacctctctcactctctctctagggttttagggacgatctctctctagaagcctgacaacgtgtagccttcggtttcagtacaatccaaaggtaaaccttaaccaggagccaacctatgtgactgtgtaatgaaatgaaatttgtctctatgtatgtagtaagtacaagataaaaggaaaaaaaaaaaattgagtagaagagacgaaatcattattactagaaatgatgaagagctgcaacaagattatgcagtttctggcttatttggctttgtacctgatttgagtacagaatcaggaggaagcaacatgtttgttataatgaacatataattctaagaaggctttcatcttttggtctcaagttttttgcttccagttttggattttaacattgcaattatgttaagatatgatataaataacaatcttaatagaagtcagatatttcaaactcaaagcatcgttttcaattagtcttgagcagctccaaatcttataaacaaatgctcagtcaacgtactagtcaacattatgaaatttcaactaacagccttcaaaaagattacacaacaatcactgacaataacacaatcactgacaataattgtgaaactaacatggatttatttttaaaattttatttatttaaagtcttggatcatcatcatcaccggaactcacagagtctctcacaaggaaagaattagagaggaatctacaccagaccaggtaaaaaaaattcaatacattcgttttccagaagtttggatcatcatcgtcatcgagaaatacagagagttttgattttttttctcacaaggaaagaattagaagaagcgagagagagtatctatttattttatataagcaaagaggttcaaaagaaaaaggaaattgctaaatcacaattaacggtcacataaagatttccttttttctgtaatgggtttagacatttcacacaacaacctctttggcaaattttacaagcccagctagctaaaaacaagcttactagtagaaattcatgaaagtcctcagctagatagattcaacgatccaaacatttacgtgaacaacaacgaactctgtggaatgcaaatacaagtatcatgttctacaccacagaccgagcaaccaagaagaagtaattctggagcaatgttttcatggaatgtttcagtcataggttgtccttgtggattacttatggctgtgtttgttataatgaatatgtgattggctatttcagtgattcatcaccaccaagaccatcccccagaaacagaggattcaagaaatatttaaaactaaaaacagttaattaatcttctacaaaagcacaatcttcactttggttacttgagaagaaagaatcaaacagtactttaaacttttataaaggaacggagataaaacggtttggttaaatgttagactaattcccggttcaactaaacctaatacggttacagatttaggataatacccaatcaaaaccctaatcaaacactcgagaccgaagagacagagaggacgaaggtctctgtggaatccattagagaagtagaaaaa

SEQ ID NO: 8961 - DNA, 3000 bp, Unknown
  misc_feature (1)..( 3000): cDNA_ID_1989317_gDNA_ID_1971952_Annot_ID_58622 3000 nt of promoter + ATG
agatggaaaaaagcaaaaggtaaaacaaaaacaaaaaagctttcttcgagaaccagagcacattgattccaaggtaattactttctcaatgccatggaaaaggacccattttgttcccctttcctgtaatctaatcgtttcaatccgtgattatctctgtcagcttggaggaaatgacttagatttcataaatcgattcatgagttgtcagaaaggatttaaattttgttggtttgttcttatttcttctgtagctgctatgaatttttagatttagtttggctatgattctaaacctacgtctttatgaaagcacttacattttctagacacaagatcatagtgagttcatatgatgcggaaaagttattattctcttggtcttccagtttatatttatggaggaacatagtctcattaacaagcttgcattgttctgttccattggattgttataaaaatattcattggtcaattgagaaatcagtgtctaattttttttgaacgtgtctttgcagattgaatgctgtttctggtggattagtttctctgagttttggtgatagatcagattaacaggcagaattttgagaatgtcgacagtgggaaattcaacgaacatattttggcaagaatcccccattgggaaaactgaaaggcagaagttgttaaatcagaagggttgtgtggtgtggatcacagggctcagtggctcaggtcaatcttctaaaaaatcttaaattcttttcccattgtgatacttacttaagatgccttctttatatctctgtctatattctaaaatcttagcctcaaactttgtgcagggaaaagcacgttagcttgctcgcttagtagagagctgaacaaccggggaaagctatcatatattcttgatggtgacaatcttcgtcatggtttgaacaaagatcttggtttcaaggcagaggatagagtggaaaatatacgcagggtcggtaagtagtacatagttgcttactatcttttgctttcagttgatgaaagtctgattccgaagaaactcactaatacaaatgcaaatcctttaaaaaggtgtctcatatgtagtgatagtttacatggtaccaatacctcattgatatacatattggtatacacctaaaagctgatagattctggttaatgttgaaagaaacttctctaaagggcaaaatactaaagaagaccaacaatttgttctaaatgcaggagaagtagccaaactctttgcggatgctggtttaatctgtattgccagcctcatatccccgtatagaaaagaccgtgacgcctgcagggaaatgatacagaattcatcttttattgaggcaagctattcaaaaccaggctttacagtttgtaacccccattcggttggatcttaaaaacatcttgtttgatattgtggccaaatttgttaggttttcatgaacatgtctctgcaattgtgtgaagcaagggaccctaaaggcctatacaagcttgcacgtgcaggaaagatcaaaggtgagataacatagcttcaaggttccatataaacagaagatagcaagttgcttcaatatcatttgagttgttctataaaagtttttttttcttcatacccttttgtgtaggtttcacaggaatagatgatccgtatgagtctcccttgaactgtgaggtatgtgatccatgtgaacataagattcttcttcaagaatattgcaaacaacgcgtatgtgaatacgtttctctgtttcttttgtatgttttgaaacataacagatagagttgaaagagaaagagggagagtgtccttcccctgtagctatggctgaggaagtgatctcttatctagaagacaaaggtttccttcaaaacgagtaacgtccatcataatctaacgaccgagatttgtttttccttttactttttatgggtgttctctgtttgttactttcctgaaacactgcaaattcttaagaagtttcaactaatgaagacatatatagcttcttctccttcttctgaaacttgtcttctacactgaaactctagtcagtcaataccagaattcgatcctatacaacaacaagagccatgccattgttttcattgttaatttatactacgatacaacgattatactaagacaaccattaatttacatagtgtcatagtatttagaattttagtttttttgggggtcaaaaacaatagttttagttatgttagtgaataaatagattcagaaaaaactgtcgatcttatttgaatagttcgtaaaagagagggttctgtttgcaattttcctaacttttagatcctgagttctgcaatataaataaagaacaaaacaaaacacgatcacgaggcaattttgagacaagaatggtgttgaatagtcgattggtggagacaacagttaatctgtcggcggatctctggcaatatgttgcgtgtaaccccgagatacttcctcgcgccaccgtcatccatttcatcttctgcatccctctcctccaactccgccgtctcgcttcctctctaggatcatacctatgcttcgattccggcgccggagttgatcaccgtactcattccgattaagttaccggcgcgtttccatgaatcgtctgttaaatttcgacttttgattgtgtaatttttgttctgattgtaatgtaattttgtttgtttgtaaaccgaaagggacatacaaatttaataccagaataaaccggaaacatttaaatacacacagaaccaaaccgggttgtgtggaattgttgtcgtcacaggagagaaataagcagagacgtgtaaaccaaagaacaacgaaggtttcgtttcgtggggaagaagatgaagtcgcttgtggctcatttctcaacgcctttaatcaccgctagattagttcctagatgtatcatccatcgagcttcaatctccgccgtctctttttccaccgtccgccgtcgattttctcctctcacc

SEQ ID NO: 8962 - DNA, 3000 bp, Unknown
  misc_feature (1)..( 3000): cDNA_ID_3044194_gDNA_ID_1971952_Annot_ID_58624 3000 nt of promoter + ATG
ctgggtctgcttcatcaccagtggacttttccgtttgcaattacgaattcgagctgtttcgattcgatttagaggccaaatgtcctccttctctgtatccaactcctcctattgaggtacgtttctcatattgtgagctctaaggtttgtttgaaataagcgtgaggttatgtaacttattatctatgcggattagactactcttccaatgcaaatattgaattaggaaacattgatggattttgataactattaagcattgaagttgaagctcagattcgtcctcttgttcttcaagtttggattatcatcttacctactactgtgacttgaaactctgtttaggttcatagtttaatgctcttgtaatgcagattgtgtagtagctgctctgtccgcaaatatgatatagcaaattttgaataggtgttctttgtttcttctaaggggatctgaagctttattcttaactaaagcagtgtcaaaattttcactatgcaggtagatggagactcactagacaggctaatggcttcacaacatggaaatgcttatatgtctgtactcttttatgcttcctggtgcccattctcacgtgctgtgcgccctaagtttgatatgttgagttccatgtttcctcaaatacaacacctagctgtggagcattctcaagcactgccatcgtaagaagtctacttactattgtttttccaaagactacattgtctattgttctatttccatactaattaggataaatagcaaggaagtgggattgaatgattcacatcaagaatttttgggtactgatagtttagtttgagagtaaaaaaaacttaaattgcatatcagttatttaataacttgatccatataaggtgcttcttcttttcactttagtagaaggtcatgtgtgtttgctgttacgttatcttacatttcattagcaaatattcatttgatctatcattaactagttagttcatcattaccttatctgccttgtgtatactaagttactagtaggttcaagtgcttttaggtttcttcatgtgtctggctgtttcttttgtcttactaactggtttcattaattgctttgttgcagtgtcttttctaggtatggtatccatagcttaccttcaatcctgatggtaaatcaaactttaaatgctcggtaccatggtcgaaaggatcttatatccctgattgagttttatgaagaggcaacaggtgatacaccaaaccacatcgtctgcttttaatttctttcagtctacctgagtagtctttgttttatgtccaacctatgactagcacattttgggtggatcgatttagaaataactggttgttgttctggctttccaggcctccaacctgtccagtatgtggctgaaggggaaccaacaggcttaaatgccggtgatggtaacttgatcacatggttgcgcaaggggacatctattagagaaatattcaaacaagatccgttcttggtactatctctgctgtttatctgtttacaaatggcaatccttgtcttccccatagctgaatcccgcatgagagcgttatgggcttcttacgttgccaatttgaacttgggaagatttggagagataagccaactgttcaaccgtggtattcacatggtcgatgtgaggaggttatggttgaaactaagtctcgtcaaaacaagaaacttccatgaaagggcaaagaacgcacaagcttgggcttcatcgctggcatctgtctctctaggccaaacttcatcagaccaatcctgatctcaagggtaagatcatgtcagtattgggaagagatgagcttttaagtgtgtgctggaaatctgagagttcctttaatgaatgttatatgacttatttgagtttgatttgtctgcaacgaagcatgtaaatccaggaacagctttgcttctgtttgtgaatatctttctcccttttttgttctataaatttgagatgtctgtttttggcctcatttcttttactgaataatttgattgagtcaggtaaatttgtctgaattatcttacgcagctttgtcttgtaatgtcagttcgagtttggttggctctaccatggtttcatgttatggtacattatcatcatgtgcatcagtgcatgttgcattatataggatacaacatagcattttatgagtgttagccttgctcactctctacaaatattattgaaagttgaaactgaggatatgtcggtttggtttagtatggtatcattaattgcgtttttattgggttacggttctgaattctgattgtgtcagatatattttctgtttcttttatagttaaccaaggaataacgttttagctagataggtataaagaaataaatatgtagccgactcaaattttactattaaaatttatttgaacaaattattatatgatcggtctaaccgaaaacctagtgatccaaaaaaatgatttgaatttaggaacgaagacttcatgaaagaggaagaattaaggaccttgtcaaagaaggcaatcaatggttcttcttcgaatggggtccccaaaggaccacttcttcttttgtcacttcattgcgttagataagctctaattcattttcgtcacccacatcttcaaatcaattcattactttttataccacacggcacacgcgttatcaaagcatattgtgttgcttcgtttaagaaacgaaattagggtctcaatcttatttctcttaattattattattaatccaaacattctcagaactagtttgaatcttttattaaaggatcttgagaccccttcacatgggagagagaaagaaagagagatagcgagagatgttactccatgagaataccaaacccacttcgctctaataattcaaaagatttcactttctcaaacaaaaaaacttctctctttcttttctaatttctaaaaccctaattgaagttccaacaagatcgatcaaggagaagatg

SEQ ID NO: 8963 - DNA, 3000 bp, Unknown
  misc_feature (1)..( 3000): cDNA_ID_1989315_gDNA_ID_1971952_Annot_ID_58625 3000 nt of promoter + ATG
aaggttgttcaagtctgacgaagcttcctgatcttttaactgccactagtctcaaaaccttgaatctagacagctgttcaagtctaatggagctcccctccttacccgggaatgcgaatgccactaatctcacgtatttgtctcttcgaggatgttcaagtcttgtggagctcccctcctccatcggaaatgctactaacatcaaggaattggttctcgacgactgctcaaatctggtggagcttcctttctcaatcggaaaccttcataagttattgagattgattatgagagggtgctcaaagctagaggttctgccgaccaacatcaacctggagtctcttgaggaactttatctccaaaattgctcgctcttgaaaacttttcctgagatttccacaaacatcaaacttctccacctcaccaggactgcagtagaagaagtccccttggggattaggtcatggtctcgtcttgaagaattgcatatgtcatattgcgaaaacctcaagaactcgccacatgctcttgacagtatcacagatttgcacttgaccgatacagaaatacaagagctcggtccatggatcaagggattctctcgtctacgtcgacttgtactaaacggatcgcagaagctggtatcactcccacaacttccggattcccttttgttcctagatgccgaaaattgtgaatcccttgagaaactagattgctctttttgcaatccagatatgtctctcaacttctataactgcttcaaactaaatcaagaagcgagagatctcatcatccaggcatcgaatcgtccagtttcagtcgtacccggtggagaagtgcctgcctactttagtgaccgagctactggaagtattgtaacagtgaagctgaatgagaggcctcctcataaacctttgagattcaaggcttgcgttatgttggttgataatgttgacaatccgccatgtggtggtacgtacagtatgtatctgcaatataagatcatggacaaacagaatggcgtcattgttccatgcccaccgggatatctctctctacctcgcgcagtaacatttgtcgggcatttgtatacctttaatttagaagtagatgtgacttccaacgagctttgctttgagctcacagtctactgtaaagaatgggatgtaaaagaatgtggagtacttcaactctcctaagtctcttcatgttgatggaacgtgagattatatgtgcattttcatgttgtaaacttgtttgattatcgtggtgatgttggtttatgtacatctgaattcataatactgatctgcttatgtatgtatgtctttgcataaaacagtgagacatttcttctttgcaaatgatttcttgctcagcatatgtctacacagtcaacagaatgtagaactttatctatatgaagctgacccaaaagataaagaaagacaatcagcatcctgaaaatcatcttgggatttagtgtttttgaagattttggttgttatcttatacgtaacactgtaatagttaatatctctacctgccacaatgggcggatcctagccgtaaaatagtggagatgaagacaaacaggtgacagcagcaaggatttagatacagtctcaagtataaatgtcaacttactgtgctgaactccacgattttgctgaatgtcatcctcataagactgtctggctccgaactcctggtgttcgtcgtgtgtaccaaactgcaaacttgtactgaaaacatggtaagagattatagagccactgtagtaaaggccaagcactaaatctcaattaatcaaagcgtgcatcaacaatgatagcaatactaagccatttgttcttaagattcagctgtcttagtcgtagatagaattaatgctttgtgaattgtaagaactggattaggcttatatgggagaaattgtactaaatcaaagttcacatcaaaaaaatgcatatgattattgatcaacagaagcaaatgaaggcgagacggtagaggatgcaaaaccagctttgagctcacaaaaatagggttaatcgaaaccatcggaaacttaatcgtggagatatactgaaactttgtttctttaatctcttcttcttccctcgtctctgtaacctccatttttctactcgatttcgagctttctcttctgcagagccctttgttttagctggaggatgacccaatttgggctgaatttaaggcctcacatattcataggcccatatatgtttcaaacccaaatttaaggatcttgattaactgtgttacttttcaatcataattaatagaattgagctgtctaaaaaaaaaaacgaatttacctgtaaaacaaagaatgaaagaaccataaccatcccaacaaaaaaaaaaagtcaactatggcatgatatcatattttgggaaaagaatttacagaaaataaaaaaattattggaaacaaataataaaaacataaatatagttatacggaaaaaaaattcaatgttaaattttttagtttcttgaaaatgaaaatattaagtcacgtttttcatttatttattcttactcacttgcaaaagataatgttaaattagtaaaagatctggaaaatttaatatttttttcagcaatgaacaaagcagaattaaatggtgctccagaatttgtaagatcgggtggtgctatttaaatccaatatcagaaacacgtcgaacgagaccaatagagctagcttctgatacatttcgactttggcgtttctcgatctgttgtttctgctcccaaataaaaataaaaaaaaatcggatcggggatttccccaaatcgtaaaattaggttttgttcttcatttctagccctagcttagttttatcgttatcttattcattaaggtttgattctacctttgtttcgcttccctcctcgaattttgcaattccgttattaaaggatcctagtttttctggctcttgtactacgtcaagtttcatg

SEQ ID NO: 8964 - DNA, 3000 bp, Unknown
  misc_feature (1)..( 3000): cDNA_ID_3044175_gDNA_ID_1971952_Annot_ID_58631 3000 nt of promoter + ATG
tcatctgaaacatggagctcccgaccacttccaaccccaacagccacatttcctgttgttattgacagtgaagaggaggaaagtgagagcgacattctaagaactcgtgacagccatgtgaaacacttttccagtattggtggtactcgaatggattcattcttgcaaccagaagatgagctgactcaacacaattccaaagaagtccgagctttgaggaaaaagttgcaacaaattgagatacttgaagcaaaacaatcgagaggacaacttcttgatggtcagcaaatagcaaaacttcaaaagaaactagatatcgaaagttcactggtagaacttggtattcctgtggaagagtttccagaggcaaaagcaacaacagctttaccgctagaaggaaaggccaacaagaagggaaaaaagaagaaaaagggtaatcagagatttgtacaagttgagacattccctgaatttggtgaagttaaagtggaaatagatacgatgcaagacaaagaaattgaagaaatctgtgaagctatcaagccaaaggttagtttgggtactggtttttcatgatgaaatgtcctttgttaacacttgatcatattatccatctgcgtcagttgaattatttttgctttgtatttattctactagggtggcaaaaccatgttggatacgacgatgattagtgggttccccaaagaatcagactttgtctcactctcgcaaaagaaagataatccacccgattcgccgagaagcaagaaacttgcaacggcagcaaacaagaagaagaacagaaagggtgggctttccatgttcttgactggtgctcttgatgatgtccctaaacctgttgttgctcctccaccaaggcctaagattgaaggtcctgtgtggggtggggctaagatttctaaaggattatcttccctgcgggatattcaagatgaacaaagcaagacccgctctcatgaacctgttaggactactaaaaatcagtcaggggatgattctcctggtaaaagtgaaggaaagatattactgagttccttcttgacttcgaagccgattccgatggaaccagccaaaagtttgcagcaatctgatgtggaaaaaggaactcctccttgggcttcctctgaaactccgcgtaaactgtctcgaccttctctcagagatatccagatgcaggaggtacgttgtcctctgtttgaagaatactgataccgtagacaagattatcttgttgcatcatagtttatgttttaaagctcatttttctttcggtgtctttgtcttgtctaatgcaggtgaagaagcaacagtctctgtcccacagtccaaagacaaaaacatcaggcttcacagtcgcaaccgggcaaggatctccatcagattcgcctggaactaatcgctggttcaaaccagagatagatgctccatcagcaatccgatcaatccagatagaagaaaaagccatgaaggatctccgccgcttctacagtagcgtgaaggtagtcagaaaccagccttgatgatgtgagtgaatgagacattacttttcaagagctctcattctcaaaactcaaaagtgttgtagttgtaactgtacagatgatgtctccactgttcattgggtctcctcttaactggtcagccattttttttctctttctttcaatgtgttagtctttggtagtagctgtcaaagtaatactcatgcttatgtacatcactggtgtacatgaagctctttagtagtcttcacaaaccattttagatgtatatatttcgtaataataagaaaaagcttatatgatttatttcagtaatattcccttgtgtaatctaaaacattgacttaacaaagtcagaaatgtagaaggtgtaaagtgtaactgtttcctaagaagatataaagacacagaagcagagtactctcttgtgcaaatcaatcatcaatcttcctgagatttcaaaacggataacggcaatttcggattttgatttaagtccggttaaatcggatcggttagattggatataattaacagacaaaaaacaaacacaacccaaacgagaatagggccttttgttaacacaacccaacccaaaattgggcattttcttaatataaaaccaaacgaatgggccttttctgggttatatgaatccggcccaaaggctaagctggtgaagtactagcttgcggcccgtaatattaacattaacattaatattatcaaatttcttaagtttcccttaccacgtgtcttgtttttctacagttaattgaaatctttgattgatcggatagatctttctgaatctcttgaatttttactgaatgaagccaatgaggcgctgattagtgctttttttctggttttcttgagagctaaaggagatagatacctttgaacaagtagaatctgagacggacttaactattttacacattggttttgtagatgactgtaattgacctaatggtccctatatgtaatattagtttttttcttgtgtagcaagaaagcgtcgaaaccagctactgactgttgtttggtttgagtctcattgtaaagatactgtcccaaaataagagtttgactaaagatttgattagtaatctgttaacaacgaaatttacctctcttttttgttgttttataaagagcatagaatttcaaatgaaatcttaaccgttgactcgaaccttacgtgcctaacaatctcacatttgtgctctgctttatacggtgacgaagctcccttgtctcttctattgatttttataggataaccaaaaaaacaaaaacaaaaagaaggaagagaacaaaagagatctgggtttattacaaaaccaggtttgtttatcttctaattgtggccattttctttttcattgattttgccaaaattttgttaattgtttgacaagtttcctgatgcttttatagatcttttgctctgttcccgttctctccgacaatg

SEQ ID NO: 8965 - DNA, 3000 bp, Unknown
  misc_feature (1)..( 3000): cDNA_ID_1989310_gDNA_ID_1971952_Annot_ID_58632 3000 nt of promoter + ATG
tctacttggactgggctgttcactctttcagaatcaccaactgtggcgtccaagacagcactcaggtaacaacactgtacacttaaaatctcaaatagtgatgaatgtttctgcaactaacttctttattttatcttctagattcacactcacatgtgttactcaaacttcaacgacatcatccactcaatcattgacatggacgctgatgtcatcaccattgagaactctcgttcagacgagaagcttctctcagtgttccgtgaaggagtgaagtacggtgcaggaatcggtcctggtgtttacgacattcactctccgagaataccatccacagatgaaattgcagacaggatcaacaagatgcttgcggttcttgagcagaacatcttgtgggttaaccctgactgtggtctgaagacaaggaagtacactgaggttaaaccagcacttaaagccatggttgacgcggctaagcttatccgctcccagctcggtagtgccaagtgaagagcttgaagatattatttctatattccgggatttttctacgtggtttgtgtttgttcagtttcaataacttttcttccaagaaaaatattttagccaaagttaggttttgagggaatggagtcacactctctcgctttcgttgaagagagtttacggctttatactatatgtttctcttgttgcaatgttatatgtatctttgttttctctaatgaaatatatgcttctttgatctcttgaaagtgtggatacgaattaatttgttatacaagcccccaaaatgtgaaatcttaaaatcactactagtgttgtagaactaaagaatttgctgaaaataatccattattgttataagatcatccaccatactacaaaaagatttgatttgataccatgaaaaaggacacagtttcgaacctttggaatgctcgattcgtgcatgtaaagatcacttgacgtggtataccagagaaccaaaagtagtactatattttcatgtcttgttaaccatttcttttgcatggtgtaagcatttcttttcaaagtaccaaaagtgcggtatttcattttatgtggaatttcttttccagaaatttataaactttatcaccgaacgcaagttacacaataacactgcaaaagtgaacccaaaaaaaaaaaccctgtaaaagtaaaaatttgcttaaacttaacattctttcaccgctccgtgacgtggacatttggctggcaaagaaaaggcataacatccaatcaaagatatccacgtagtccgatttatgtcacgagagctgacgcgtcacattatgcattttttttttttttttacacattatgcatttgattaagcatctgtttaacttcttttaccattttgtccctcaaattttcattccctctaattaaaaaaaatagaattaatccacaataaattcttgaaaaactgatgatgccacagaaattcacaaaattattgaaaggctacaaaaaaaaaacagagaagtttcagacatatgatgactgtgtatgaccttgtcaacgtctgacgtgtcgcacatgtcaccacgtgtcataacgatgtaaagcaaaccagttaggtgtctggagagagagatatggacttcatctcttctccgagtctttagcacgtcacaacttcaaaggactctatcgtcattcgccgtaatttctatcttaattactgtattacccttaggctcggagatctctcttctccccgtttctctctctctgtctggctcattcagaaacttttttatacgcctctgtttcttatggggaagagggtatattctctgttttgattcgcttctgtcttaacacattgaaattttccatagaagattccattgtgctcttttaatcctcttctctttctctctgttttaaatacctgtctttaatcgcttctctctatctctctctcttgttaaatctcatcggagttcaatttcaggtaacggaaaattagtttttatttattttattggtttctctcttgtctgattattttaaactcaattccagtttttgatttttacccaaaaaaaacagttttttttttctttggttctattgaagtctcgaattggagcttccgaaagttgtaaatttccgtgatttatgtattttctcgatgaattttgaacattttctatcgaattgtgctactcattgtgtcttggagatcgagttttatctgtttgccattctcgatttgtgtgctttgtggagatttttttttttgttttggcttcactttgtctctgtttcacacttcacaagagatctaagtttaatgttaaaggcgtgatcttttgtagcgtgtcacattcgtggactaatttttactaattgtatgttgttgcttaacaaatgtccttactggagatccttccttgttttggttcaaaacaatgtacttgttggtagaacatctctttagttctgtttgagtgacactaaatgagattctttgctttgtggttggtggaagtattagtctctagatgcatctttttgtgttttgtttttagaaaaggagcgatgctttccactactcgggtttacttgtttattctttcttctctagatttctcaaagaagctacatgaatattattaatccaatataatctatatccttatcttttatcatcaggactctcggcgctcttatgaagtgattgtgaagatttgcgtacactaagcctttgcttcagaaagttgagtgatttgtttgactcactttcaagatgaaaaatgagctctagcaaagatggatggcgtaaactccgttgagggctatagaaatccttttagttgtccgtttagtgagagttatccgagtctttttctttggagacatttggtctagacacaacatttgtggcgaacaaggttttagtgggaattcttaccgtctagaaatatggaattgtcagtctctcctcaaacccaaaagatg

SEQ ID NO: 8966 - DNA, 3000 bp, Unknown
  misc_feature (1)..( 3000): cDNA_ID_2993961_gDNA_ID_1971952_Annot_ID_58633 3000 nt of promoter + ATG
tgtcgatcatgaaactcacatctgtaaacaaacaaaagagaagggaagaattatgaaaatatattcttgcatttcatattaaaaagagtccaatattaacaaactggctacaataacgatttgttcgataaagcgaagagattgaaacggaaacatgtttatagtactatcatctctagactacacaaaactatccgaaagattaattcgatggtcatggttatattccggagatgatacacaacaattgttttaaataattgggttttgtaagtgcaaacgatacacataagttaaatcttgaaaattatgtatgtataaatacaaaagaaaaacattatgcattcagaaaaagaagtgaagacaaagtaagaaatgaaatgataaaattaagataattaaacgagaaaagtgatagattaagaaaccattaattgtcttgagtaatttttccaaggatttcttccatcccggcgtaggagattctatcttcaaaagacatatctgcgcttaaaaacataagatttatacacactttcaaataaacataaaatatatacacaaatcttacaatctattatgcgtttacgcataccatgtgattggaagatgattccatcgatctagattagatatgttttgttatttgttcctgctcttgagaaaccttaggaaaacaaaaaatttgggaggttttgggtggtgaagaaaagtttcttcttttattatattttggaaatatggatatatgatgataagagatatcaatctatgaattttttattttccttaattagtaaaaaatttcgatctatggatatcagtatatcgtctatgaattttttattttccttatgataagagatatcaatctatggatatatgaattcttttagtttccttatatattgaatatcatattctcttttcaaagtatggaaactttatcgtctcttgcatgtgatctcgccgttaaaacttatagtatattctgtaggattgatgatatgtaaacgtgtttattcatttaactttcttacaaaaaaaattgaaagtaaattaggtatgtaatgtgtaatgcgatatttcaagacgcacaagtatatattagtcggaacattttgtcaaattcttttactttgggaataccgaatacgcatgatacattaggcattagcgagaaataagaaaaaaaaaatgtctcattaaatggtcgtgcgtttttatatctatatcccaccgacagccgacaaaaccatagcaaggcatctactgatctactaatgcttcggaatagaccgatgttggatattgtgaggaaatataaaatttaccggatacaaatatttctgtgttttgttttgaaatttgaagttacttgttaagcgtcttgatggattaaagttttttgagtcgaaaaacaaaagaacggactttctcatgtgaaagcattaaaaaaaagagttcttgctacaaaacaagttacaagagatggtagaaatacacttctttattcgaaacatagaattttcgtattagtcgtccaaacagagcattgaatattctttactgaactagtttaccatttcatactagacttctttacatacattatagacgtatattcctcattaaggtgaatattatgacaacttatggttaataggtttcaaacgtcattgttgaataaaaaaaattatgtgaagatcaaaccataagagggacgtggaggatctcataatcattcaccaactttgtttaccaaacaaatctccaaatttgtgtggcaagaattgttggtactgactcccaaaaatgaaattaaaagtgaatatctcaccaactccctaatgggctccacccaccaatcccgctacctccttctcctcatgtatactcttcacaaacaacacacaccaactctcctccccaccttcacattttcaattccataattaatcccctcttaagctcttatatcttaattaatactacgctttacaatacaacatacactaaccccttaattaacccttaaacaattgttttaagctttaactagccagtgaggacttgacaaaagtcaactaaaattaccagtaaactagtactaattcaacggaattaagttctaccagcttatataattgtaatgtcatgccatgatcaaatacatttttttattatgtaaaccgtcgttatacgtataattctcgaaagttgtatataattgaccgtgcccttaaatttgaaagataaaaattagtatcattctggatacatggattacacgtatttttatttatcatatagtataatgttgtagagagggtaaaaacctaaatatacgtattttgatgtacatgtacgtattattaatttaaatagaaaaataatcagccaccacgagtgagtgagagaaaccaaggaacgatgtgtaattgatttgctataaataagcttaacacagaacactctccatcgtcgctctctttgcccatctctcatctccactcttctcattccgtaaggtacgcttccgagtttccatggcttccgcatgactattcttgctctctcccttcccactctcttatttaccttccgtctcttcgttttcttctcaattcaattttcgtttgattccgtttcttcttcgttcgttaatacttagatcttaatccggtgagtgaaattctatgaaacacagatctggattttttatacgatcagattcgtaaaatctctgttttgcgatctttctctgcgttagatctctgttttccctagttgtgattcgttttgatctttaaactctctcatactctgttttcaataaatacgacaaaaaaaactgcaaaagttttttacttttttaacgattggtggcttttaccatatgacaagaagtacattttaggattgtgtttggtttactgactgattttggttttgtttgtggttcaaatgtagtaaaaaaacaaaaaacaaacaaaaatg

SEQ ID NO: 8967 - DNA, 3000 bp, Unknown
  misc_feature (1)..( 3000): cDNA_ID_1989307_gDNA_ID_1971952_Annot_ID_58636 3000 nt of promoter + ATG
tctcctatgatccacatagtattcgacagtggaaacactaagttacaagatctccgcttcatgatgtctgatcctaacttcagcttactcggattgtcctttggcttttttattaccttttatttgctcaatcttctagttctgccattgggtcatcactgttattgttgtcattattgtttctaccgcttccattagcgttcacaacttcgacccaaacactctggcttctctctgctcctccattgatatctccccaagtctgtgcttgtcttccgtttgtctcagctccaccgtctgagaattggccccatacgcttctcgtcttccctcctcctccgcttaactcctcttcgcaacccgcaactgttttcagaagctcagactgaagtgacgggcagtgttcccttagataatcaaacccatctgacctcataacagctgcatcaagaaaaatgtttatgcaatgtaagtttggtgtgaaatcaatttcagtgatgagcctgtcagaaaagatcattaccgatgagattttctgctgcgaatttcagacaaacggatttcaaggcggaagcattgtaacggtcagcaagcgccaaaatatttgcaacggaatctactgatatatccttgcagagcactgactcgcacattagacttaatctaggcaacttgtatttatcagcggctcctagtagctttgcagctaatgtgtctgaggcagatggaccaacagatgaaccggaagatgatgatgactctgcatcttcaatgagagcatccttgtatatgtagtggagcaaagccttcaccagaaatgcatcaaaacaattagagagaaatgcgatgcgtttacattgtgtgatgttacatacttggtgtcaaaaagttgagagaaagtttaccttgaaaaccttaggctccatgtcagtaacttcgatatcacgatcttcttctcccgtaacatcgaggaactcgctttcaaagacaggagatcgagcagccaatactaacctgtgagcacggaacttttcaccagagacgttaaaagttatatctgaaccgtcctcgttctctagaagcatcccgaaatgagatccaatatcagatgcagggacatgaatagaatgtaaccgtgggcaatctatttctgagaccacaactcccacggtgcaattaattttcagacaatcatccttcagaaaatcagatgtttccagcataagtcttcgaaaaaagcgcttgtagcccctgtaagcatataaaattgaataaggatccgttgagcgaaacagggaagtacaaaactctaagagggaattattcctctgcattaataagcaatgagatctttctaatagagagacaaatcaaagccaaaggcatcaccttcaagaagaagaaaccagagacaatggttgattaattcatacaagcagacttaacaacagatgtttaaaaaagcaggaaaaccaaatgtacgaatattgagagcaaaagacaatactctgttgcttaactcatacaagaagtttcaaacctaacatgaacagtttcataaaagcaaggtttgtgctgctatatgcaggtaaacagtaagcaatgttcctacttcagaattagcctaccatattgaaagaattggtgcctatatagtaaaacatcacaatgacaggtctttgaaatcatgccaacatgtgaaaacacaatacttttcaagaaaatcctaaatatcatcagtccaaaccctctctcgttcccaatcaagtttccttaactacagaaccaacgctacatgctggtgaagcagcaggaaccaaattctgtttatgaaaagttcaggtaaactagttacagaatgtccaaaacaggtaatagaaccttcatattctagaaacttgcttcttctactcaaagccctctctctttccatacgtcacagactcacagtttcaagcagaccacaaaaataaagccaagcagcctccagcataaaaaataaagaacattgtttatcgctctcaccacccatctttcaatttcatatacaggtcacacaacaaaaaagaaacaaacagattgagaaatccacagctaatgtatctttatttcctctgaatttctcaatctcttttatattttttaatgttgtgagctcaatctcattttgccttcaacaatctacactcttgagtcttgaccactaataacatccgtaacctcatataaaccccaacaaaggagcaaaatttgttctaaaagtaatgagctttcactagaaatcagagaccctaagccaattcttcaccaaaccctagcaaaatggctaagagaaaaataaaaaaattgaaaagaagaaatcgaagaaacgaaccacatgctgccacgatacttgagagtataaggaccgctctcaagagcacgatcgaagtggctatgaaccttatgcttccctttaccactctgatcaagcaaagaaagctcaaaaagagccctaacatcggtaccatcgctagctaaagcaatgaaaacggagacataagccgaattatcctcaggattcttgccatcaggatagaaatagatagcccattgataacccccgacggtgaaagtatcgctggcgatgtgttttccgatcccgattcctttagccaaagaatagcctttgattgtgaagctgtgtgatccgtttatggtctgtgtcaccgagagagaagtcgtcgtcggtggcgatggcatttcgaaatttcgtcgttgttgctcgctcttttgcaatggattttgtctttgtaagtttttttcctctgtgaaaatgacagatttcattacacagaccaaagcgacggtagtaaatctatagttatgattaacacaaaaaaactcgccatttttctttaaaaaattcttactgaagtgaaattaaaatagaatttaaggatataaatagaattaaacgcaacgacgtcgtttgtatatcgctggctgagaaaaaatatg

SEQ ID NO: 8968 - DNA, 3000 bp, Unknown
  misc_feature (1)..( 3000): cDNA_ID_2179705_gDNA_ID_1971952_Annot_ID_177362 3000 nt of promoter + ATG
ttcgctatatatatatatatatatatatatatatatatatttattatcttaggtcttattaaatgtaaatatattagttatggttagaactagtataacaaacttatggaaatgcgtacattgcgtctgaaaccattaattagcgatatatacatttgagatttataatcataaaaatctagagtccttttgcttatacaagacgaacacttataaacgtttccaaaggggggaactttcgaaagttgttgaaatgagagatatacaattgcgaagtatagagaaataaacttcaggacattgacaataatatgaaatgaagtacacgatttagttgataagaaaagaaaagaaaaaaagtatacacgattaatttccttttagaaaaaccaatcatacatcgatttgatgtttaagtctagaatatgtgatgcaatttaaattatctgtttttgttttccctgagtacccaagaatattgggcggagcagattgatgccaatatcaatatgtaatcagtacatgcatgcatgtggtatatatagagagaaaattgtatgtttttgcttacataacttaaatcaaccagacaaccagtgatgcatgcatgtggtatataacgaaattcacatgaatgttctttatcttaaggaaaaaaggaagataaatcagacgaaagttaattgtctcaaaaggtaaaacaaatgtacgatacaatgattaataacaaattgtatagtatagctagctaccacaatctaagtatcgtattcgtacgtaatttcgtatggatagagaagtaagtatatatgtgagagtgtctgagagaggagaggcacgagaatcgtgttgaccgtttcgtgtggagttctttagtaagctaaccaaccttcatgtctgtcgtgctccttttcttcacaacattaatcctcccttttctttttccgtactttgccattttcaaaattagttttatttcacgaaattcttagtatttcatgacttcattttggtgggttcattttcgtgaattacttctaaatttcccccattccttctccaaatcagtagagccgctattaataagaaagtgtaacttccgaatgacaatgacggtgcttggttgtgtttgctacaaacatagaactcgaatttttcaaataataagagtgttggacattagtatagcgagacaagatgatgatgaattcaggtattctcacaaggcaacgttcccaaacagcaggaactaccacaagagcagtttagcttgtcgtctctgttctctccggccacacttacgtctccataactgaaacttaactcctcctctgcgattatgtcctttgctgcaaagaaacagagccgaggaagcaacgctcctgagcttctcaacagaacagtggagagatttccaccgtcacaagaatggttgatgaatctagcaacgttcccaattcttgtggcgtcgatgtttatccttaaacaagcttgtcctgaagggaggtgttcgcgtacgaccaaaagagctgaagcgaaggattgtgttgatctgagtttgtcgtaaatgttttgacgtctacgtgcttcatctgttgtcaatagctcacctataagaagagacgacaaaatcaagtttatgacttttgcataaaccaagtcattaaggcagatcacaaagaaaaaacacattcaagaaagaagaaagatttgtcattatctctaatctccaaatccagcattgtgatactacctctaaacgattgaaacaagaacatttcgaaagctcagatctttcactgatggagatcactcttaataccatgctagaatctcatctcaacgcatcgagctaaatcatatgcagtccaagtgtaaaaggctaataactaatgctaatattcctcaaatcatgtaatcttaagcttgattttcaagttccaattatcaatcttccaaaattagtgacctactgcaataaaacgaatcactatactattaggaaaccaaaagttggttaacgttacctaatgctaatattcctctaatcatgtaatatgaaatcgaaatgtaattgtaacctgcatattcacagatgaattggccttgcttgataagctggtcagcgtacaagcaccaacctttcttctcatctctcacaatcttcaaactaaccgaaacccccttctgcgtaacccggttcgaacaatcggacccgcatccacaacccgacccacattcgttagctatctcttccatccccgcgaaagctaaacacttgcagtatccttcctcacacctctcgcattcgcatcctgactcgtccactaaactcaccccaaaacgtccgctttcactcactgagtcaaaacaaggtctagactccgatccacattcattagcagcagctccccaccattgtcgcggcggaggaggagatgaagcggggatctgaaaaggtgtgtagatgaagtacgcgtatcgttgagaatcgatggagttgtgaaacgggattgagatgttttccaaggatcgtgcagcgtcgagagatcggtgaatggttagagatttcgagattagggataaggttttgcaggtttgagcaacaacggcgagttctcgagggtttagccatgggagaatcaaattcgcacatcggagaaatcgatcggcggccggaataatgtcggaagcttctccaagacaacgcgtcttcggtggtggtgactctcgcagtcgctgcatattttttctcagccagcgatatacaaacgacgtcgttgcgtttaattctatttatatccttaaattctattttaatttcacttcagtaagaattttttaaagaaaaatggcgagtttttttgtgttaatcataactatagatttactaccgtcgctttggtctgtgtaatgaaatctgtcattttcacagaggaaaaaaacttacaaagacaaaatccattgcaaaagagcgagcaacaacgacgaaatttcgaa

SEQ ID NO: 8969 - DNA, 3000 bp, Unknown; identical to SEQ ID NO: 8967
  misc_feature (1)..( 3000): cDNA_ID_1989307_gDNA_ID_1971952_Annot_ID_177361 3000 nt of promoter + ATG

SEQ ID NO: 8970 - DNA, 3000 bp, Unknown; identical to SEQ ID NO: 8966
  misc_feature (1)..( 3000): cDNA_ID_2993961_gDNA_ID_1971952_Annot_ID_177356 3000 nt of promoter + ATG

SEQ ID NO: 8971 - DNA, 3000 bp, Unknown
  misc_feature (1)..( 3000): cDNA_ID_3044175_gDNA_ID_1971952_Annot_ID_177355 3000 nt of promoter + ATG
aaggattgcctcttaggaaagccgaacactctttctacttggactgggctgttcactctttcagaatcaccaactgtggcgtccaagacagcactcaggtaacaacactgtacacttaaaatctcaaatagtgatgaatgtttctgcaactaacttctttattttatcttctagattcacactcacatgtgttactcaaacttcaacgacatcatccactcaatcattgacatggacgctgatgtcatcaccattgagaactctcgttcagacgagaagcttctctcagtgttccgtgaaggagtgaagtacggtgcaggaatcggtcctggtgtttacgacattcactctccgagaataccatccacagatgaaattgcagacaggatcaacaagatgcttgcggttcttgagcagaacatcttgtgggttaaccctgactgtggtctgaagacaaggaagtacactgaggttaaaccagcacttaaagccatggttgacgcggctaagcttatccgctcccagctcggtagtgccaagtgaagagcttgaagatattatttctatattccgggatttttctacgtggtttgtgtttgttcagtttcaataacttttcttccaagaaaaatattttagccaaagttaggttttgagggaatggagtcacactctctcgctttcgttgaagagagtttacggctttatactatatgtttctcttgttgcaatgttatatgtatctttgttttctctaatgaaatatatgcttctttgatctcttgaaagtgtggatacgaattaatttgttatacaagcccccaaaatgtgaaatcttaaaatcactactagtgttgtagaactaaagaatttgctgaaaataatccattattgttataagatcatccaccatactacaaaaagatttgatttgataccatgaaaaaggacacagtttcgaacctttggaatgctcgattcgtgcatgtaaagatcacttgacgtggtataccagagaaccaaaagtagtactatattttcatgtcttgttaaccatttcttttgcatggtgtaagcatttcttttcaaagtaccaaaagtgcggtatttcattttatgtggaatttcttttccagaaatttataaactttatcaccgaacgcaagttacacaataacactgcaaaagtgaacccaaaaaaaaaaaccctgtaaaagtaaaaatttgcttaaacttaacattctttcaccgctccgtgacgtggacatttggctggcaaagaaaaggcataacatccaatcaaagatatccacgtagtccgatttatgtcacgagagctgacgcgtcacattatgcattttttttttttttttacacattatgcatttgattaagcatctgtttaacttcttttaccattttgtccctcaaattttcattccctctaattaaaaaaaatagaattaatccacaataaattcttgaaaaactgatgatgccacagaaattcacaaaattattgaaaggctacaaaaaaaaaacagagaagtttcagacatatgatgactgtgtatgaccttgtcaacgtctgacgtgtcgcacatgtcaccacgtgtcataacgatgtaaagcaaaccagttaggtgtctggagagagagatatggacttcatctcttctccgagtctttagcacgtcacaacttcaaaggactctatcgtcattcgccgtaatttctatcttaattactgtattacccttaggctcggagatctctcttctccccgtttctctctctctgtctggctcattcagaaacttttttatacgcctctgtttcttatggggaagagggtatattctctgttttgattcgcttctgtcttaacacattgaaattttccatagaagattccattgtgctcttttaatcctcttctctttctctctgttttaaatacctgtctttaatcgcttctctctatctctctctcttgttaaatctcatcggagttcaatttcaggtaacggaaaattagtttttatttattttattggtttctctcttgtctgattattttaaactcaattccagtttttgatttttacccaaaaaaaacagttttttttttctttggttctattgaagtctcgaattggagcttccgaaagttgtaaatttccgtgatttatgtattttctcgatgaattttgaacattttctatcgaattgtgctactcattgtgtcttggagatcgagttttatctgtttgccattctcgatttgtgtgctttgtggagatttttttttttgttttggcttcactttgtctctgtttcacacttcacaagagatctaagtttaatgttaaaggcgtgatcttttgtagcgtgtcacattcgtggactaatttttactaattgtatgttgttgcttaacaaatgtccttactggagatccttccttgttttggttcaaaacaatgtacttgttggtagaacatctctttagttctgtttgagtgacactaaatgagattctttgctttgtggttggtggaagtattagtctctagatgcatctttttgtgttttgtttttagaaaaggagcgatgctttccactactcgggtttacttgtttattctttcttctctagatttctcaaagaagctacatgaatattattaatccaatataatctatatccttatcttttatcatcaggactctcggcgctcttatgaagtgattgtgaagatttgcgtacactaagcctttgcttcagaaagttgagtgatttgtttgactcactttcaagatgaaaaatgagctctagcaaagatggatggcgtaaactccgttgagggctatagaaatccttttagttgtccgtttagtgagagttatccgagtctttttctttggagacatttggtctagacacaacatttgtggcgaacaaggttttagtgggaattcttaccgtctagaaatatg

SEQ ID NO: 8972 - DNA, 3000 bp, Unknown
  misc_feature (1)..( 3000): cDNA_ID_2179667_gDNA_ID_1971952_Annot_ID_177348 3000 nt of promoter + ATG
tatgattagcgttatgattagggttaaggttaagagtattatccggatccgtggcgcaatggtagcgcgtctgactccagatcagaaggttgcgtgttcgattcacgtcgggttcaaatcccccgaacaataaattccggaatatttttttacgtagtgtcggtcggcacattcaacatagcgttcgccgttaggctatttccagctttgccctttgcgtttcaattcaacctgtaatctcttaaggggcagagataagatttcgactgtcgatgatctctccttgaaagagttctgaaacagtaaattgtgatttgcttgaattccaaattcagttatttctagaggacgaacaatcatgcaagtatttttgcaaccatccttctatggatgcggataacgtaaactctaagtctctaagtccattcacgttcatggacacggagagaacatcagaggtaaatggggatgaatgtgcagagacaaattaagaagggccataaacgaatggaagtttaataaacgatgagatttatcccctttttaagactttcatttagataaatcttaccaaattgatccatgttggattagatttcattttggcgggaacttttccatttttcaaatcaaacgaaaaaaggaagaaaaaaaaaactgaaagtgaaatgaaactaatattcaacagtaatttgcgtgcttatgaatatgatatatttcagtgtgtatttgaaaatttaaaatggaaaataacgaaaggaagttacagaaaaatcatagttaaatggtaattgtattaattagcgtcttcagagagtgttttccttggtagcatcttaagaagagttgatttattgaccatgtcattttttcaagtgacttttttttttttttttttactttgagatttgttggtaacttggtaatgtgacaagagtagagctattgactttcacaaacgaaaaaaagaaagtagagctattgaccaagtcatcttttaagtgaccttttttttgtttgacttcgaatctaagcatattgagaagaatagagctattgaccacgttatctttttcaagttgcatcttttcgtccgacttcggaaattattggtaaattctattagcaacttaagaagagttatatgatttaaaccaagttgtccttttaagttaaattattatttttttaataattttcaagtgaccttttttgtttgacttcaagatttcatggtaaattatatgtatcttgataattgtagagctattgatcaagtcatcttctttaagcgaatattattggtgaattctattgagaagaatagagctatatatgtattgaccaagttatcttttgaagtcgcctctttttgtttgcctttgataattattggcaaattctgttagcaacttgagaagagtatatgatttcttaaaatcaagttgtctttttttaagtgacttttttttttttttttgacttcgagttaaatgacggtgaattgcaaaactaaccatttttgataatgtaattaagaatatagcatcgtatatatataaattaagaaagtaacatgtaaggataggaaaaagacaattttagtgttgagttataggtgagatgatttactaacctttagtgtagttttcacccatttatatttgtttgctatatatattttctaaaaaatagatttcaattctaaaatttattagagaaaaatatatgtttttttctacatacagaatagtttgaatttttaaaatcggatttgaatttaaaaaatagaaaatagtgtttgtaagtaaaaattatgttgtactatttaggatgtatagaaataaaatgttgttctatactattttcataaattattcgtaaatcaattaattttagtataaagcgaaatatttttaatataaagtaatagtgttagcagtggtgatgggataatagtttaggttgcgttaatataacattataatcattaaatgtttttgatggaaggatactaaaccctaaggagataatatatagggaacccaagaatttcaatctaaagaataatatactttaaccaaaaaaaatagaattgtatatgtctgtcaccaataccaccataacgtgaagaattttatggattttcttatatgtaatatttttttgttagaatagaatagaagctagaaacatagaaagagagggagagggagagggagagggagagggagagggagagggagagagagagggagagagagggagggagagagagagggagagagaggagagagagagggagagagataggagagggagagagaggaaagaaggaaggaagggcaaaataaaatttgtgattaatacacaaaatattaaaaatatcatcacttttttgttggtgttattttcttaaatatagtatttttttgtgttagatttgcaaatttcccttaaatgacgaagtttgctcaaaaatgaatcgacgaccgagtttggcatatatgcttttttttaatagaaaaacaaaacaattctatatcattggcggaagatccatacactataaaagtataaagaaagagccctacactatatagcaataattatcagaatagctttaacaaaataattatcaagatatcgaaacataattacgttgttatcaacctagtccgtttaatagatatacgatattgtttcctattaaattggaaatttcggttacaatccggattcaatacacttttgacttttgatttggattcggtatagtttggataaactaaaaagtaaggggaattatttgtaataaataaaagtagaaggatattagaaaaaaaattcaaattgtaacaagtcgtctttttctctgttcataataaaaaattaaaaacccttgtctttccaactgttgaccaagacaagccctctccacttcagattgtttctaaaagcaattctcaatcttttctacaccgaaatagcaacaaaatg

SEQ ID NO: 8973 - DNA, 3000 bp, Unknown; identical to SEQ ID NO: 8963
  misc_feature (1)..( 3000): cDNA_ID_3593635_gDNA_ID_1971952_Annot_ID_177346 3000 nt of promoter + ATG

SEQ ID NO: 8974 - DNA, 3000 bp, Unknown
  misc_feature (1)..( 3000): cDNA_ID_3044194_gDNA_ID_1971952_Annot_ID_177345 3000 nt of promoter + ATG
cttctctgtatccaactcctcctattgaggtacgtttctcatattgtgagctctaaggtttgtttgaaataagcgtgaggttatgtaacttattatctatgcggattagactactcttccaatgcaaatattgaattaggaaacattgatggattttgataactattaagcattgaagttgaagctcagattcgtcctcttgttcttcaagtttggattatcatcttacctactactgtgacttgaaactctgtttaggttcatagtttaatgctcttgtaatgcagattgtgtagtagctgctctgtccgcaaatatgatatagcaaattttgaataggtgttctttgtttcttctaaggggatctgaagctttattcttaactaaagcagtgtcaaaattttcactatgcaggtagatggagactcactagacaggctaatggcttcacaacatggaaatgcttatatgtctgtactcttttatgcttcctggtgcccattctcacgtgctgtgcgccctaagtttgatatgttgagttccatgtttcctcaaatacaacacctagctgtggagcattctcaagcactgccatcgtaagaagtctacttactattgtttttccaaagactacattgtctattgttctatttccatactaattaggataaatagcaaggaagtgggattgaatgattcacatcaagaatttttgggtactgatagtttagtttgagagtaaaaaaaacttaaattgcatatcagttatttaataacttgatccatataaggtgcttcttcttttcactttagtagaaggtcatgtgtgtttgctgttacgttatcttacatttcattagcaaatattcatttgatctatcattaactagttagttcatcattaccttatctgccttgtgtatactaagttactagtaggttcaagtgcttttaggtttcttcatgtgtctggctgtttcttttgtcttactaactggtttcattaattgctttgttgcagtgtcttttctaggtatggtatccatagcttaccttcaatcctgatggtaaatcaaactttaaatgctcggtaccatggtcgaaaggatcttatatccctgattgagttttatgaagaggcaacaggtgatacaccaaaccacatcgtctgcttttaatttctttcagtctacctgagtagtctttgttttatgtccaacctatgactagcacattttgggtggatcgatttagaaataactggttgttgttctggctttccaggcctccaacctgtccagtatgtggctgaaggggaaccaacaggcttaaatgccggtgatggtaacttgatcacatggttgcgcaaggggacatctattagagaaatattcaaacaagatccgttcttggtactatctctgctgtttatctgtttacaaatggcaatccttgtcttccccatagctgaatcccgcatgagagcgttatgggcttcttacgttgccaatttgaacttgggaagatttggagagataagccaactgttcaaccgtggtattcacatggtcgatgtgaggaggttatggttgaaactaagtctcgtcaaaacaagaaacttccatgaaagggcaaagaacgcacaagcttgggcttcatcgctggcatctgtctctctaggccaaacttcatcagaccaatcctgatctcaagggtaagatcatgtcagtattgggaagagatgagcttttaagtgtgtgctggaaatctgagagttcctttaatgaatgttatatgacttatttgagtttgatttgtctgcaacgaagcatgtaaatccaggaacagctttgcttctgtttgtgaatatctttctcccttttttgttctataaatttgagatgtctgtttttggcctcatttcttttactgaataatttgattgagtcaggtaaatttgtctgaattatcttacgcagctttgtcttgtaatgtcagttcgagtttggttggctctaccatggtttcatgttatggtacattatcatcatgtgcatcagtgcatgttgcattatataggatacaacatagcattttatgagtgttagccttgctcactctctacaaatattattgaaagttgaaactgaggatatgtcggtttggtttagtatggtatcattaattgcgtttttattgggttacggttctgaattctgattgtgtcagatatattttctgtttcttttatagttaaccaaggaataacgttttagctagataggtataaagaaataaatatgtagccgactcaaattttactattaaaatttatttgaacaaattattatatgatcggtctaaccgaaaacctagtgatccaaaaaaatgatttgaatttaggaacgaagacttcatgaaagaggaagaattaaggaccttgtcaaagaaggcaatcaatggttcttcttcgaatggggtccccaaaggaccacttcttcttttgtcacttcattgcgttagataagctctaattcattttcgtcacccacatcttcaaatcaattcattactttttataccacacggcacacgcgttatcaaagcatattgtgttgcttcgtttaagaaacgaaattagggtctcaatcttatttctcttaattattattattaatccaaacattctcagaactagtttgaatcttttattaaaggatcttgagaccccttcacatgggagagagaaagaaagagagatagcgagagatgttactccatgagaataccaaacccacttcgctctaataattcaaaagatttcactttctcaaacaaaaaaacttctctctttcttttctaatttctaaaaccctaattgaagttccaacaagatcgatcaaggagaagatggatctcgaggattgggaattagtactccccaagaacagcttcaaggatcttgatcttgatcatgacgaggatcatcatggagccatg

SEQ ID NO: 8975 - DNA, 3000 bp, Unknown
  misc_feature (1)..( 3000): cDNA_ID_3044198_gDNA_ID_1971952_Annot_ID_177343 3000 nt of promoter + ATG
taaatgctctctcaagggaccaagtctcattattaccatcacctccgagcgttctcttctctccatctgtctgccgctcctttaacgtcggttcccattttcttattcacaatgaccccaagaaactcgaggagatggaaaaaagcaaaaggtaaaacaaaaacaaaaaagctttcttcgagaaccagagcacattgattccaaggtaattactttctcaatgccatggaaaaggacccattttgttcccctttcctgtaatctaatcgtttcaatccgtgattatctctgtcagcttggaggaaatgacttagatttcataaatcgattcatgagttgtcagaaaggatttaaattttgttggtttgttcttatttcttctgtagctgctatgaatttttagatttagtttggctatgattctaaacctacgtctttatgaaagcacttacattttctagacacaagatcatagtgagttcatatgatgcggaaaagttattattctcttggtcttccagtttatatttatggaggaacatagtctcattaacaagcttgcattgttctgttccattggattgttataaaaatattcattggtcaattgagaaatcagtgtctaattttttttgaacgtgtctttgcagattgaatgctgtttctggtggattagtttctctgagttttggtgatagatcagattaacaggcagaattttgagaatgtcgacagtgggaaattcaacgaacatattttggcaagaatcccccattgggaaaactgaaaggcagaagttgttaaatcagaagggttgtgtggtgtggatcacagggctcagtggctcaggtcaatcttctaaaaaatcttaaattcttttcccattgtgatacttacttaagatgccttctttatatctctgtctatattctaaaatcttagcctcaaactttgtgcagggaaaagcacgttagcttgctcgcttagtagagagctgaacaaccggggaaagctatcatatattcttgatggtgacaatcttcgtcatggtttgaacaaagatcttggtttcaaggcagaggatagagtggaaaatatacgcagggtcggtaagtagtacatagttgcttactatcttttgctttcagttgatgaaagtctgattccgaagaaactcactaatacaaatgcaaatcctttaaaaaggtgtctcatatgtagtgatagtttacatggtaccaatacctcattgatatacatattggtatacacctaaaagctgatagattctggttaatgttgaaagaaacttctctaaagggcaaaatactaaagaagaccaacaatttgttctaaatgcaggagaagtagccaaactctttgcggatgctggtttaatctgtattgccagcctcatatccccgtatagaaaagaccgtgacgcctgcagggaaatgatacagaattcatcttttattgaggcaagctattcaaaaccaggctttacagtttgtaacccccattcggttggatcttaaaaacatcttgtttgatattgtggccaaatttgttaggttttcatgaacatgtctctgcaattgtgtgaagcaagggaccctaaaggcctatacaagcttgcacgtgcaggaaagatcaaaggtgagataacatagcttcaaggttccatataaacagaagatagcaagttgcttcaatatcatttgagttgttctataaaagtttttttttcttcatacccttttgtgtaggtttcacaggaatagatgatccgtatgagtctcccttgaactgtgaggtatgtgatccatgtgaacataagattcttcttcaagaatattgcaaacaacgcgtatgtgaatacgtttctctgtttcttttgtatgttttgaaacataacagatagagttgaaagagaaagagggagagtgtccttcccctgtagctatggctgaggaagtgatctcttatctagaagacaaaggtttccttcaaaacgagtaacgtccatcataatctaacgaccgagatttgtttttccttttactttttatgggtgttctctgtttgttactttcctgaaacactgcaaattcttaagaagtttcaactaatgaagacatatatagcttcttctccttcttctgaaacttgtcttctacactgaaactctagtcagtcaataccagaattcgatcctatacaacaacaagagccatgccattgttttcattgttaatttatactacgatacaacgattatactaagacaaccattaatttacatagtgtcatagtatttagaattttagtttttttgggggtcaaaaacaatagttttagttatgttagtgaataaatagattcagaaaaaactgtcgatcttatttgaatagttcgtaaaagagagggttctgtttgcaattttcctaacttttagatcctgagttctgcaatataaataaagaacaaaacaaaacacgatcacgaggcaattttgagacaagaatggtgttgaatagtcgattggtggagacaacagttaatctgtcggcggatctctggcaatatgttgcgtgtaaccccgagatacttcctcgcgccaccgtcatccatttcatcttctgcatccctctcctccaactccgccgtctcgcttcctctctaggatcatacctatgcttcgattccggcgccggagttgatcaccgtactcattccgattaagttaccggcgcgtttccatgaatcgtctgttaaatttcgacttttgattgtgtaatttttgttctgattgtaatgtaattttgtttgtttgtaaaccgaaagggacatacaaatttaataccagaataaaccggaaacatttaaatacacacagaaccaaaccgggttgtgtggaattgttgtcgtcacaggagagaaataagcagagacgtgtaaaccaaagaacaacgaaggtttcgtttcgtggggaagaag

SEQ ID NO: 8976 - DNA, 3000 bp, Unknown
  misc_feature (1)..( 3000): cDNA_ID_3044167_gDNA_ID_1971952_Annot_ID_177366 3000 nt of promoter + ATG
aacaaaatgatagaacttattgacaaagatgtatgtatatatacatatatatatacaacagaagaatgatgattgatgaagatggttaagtggaacttgggattcaaggaacactcctggcaaatacaacgcatctatgcctacaccaacaagcaacggtcatgcctctcgcgtgcagattcaagaaccaagaataatgtctcctcttcctccttcttcttctccaatcgccttcaaggtatttctctcttttgaatcaagaatcaggaaacaccttgatctctgtatcttctctctctctgggttctgttttgctttctactttatgctatctgttttgatcctctctcgttgacttccatcactatttcttgactcaagaacaaaaccaagacccagcttctcttttgtctcttcttgttttcttcatggtgctttttacttgcatgttcataacgaattcacattaaccagctttgaataacctgttgatgagacaccatttttttttttttttttttttttgcaggaacaacaaggtagaccacctccaacaacacaacaaaccatagcaggaaaactctttagaactcttttcaagggtcttctcttctcacaactaaccttaatctcacttttggtgatcgttctcaccattcgcggtctcatctcagcaagtacacaccatttccacctcaagaaatggtaccctcctttactagcatctgttgctgtctcaggaattgcatctttagcatggcaatgcatctttatctacaatccatcaagagcagtcaaagcaacgttctggcttagtccaatactcacctgctcggtaggaatcttgcttgttttgattggctcagcggtagatgcaggtataggtgcagtgtttgtccttttcgccattactcagtccctctatggttgctggattactccgaggcttgagtacaccgataaaatattatcacttgccacagcatttccacctgcaagaaccagagaagtagtctgcttatcaatcatagtcagtgtcgtttactctggtttcttggtgactggaattggaggagcaacttccactagaacaaatcttgatatcttgttcatatccgtaatcataataagcttagcatggacgatgcaagttatcaagaatgttcaacaagttgcgatttcacgggcgagatatgtaaactttgcacatggagaagatatggacgcttggaatgctttccgcatcactatgaaacacttgactgggagcatctgcgttggctcgacgcttgttccaatcatcgtattcataagaggatcaataagaagtgttaatctaatgtcagggagcagcgatgaggtcatgtattcaggtgctgattgcttctctaccattgctaacaaactcattacacttggaaacagatggggctttgtacatgttggaacctatgataaaggattcatggaggcttcgagtgatacctggaagaagttcagaagcacaacagggttggagaaactgattgactcggatctcactagctccttctgttttctcagtgctgtttctgttggagctgtctcttcattaactgctgggatatggatgttgttaatacacaaggactatgccctggaagtgactctctatgctttcataattggatattttgtggtaagatagctaattttataaaactaagaagaagactttaagacaaagtggtttatgttgtgtacctggttttgagtgttttcagggaagggtaggtttggcgtggctacaggcatgtgtattggcttactatgtagcttattctgaagatcctcagagcatgagatttgatggaacaattccacaacgtattcagcgtcttcaaatgttaagtgctcaccgagataacagggagcttgaggtgggtagagacagagaagaagatagttataacaattgttgagtcatgaaggagtctcgctacatacatgtaaagaaaaacaaggattactactttatttcttcaaacttatagattcttctattgataggcaaaaatcttagcttcaatgtgtttatatgtatgccaaaactccaactaaagaaagaatgcacatactttttctctcaacttagccattatacagtgggacttaggattattgaaattttcaacacttaaaaatcttagagtttttagtatactaccaatttacagcaaaaaataactaaatttgttccatatgtgacacaagtatactagtgattataatcacaatcattatcaacattaagcacaagtacattctaatgattaacggaaaaaacaataatctgaagcaatagaaggaagagaagctactgcacatttggaatcgaatacccgataagggaatccgccgcagattctggagaagaatttgcagtttgtcgtagagagcttttgattgaagaaatcaaacaaaaatttaggaggagagatctcgaaccggaacaaaaagtttatattggtattgaaattacaattgattttgtgtttggtttatactggtttagagaggaaaagaaaaaaatattcacgcgatggtgattttagagacaagtgcgttgataaaaaaaggcacaatttcagaaggtaaacccctacagaattgctctcacgctctctacgcgcactttgtgagagtggatctgaaatagaactttctgattggctaaaaaactctaaaaaaatagcaatagtagacatgttgctagctcttgttattatttagcttttctacaaaacgcagtcgtttctatttcgatcgtttcagcttttgacattgatccgaaccaatcggttcaactggcttagtctatccacaggttcgtataaaaaatctcatttttggtcatcaaattaaacagtaaatttatattaattaatcataagttaatgtttaaagacaaattctatttcaaatttctaacgaatcagacctaattgtccggaataaatg

SEQ ID NO: 8977 - DNA, 3000 bp, Unknown
  misc_feature (1)..( 3000): cDNA_ID_3044171_gDNA_ID_1971952_Annot_ID_177365 3000 nt of promoter + ATG
cctaatattcaaaatcgtaaaaaaatgtccctgaagaaggagatgtgggattccaacgaaaagacatgcgacgattcgaaccagcctatacttgtcgtggacctgattagatcaatcttggaacgtttgagctttgttgatttccatcgagccagatgcatttcttcattatggtacactgcttcggaatcatgcatcggaggaccatcaactccatggatcatcctctttccgaacgaatttgttgaaagaaacaacgattcatgtaagttgtatgatcctcgtaactatagttcctacatagtaagagatctcaggtttgatatggctaggagtcgttgtttggccagtccgatagctggttccttatgttagactataacaacgatttccacgttttgaatctgtttactcgagagaggattcctcttccgtctctagaatcaaccgatggatttccgatgaatattacgaatagactagacactgcggttttgtgggtagatgaaaaaagcagagattacttagttgcttggagttacggtgacatttttgcatatcgcaagaatggagatggaaacaatagctggaaagtgattgagcctttaaagaatcaacgatgcgttgatatggtgtgtaaagaaagcaagctttacgtgtttagtgatactcgagtcactgtgtttgatttctcccgtagtgattctccaatggaatgtgcaagtttattttttatctggagtttcacaaaagtcctgttgtgactttgtctggagaagttttggtcattgctagcagagtggaaccacatcctgggacgttcttattcttcgtctacaagttggatcctaagtcatcaaaatggagcataatcaaatctataggggacgaagcattgattttggatcttggaataattgttgcagcaaaagatggagttatgaaaaattgcatatatttagtaatgatcattttcataagtacagtgggattagtctatgcggtgataacggtaacagtattttcatctaccatattgggaccaaaaaggtgatccaagtgtttgaacatcttactgcttcattgccaatactattcaggatgctcgttggtttttccccactatcggtggaaaatgtttgctttaaaactatctagttttgtcttttttgtaaggctacattatttgcttgtctctcgtggaacaagagtgtttacaagttttctttttatattcaagtgttttggacttagaaaggtttgaaaaatcgtactcaaattatctatatatcaacaactaatcctctttagatggttttgtttttgtagataaatttggcttttagttcccatcaacatttcttccatgggtttaagtgttgatcatgagcttaacaagtcattagctatatcaaattaccaaaagactgattctcaaaaccgatcaagaaagagcatcattttataatctaactcgtgtagagtactgaaattttgatttggaaattaattctcaccgacttaacatggaccaaatgtacttgatgtgcaccgacttaacatggaccaacttggtcgatatcaatacaattctggacatctagaggacgcttatggtacgttgattaggcttcccgtgtgtattttgcttgtgatctcggcattccattgccgaaggttcgaggatgcgcgcattctttcgattgaactatctacaaacgcacccaagcttgatgacgctgatgacaggaaagcaatccattataaatccttatgtggacgaggcttagccaacatggctttaggccactattacacagccgctgttttggtacgtaaactcatatagatatatttatgttttgtttataattatgtttggtataacttatattcatcaatatttattgttttcgcagtttgcgcatttggtcaaatgctatgccaagtggtcaaaaaactcttttgacctctttacttgggaggatttgttcatgtacacggcatggtgtggtcttgccacgatgaaaaaagatgagcttgaggtaatacaatattaatcgattatatatatataaaaataaataagccgacttgtaaactttttttattgatgattttttaggagatttctgagaggatgggaagtcaaaaagttggccaccatttccaacacttgattagaaaaactcttggagggtaatatataactcttaaaaaatttctattgaatacacttgtcggcaattaaacaagcttggtttatttgttgcaggatgtttaaaccaccatgcttggattttttgaaaactcattcaaaaccaaagcacttttggacttatacctccacgaccatgtgaatgctcttgagatcctcatccaggagaaatttagggtgtgatgcatggttgctttaaaactatctagttttgtcttttttgtaaggctacagtattttcttgtctctcttggaacaagagtgtttgcaagttttcttttatattcaagtgtgttggacttagaaaagtttgaaaaatcgtactcaatatcaacaacgaatcctcttaagatggttttgtttttgtagataaatttggcttttagttcccaccaacatttcttccatgggtttaagtgttgatcatgagcttaacaagtcattagctatatcaaattgccaaaagactgattctcaaaaccgatcaagaaagaaagcatcattttataatctaacttgtgtagagtactgaaaatttgatttggaaattaattctcaccgacttaacatggaccaaatgtacttgatcattttcaatataacaaactagtgcaccgtaccgtattataaagtctttatgtatttttttttaatataaaaacattttcagatatatttatttccaataaattcatttattttaagaaattaaccaaaaagaaataaaaatgaacaaacatatataagtatcttgattagaagaagcaggagacaaaccctag

SEQ ID NO: 8978 - DNA, 3000 bp, Unknown
  misc_feature (1)..( 3000): cDNA_ID_3044202_gDNA_ID_1971952_Annot_ID_177342 3000 nt of promoter + ATG
tgttttggtttgatgaaaaaaaaacagagtaaaacaaacctctggatgatatctgattccacctttcatgggacctcttgcattgtcgtgttgaactctgaatccaacaaaggatgctagagttccatcgtcttttggtatggtacattccacctgcaatagttggttagttccgttcaaatgatcttgaaccggatcggttctgcagatctgttatagatggaagaagaaaacagaggaaaacatcgaaccttgatctctctgaagggaatgagaagacttttctcgagctttgagtctaaaccaagaagcctagaagcaagcttgaagtttctgttggttgctgctaaagcattcatggctttcttctctcttctttattttgggtttatttgatcagagagtctgatatgaagacagttggaaaaatgtgagtcttgcttatgttattgcaagtttatttatatagagtgatacgtacacacttcgtgttatggaatatgagaatgaaaattttgttatttatatttataataaaagataatttatataaggaatatgaataatcatataagatgatacccataattgatcctgattttgagtattcagaatactatgtgtctgtttagcaaagttctcacacaaaaaaaatatatagattatagaaatagcccatgtcttcaccatgtgtataaactagatcagaataatggaatattcattaatgaaaaggaaatccgtagactaatcaagcagaataaatatattcttttcattacaaaaagatcagaataaaaataggaaaaatcaagatttcacaagattataaatattacatggatgaaagagatagctcgtaaaatttatcttattgtgtcacacactgtcattttattcattttaaatctagattaaaggaaaaaataacatttcgtattacctaattagtacccacctaataagcaaggaccaagatattgtttttcagaatttgtttttttttttaaataagaaaatatgatacaataatgatctagcaatagcatgcattggaccggatgactatactcgtgcatgaaaaatcatagtcaaattgtaatacgttaatgtgggacgataataatactttttttttgttttattatctacgattatatatatattaataatcatttacatatttgtgatatacgacccgaaatgaatcttgcatgtcataagatctttacgtgttattaacttattcaattctacttgcccctacacatataggcatagcgtatacacttttgtgagagggtgacaaaaaaaaacgtatacactttagtgagctagtgggaaaaaaacgtataaacttatcacacacatacaatattcagttttaattgaaaagattctacggatatatgtttttttagatactcaaatcagaatctttttggaattagaggaggacacgagaggatgcaacaaatcaagaaacatatagaattacaagattccaccatgaaagaatctttttggaaaagagattccccatgatttatgcttccactaatataattgatttattgtggatttccaccaagatttctttctctttcaatttccaaaagaagatatcaatttcgtaataacaacattgaccgtaaatagtgtttccaaatttgatctcaccctctttggtcaaaccaatatatagaaataataccccaataaagaatccggttcatggtaggcttggtagctaatgtcaaggatttagtatttttaaaacgttatgcattagctttctatcactttttaatacatgaaaaaaaaaaaaaaaaaaaaaaccaattggactttctcctaaaaggccattccctaataaacaacaaactacgaaaagctaaacatgtatttaaaatattaaagtgatagaaagctaatgcataacaattaaatgaagcaatttttttatattctttggtcaaaccaatatatatacagaaataataccccattaaagaatactgttcatggtagctaatgtcaaggatttagtatttttaaaacgttatgcattagctttctatcactttttaataaatgaaaaataataactcaaacaaatataaaaggccattccctctacgaaaagcaaaacatgtatttagaatattaaaaagtctaaaatcaaacctaaaattcaaaaatcaattaaaggccacaattgtcctataaaattatgggcttgaagcccaataatatctaagtgaaaaactaaacttaaatgctctctcaagggaccaagtctcattattaccatcacctccgagcgttctcttctctccatctgtctgccgctcctttaacgtcggttcccattttcttattcacaatgaccccaagaaactcgaggagatggaaaaaagcaaaaggtaaaacaaaaacaaaaaagctttcttcgagaaccagagcacattgattccaaggtaattactttctcaatgccatggaaaaggacccattttgttcccctttcctgtaatctaatcgtttcaatccgtgattatctctgtcagcttggaggaaatgacttagatttcataaatcgattcatgagttgtcagaaaggatttaaattttgttggtttgttcttatttcttctgtagctgctatgaatttttagatttagtttggctatgattctaaacctacgtctttatgaaagcacttacattttctagacacaagatcatagtgagttcatatgatgcggaaaagttattattctcttggtcttccagtttatatttatggaggaacatagtctcattaacaagcttgcattgttctgttccattggattgttataaaaatattcattggtcaattgagaaatcagtgtctaattttttttgaacgtgtctttgcagattgaatgctgtttctggtggattagtttctctgagttttggtgatagatcagattaacaggcagaattttgaga

SEQ ID NO: 8979 - DNA, 3000 bp, Unknown
  misc_feature (1)..( 3000): cDNA_ID_2179705_gDNA_ID_1971952_Annot_ID_58637 3000 nt of promoter + ATG
acaagaacgagcgtatcaatgggaagaaggtgtgaggcacacgtgcaaagagagtgtttaataaagtaataagtttataattagtatttcgctatatatatatatatatatatatatatatatatatttattatcttaggtcttattaaatgtaaatatattagttatggttagaactagtataacaaacttatggaaatgcgtacattgcgtctgaaaccattaattagcgatatatacatttgagatttataatcataaaaatctagagtccttttgcttatacaagacgaacacttataaacgtttccaaaggggggaactttcgaaagttgttgaaatgagagatatacaattgcgaagtatagagaaataaacttcaggacattgacaataatatgaaatgaagtacacgatttagttgataagaaaagaaaagaaaaaaagtatacacgattaatttccttttagaaaaaccaatcatacatcgatttgatgtttaagtctagaatatgtgatgcaatttaaattatctgtttttgttttccctgagtacccaagaatattgggcggagcagattgatgccaatatcaatatgtaatcagtacatgcatgcatgtggtatatatagagagaaaattgtatgtttttgcttacataacttaaatcaaccagacaaccagtgatgcatgcatgtggtatataacgaaattcacatgaatgttctttatcttaaggaaaaaaggaagataaatcagacgaaagttaattgtctcaaaaggtaaaacaaatgtacgatacaatgattaataacaaattgtatagtatagctagctaccacaatctaagtatcgtattcgtacgtaatttcgtatggatagagaagtaagtatatatgtgagagtgtctgagagaggagaggcacgagaatcgtgttgaccgtttcgtgtggagttctttagtaagctaaccaaccttcatgtctgtcgtgctccttttcttcacaacattaatcctcccttttctttttccgtactttgccattttcaaaattagttttatttcacgaaattcttagtatttcatgacttcattttggtgggttcattttcgtgaattacttctaaatttcccccattccttctccaaatcagtagagccgctattaataagaaagtgtaacttccgaatgacaatgacggtgcttggttgtgtttgctacaaacatagaactcgaatttttcaaataataagagtgttggacattagtatagcgagacaagatgatgatgaattcaggtattctcacaaggcaacgttcccaaacagcaggaactaccacaagagcagtttagcttgtcgtctctgttctctccggccacacttacgtctccataactgaaacttaactcctcctctgcgattatgtcctttgctgcaaagaaacagagccgaggaagcaacgctcctgagcttctcaacagaacagtggagagatttccaccgtcacaagaatggttgatgaatctagcaacgttcccaattcttgtggcgtcgatgtttatccttaaacaagcttgtcctgaagggaggtgttcgcgtacgaccaaaagagctgaagcgaaggattgtgttgatctgagtttgtcgtaaatgttttgacgtctacgtgcttcatctgttgtcaatagctcacctataagaagagacgacaaaatcaagtttatgacttttgcataaaccaagtcattaaggcagatcacaaagaaaaaacacattcaagaaagaagaaagatttgtcattatctctaatctccaaatccagcattgtgatactacctctaaacgattgaaacaagaacatttcgaaagctcagatctttcactgatggagatcactcttaataccatgctagaatctcatctcaacgcatcgagctaaatcatatgcagtccaagtgtaaaaggctaataactaatgctaatattcctcaaatcatgtaatcttaagcttgattttcaagttccaattatcaatcttccaaaattagtgacctactgcaataaaacgaatcactatactattaggaaaccaaaagttggttaacgttacctaatgctaatattcctctaatcatgtaatatgaaatcgaaatgtaattgtaacctgcatattcacagatgaattggccttgcttgataagctggtcagcgtacaagcaccaacctttcttctcatctctcacaatcttcaaactaaccgaaacccccttctgcgtaacccggttcgaacaatcggacccgcatccacaacccgacccacattcgttagctatctcttccatccccgcgaaagctaaacacttgcagtatccttcctcacacctctcgcattcgcatcctgactcgtccactaaactcaccccaaaacgtccgctttcactcactgagtcaaaacaaggtctagactccgatccacattcattagcagcagctccccaccattgtcgcggcggaggaggagatgaagcggggatctgaaaaggtgtgtagatgaagtacgcgtatcgttgagaatcgatggagttgtgaaacgggattgagatgttttccaaggatcgtgcagcgtcgagagatcggtgaatggttagagatttcgagattagggataaggttttgcaggtttgagcaacaacggcgagttctcgagggtttagccatgggagaatcaaattcgcacatcggagaaatcgatcggcggccggaataatgtcggaagcttctccaagacaacgcgtcttcggtggtggtgactctcgcagtcgctgcatattttttctcagccagcgatatacaaacgacgtcgttgcgtttaattctatttatatccttaaattctattttaatttcacttcagtaagaattttttaaagaaaaatggcgagtttttttgtgttaatcataactatagatttactaccgtcgctttggtctgtgta

SEQ ID NO: 8980 - DNA, 3000 bp, Unknown
  misc_feature (1)..( 3000): cDNA_ID_2993965_gDNA_ID_1971952_Annot_ID_58639 3000 nt of promoter + ATG
agccaacatggctttaggccactattacacagccgctgttttggtacgtaaactcatatagatatatttatgttttgtttataattatgtttggtataacttatattcatcaatatttattgttttcgcagtttgcgcatttggtcaaatgctatgccaagtggtcaaaaaactcttttgacctctttacttgggaggatttgttcatgtacacggcatggtgtggtcttgccacgatgaaaaaagatgagcttgaggtaatacaatattaatcgattatatatatataaaaataaataagccgacttgtaaactttttttattgatgattttttaggagatttctgagaggatgggaagtcaaaaagttggccaccatttccaacacttgattagaaaaactcttggagggtaatatataactcttaaaaaatttctattgaatacacttgtcggcaattaaacaagcttggtttatttgttgcaggatgtttaaaccaccatgcttggattttttgaaaactcattcaaaaccaaagcacttttggacttatacctccacgaccatgtgaatgctcttgagatcctcatccaggagaaatttagggtgtgatgcatggttgctttaaaactatctagttttgtcttttttgtaaggctacagtattttcttgtctctcttggaacaagagtgtttgcaagttttcttttatattcaagtgtgttggacttagaaaagtttgaaaaatcgtactcaatatcaacaacgaatcctcttaagatggttttgtttttgtagataaatttggcttttagttcccaccaacatttcttccatgggtttaagtgttgatcatgagcttaacaagtcattagctatatcaaattgccaaaagactgattctcaaaaccgatcaagaaagaaagcatcattttataatctaacttgtgtagagtactgaaaatttgatttggaaattaattctcaccgacttaacatggaccaaatgtacttgatcattttcaatataacaaactagtgcaccgtaccgtattataaagtctttatgtatttttttttaatataaaaacattttcagatatatttatttccaataaattcatttattttaagaaattaaccaaaaagaaataaaaatgaacaaacatatataagtatcttgattagaagaagcaggagacaaaccctagatgagtgagtccgaggaaaagacatgcaacgacgatccaaagcagccgacacttgtccgagacctggttatatcgatcttggatcgcttgagattctctgattttcatcgagccagatgcatttcttcagaatggtattacgcctcgaaatcgtgcatcagagtaacaactccatggatcataatgtttccatacaacacagattggaaagaaaattcatcatgtaagttgttcaatcctcgtgaccatagttgctacactttaagagatgtcgggtttgatctagctagtagtcgttgtttggccagttccggtagatggttccttatgttagaccatagaaacgattttcatctcttgaatctgtttactcgagagaggatttatcttccttgtctgggtgcaaccgatggatgtccgatagaattttggagaatcaataataataatttttgggtgactctcaatgaccaaaacaattctgcaaaaaaaaaaaaaaacttcacatatggtcatgtgtcttagaataggcaaagctgttttgtgggtagatgaagaaaccagagactacttagttgtttggaattatgatggcttttttgcatatcacaagaaaggagatgacaagaataactggaaagtgattcaacctttaatgaatcaacgatgcgtggatatggtgtgtaaagaaagcaagctttacgtgcttactgatactcacgtcactgttcttgatttctcccacgctgatgcttctccaatacaatgtgcaagtttcaaatctccgaattatggtaatgattcgttttgcggcaagaatcttgctgtgactttgtcaggacaagttttgatcgttatacacagtgggggtgtctacaagatggatcctaaatcattagaatggagcagaaccaattctttaggagacgaagcatttatttttgatctaggaataactgttgcagccaaagatggagttatgaaaaattgcatatatttttatgctgacccgccttatcgacctaggaggaggtttgtacgcaatgctgaaagcggtattagcgtataccatattaaaaccaagaaagtggtccaagtgtatcaaccagctcttactgcttcgtctccaatatctttctcttctgctcgatggttcttaaatagttgcttcaaacctaaatcaagttttgtctcttggtaaagtttggagtattttcttttgttttgtactggaacaagatttgttgcaacttttcttttttatatattcaagtgttttggactaaaggattgatgaattggagattagacgggtgattattgattgtctataacatttgggcgtaatctgttataatttacattaccgttctgtttttggtaaagagaagatccacatgtccatcaatttttactgtgacattgtaaaaaaagtaaaatctgttaatctgtttttaagctgaggtgcagataaatctcttaggatagagaattcatgaatcaagagttgcccattgcacaaattagcccaattgttaataaaaaggaagaaataaacaaaatcacaaaagtcatctaaactttgaagaatctttaccaacgagaatctcacaaaagttggaatcgtgcacgcctctcgagttatctccggctccgatactccatctggtggattctgtagaagaaaaaatttcaatctttgttggattttctgggaaaaactcagatgggtttgctctgaatcgattggaaaatcaaaccggtgtggactctgcaaagttggttgat

SEQ ID NO: 8981 - DNA, 3000 bp, Unknown; identical to SEQ ID NO: 8976
  misc_feature (1)..( 3000): cDNA_ID_1989304_gDNA_ID_1971952_Annot_ID_58640 3000 nt of promoter + ATG

SEQ ID NO: 8982 - DNA, 3000 bp, Unknown
  misc_feature (1)..( 3000): cDNA_ID_3610002_gDNA_ID_1971953_Annot_ID_58648 3000 nt of promoter + ATG
ctcacgggggggggggggggggcttacgtagacggcattaaatttttaatcacagctggatgcgatggagttagtgtggtgcagatgcgatgcaacattaacaaatttttttttaaaaacaattatcgattttattcacttccacgcgagtcttttttgacgtgtgtgtcacgctctggttttcgtttgttctttttgggttaactttggattttgttgttgtgcatgatgacttctttctgatcaagaacaggaacttgattgaaaaaactaacgtatttgataatcactagatagctagagatagatatctaatgagtgattttagaattttgttcatgtacaaacaaaatttacaatttgctgatttcttcgtattcacgtaagtttaacaattatcctttttaaaaaaaatcaagttcaacaataatctcgttgtaaaatgagacttatcctcatattcgatttatatttaaggttatttatgaactgaagtgataaaaaacgatacagaagacaatacgtacatttctaaatactttcttgttttattttggtaatacttaattactcttatactagttttatgaggccaaaagactaattttttactccattaccaaaactcctgatcttacgaaaccttctctttaaggattctcatttatatatacatgtggaacgagtaatttatttttatttatttctgacaagagagatattttgtactattgtataatgtactgtatactactaccctgtcctttcaggttcatgatttataaggtttgtttttccgcaataaacaaaagacgacgacgtgtttttaaagacgtgattgtagacaccttttcatggactgtggaatcggtgatgtaagtgaaaccaagcacaagtgggaggacgaacattaccacgtgtcgagtatgcaacacctatatcgactaagcatagaaggaatcatgaacaaataaataaataaatcttgtaatcaatcaatacgaaaccaaaatatctcaagcatggacaatgcgtgtgaatgagatgaaacctttgtagtcagatgactcagatgattgatagtataaagtcttctatatgtaattatggattgtggtgtaggttttaatcgttttccaagttatgaaattctaacatcaaaactaggactagaaaaaaaaccaaagccgaagatttattatattgggttcgaaattaaacttgaacccgaagatttactatattggatcctaaattttttaatccaaaaaatctaagtcgaatccgaaaataccggtattttattcgaaaatctaaatttattcgaaatctaaaattttatccaaaaattcaggtatttactcaaaaattcggatatcggttctaaaaggaccctgaaaatttatatccaaaccgattaaaaaccgattggatacaaacttaaaccaaaccgatattttggatttatcccattgaatcttaaacttttatatccaaaaaaatcatatctaatcgggttttacccgaacttaacccaaatgcccacctttaattattcaaaaccaaaaaagaagtgtttgatgctgaggtttgaactcatcagatacacgtaactattttccaatttattttcgtttatgtgcatttcagaatttcaagcataaatatactcttattgtttaaacatttcaaattgcatgtgtgaaataatatcagagttagaatatatgttaatcttctcttctcctagattcagttagatacgtttctatcttcttttaggcaacatctcttgtacaaatagtctctttggcaattcaatacaatcaaccttttacgatatatatatttgttatttcttgtacaaataggatcaaaattgttatttctgaagcaaattttctttagtttggatgtcaattatatcctcgattaatatgtaatcacggaacggattcacgatgcgttattttagaagcaaatttatacttgatagtacgttcagaggcatcgcttttgtacaaattgaagcgggtttgttcaatatttaaaataacacaggaaacattcaaatgtattattgatgttgcttaggtttgtgaaatgatatgaaccatatcgtatatattactagatttttcttatatgttttaagggtagtggggctgacctatcattctgtttggcattaccaatcagactatcagagtattcaccattcaggattccataactagaaaaagaaggggtttacattttctcatactgtataattttctactatcagagattttatcgattacattaatctcatagtgattattctgatttataaaaaagttgacaaaataattaaaaccagtattttataacaagattgtctctctcccatggccattattttgacctctgacttatttaaatcttaattaacagcataatactgtattaagcgtatttaaatgaaacaaaataaaagaaaaaaagaacaaaacgaaagagtggaccacatgcgtgtcaagaaaggccggtcgttaccgttaaggtgtgtcgaactgtgattgggccacgttaacggcgtatccaaaagaaagaaagggcacgtgtatagatctaggaaaaaagaaagaatggacggtttagattgtatctaggtaccaggaaatggaacgtcacaccaaacggtacgtgtcggatcctgcccgttgatgctgacggtcagcaacttccccttattcatgcccccctgcccgttaattacgtgtaacccttccatgcgaaaatcaaacccttttttttttttgcgttcttcttcaacttttctttttaaatcaaaccttttctttttaaaatcacattgcatttcctaacgctcaacaaaatctctctctactaatatctctctctctctctctctattgttgaagaagactcataatcggagattgtttgtttttggtttgctctgtaaattggagaagttttgttagagatcaaatg

SEQ ID NO: 8983 - DNA, 3000 bp, Unknown
  misc_feature (1)..( 3000): cDNA_ID_1989337_gDNA_ID_1971953_Annot_ID_58649 3000 nt of promoter + ATG
tctccacgtttccatcatattttctttttttgtttccctatttgttctttgaatcctcgaaatattttctaatcatcaattatagcctctatcttttggaatcttaatttatacccatttgatcattcgatgaaaagtttcttatcgaatgtttttgacagatttttatggttcagtagttttacaaggttataaatatttactttgctaaacgttttacatgtttgagatcctaacattagttccatattgtaaatatcaaacatgtataaatgttcgaatcgaaaacatgtacattagctgttattattttgtctcaataaattttgaatctggaagaattgataacatcctataaatgtggtgacaatatgcaaagattgaaaacaaatttctctctgtttatagattctatggtagcatataatataaatatataatatgatactaatagaatattgaatttcttcttttcttttcaaaaatagaatattgaatttcatcttgatattttttgataagctataggatgtttacacacgtcctctttggttaaagagagcagttctaatctcaccaagcttggaacagctataaagcacgacaatcgaactatactacgacacgttgcagtttgaagctgtcatgaaacagacctaccactagtaccgccacgtgacggtcatacccaaagaaacgaaacttgtaagaagagatcaccggcacgaacctaacacatcgcaaattcgaccggtctcgctagacacgttatgcatgttttttgttcgtttaatgaatgacgactcttcactttcgtttttgtattagtcaataattataagagttggccagttaggttgattacattaaatattcgattaggggagactaaaatatttgtactattttgtacacgtaaccttacattagatgtcttcgaaacttctttccatatgagtcatgacaaggaaaacttctttctatgcgttctcttacccaaaaaaaaggttctcatttttataattggagattccacatatatattattaattctcggcttagtaggattctaccgggtaatattgtaaactaaattttcaatattcaaaattattgttattgaaatctcaatggaatgactcaattaagataacaaaacattgaaccaatagatcacttgtgaatagttaacgacgattttgatattttgaagataaattaataataaataaataaataaaactgttacctatttaattgcgtctgctttttgacatttgcgtgcgtaaaatatttttatatttccgtggattcggcatgcacgatgacattttcctaacatgcaagcaaacgacacaattttttaaaaataattattcgatttgttttctacttaagaacttgggacggtgtaggacctaccccattctctgtaaattctattccatgatcaataatgtgaatctcttaggaatagatcaattgcttaaaccatctaattagcgacaattcttgcattgatcgataatatttggatatatagtgccggctttgaggtcctataagctcaaagcaaagtttaaaatgcgtgcacacaaaagaagcagacagatattttaacttttcgttgggccataaaagaagcccctaacaaatatgcacctaagtcaagcgacataagagatatgagacgatacagacccacaaggatgaagtaacaaacatcgatttggatcaagtttgttaaagataaacccaattcggagagagtccactcaatagtgaaatgcctacaatgggctcttattaagcaatggactctaagagacgtgccttttttcaatttaggcaactgtagtctattgggtataacaaatgctattctttgccatgtatattaaatactttactctttgctgcttctttaatttcttcttaaatggtttatctagtaaacgatggcaaggtatactcttttgagttattacgagagacagagttagttacatgagctagttcagtctttaattagcctttctttatgtacattatctcataaatctacatgtgaaaactttatttactctttgtggagagaaaataaattgtaaagcagcagcacaagatcgatttactgttgatttcacattttgaatgtagtactgggccttgagggacatagaaaagctaagattgcactgcagtactgcacccattcattttgtgactcggcccctccccattttgtacgtaaacaagaaaacgcgttcgtgattcactttaactttatggaaaaaaaacaatttggcgacttgcatcgacgtgcgcgtttatattatataaactgattttcaaaagaaggcatgattcatcaaagcatgtatattagcattcttaattatatctttgtttcaatcatgatccaaaagatgtgagttgatctattgttgttgtttccacgtatgttcgtctatatccaattttcagtgtattttattattctgctacatatttaattttagctcaaacacacattttaaccatattctccttggcaatttatttattagtcgatagcaatttggttgcaataatcttctgttatacttgaaaaacgatctattaacaaatatattcgaaagagtttcaaaacaatctattaacaagtattcgaaagtcgtcacatcgttgactaaagctgaggacaactctgtcatttttatcttattcacgtggctacctcttcttcttcgtctctcattttatgtgtaatcccacagagcttgtcactccaaaaaaggcaaaacaaaaaaaaaacagcttctaaaaataaaaaacaaaacaataatccagccaccgtaggggtaattccgtaaatttgtaacagaaactccattcccgcggcgtatgcagagggcaatcccgtaaacttaacccatctccggtgatgaataatatcaattccttcacgccggagtgattttccacaaaaaataagat

SEQ ID NO: 8984 - DNA, 3000 bp, Unknown
  misc_feature (1)..( 3000): cDNA_ID_1989336_gDNA_ID_1971953_Annot_ID_58650 3000 nt of promoter + ATG
gtgttagtctgctagaaaaagcatgttggagtggatttattgaataaagtcacaaaattgttgaccaaaaaggaaaatattagtcattcaattatggacattagtacctttttccctctattcgacttatatatgttaagtactcttagttgattgcagttacagtttttacgttaagtactcttagttcattgcttgatataaatgctctccgaccgttttcccaaattttataagtttatttagttttagtgagtggttcttgtttgttgtggtccatgaatgtggcagaaaattgtttctaaattcgtgggtttaatttattggtggagcacatgatactgtcatgttcagatacatagcttttaatcatgtctagctactgatcagctttctgcaatgtgcttgttttaatctttagtgtccgctaaaatcttatactatttgatatttgttaatcatatctgtggttcttaagatatttatgtttattgttttatctctatgtgcgtgtcattatcactaagatcacgtgtagtgtctaaagggaaattccaatttatatgtctattgataatttgatattcattataacatggtagtacagtcgtgtttggactcacattcattctttgttttgtgttctgtgatggaataattatattgcagcttgacataagaggagatccatacgggtttctagcggcgcatccattggcaccgcttgtatcgttgcatcaccttgtttacttagacccaatgttccctaacaaaaacccgatcgagtcgttacagaccctaatgaaaccttataccttagacccgaatcgaatactccaacagattaattgtcatgatcgcaaacgtcaatggtctatatccatctcttggggatacaccattcagatatacacttacttcttgactgctacggagctgactacgccgttgcagaccttcaaaacttggcggtcttccagcgatggacctttcgtgtttaacactcggcccttgaaacctgacccctgtgagcgtccggtcacttatttcatggatggtgccgaggatgtacgggatagtgggacgaaaacttggtatagcataggggataagaactatggtcattgcggaaagattgagcatactcgattaactaaagtgaagaggatattggtgacttcaatgaagacggatcctgagtattggaacaaggtacttagtgtttgtatatttctcatattgaatttaacattttgggtgagtttaggttacatctttttttttattttttgcttttgttgataggcaccgaggagacagtgttgtgaggtgatggaaggaaaagtaggaaaaagaaaagagaaagaaatgttgttaaggattagaaaatgcagatctttggagaagatataaaaaaagcgttttaattagagagatttttgcacatacagatttagattcgatcattagttatttgtttctaaattcctcaattcctagtaccaagagaatgacgattttctctagtaatactggcactcttcgtttttcaacatgtaaacattactttgtataattagtctatatcaaataaatagttacaacatgaacgtaactatttatacacgagggtaaatttttaacaaatttaaaccgaaccaaaaagatttcagttaatcatagttttgttacaagcgaaatctgaaatattcaccctcaagtttgttacgtaattgtctaatctgtgtttttttgtgctagtgttataattgtttcctcgaatgttaagcaccacatagaagtatacacttttcttttattattttcgttcttcttccatttagaaacttttattaattctactgttaaatccaacgttattagtttattttctctgatgaagttctaattttttttgtttgttggaaaaagggttacttttctgatgaagttgccgatttgtttccaaccaaacctcagctaatatagttagggagacggataagaaattgcataaagggagaggctttgtaaacacgcaagtttacgtcaacttgacacatataaactcgtatataggaattgtgtaaaatgttaatcaatatatgtttatgaatatagtccttttatttccttaatctatagtcatgttatcatcatatcggcaagaaaattactattacaacatatgtttccgtgcttcgatttgtcgatcaggtaggcaaccaaaccgggccagattagtcacaaatgaaattaggctccactttggcaagttttttcacaattaaaaattagaaagtctaaccaaactaatagaaactgaaccaaacaaaaatgttcacgcaattacgtagcacttctctatgaaatactgtggataattcgatttgagctaatctatggtaagtcgtttctctcaaactgaattaagctaaaccaaaccgaaaataaaccgttgtagaacacccataataaacatatatatgttctctactcttatttggctatttttccatttgcagatacgtgtgacaacattccaaatataggcacatgatacaaattacaaagccagaaattataatttataaactatacataataaggtcagtagcctaattacatccatatatttagttgggcataataaggatagcctaattttggtgcatcccgccaaaaattcggacaaatggtgaatttcaaaccatgaatttctttgttatacatacattacgtgcactattacatcaaagaaaaatagtgacgtgcataaacgtattttcttcacataatctatatataatatatacagccatgtacatttttcaacatagaaaaatcatgtatacaaatacggtaggtgcaatactgataaactgccattcccattgcattagacgctagtcaatccaaaccttataacataaaaagttatagtccatttctttcatatccaatcgagtcaaaataatattcgagcaaaaaacaaaagaa

SEQ ID NO: 8985 - DNA, 3000 bp, Unknown
  misc_feature (1)..( 3000): cDNA_ID_1989335_gDNA_ID_1971953_Annot_ID_58651 3000 nt of promoter + ATG
gacttttatatatatgaagcgataaagaagagcctatttggtgttttctccaatgatgtgcataaaatatatataattaacaaattaaaaatacgttaactgagatctcagatactcaggtcattagtacaaagtacaaacgtctaatagaggccaattttgtcatccatattcaattcaaaccatatcatttgccataaccgtacccatatatagatatttgttagtctacaaaagactgtataaatcgttttatcttgtgttcaagccatcaactatgatatcaaattaccagatcactcatgctaaagaatccatcgaaatgtattaagtttgtcgaagttcgttactctatatggtggattttaaatatttgatttggttagataatttttagttataccgtcaaataaatttccaactatttagtcagcgaatttaaagatcaaacactaatcatcagtaatggtttgctgaaaatcgtcagaatttcttttactagtgagcaagttttaagatgaaataaaaggtgtgaaacgaaatagagaaaaggtagagagggaagagacaagcgtgagacacggagaagtggaactgatctctttacgttcctcgtacgtttaccaagttacactgctttccatatttctatattattattccctccatccctttcttcacatactttatgtaacttctttttaaaaaccaattatttgtattctaattgattgaatcaaatagtttctataagactataaataaacataattcgaattcaaattcggcagcgttgaaagatatatgttgaacaatacattaccacacttattagtagaatatatttatttctagagtctcaaaacataagccaaaaagccgaaagcacctttttatctttgtgggtttggtgcaatggatcatatatatggtacattagcatttttatcatctttctcttttatcatttttcttgtattgtcgggcttgcgtcaggcctgtacttatcttcatacaacattatttatgtacataaccagaattcaggccacaaacaatacgtgagctattcaggatcacgaggtccacgcgctcgctcaccttcctctttcctcaaaggctttagctaattgttaactagatggaaaacagtgctatggttgaattttaacatattggttactactatctcaataatattttgtaatacaaatgtcggtagatgaattgatataccaccttcatggatgatgaagatccacttttaaagcccaattttttgtttttcttcgatgccgaaatcaatatgggcacatgtggatcctactatagcagttcctcaatttgagttaaaaatctttgggttttaggcttttagcccaaggaaaaaaaaaaaaaaaagaaccaatttttattttttataatttaataagaaccaaattattcatcattatatacttctgacaacaaatatttactatgtatattatatagtgaagaagctgtgacatgaaacagattcaagccaatcgtctgattagctagagaatcactgtcataatctattagttgacaaagaatgaatgacactagtacagtagttaatatgagtgcggattctcgtaatctcaacgtatctacgtcaataagctcatttatacatcattaaattaaagtacaacattccaatttatgtttggtgggttcctttttatcaagacgtatacgattataccaaacctttatccataattatttttaaatgatacatttcgtaaatattaatattacgattattatttttaaacctaaaatctttgaattttataaaattttaaaattgataaaaaagatacgggattttttttgagttaattgattttctaataaagatattggattcttagtgttttttttattctataatttatttataacgcggaaataaaaagcaaaataattaattaagtgaggagagttttaatattttgatgtttatttctaaattcatctcttttttccacttctgttcagctctgatgaatcttcttcctctgttactttgatctctttctccatccttgtctctgtcgattctctgagatatcttctctcgagctttttcccgcgttatctctctcccactcctggtaatattttcttcttcttcttcttctagattgttcttccgttactagctcttgaatccatttccacggatctctgatcttcaatctctgttttcattctctctaatcagttgttgagcttgatatttttagctaacgtttttccgattcaaatttacgatttgtgtgttttccgataaccaaatcggatatcttcagctcaaactcgagctccgatttcgtctcatgttgtagatctcgacgacttcgtatttgtctatggtttgctgattgtattcagattgctagatactcaatatagagcttacttttacctcagctagggttcgtctttgttgtacctttagttgctgctttttgattcttgtatatatggattttgattgttcaatcgtaatttctggttcattgaaaatcgatttattagtattcgaaattggaactaagatttagagattgcgaatttgatacagaagtcatttcaaagtatcagagctataaaatggtgcttagctagtttctggtttccatttctggattttcattcaaatacgaaatctattcgtcaaaatggtgtcactagtgttctgtagaaatttcattacagacttttagttgttgcctagtatcaactcatatctcagcggtagatatgatgaatctactagacatatttttcaattatcgcctccttttacaagtttatcatgtcattattttgttgataactacatgaatgctggctgaaatattaatttgtctctttttcctcttaattggttcaggttggagcttgatgtctaaattgttattgaactgctggagtctgtcttgctttaagtagaaagag

SEQ ID NO: 8986 - DNA, 3000 bp, Unknown
  misc_feature (1)..( 3000): cDNA_ID_1989334_gDNA_ID_1971953_Annot_ID_58652 3000 nt of promoter + ATG
ttctcattatgctgcaatctgtattgaagatgatgaagctagtggaggtgcaattttcagttgacatatctcttgatactgaaaaatccattttattcagtaatttcttcatcacatctttttccttcttgcaggagctcctatgagggtgattgtccgaaaaaccatcccgtttgtagaagatgaacttatatctgaaagcaaacttctttagttagtgtagccttaaaccttcagatttctctgtaatcattctgttttgagtacatcctctctgtagtatacattctgtgcaagcgaaaaataaaagtagcctattattggaccatcatgtttgtgagacacttggaagatcaccagtaatctttgcacgagcagaccccgtctttgaaatagtggaaccgagatgcatcccttacaacaaactggcgatctacaatcttgctaacctgcttgaggaacacatgacaatcttcacaaaccctcaaattctttatcacaagaatttctgtgcctggaatactgttgagaatcccaaaagctattgctaacctctcgctatgctcacgggtagtgctcgaaacctcttcgcctctatcacagtccatgtttcccgcaagctccatcacagaagtctctaactcatccaacattctatggacttcctctgtttgctcatgacttctatcgccagctaaaaacaagtgaactcttcccttgtgttccacataactatacccaggctttttcctgaatgctctctctctcatcattacccggattctccagattccttcttggtttttcgagtctgaatatatatttgacatcaatacatagtagccaatgttattgggttcaaactcaatcacctttgcaaaagctaactctgccatatccacattcttatggattttacaagcacccaatagagcaccccaaacagcaccgtccggttcaacaggcattgactctataaactccatggcttcatctagccgaccagctcttccgagtagatcaactaaacaagagtagtgttcaggaccaggctccagcttatactctctcttcatcgctctaaataactctaaacctttatccgttagccctgaatggctgcaagcagataaaaccattacaaacaccgccccatctggtcttatgcctctttttatcatatcatcaaaaagcataagcccaatctctcccattccatgcatcccatagcaaccaatcatggcggtccatgaaactaagctttttacaggcatgatgtcgaaaacagcacgtgcctttgccaagttaccgcatctagcatacatgctaatcgatgcattgcttacaaaaacatttggtacaaaaccattggattctactaacttccctacttcgtgaccaatcttcttagctccaagatgggcacaagaagacagaacactaaccaatgtaaaaggatcaggacaaacacccgatgatttcatctgctcataaagttccagaacatcgtaagctagcccgttctgtgaatatccagaaatcacagcattccaagtaatcaaacccttcacaggcatctcatcaaacaacctcctaccagcttctaccgacccgcatttcatgtacattgtgatgaaactattcaaaacagctacttcagaatccagtcctcctttaacacattgaccgtgaagagacctcccaagccagaggtattcaggaaccgtgcatagcgggacaagcccaagcattgtaactgaatccacagacacaccagtttccttcattctacgaaacatatacgcagcatcagtgaccttcgagtttgctgtgtacccagatatcaaagcattgtaacaaacactaagctgacttgactgaggattttcttcgaacactttacgtgcatctgcaaccaaaccgcatttacaatacattgagatcagagccgttagtacaaacggctcagtctcgcaaccgcctttggtcacgtggcaatgtagctgttggccggagacagggagcgaaagggaagcacaagacttgagaatgaaagggaaagagaacgcgtcgggagaagaaccagaacggagcattgaccggtaaagagatatagattcagaaaacaatgactgatatgcgagctctctcaaacgtacgttccatggcgtcgaagccaccgcagcgacggcggagttccgtacaaagcttgtaacgacgatcatggtctcccgcgctgattatgacttgtttgggttaaaacgcatagttctaatttttatgagaataaggcccaaatagtatgggcctgtagcccaaagtaatccgaaaatttgggggaatagagttatacgtaaaaccaaacgggtattaatctgtgatagaccatttcttcttctcagatactttcctccatctggaaatcgttgccgccgctatttcctcaataaaccagattaaaccttctcttcttcatcatctttctcaaccgccgtaggttggagggaagctcgcgcggcaagtaatagccggagcagcttccgaccaacggatcggggttactaggagctcagtttctggtaagagaatcggtttaatcactgttgttttattacttatggtagctgagtggttttcgaatgttatctgattgattcgtgaaatatcttaagattgaataagatcatcttttgtttgtgcataaggggaggataagctgatagtagaaaatctagattagacaattgatggtactgagtaataactaataactaaccttaggagtatgattggtttctagggttcttatgagatgtattttgcgatcatgttcctttctttttcgtcatttttatggagtttcatactcggagttgtattagtagctttgatcagtgtcttgcgaaaacaatgtgtttttaaaccaggccttgtgaaaccattagcctttgtgtaacatctggagtttattgtgctgttctctcgtttacttggttaatg

SEQ ID NO: 8987 - DNA, 3000 bp, Unknown
  misc_feature (1)..( 3000): cDNA_ID_1375398_gDNA_ID_1971953_Annot_ID_58655 3000 nt of promoter + ATG
taaataaatttaaatgagactttcgtgttccacatggtctctcatccctctctactcggaaatggaactgttgatacggacaacggagtttttctcgaccgcaaaacataaattgtcgagtactatttgtaatttgagatggtttacgtaaattgaaatagtcctttctgatcataaatggcctgttttctccactcttttaaatgagtttggattgttcatagacagattttctcatttttttcgatatatgtaaatctccgattattaaattgtaggccggattgttagataaagcttctacaactatagatttgttgagttgtcatacgtaaacagttttgcttcaaattcactaacctaggaccctccttttgatattaatgtgtggttgttagaaaaacaatttttcgtgttccatataattttagaattacgtggcatggaacatttacatcggggataaattaagcgtcgtccacagattttacgacaatgctccatataagaacatgcattacaaaaaaaaagggaaaaaatgcatgttcatgtatggtcgtctgtctgtttataattgaaaaggactttgatgttgttaatgttattaatggagattactttgaatctcacacggtttgattaaacgaatcttcgtcagcacacactctgttcacacttattatttgagactagcagaagaaactcactagtttatcatagattctgaccttcgcacttgttagtcttttaataacttgaagatactcgccattgtatatcacaactaggcgatttctcgttcatttaaaatgttaatattcgtgtttaatgtatatttaattgaagtaatgattttacatgtacaaatgtatcctagtattttgaatcttctagtaccaagtggttttctcttcgattacctttttgtcttttttcattacaacatgaacaacaccagcaataattaaaatatcgtgctttttgtttttgtcattttttggggtcatacatatataatatatacacgtaagttcaaacatttgtttgttgttctttttgtttgtcttggattcgacatccttagaaataaaaaccacatttttaataacgaaagttcattaaaagtatttcgaatattttaggcatgttggtttgattagagtttgtattccttattcaaactaatgtcgttgttttttactgtttagatcgaaagaaaagttttttttcgtaattttcgtttatttattttgtgaaatcactagcaaagaaaaacgtacgtgactatcacatcaaaccactataacatctcattttatctatcgcttaattcgttttttaagatcagatctgagatcattgtgcatttcaattgtaaaaccgagcctaaagtcaataatataacattatttcagaaccaataatttttaacagacgttgtttgtttttgggtctcaagctgaacgactttgcaactagtacacttggcatatgtttcatgttttttttataaataatgtgctaccttgatgaagttccctctctctataaattgaagtgtgtgagatgcatcatccatacacaacatcttccatcttccgataattctcctttagtcttataatcactaataagtacgataattgaaatggatccaagattcatcaacaccattccttccttgaggttcttatctccaattcatgtatcattaatgcaacacattcacacacacacacacataaatattctgtatatagagttaatgcttcttaatttgatttagttatttaaatatagatcgatatatatccatgcagctgtttatgtaacaatatatgcatgtatgtcgcgatgcaggtatgatgatgataagtgtgatgatgaatatgcgtttgtgaaagctctatgtatgagtggtggagatggtgccaacagttactccgccaattctcgccttcaggttcttcaatatcttcgcttacttttagggtttaagcagaaacaaattattaatgttcagatttttctctggtgatacaaacatttttacaatcatttaattatgataaaattgtaaaaactgaacatgaactaactaattgtcaatatcaaatattaaatgaatttacatataagaacataatatttaaatgtctttatatgaattgcaaaaacttcaaatatattatgcatgaagtagaaaaatataaacatatactcaatagaaatagattttcttgtttttaaaattgaaacatatgttctttctatctatatgttgagacagtctttaataaaattctactcaaaaagagaagttatgaaagatgcatgatttccatctattttatccaatcaaattcattcatatcatatgttagtttgtttttaagaagtttacatttgtatttaggaaagtaaaaatatattaaaaatataagtaatttaaaacgaaattataggtttcatttaaaataaaaaaaataaaatataactaagatatttatgttagattaacctctactaattgactaaaaaatggtatatatgttgaccaaaaaagaaaaagatactaatgatacaattactaacatatgcgttctgttaacgacggttctgccaaacaaattaaaatgttgataaatgacgattcttaggactagtataaattctctaaattaaaaagggctcattacatcacctataacttataaacctacaagtcattaaagaataataaggcatgtacatgcactagtcaaattgtaaactcgaaaatgcataaacactagtaatatataaatgtatataactcaaaatcatatattgttgttgttatcgtatgaagcatgggtccagtatcacattatcacggatcgacatactgtaaagaaaaaaatcatattttctaaacgaattataaaatccagataataatactattttttataactaagcttctttttttgttgttttttttagaaaaaagttttatca

SEQ ID NO: 8988 - DNA, 3000 bp, Unknown
  misc_feature (1)..( 3000): cDNA_ID_1989331_gDNA_ID_1971953_Annot_ID_58656 3000 nt of promoter + ATG
cgctctggagactggaatcaatcgagtaaagtgttcgtagctgagaaaaaccctaagctctcgtttttcgtcttctccgattctgcaagtatgagtcgatcaggtcagcctccagatctcaagaagtaagttctcttcgccacttttttccttttgatttctaatttctctgtatccatttagttgaagtttttggtttcatagagctcctacttcttcgtgtttctgattttgttcttcgtttgtttcatgtaatgcaggtacatggacaagaaactccaaagtaagctcgatctcttcttccactttttcaattttaaagcgtctttaagtcgaacctaaatctcttactcagatgagaattgcttgcaacccgatttctcaacttaagagctatattaatgccatttcagttcatgtattacttgggattgcgtgtttttgtgtactaattaaacttgtgtttacaattccaatatatagattcaatgctaatcttggttaagaatatatcaatgtcacataaagttaagagttgtatggattcttaggttttgtatctcgttcatttagaattttactagactttgtttgttatcatgtttttgtaacttggtatggtcaagtgaagttcttgtctgcttttttttgttgttacccccaatgtagttaagcttaatgccaacagaatggttgttggaactctccgtggctttgatcagttcatgaatcttgttgtggataacactgttgaagtcaatggtgatgacaaaactgacattgggatggtggtacgtttctctccatctctctaactcacccacagaatcttcttgtcatttgttttgtttaaacattctacttttttcctggatgcaggtgataagaggaaacagcattgttactgttgaagctctcgaaccagttggaagatcttagcttatgacttttcacccccaagtaatcatcttctgtaatatgagactttgacttactttgctctctgtaccggcatgaatcaatcttgattttatttgatgaattcctcttctttggctcctctacttatgtcattttacccttgttcggtcctgtttgttccctatagatttttctgaacccttgatttgatggatacaaggaaatttggatacttactgtccttgtgttataatctcttatcatatgtgttagtcaggtataagttatataatcatttcaagttagagaaatcaatgtagtaatgaaaaagctaattttgaatggtccaaaccttagagaaagcaaaatacttttgttgtggggatctgaattttgggtaaatgagctccaacggttgtttttcttttgctttattagtattttaaacccttttttagccctctttttatcaaagtgagatcataatcatgccgtttggctcctctgttactattaaagatgttgttatatgaataagaagaagctaaaagaaagaaaaggagaaataagagaagtgaaagtggaaggaatcaaggaagcatgtgccccacgaagtattgtgtgtgaggcaaaatgaatgaaatcggtacaatatctatcaatctccaatgaaacagcaacaacaacaacatgtaaccacaacggaatgttcggcacgtgggtcgtcgtcggcacacacgtggggtgggctttgttccaacttacattcatatcaagtattatcaaccacaaaactatgagttgaaatgccttttttggtagaaaagtaggtatttgtgttttgtctataaattctaaattattttctgtccaagtcattatacaatttgatgtgttttttaacatttcgtggtcggggatctccaactaatataacaagtaaacgaattttaaacacatggatttacaactaatccaaaaagaactttcaccaacttcactttctcttttattcttttctctttggtttttggggaagagaatagaaagagtacgagagattgcttctttctaaattctaacggtaaacaaatattacataaaaatgttaaccatcttcgtatattattctcatggaccatttgcaagtaactaaaagattcactttagatgcaagctgttcaatgaacttcaccatccttttttttatttctttcaaatttgattttacaatatcaatctcatttttgtttgtcacaatatcaaaatctcacatcttagcgtggattacaatttgtgtttaactattccatcatcattaaatttaatgaccaaaagccatagaaattgtgttattatggatcattggttgttattaggtttaccaagtacatgagactagtctcattgtagataatcttttactatttttttttctcaactgattattatggatttatgctagatttcttcttcttcttttttgtgtgtggtacattcatccggcagagaaatgatactataaaagttaattaatactccaaatttgagatatcttgtaagatttgatatacacatagaaacaaaaagttattacataatacaaaatttgcaaggtttctttacttcataaagagaaagacaccaaaaaaaaagtaagtcacaaaataaaaaagacagctcgacattcatcttcctcgttaatccttcatcttctctcaccaacctccaccaatctctctctctttcttctctgtgtataggatacgaagaagaagaagaaagaaagaaagattgtgaagtgataattacaagccaccaactaatatcctttcttcaattcaactctacgcgtcgcttagtaatacccaaaaagttttaatcttttgagtttcccaattattttccccaacagaaatatcattaattactccactaatccaattttctaggttttctctttttccccctaaagattgattctttatagccattgattttgacctctccatcactgttttcagagagtacccatcactccaagatttgatttttttggattatcctttgagaataatg

SEQ ID NO: 8989 - DNA, 3000 bp, Unknown
  misc_feature (1)..( 3000): cDNA_ID_1008840_gDNA_ID_1971953_Annot_ID_58658 3000 nt of promoter + ATG
cagtttgattgtttatctgtttggagtttgcgttgatatatgatgtttatcccttttgtaatgatgtgacttgcaaattgctatgtaacctcaagattaagcatagagttatttatttcgaagtttactaaattgcattaagtaattttgtggccttgtgatttaattaagagacccatgttcattggataaaaagcactatcttacaacaatggtatattaataaagtgagaatgctacctttcttgtaaggtggttcatataaaatataaattcaaacaaaaaacgaacgaccaatctttaatcgtttacatgaactgtggtgtgctaataaggtgataacaatatttaaacgttgctttgactcccttaaaaaagaaaagaaaaccaattataggaagaaatcaaactccaaacttgtcactaatgggaagaaataaaccagtaattaaaactcggaccttgtcattaagtgtgtgaaaggcgtgaatcttcacaatcctataagacaaaacctccttatccaccgttagatttaaagttcatcatccaacggctagaagtctaatcccgctaataatttgaccgttgcgattatgcttttaatggctcctcctctcttctctatcccttaagcgctctctctcaaatctcaatcatccttcttctcatctagaaaccccttatcttggagtaatcagagagtttgaaaacaccagaaatcatggcgacaggaccagttgttcatcctcaaccagttagaggtttgtttctcccctctgatgaatctttgttttaactctaggatctgcataaaaactctcatctatgaatccttttatttagatgttatcaaagattgcttacaaatctgttttccaaggatccaaatcttgataggttgctttttgttaaaatttatcaggtgatcccatcgacctcaaaaacgcagcagcaaagaatcgtcgtgctcttggcgacattggaaacgtcgattctcttattggagtcgaaggaggaaagcttaaccgccccattactcgtaactttcgtgctcagttgctagaaaacgcacaagttgcagccgccgctaacaaaaaggctccgattcttgatggagttactaagaaacaagaagttgtaagagcggttcaaaagaaagcaagaggtgataagcgtgagccgtcaaaaccaatcgaagtgattgtgataagtcctgatacaaacgaggttgctaaagctaaagagaacaagaagaaagtgacatactcttcggttcttgatgctcgaagcaaggtagattctttgttcaacattgaaagcataatgtgcaaagttctgattatttggttttgtgattggtgtacacacttaggctgcttctaagactttggatattgattatgtcgacaaagaaaatgatcttgctgctgtggaatacgttgaggatatgtacattttctacaaagaagttgtggtacacttacagtgaaaccttcttttgtttatgcttatggataagttatgtgaatgtcttctttaagtttgttgttttgttctttgttgcagaatgagagcaaacctcagatgtatatgcatacacaacctgagattgatgagaagatgagatcaatccttattgattggcttgtagaagttcatgtcaagtttgatctctcccctgagactctttacctcactgtcaacataattgatcgttttctttctctgaagactgtgcctagaagagaactacagcttgtaggtgttagtgctttgcttatagcttcgaagtacgaagaaatctggcctcctcaggtcaatgatttggtatatgtgactgataactcctacaacagcagacagattctagtgatggagaaaaccattttggggaatcttgaatggtacttgacagttccaacacagtatgtgttccttgtgaggtttattaaagcctcgggttctgaccagaaactggagaacttggttcactttctagctgagttgggtttgatgcatcacgacagtttaatgttctgtccttccatgcttgctgcatcagcggtctacacagcaaggtgttgcttgaacaagactcctacttggactgatacactgaaattccacacaggctactccgaatctcagctcatgttagtcttcttaattctttacactagcaagtttgtgatcatattgtttgtatattaattctctatgtgcgtttctgtgtgtaatcagggattgctcaaagcttttagctttcattcactcgaaagcgggggagagcaagctacgtggtgtgttgaagaagtattcgaaacttggaagaggtgctgttgctctgatttcaccagccaagtctcttatgtcatctgctccatgaacaaggcttgaaagatggctctcttgcaaactctgcattttagattctctatcttttatcgttttatatgtaaaggtattggttcttgttgagaaatgatgtttccgtatgaattcaaaagtattataatgaaattcttcttctcttctataatcagaatcgttttggtcctttttcccatcatattctttaactatggagtcaaattcaaattacatagttatctgttataacttgaaaacttctttgttcttcataagaccaagtacgatggtacgatcaaggtgaagttgttcacatttgtcaaataataatttccaataagaaatctggtgaattttgttacttgtcaaaaaaaaatcaagaaaattaacaagactaatagtaataatcgaacgacgacgtaatgtttaagaaaaaaaaacaccaaacgacgacgtaatgggtaatgaaagtgatgagggtatttacgtcaattcatagaggtactccgatgtaaccctaatatataacgtgcatttgtagcgccgtgagtgtccttcttgtttacactgagcagaatctaaaaacacttatcgtttcgtctcttctctgatccattgttgaagatg

SEQ ID NO: 8990 - DNA, 3000 bp, Unknown
  misc_feature (1)..( 3000): cDNA_ID_1989330_gDNA_ID_1971953_Annot_ID_58659 3000 nt of promoter + ATG
tgtttaattttgtgagctagggtttctgggttttgcattgttcaaactcactcattgtttgctcttttctaaattttttccgatgctgatttcttctggaatgctcaaattgctttcttggtacagtgtaagttctaagacttgatgctctttaattacccttgttgttacatctgccagtgtattctcgtgtgtcgtgatcttacagattttatttttcttgattgcacagacttgctggacttgctttcatgttttcatctagtatcctcctacagatcctggtacgtttctgaatatagctatctgcttataacccttgaagcttgatcataagatcatgacttagtagctttaaatcctgcaagagatggttagctagttctgctgttaggttgtgagctgagtatactggtctccttttgtacccttgttgatgtagcaaacagagttgtgagtcttttggcccgttttactgggagagatactctgtgaagtaaagtttgttacattcaaaccttctttcatatttgaagttttgagctttactctcttgtagtatgttgactagcgatctctggatcccaaaaaccaaaattacacttagaattcttatccttacaacactatttgaccggagcatatggtaagctggggtccttagccgacctcaatgtctaacttgttaattgacttagactttctgaacaacttctataaactcaagcatcttctctcctcagcttatatcaggtccttgtataggtatagtttttttttttttttgcacttcgattagaagaagaaaggatcatctgatttacaaatctgatacgtttcccatattttgtgatttcctttggtatacctggttataccatgcaatgagtaacacgtgttatagtcatctgggagatatagtgataactatttgttcataatggtcaggcatgcgcgatatatggtaactggtggccaatgctatcagcactcatgtatgtagtggtgcctatgccttgtatgttctttggaggaggctcaacccaattccttattagtcgggacggtggagggttagttactagagactttattgcttctttgagttaaacgaaagatcgattaccaaattggctcgtccataaaacgcaggtggatagacgcagcgaagttcttgaccggagcatcgaccgtgggaagccttgctatcccaatcatcttaaggcacgcacagatgatcgagacaggtgcaatgctcatagagttcacatcattcttcatattcatttgcactgtcatgtgttttcaccgggctagtctcgatgatgactggtaacgtagatgttgctgctcgtgaattactaattggattcgtatgagaaagagagtgtgaagaaaagatgaggttactatgagtggttaagaaagttgtgttcttctccctctttttgtaaagctttgtatcactcaatgtttgtaaaaagttttattcatcactgtgaatcttttcctgaaactaagtgccaaaatattttgtttcgcatgtttaggaaaaagtttaattcatcattgtgaatgttccctaatccctagattagcttcgagagattaacaaagaacggttcaactgtaacacgtggtcatgaaataatgtccgaaggcccttcagataataaaagcccatgaacttcataagggtagaagcgtaattttaaaagagacccctttcatatatatatccttgcgattattattagccgtcatcgtctagggttggttgttctgcaatttagttttttttttttgtgttttttataatctgcagcatcgtttcttgtaatctgaggaattgtttttcagactgcacgatcgtttaattttgttacgttggttgtttctttgaagtgaaaaacggcgagggatgatgattcaattagatgtgcgaatggtttcatcatgagctcaaaaactttatttggcattttataatctgacttcgccgtcaactcttttttctgtaatttggaggaatggtaaatggatgatgattcaattagatgtgcgaatggtttcatcatgacctcaaaaactctatttggcaatttatctgacatctcccatttctctatgttcaatccaatatatctcctttatgtggttttaactcgatattgttttattgtctgcgaaatgtttgataatgatgagttaacttttatagagtgttacataattattttacttattcatattgtagttacgccattgaaaaacagtttgattgtttatctgtttggagtttgcgttgatatatgatgtttatcccttttgtaatgatgtgacttgcaaattgctatgtaacctcaagattaagcatagagttatttatttcgaagtttactaaattgcattaagtaattttgtggccttgtgatttaattaagagacccatgttcattggataaaaagcactatcttacaacaatggtatattaataaagtgagaatgctacctttcttgtaaggtggttcatataaaatataaattcaaacaaaaaacgaacgaccaatctttaatcgtttacatgaactgtggtgtgctaataaggtgataacaatatttaaacgttgctttgactcccttaaaaaagaaaagaaaaccaattataggaagaaatcaaactccaaacttgtcactaatgggaagaaataaaccagtaattaaaactcggaccttgtcattaagtgtgtgaaaggcgtgaatcttcacaatcctataagacaaaacctccttatccaccgttagatttaaagttcatcatccaacggctagaagtctaatcccgctaataatttgaccgttgcgattatgcttttaatggctcctcctctcttctctatcccttaagcgctctctctcaaatctcaatcatccttcttctcatctagaaaccccttatcttggagtaatcagagagtttgaaaacaccagaaatcatg

SEQ ID NO: 8991 - DNA, 3000 bp, Unknown
  misc_feature (1)..( 3000): cDNA_ID_1989328_gDNA_ID_1971953_Annot_ID_58661 3000 nt of promoter + ATG
cagaaacgtaccaggatctgtaggaggatactagatgaaaacatgaaagcaagtccagcaagtctgtgcaatcaagaaaaataaaatctgtaagatcacgacacacgagaatacactggcagatgtaacaacaagggtaattaaagagcatcaagtcttagaacttacactgtaccaagaaagcaatttgagcattccagaagaaatcagcatcggaaaaaatttagaaaagagcaaacaatgagtgagtttgaacaatgcaaaacccagaaaccctagctcacaaaattaaacaattcacgaagcacaaaataactataatctgagtaaatcaataccaatctctaatacgtatggaatatatgaacatagagcaagggagaaaagtaaaaggggaaaatcgacttgaatctgattcgattccgtcgggaaatgatacagttggaagataggtgattgattaccttcgatggtcatcgccatgtcggcgaatgaaaatgttctgattaccggagatcgagtcttgaatgatcgccggtgacgataaaagagaaggtgatgatttcgttgttccccttagagagatacagaaggagagagcccagagaggagtcgcgatttgagagcaaaatgaaaattagtgaccggtcaaaattggttttctcaccgttcatcgatttcatctttttggtttggttggtttattttggttataattggtttccaggattgtggttttgataatacagctagtagtcgattttaaaatatcacaaactaaatgacatgaaaaaaaaattacgatcaaaatttgggttgcaaggaccacataaaactcattcctaaatcatacgtaataaaaatgattttataactgaaatttttaaccaaagttcataccaatcatcaaaatatgtgaaatgctaaatatttttttcttttcattttttgttatttaaatgcaatcaactatgattgaaactgcatcaacgaaaaagtattattaaactattaagcaaccataagttgagttgattcgtttccataattttagttagagtacgtaaatctccatcataatacactatctatgctatcattgtttgttttttttttcttttttttgctaagaatgtaaatatcattagaaatgaaatgtttggtattacaagagacgtattacctaaattaaattaaccttggcaaaaagaaataaaaacaaggttaagataaagagtagttaatcaggagagattaatggatccaaagtagcataagttgtttccaatgctttctatgtcttcgagaagtaatggtattgcgcacctcacgatctatgctatcatggttggtgcgtttatgacatgctgctgctggtgacgattcaaaagtgtttatcagttgttcattatgatgccattgtgatgtaccattactaatttcttacttaaataaggtgttgttttttgttttgctccaaataataaggtgttgtttaaaaggggctctttcgttttggagtaaaagtctctctgagtagctgtatattatttaagtagcatagtccaattatttgacaatgaaaaaaagtgtatagtccaatgaataccaaatgaattgacgtcaccactagttgagacctgagacaagcaagtgatcgttaaatcaaggagaacgcaagtggacgaggccgacatgatcctaactattggactcccacttgtgaaacttacttgatccatttcccacttcataatttcgtaaaaaaattaagacaatgagaatgaatttatttatttatttttcggtagaacaatgatttttattttgtccaaataaaacaatcgtgaaaaattatgttttggacattatcaactttgtgagtaaaacaaattttgtagtttcttttaaccaatattttcgaagtcaacttttttctacgtgtgagtgtattgagtaaatgatagatatgtcaataataacataactcatcaatcaatctggcttcaatagaactagagaagttataacgtttttttttttttagacaagagggttttataactctagactagtttcatagtccatgaaaaaaacatcaaatctcctaaatggctggacataattcagatgattttgtatgaaataaaacataaaacatatattttcttgcatatctggagatttttgtttctttattacaatgactaattaatttaccttgttcctttttatttttgcaaaatgattactgttatctattttgtccgtttctaataaaataaaataacaatctgagctgtggaaagaaaaaaaaaggaaaagcgaggagagctaatctgagtcgttgcctctgtccactggctcggaccgacctcgtacctctttcatttgtcctcgagcttataatagaggctacgccgtcgccgccacctccgctccatccattcacggccaagcgacgactccaccgcttaggcttggcgtctgaggtatactgatcaacgctttctgttttcggaggagcgaggcggagatcagcttctcttatgtctactcaaacatatcattcttctttagccactcgatttcttctctagcggctccagaggtttcgtcgctacagagtcaagttcctcttttcaggttttgtggtaagtaatcgttaaaccctaagtatcggaccttgttgtttaatctgttcgtgtttactctcaattacatatgcattcttctgcttaatcgtttcttttagtttaatttctagggtttacatcccaaaggtctgatctttttgcatatttgtgtgaatcttagtttttttttttttttttggaattgaatgtgatgagttgggtttgatactgttaaagatcaaatctttagcttcgttgaagcttcatatttatgtcaacaatgcaaggtttatttttcttccacctttgatttgatatttataattgtttctttgaaggtgaacaagattttagttacaaaaaa

SEQ ID NO: 8992 - DNA, 3000 bp, Unknown
  misc_feature (1)..( 3000): cDNA_ID_1989739_gDNA_ID_1971953_Annot_ID_58662 3000 nt of promoter + ATG
gtttcatggtgcgattcaaatgtaggtgttctttacagagatgctggaaatataactatggctatcgatgcttatgaggaatgccttaagatagatccagattctcgcaatgctggccaggtatctatactttagcgtggtcttcttgttatgaggttgaaagatatatgtgtttaaaaccttcttgtccccttttgtagaaccgattgcttgccatgaattacataaatgaaggactcgatgacaaactatttgaggctcacaggtaagcacatatattattaatgtagatttgtattatgttgcttttatgggtcttacagtgaaaaaatcttctgaacacagagactggggttggcgcttcacaagattacaccctcaatacacttcatgggataatctgaaagatccagagcgacctatcaccattggatatatctcaccagatttcttcactcattcagtatcttatttcattgaagctccccttacgcatcatgattatacaaagtacaaagtggtggtttattcagcggtagttaaggtaggatttttacctatataacttatatagatacattttccctctaagcaattcatttcctggttctcgtggcatttttcccttttgagcaatcattggtctctcatggctttgcaggcagatgcaaaaacatacaggtttagggataaagtgttgaagaaaggtggagtttggaaggatatatacgggatagatgagaaaaagatagcaagtatggtcagagaggacaaaatcgacattttggtagaactcactggtcatacggcaaacaacaagttgggaacaatggcctgcagaccagcaccggttcaggtgagaggatatattaaacctatctcattttgttgtttcgggttttgcctttgactttccatttcaagtgtacttatattggctaagataccaggttacttggatcggctatccaaatactacgggtttgcccactgttgattacagaattacagattcgttggctgatccaccagataccaaacaaaagtacgttttggttcaagatgcaattttgggtttcggaagtgctccaaataaaaatcttaatttttatttatttattttgtgatatttgattgcaggcaggtcgaggagctggttaggcttccggactgttttctttgttatacaccttccccagaggctggtcctgtttgtccaacacctgcgctttctaatggctttgtcacatttggtagtttcaacaacctcgcaaaggttaaaaaatttgtgtccttggattatgcacaccaatctcccctagtatctctttcaatgttttgacaggtttatctctgtttgtgcaaatcagataactcctaaggtgctgcaagtgtgggctaggatactgtgtgcagttcccaattctcgtctagtggtaaaatgcaaacctttctgctgcgatagcattaggcagaggtttctcaccacgctggagcagcttgggttagaatcaaagcgtgttgatctcttgcctttgattcttttcaatcacgaccatatgcaagcctattccttgatggatattaggtaagatttgacacatagtgctctgtaaaacaccgaggcttatagattcacatatttaatttacatttattgcagtttggacacattcccttatgctggaactaccactacctgtgagtctctctacatgggagttccatgtgttacaatggctggctcagtacatgctcataatgttggtgtcagtcttctcactaaagttggtaagctcttagcaaaatttttttttttttttttgcaaaaattgttgttagtcggacatcttttagctaattcagccatttcttgattcaggattaggacacctggttgccaaaaatgaggatgagtatgttcagctatctgttgatctagcctctgatgtcacagctctttctaaattgagaatgagtctccgggatctaatggctggatctcctgtttgtaatggtccttcctttgctgttggtcttgaatccgcatatcggaatatgtggaaaaagtactgcaaaggtgaagtgccgtccttaaggcgaatggaaatgctgcaaaaagaggtccatgatgatcccttaatctcaaaagacttgggaccatcaagagtcagcgttactggagaagccactccgtctctcaaggccaatggttctgctcctgtaccttcctctttaccaacccaatccccgcagctctcaaagagaatggactccactagctagataaccagcaaatcgagctgctgcgaaatgccggcagagagtcttgacccatctggaaaaggtgtgaaagaaagagtcgatgagcttttcctgctatttacttccaagacaataggaactagactttagattactgcttgtgtagtaaaaagaatagtaaaaccagctctttcttttgttgtatctctttctactcttagtttagctttacatgattcttgggaagtcgttaggtggtagtggatttggagtttttcttctcatttgagagatcaagttgttgtgtatcgattagggttttaaggctttttaggatgttttcatgtgttggattttgactcatatgatagtaaatatagttatagaaagcttttcggtgcctttacctatttcataatataattatctaaaactcctgcttaagcttaatcccataggtgagacccaatgaaagacttttgacttgtatgattatgttgccaactccatatctctctttaattaattaatatggagagagtaaaaaggcaagcaactaactactcttcaattcaacacttcttctgctccattgcttccaccagaaccctaaagaccttataaaacccaatcccaaatccctttgctcattcaccaccaaagcatccaactttctttgcttcctctttcaaagcaacacaaaatattaaatctcaagaaacaaagtaaagaaaa

SEQ ID NO: 8993 - DNA, 3000 bp, Unknown
  misc_feature (1)..( 3000): cDNA_ID_3409603_gDNA_ID_1971953_Annot_ID_58663 3000 nt of promoter + ATG
atatttaatttacatttattgcagtttggacacattcccttatgctggaactaccactacctgtgagtctctctacatgggagttccatgtgttacaatggctggctcagtacatgctcataatgttggtgtcagtcttctcactaaagttggtaagctcttagcaaaatttttttttttttttttgcaaaaattgttgttagtcggacatcttttagctaattcagccatttcttgattcaggattaggacacctggttgccaaaaatgaggatgagtatgttcagctatctgttgatctagcctctgatgtcacagctctttctaaattgagaatgagtctccgggatctaatggctggatctcctgtttgtaatggtccttcctttgctgttggtcttgaatccgcatatcggaatatgtggaaaaagtactgcaaaggtgaagtgccgtccttaaggcgaatggaaatgctgcaaaaagaggtccatgatgatcccttaatctcaaaagacttgggaccatcaagagtcagcgttactggagaagccactccgtctctcaaggccaatggttctgctcctgtaccttcctctttaccaacccaatccccgcagctctcaaagagaatggactccactagctagataaccagcaaatcgagctgctgcgaaatgccggcagagagtcttgacccatctggaaaaggtgtgaaagaaagagtcgatgagcttttcctgctatttacttccaagacaataggaactagactttagattactgcttgtgtagtaaaaagaatagtaaaaccagctctttcttttgttgtatctctttctactcttagtttagctttacatgattcttgggaagtcgttaggtggtagtggatttggagtttttcttctcatttgagagatcaagttgttgtgtatcgattagggttttaaggctttttaggatgttttcatgtgttggattttgactcatatgatagtaaatatagttatagaaagcttttcggtgcctttacctatttcataatataattatctaaaactcctgcttaagcttaatcccataggtgagacccaatgaaagacttttgacttgtatgattatgttgccaactccatatctctctttaattaattaatatggagagagtaaaaaggcaagcaactaactactcttcaattcaacacttcttctgctccattgcttccaccagaaccctaaagaccttataaaacccaatcccaaatccctttgctcattcaccaccaaagcatccaactttctttgcttcctctttcaaagcaacacaaaatattaaatctcaagaaacaaagtaaagaaaaatgaagaacgaatctaccttcattgatgtccctgcagaatccagctcagccatgaaaggcaaagctcctctaatcggtgtagcaagagaccacactactagtggctcaggtggatacaacagaggactcgccatctttgacttcctcctccgtttagctgccattgttgcagctttagctgctgccgccacgatgggaacaagcgacgagactcttcccttcttcacacagttcttacagttcgaagctagctacgacgatctaccaactttccagtacgactcatagatgcttgattgatcaaacagatgcttgtgtttttcttgagaaacacgtcacctaattaggtcatattttttcttcaggttctttgtgattgccatggcccttgtaggaggatatctcgttctgtctcttccaatctccgtcgtcacaatccttcgccctctcgccaccgccccaagactcctcttgctcgttcttgacactgtatacactcaaaactcttcaaattatattgctttaaaataaaactttagtatcaagtaaaatactaagaattgtgttgggaacagggggtcctggcgttgaacacggcggctgcatcatcggcggcagcaatatcatatctagcacacagtggtaaccagaacacgaactggctccccatttgccaacagtttggagacttctgtcaaaaatccagcggagctgttgtctctgcctttgtctccgtcgtattcttcaccatcctcgttgtcatctccggcgtcgctctgaaaagacactaatcaaaaccttatatgtgtgttcatcattattgtaaaatttatgtcaccattgtgtaattattactcatccatggccttgtgaattgtgttgtattaatctttttaaaaaggaaaatgaaagtgtgattgtagctctgcttttctggaaaaaaattgaaatgagtttctcaattttttgtccaccaaagcctatgagattataaatgtctcctatatttgtctctacgaaaatacccggtaatgataatgttacagtgagtagcagagaaatatcttacgtggtgttatcttagtggacgttcacggagttgtcgttggtcataatgtttctgtcttcctttttttggtttaaggataaacgagccttcctggtgccacgtcaccttttcgtcttctgctacttcgtcttcttcactaaatgattcagtattttctcctcaatcttctccattttctcaccaaaccaaaatcgtgaaagaatattttcccgcttcatgtagatggcagctagactacaacgacctgggcttgtatcctcaaggtaaatcaaactcactacaattttcagatcattcccagaaatttattagtggaattaatcaaatttggggttttctccgtcgtccatcttcaccagtgttcaattttcgattccgtttatacactcgcttagctcaatcattagagtaggtgcagcttagtttaagtcaaacccagaaaagggaaacttagacgaatgattcaattttgtactttgttcacggtagatcattcttttgattttagtggctgcttaataactgaatctcgccttttgtagctctacttcaaaaccatgtcttccaagg

SEQ ID NO: 8994 - DNA, 3000 bp, Unknown
  misc_feature (1)..( 3000): cDNA_ID_2993983_gDNA_ID_1971953_Annot_ID_177418 3000 nt of promoter + ATG
ctcattcttcaaagcctcattttctgtttattaagagtcactatccattatatagttctttttcttcccgggaaaaatctagaaatttcggtttatagtttacgtaaatgggaccaagaattaaaatcttactaatcgcgatttattggattttatatacgaattcatacaacttttgtggttgcaagatgatttgcgattgaccaacttgcactctcctaaaatttctttgtaactagataaccaaacattttttacataaaccatctctctgacaattactattaaactaatctgtttaaaacaaacattttgatggttgacacttattttgttggaaggaagagacaggggaatgtactttactggagctgtgaaaaccggttcttgattagagtggctacgtgctgcgcaacccatgccgagccagccaccgtgcagcagaatccgtgcgtgtgaccttccctctcgatagataaggaagtatgcggagcttgctttgaaatctggacaatggagagattctatgagagaccttccttctatcgttaggataatgcattttgattaagcgagaagaagggaaaccaagtaacctcttcaaagagttgcagtggaccccaatgatcatcaatgccaaataaaaatgcaagcttgctctggttttctctcatgaaatcccaatctggctctgctgcaagcttatatgccaaaaatgaaacagtggatcgtcacctagaatgctttagttggagatcaactatagggcaagcttggtcatgttgtagagctttcaagtaaacactttgcatactttgaattcaaaatgagactctaaactctatacaacacattgttgaaagaagagtacctctctaaactctgactttgccatgaagagaacattgcgcatggtgtgatactgcaagcatcagatgaagttaagtcgtctgaatagttagtagggaataagaacttaaagtatcaagaaaagaagatgtaatggccatcttcaagtctttatacaactaggttcaagtgtaaaacccaagaaaatcagtgaatatgagataatcaatacctgcctcaagtgagtgcaggtagcttgaacagcagtatcagaccatgaagctccaatggatttagatacaagcagccgtgcagctgacataggtaaaagtctcagcgatgcaatcagaaaacttgctgtagccgacagaacagaagacctgcacaacatgataacgatttcacaacattctaaataaagactgattggttctttcctatcgaggattcgtattgagaacaaaagctcacgctgcaagtttgccaattaatgattgctttgttgattgttggttcaaagtcaaaaatggatataggccaatgcaatataccacctgcaaagcattccagagaataatataagaaaaatcacatagcactgaaagaaattgtgatggagaaagtactactcttagaggaagccatctataccttgtccgagaatttcttcaataactcaagggatatataagacccaatagaatgcccaacctaccaagatcaattaagcttagagttgtaaattttcatgaaaatctggaaatccatccaactaatggacatatatattttggtcataagaagcaatatgtcaatggcttatacacatgacagtcttaccaatattattggaactttcacactctccaactcctgtctgataaaatcaatctgtatgataactaacagattaagatcttaacttcacaggatgaacaatacaagaacctaaaggctttcaaatccaagagcaatgaagaaaaatgatttttattaccttatgatcaatttgttcttgaaatgaaaatagcctcccagactcccagtcctaaaagtgaaaataatcaagtatcatgaaagcctatcaaactaagatattatatgaagagaaccatcaaagtttacacacagtaaaacctgaaaccaaagttaacgtaccttgctcgtgtgagatatttgcccaatagctacacaaataaaacaaaccactccaccattagagatcagaagaacaaactcaaactcagaaataaacagcttccatcttaaggactcaaagaaatcaaactcgaaaagtagagcagccataccaattacagaagcatttccaccaagaaactcgtataaagattccaaaaagtccttgtaaaatgacacaactcctgaaaaattacaagccaatgtatgaagcacactagtatatacacgtgcatgcataagagtcttgagcataataatgaaacctggatttcccggaataaacaatacatggaatgtgggattctcagcttgaatttccatcatctccgtcatcgaactttgatcacaaatacaaaaaacaaaacaaaaagtgtaactatagtcaaagaaattagaaaatttcgtaaaagattaatgtaacaatacccagaaactctgcacaatctggatttaacatgtcttttagtttcattcatcaatttgttttgagtctccatgtctccggtcacgcgattcaacttatatcttctctcagaactgtcaacacttgaaaggagaagatcgagagaattaatgagacaacagagaaaccactaaaaatcaaaactttgcaaaataagtgaagaagccttttaaagtaaaccaagtgaagagagcacaacaatgcacctgaaacaacaggagtagattagatactttggagaactgaaccaccgatcggaggaagaaagtaacggagagacggagttacccaaggtagaagaagaagacgcatatttgcagcaatagtaatacgacctcgttttgagtaacgcgacgtcgttttatgagtttgggtgtcgtcaggcttatctccacctcatacttccactacaaagagaggtgattgacagatagataagagtgtttggtagctcagactcagagagtcacaaagtgtgtgtagcagca

SEQ ID NO: 8995 - DNA, 3000 bp, Unknown
  misc_feature (1)..( 3000): cDNA_ID_1989324_gDNA_ID_1971953_Annot_ID_177414 3000 nt of promoter + ATG
acaaaaaattattgtattttctaatttttttttttaactttattttctttacgaatgaaagatgtgttttaataaagaacttacattatggggataaataataatagaaaaataaaaataatgaaagcctatatatatgtatccctctaatgatgtgtataattaggattagacatctcataactctcaacaagttgacttgttgacttagctcttcgtcaatgagagcgaacatgtttgttggaacacatcattagtggacaaatgaatgcagattaaaagaaaaattataatcaaattttctagaaaaacatatgacagatactttgagagataatagagtttttgtttgattgaatataacatattgtggtttgttttcacgtggtttagaaaagaaacaagagtgggcttttaaattgggcccacagagtggcagaagcagggctgagagagtaatgggtcctacaaaacgcccatgatcccaaaatttccaaagaaaatggagacaatcttctgtgtttatccgaaagctaccctcacgctttggattttcttcttcttttttttttctctctcttttcttttttaatactacttatttttctataaatttgtatatctagctataaaggtaatagaaaatggtaagttattttttccttccggtacaaaagatgaaaacatgcaatagtcggcaaaggtccacactccacacatttgtctgcacatctatccaatattcattcataggttcaaccacaactttatctactacatatatattttttattttattgaacgaatttatattcgttttccatttctgtcatatatcatagtagatgttgatagttgggtaatggagcaagtgaaagattgatggttggtagaccatagattcatgcattcataccataaggtatactgatggtgattgggtaaatttttgagtcagctattacaattgaaaagttcatcaaatgacaaaactattacaacttagatctttgacagccaaaagaaaaaaaaaaaaaaaagagaaaaaaaaaactaaattgttgttagaaattagaagtcagaagtaagaagactcccataggaatacagttctggcaaccaatttcttagttctttattgggcattcatatcttagttgggcctgactcatatatattttgaactttttgtacgcaattgtatctaacactatagtcttacattgttcatatatttaatgttttatattgattgctacctatatattttgatatgatgtagatccaactatttctaggttgaattgtcttttcgaacagattttgtttccggattcaccataaaaaaaaaaaaaaacttatgtgacagaaagtactatagaaagaatcgtgtttacaacaataaagagacttgacccaaacaaaaaacgtttacaacaataaagagttgaacaataatacggtacgattgtgtatgttgaatcatctcctccacttggacgtgtccatttgacaacggaaaaaagtgtggccgtgttatctttctttgtaacgtttacagtttcaattgtttagtttgatcaaataattaacttgtgaattttatggatgcaatatcttgaaaactaggaaatcatatctgatcatcctgctataaaaaaaataatacatgcattttaatattcatggtttcacatgaatacttcggtcatccatttttcaattacacgagtgtaaatctgtaatatcaatattcatttataattataacgggttgtgatttgtgaaattgtgggtatagataaaacttcaaaacctattgaaatgaatatctatatacttggaatagtagtagacacattttgtaatgagtaacttaagcacaccggttctcactcacactcgtctaatggagaaaaatggtatattatatacctcatataggaacatgatcatatgatttaggagtcataagcatgagattaacaagatattttggtccacattaggaatctactaaaggaactattttcttataacctaaaaatcttggtttggtaaaaagaacaaccttagattatttggtcttttatcgattcatgtaattgtgtatcaaatgattaaaatctaatgcatcctactcaaacacgtcatttaagaaaccctatatagtacaaacacgatccaatctccaaattaacccatagtatatcatagacgagcataatatttttggtcaaatataaaattagatgcactagttccctttatttaggcagatggactttcttctaatcgaaaataattgttctcaatgagccgtcaaactttgtgaaatatggatataaattcatgacatctacataatttttggtttaacatgtgaaattgaacttaggatctatttcattcgaattcttaccatatactaaccaaatataaataatgtttactgctaaatactatttatataagtttgttcttcactaaagaaatttgttgattagtttgtttttctaattgagaatctcttatttcaggaccgataaaaaggaagtgatttccggttttcgattcaattatttcggtttaagtcggtttacaaatcatccaccctgtaaatcacggagcaacatccataatccatacagatcaaaccacgtggacatgttacagtgttccttatcacagaagatgagtactcctgtcatctttccccttttcactttaacataacactctgtacactagtctgatcaaaaaacctcaaaacacagcaaccgccatttctttccaaattcccccaattcccattccaactttatcttctgaagtagaagaagaagccatagaaatgctttgaagtttctgtaagtgttcttactcactctaaaaacttcaattttggtctttgtgcttttttctaacagatcggtgaaattttctgaatctgctttttgtttttccaggtaaagagaaagatctacaattgttttgaat

SEQ ID NO: 8996 - DNA, 3000 bp, Unknown
  misc_feature (1)..( 3000): cDNA_ID_3044221_gDNA_ID_1971953_Annot_ID_177411 3000 nt of promoter + ATG
tgatttagcattattgactagctaggatcgggaagctagtaaatcaaacccaattaacagaaactctttatcttgttaaattttatttttctaaacctggaatctaatcagtcagtggttactggatcagtgattgtctagtaatacattcatttaagataggctgttcatatatagtaacttctaaaaaatcgccattttacaaaagaaagcttaatatttgatgggagacgtcggtagtatagtttattttttaaaaaattacgatgcgtaaacaaaaaattctgatacacctgttttctcttataattttttagtagaaaaaaagacgaagtaagcaagcgaccaacaacctctattattcgtgggaagggatatgtcccccaaacatgtgctatattcatgaattaatacttaacaattagactagtcttacttttattcaatatttattcgaaaatatacttacgaaaataaaatactttaacttatagtgaattgaagagttagtttaatttgatattaatggggtcgagttgcagacgtacatgcaaaaaggtgcctctaaatcgacctggaaaatcatgtcagtttgtccttcagtgcctcttttaattatgcaaaactaatatttgacaatgacatatcttagacataattaacatggatcactacaaattttattttattttatatcacttattttgaatcgattaagtgtgaggagaggagtgaaacacgtcaaatataacgaatcttatatctttgttttttttcttttattcttacaattatcttggaatttggaaaccctagttgtttcggctatttgttatactattgttataacagtcacaagacttgacctcaacgaaaacttttacaaaacgtgaattggaaatttttacaaaatatgctcttaatcgttaatgcttcccaattaggtgagttaaattgtgagaggaaccatttcttagaggaaatggttcatgaaaacaaatatgaaatagtatcactagtcttagttttgcgagaaaattaggaaaaatagaaacgtgtaagcaccaatgatattcctgaaagcacgtgacagatatttcatgatcctataattaacaagtgataaagatattaaataaaattaacgatacttgagaaattcgtcaaataaaatagaagaggaccactcacgtaaccatttgcacgtcccattgatttttgtggtagacttggtatgttatattacttatattcacagaattatatacgaaactcacgacttaagatgcacggtaataactacagatggaaatttacccatcaaacaagaaaacaacatttactcaagcatctagctagaccaaaatgtttgtttacttgttgacttgcgatccatagatatattagttagaactttttcttctacaattgatcaaatgtttcacactgttctcaatttctcatctagattcatgacttatatgtttggtcaaatatcacagcttgatgagcattaaatagcgtcgaagtataggatggttacgttgttcaatattgtaaaggaaaaaaagagaaagagtgccaaaaggtcaagtcgatttcacaaataaatcttgaagtctttatccctctcgattataaaatgattaggaaaagaaaaagagagaataaaatgtagataaagagaaagagaaagagagagaggaacataagggatggtatgaagtagaagtgaagatgcatgcgatggtgtgtcggaaaggcaaagcacatgctacacaacttgagcttctcacttgcgtcagggataagtatcctctgtaccttcttacttttgcgtaatatgtaccacctcacttctcaaccgtttgatctttaatccttcattatttcttcattaccttctctttttgtttttgttttcgttttcaatttctcatagattcatttacaaactaaatatcataggaaggtgttatctctagttaatttcttatcctactttaacaaaatttaattgtcaaaagattatttttacgtttatagacaaaagatactgacacatcaattccacgaaccaaatggttgagaaaaacaaaacgactatctttgtcttgcaaataaattaatggcagttagtaagattctcagctgaaaattcatacaagagtaaatgatcaaataaccatttatgagagaaatttaatccttcagaaaccaatgaggatctgatcaagtaattgcaaaccacatgagtccatgataaaggattgtttgacttacgcaatccacatatttatggctgcttgatatgtaaggtttatctgctttgacagtctatagaatcttgctaatcaatacgtcatatccggtgaatactgaaacttttttaattaagaaaacacaaatcatcttttctccggaggatttcgaatttagttccggcaatgctgaaataacatatgttgaacttataacattccaagacatcaaattttactaatatataaataattacatattcttcttctacatgatcaaaaccttttcaactttaattaaagggttacgtcgcggcgttttgtgtggcttactctttttttacactataactatagaacactcgtggatccaatgccgtttaggacaagattttatcagacgagaaaaaaaaaaacaataccacatttttaaatatatatggattatggactgcaacaacaatatagaaaagaagagaaaaaaataaaaataatgattgaaaggaaatatcatcacgcaaaaccttaaaagtactatcggtatcgtgtcgtcctctcctcatcaaatagttcccacagttttcacatcaatttaaccattttcaatttttttcactctctgtctctctcctttgtataatactatattagtaccattacccatctctctttcaccaccaaaccaacacctgcaaatcctctctctctctctcactccaagaaaccaaaaaaaaagatg

SEQ ID NO: 8997 - DNA, 3000 bp, Unknown
  misc_feature (1)..( 3000): cDNA_ID_3044226_gDNA_ID_1971953_Annot_ID_177408 3000 nt of promoter + ATG
tccttggattatgcacaccaatctcccctagtatctctttcaatgttttgacaggtttatctctgtttgtgcaaatcagataactcctaaggtgctgcaagtgtgggctaggatactgtgtgcagttcccaattctcgtctagtggtaaaatgcaaacctttctgctgcgatagcattaggcagaggtttctcaccacgctggagcagcttgggttagaatcaaagcgtgttgatctcttgcctttgattcttttcaatcacgaccatatgcaagcctattccttgatggatattaggtaagatttgacacatagtgctctgtaaaacaccgaggcttatagattcacatatttaatttacatttattgcagtttggacacattcccttatgctggaactaccactacctgtgagtctctctacatgggagttccatgtgttacaatggctggctcagtacatgctcataatgttggtgtcagtcttctcactaaagttggtaagctcttagcaaaatttttttttttttttttgcaaaaattgttgttagtcggacatcttttagctaattcagccatttcttgattcaggattaggacacctggttgccaaaaatgaggatgagtatgttcagctatctgttgatctagcctctgatgtcacagctctttctaaattgagaatgagtctccgggatctaatggctggatctcctgtttgtaatggtccttcctttgctgttggtcttgaatccgcatatcggaatatgtggaaaaagtactgcaaaggtgaagtgccgtccttaaggcgaatggaaatgctgcaaaaagaggtccatgatgatcccttaatctcaaaagacttgggaccatcaagagtcagcgttactggagaagccactccgtctctcaaggccaatggttctgctcctgtaccttcctctttaccaacccaatccccgcagctctcaaagagaatggactccactagctagataaccagcaaatcgagctgctgcgaaatgccggcagagagtcttgacccatctggaaaaggtgtgaaagaaagagtcgatgagcttttcctgctatttacttccaagacaataggaactagactttagattactgcttgtgtagtaaaaagaatagtaaaaccagctctttcttttgttgtatctctttctactcttagtttagctttacatgattcttgggaagtcgttaggtggtagtggatttggagtttttcttctcatttgagagatcaagttgttgtgtatcgattagggttttaaggctttttaggatgttttcatgtgttggattttgactcatatgatagtaaatatagttatagaaagcttttcggtgcctttacctatttcataatataattatctaaaactcctgcttaagcttaatcccataggtgagacccaatgaaagacttttgacttgtatgattatgttgccaactccatatctctctttaattaattaatatggagagagtaaaaaggcaagcaactaactactcttcaattcaacacttcttctgctccattgcttccaccagaaccctaaagaccttataaaacccaatcccaaatccctttgctcattcaccaccaaagcatccaactttctttgcttcctctttcaaagcaacacaaaatattaaatctcaagaaacaaagtaaagaaaaatgaagaacgaatctaccttcattgatgtccctgcagaatccagctcagccatgaaaggcaaagctcctctaatcggtgtagcaagagaccacactactagtggctcaggtggatacaacagaggactcgccatctttgacttcctcctccgtttagctgccattgttgcagctttagctgctgccgccacgatgggaacaagcgacgagactcttcccttcttcacacagttcttacagttcgaagctagctacgacgatctaccaactttccagtacgactcatagatgcttgattgatcaaacagatgcttgtgtttttcttgagaaacacgtcacctaattaggtcatattttttcttcaggttctttgtgattgccatggcccttgtaggaggatatctcgttctgtctcttccaatctccgtcgtcacaatccttcgccctctcgccaccgccccaagactcctcttgctcgttcttgacactgtatacactcaaaactcttcaaattatattgctttaaaataaaactttagtatcaagtaaaatactaagaattgtgttgggaacagggggtcctggcgttgaacacggcggctgcatcatcggcggcagcaatatcatatctagcacacagtggtaaccagaacacgaactggctccccatttgccaacagtttggagacttctgtcaaaaatccagcggagctgttgtctctgcctttgtctccgtcgtattcttcaccatcctcgttgtcatctccggcgtcgctctgaaaagacactaatcaaaaccttatatgtgtgttcatcattattgtaaaatttatgtcaccattgtgtaattattactcatccatggccttgtgaattgtgttgtattaatctttttaaaaaggaaaatgaaagtgtgattgtagctctgcttttctggaaaaaaattgaaatgagtttctcaattttttgtccaccaaagcctatgagattataaatgtctcctatatttgtctctacgaaaatacccggtaatgataatgttacagtgagtagcagagaaatatcttacgtggtgttatcttagtggacgttcacggagttgtcgttggtcataatgtttctgtcttcctttttttggtttaaggataaacgagccttcctggtgccacgtcaccttttcgtcttctgctacttcgtcttcttcactaaatgattcagtattttctcctcaatcttctccattttctcaccaaaccaaaatcgtgaaagaatattttcccgcttcatgtag

SEQ ID NO: 8998 - DNA, 3000 bp, Unknown
  misc_feature (1)..( 3000): cDNA_ID_1989739_gDNA_ID_1971953_Annot_ID_177407 3000 nt of promoter + ATG
ataactatggctatcgatgcttatgaggaatgccttaagatagatccagattctcgcaatgctggccaggtatctatactttagcgtggtcttcttgttatgaggttgaaagatatatgtgtttaaaaccttcttgtccccttttgtagaaccgattgcttgccatgaattacataaatgaaggactcgatgacaaactatttgaggctcacaggtaagcacatatattattaatgtagatttgtattatgttgcttttatgggtcttacagtgaaaaaatcttctgaacacagagactggggttggcgcttcacaagattacaccctcaatacacttcatgggataatctgaaagatccagagcgacctatcaccattggatatatctcaccagatttcttcactcattcagtatcttatttcattgaagctccccttacgcatcatgattatacaaagtacaaagtggtggtttattcagcggtagttaaggtaggatttttacctatataacttatatagatacattttccctctaagcaattcatttcctggttctcgtggcatttttcccttttgagcaatcattggtctctcatggctttgcaggcagatgcaaaaacatacaggtttagggataaagtgttgaagaaaggtggagtttggaaggatatatacgggatagatgagaaaaagatagcaagtatggtcagagaggacaaaatcgacattttggtagaactcactggtcatacggcaaacaacaagttgggaacaatggcctgcagaccagcaccggttcaggtgagaggatatattaaacctatctcattttgttgtttcgggttttgcctttgactttccatttcaagtgtacttatattggctaagataccaggttacttggatcggctatccaaatactacgggtttgcccactgttgattacagaattacagattcgttggctgatccaccagataccaaacaaaagtacgttttggttcaagatgcaattttgggtttcggaagtgctccaaataaaaatcttaatttttatttatttattttgtgatatttgattgcaggcaggtcgaggagctggttaggcttccggactgttttctttgttatacaccttccccagaggctggtcctgtttgtccaacacctgcgctttctaatggctttgtcacatttggtagtttcaacaacctcgcaaaggttaaaaaatttgtgtccttggattatgcacaccaatctcccctagtatctctttcaatgttttgacaggtttatctctgtttgtgcaaatcagataactcctaaggtgctgcaagtgtgggctaggatactgtgtgcagttcccaattctcgtctagtggtaaaatgcaaacctttctgctgcgatagcattaggcagaggtttctcaccacgctggagcagcttgggttagaatcaaagcgtgttgatctcttgcctttgattcttttcaatcacgaccatatgcaagcctattccttgatggatattaggtaagatttgacacatagtgctctgtaaaacaccgaggcttatagattcacatatttaatttacatttattgcagtttggacacattcccttatgctggaactaccactacctgtgagtctctctacatgggagttccatgtgttacaatggctggctcagtacatgctcataatgttggtgtcagtcttctcactaaagttggtaagctcttagcaaaatttttttttttttttttgcaaaaattgttgttagtcggacatcttttagctaattcagccatttcttgattcaggattaggacacctggttgccaaaaatgaggatgagtatgttcagctatctgttgatctagcctctgatgtcacagctctttctaaattgagaatgagtctccgggatctaatggctggatctcctgtttgtaatggtccttcctttgctgttggtcttgaatccgcatatcggaatatgtggaaaaagtactgcaaaggtgaagtgccgtccttaaggcgaatggaaatgctgcaaaaagaggtccatgatgatcccttaatctcaaaagacttgggaccatcaagagtcagcgttactggagaagccactccgtctctcaaggccaatggttctgctcctgtaccttcctctttaccaacccaatccccgcagctctcaaagagaatggactccactagctagataaccagcaaatcgagctgctgcgaaatgccggcagagagtcttgacccatctggaaaaggtgtgaaagaaagagtcgatgagcttttcctgctatttacttccaagacaataggaactagactttagattactgcttgtgtagtaaaaagaatagtaaaaccagctctttcttttgttgtatctctttctactcttagtttagctttacatgattcttgggaagtcgttaggtggtagtggatttggagtttttcttctcatttgagagatcaagttgttgtgtatcgattagggttttaaggctttttaggatgttttcatgtgttggattttgactcatatgatagtaaatatagttatagaaagcttttcggtgcctttacctatttcataatataattatctaaaactcctgcttaagcttaatcccataggtgagacccaatgaaagacttttgacttgtatgattatgttgccaactccatatctctctttaattaattaatatggagagagtaaaaaggcaagcaactaactactcttcaattcaacacttcttctgctccattgcttccaccagaaccctaaagaccttataaaacccaatcccaaatccctttgctcattcaccaccaaagcatccaactttctttgcttcctctttcaaagcaacacaaaatattaaatctcaagaaacaaagtaaagaaaaatgaagaacgaatctaccttcattgatgtccctgcagaatccagctcagcc

SEQ ID NO: 8999 - DNA, 3000 bp, Unknown
  misc_feature (1)..( 3000): cDNA_ID_3044230_gDNA_ID_1971953_Annot_ID_177406 3000 nt of promoter + ATG
ctccggtcaagaacttcgctgcgtctatccacctgcgttttatggacgagccaatttggtaatcgatctttcgtttaactcaaagaagcaataaagtctctagtaactaaccctccaccgtcccgactaataaggaattgggttgagcctcctccaaagaacatacaaggcataggcaccactacatacatgagtgctgatagcattggccaccagttaccatatatcgcgcatgcctgaccattatgaacaaatagttatcactatatctcccagatgactataacacgtgttactcattgcatggtataaccaggtataccaaaggaaatcacaaaatatgggaaacgtatcagatttgtaaatcagatgatcctttcttcttctaatcgaagtgcaaaaaaaaaaaaaaactatacctatacaaggacctgatataagctgaggagagaagatgcttgagtttatagaagttgttcagaaagtctaagtcaattaacaagttagacattgaggtcggctaaggaccccagcttaccatatgctccggtcaaatagtgttgtaaggataagaattctaagtgtaattttggtttttgggatccagagatcgctagtcaacatactacaagagagtaaagctcaaaacttcaaatatgaaagaaggtttgaatgtaacaaactttacttcacagagtatctctcccagtaaaacgggccaaaagactcacaactctgtttgctacatcaacaagggtacaaaaggagaccagtatactcagctcacaacctaacagcagaactagctaaccatctcttgcaggatttaaagctactaagtcatgatcttatgatcaagcttcaagggttataagcagatagctatattcagaaacgtaccaggatctgtaggaggatactagatgaaaacatgaaagcaagtccagcaagtctgtgcaatcaagaaaaataaaatctgtaagatcacgacacacgagaatacactggcagatgtaacaacaagggtaattaaagagcatcaagtcttagaacttacactgtaccaagaaagcaatttgagcattccagaagaaatcagcatcggaaaaaatttagaaaagagcaaacaatgagtgagtttgaacaatgcaaaacccagaaaccctagctcacaaaattaaacaattcacgaagcacaaaataactataatctgagtaaatcaataccaatctctaatacgtatggaatatatgaacatagagcaagggagaaaagtaaaaggggaaaatcgacttgaatctgattcgattccgtcgggaaatgatacagttggaagataggtgattgattaccttcgatggtcatcgccatgtcggcgaatgaaaatgttctgattaccggagatcgagtcttgaatgatcgccggtgacgataaaagagaaggtgatgatttcgttgttccccttagagagatacagaaggagagagcccagagaggagtcgcgatttgagagcaaaatgaaaattagtgaccggtcaaaattggttttctcaccgttcatcgatttcatctttttggtttggttggtttattttggttataattggtttccaggattgtggttttgataatacagctagtagtcgattttaaaatatcacaaactaaatgacatgaaaaaaaaattacgatcaaaatttgggttgcaaggaccacataaaactcattcctaaatcatacgtaataaaaatgattttataactgaaatttttaaccaaagttcataccaatcatcaaaatatgtgaaatgctaaatatttttttcttttcattttttgttatttaaatgcaatcaactatgattgaaactgcatcaacgaaaaagtattattaaactattaagcaaccataagttgagttgattcgtttccataattttagttagagtacgtaaatctccatcataatacactatctatgctatcattgtttgttttttttttcttttttttgctaagaatgtaaatatcattagaaatgaaatgtttggtattacaagagacgtattacctaaattaaattaaccttggcaaaaagaaataaaaacaaggttaagataaagagtagttaatcaggagagattaatggatccaaagtagcataagttgtttccaatgctttctatgtcttcgagaagtaatggtattgcgcacctcacgatctatgctatcatggttggtgcgtttatgacatgctgctgctggtgacgattcaaaagtgtttatcagttgttcattatgatgccattgtgatgtaccattactaatttcttacttaaataaggtgttgttttttgttttgctccaaataataaggtgttgtttaaaaggggctctttcgttttggagtaaaagtctctctgagtagctgtatattatttaagtagcatagtccaattatttgacaatgaaaaaaagtgtatagtccaatgaataccaaatgaattgacgtcaccactagttgagacctgagacaagcaagtgatcgttaaatcaaggagaacgcaagtggacgaggccgacatgatcctaactattggactcccacttgtgaaacttacttgatccatttcccacttcataatttcgtaaaaaaattaagacaatgagaatgaatttatttatttatttttcggtagaacaatgatttttattttgtccaaataaaacaatcgtgaaaaattatgttttggacattatcaactttgtgagtaaaacaaattttgtagtttcttttaaccaatattttcgaagtcaacttttttctacgtgtgagtgtattgagtaaatgatagatatgtcaataataacataactcatcaatcaatctggcttcaatagaactagagaagttataacgtttttttttttttagacaagagggttttataactctagactagtttcatagtccatgaaaaaaacatcaaatctcctaa

SEQ ID NO: 9000 - DNA, 3000 bp, Unknown; identical to SEQ ID NO: 8989
  misc_feature (1)..( 3000): cDNA_ID_1008840_gDNA_ID_1971953_Annot_ID_177402 3000 nt of promoter + ATG

SEQ ID NO: 9001 - DNA, 3000 bp, Unknown; identical to SEQ ID NO: 8988
  misc_feature (1)..( 3000): cDNA_ID_1989331_gDNA_ID_1971953_Annot_ID_177400 3000 nt of promoter + ATG

SEQ ID NO: 9002 - DNA, 3000 bp, Unknown
  misc_feature (1)..( 3000): cDNA_ID_1375398_gDNA_ID_1971953_Annot_ID_177399 3000 nt of promoter + ATG
taaagaagaattaagttttctttcaaataaagttttactaggccataacctgagagacttgtgtcatatacaaggggcaggttcaggttactaagatgatcaatcttcaattagcaaaatcaaataggaaactccaatggctaatgatggaaaactagatggtaagtaagtaagaattaccatacatctagcaatggtggtccgaaccaaggttcgagcaagcaaagcattcttcttaagctcatcgcctcgcatctgaagaactttctctttctcggttggtgacagaagttgagagtagtgttttagaagagatgtactcttcacttcatctggtcgaataaaccatagatgagtctccctacatgtcaaaagataacacaatgtagaagataataaacagataagaatgttgaagatgagtttcaacacaatttggatcattgcacaacattaggaacgtacatccgagatggaagttgcagaggaaccagtgaaggcaattcgatcgataagcttcgctgcaattgagacatgactctgattctcatcagctccaacaaattcttattctattggaatcccaaaatcgcaacattcaaacaagaatcagtaatccaatcagtgacaagacaaatttagagaatcgatctagaattctaagaacaagtaatcaactggacttggaatcaattattcagatgaattacccaaacggaaattaatactccggctaaacgacggcgaggtcccttgccggtgacggaggaaagatactctaatcgaacggagatggtaatactttctgtttgagaaaaaagtactaacagtgtcgaaccaaatcgaattttattttgaaccaaacggttttacttatccttaaaccaaactaacccgtaaatactttggttcccagttccgttcgctggataccgggaattacatttaaccggatattagaattacaacattttttgttttgttttgattaataacagagttctacacttctacttctaacttgtgaaccttaaagttccatagttaaggaaaatctcatgatatacaagattagggcaacatttttttgttttgtctttaacttatctaataaaaacaaaattttagtaaattcgaaattcagtttggcctgtaggagaggtccgaccacccatccaatatctccggtttatgaaacatggactagattataaaagaatcttttatcgtacgaggaaatttgaacgtatgattcatcatgcatgctttgccgattttctaggataaaaggtggcgtaccatcaattggatggggccgccgcagaaattagttactagtactaccaaagaaataaataaatttaaatgagactttcgtgttccacatggtctctcatccctctctactcggaaatggaactgttgatacggacaacggagtttttctcgaccgcaaaacataaattgtcgagtactatttgtaatttgagatggtttacgtaaattgaaatagtcctttctgatcataaatggcctgttttctccactcttttaaatgagtttggattgttcatagacagattttctcatttttttcgatatatgtaaatctccgattattaaattgtaggccggattgttagataaagcttctacaactatagatttgttgagttgtcatacgtaaacagttttgcttcaaattcactaacctaggaccctccttttgatattaatgtgtggttgttagaaaaacaatttttcgtgttccatataattttagaattacgtggcatggaacatttacatcggggataaattaagcgtcgtccacagattttacgacaatgctccatataagaacatgcattacaaaaaaaaagggaaaaaatgcatgttcatgtatggtcgtctgtctgtttataattgaaaaggactttgatgttgttaatgttattaatggagattactttgaatctcacacggtttgattaaacgaatcttcgtcagcacacactctgttcacacttattatttgagactagcagaagaaactcactagtttatcatagattctgaccttcgcacttgttagtcttttaataacttgaagatactcgccattgtatatcacaactaggcgatttctcgttcatttaaaatgttaatattcgtgtttaatgtatatttaattgaagtaatgattttacatgtacaaatgtatcctagtattttgaatcttctagtaccaagtggttttctcttcgattacctttttgtcttttttcattacaacatgaacaacaccagcaataattaaaatatcgtgctttttgtttttgtcattttttggggtcatacatatataatatatacacgtaagttcaaacatttgtttgttgttctttttgtttgtcttggattcgacatccttagaaataaaaaccacatttttaataacgaaagttcattaaaagtatttcgaatattttaggcatgttggtttgattagagtttgtattccttattcaaactaatgtcgttgttttttactgtttagatcgaaagaaaagttttttttcgtaattttcgtttatttattttgtgaaatcactagcaaagaaaaacgtacgtgactatcacatcaaaccactataacatctcattttatctatcgcttaattcgttttttaagatcagatctgagatcattgtgcatttcaattgtaaaaccgagcctaaagtcaataatataacattatttcagaaccaataatttttaacagacgttgtttgtttttgggtctcaagctgaacgactttgcaactagtacacttggcatatgtttcatgttttttttataaataatgtgctaccttgatgaagttccctctctctataaattgaagtgtgtgagatgcatcatccatacacaacatcttccatcttccgataattctcctttagtcttataatcactaataagtacgataattgaa

SEQ ID NO: 9003 - DNA, 3000 bp, Unknown
  misc_feature (1)..( 3000): cDNA_ID_1989334_gDNA_ID_1971953_Annot_ID_177396 3000 nt of promoter + ATG
atactgaaaaatccattttattcagtaatttcttcatcacatctttttccttcttgcaggagctcctatgagggtgattgtccgaaaaaccatcccgtttgtagaagatgaacttatatctgaaagcaaacttctttagttagtgtagccttaaaccttcagatttctctgtaatcattctgttttgagtacatcctctctgtagtatacattctgtgcaagcgaaaaataaaagtagcctattattggaccatcatgtttgtgagacacttggaagatcaccagtaatctttgcacgagcagaccccgtctttgaaatagtggaaccgagatgcatcccttacaacaaactggcgatctacaatcttgctaacctgcttgaggaacacatgacaatcttcacaaaccctcaaattctttatcacaagaatttctgtgcctggaatactgttgagaatcccaaaagctattgctaacctctcgctatgctcacgggtagtgctcgaaacctcttcgcctctatcacagtccatgtttcccgcaagctccatcacagaagtctctaactcatccaacattctatggacttcctctgtttgctcatgacttctatcgccagctaaaaacaagtgaactcttcccttgtgttccacataactatacccaggctttttcctgaatgctctctctctcatcattacccggattctccagattccttcttggtttttcgagtctgaatatatatttgacatcaatacatagtagccaatgttattgggttcaaactcaatcacctttgcaaaagctaactctgccatatccacattcttatggattttacaagcacccaatagagcaccccaaacagcaccgtccggttcaacaggcattgactctataaactccatggcttcatctagccgaccagctcttccgagtagatcaactaaacaagagtagtgttcaggaccaggctccagcttatactctctcttcatcgctctaaataactctaaacctttatccgttagccctgaatggctgcaagcagataaaaccattacaaacaccgccccatctggtcttatgcctctttttatcatatcatcaaaaagcataagcccaatctctcccattccatgcatcccatagcaaccaatcatggcggtccatgaaactaagctttttacaggcatgatgtcgaaaacagcacgtgcctttgccaagttaccgcatctagcatacatgctaatcgatgcattgcttacaaaaacatttggtacaaaaccattggattctactaacttccctacttcgtgaccaatcttcttagctccaagatgggcacaagaagacagaacactaaccaatgtaaaaggatcaggacaaacacccgatgatttcatctgctcataaagttccagaacatcgtaagctagcccgttctgtgaatatccagaaatcacagcattccaagtaatcaaacccttcacaggcatctcatcaaacaacctcctaccagcttctaccgacccgcatttcatgtacattgtgatgaaactattcaaaacagctacttcagaatccagtcctcctttaacacattgaccgtgaagagacctcccaagccagaggtattcaggaaccgtgcatagcgggacaagcccaagcattgtaactgaatccacagacacaccagtttccttcattctacgaaacatatacgcagcatcagtgaccttcgagtttgctgtgtacccagatatcaaagcattgtaacaaacactaagctgacttgactgaggattttcttcgaacactttacgtgcatctgcaaccaaaccgcatttacaatacattgagatcagagccgttagtacaaacggctcagtctcgcaaccgcctttggtcacgtggcaatgtagctgttggccggagacagggagcgaaagggaagcacaagacttgagaatgaaagggaaagagaacgcgtcgggagaagaaccagaacggagcattgaccggtaaagagatatagattcagaaaacaatgactgatatgcgagctctctcaaacgtacgttccatggcgtcgaagccaccgcagcgacggcggagttccgtacaaagcttgtaacgacgatcatggtctcccgcgctgattatgacttgtttgggttaaaacgcatagttctaatttttatgagaataaggcccaaatagtatgggcctgtagcccaaagtaatccgaaaatttgggggaatagagttatacgtaaaaccaaacgggtattaatctgtgatagaccatttcttcttctcagatactttcctccatctggaaatcgttgccgccgctatttcctcaataaaccagattaaaccttctcttcttcatcatctttctcaaccgccgtaggttggagggaagctcgcgcggcaagtaatagccggagcagcttccgaccaacggatcggggttactaggagctcagtttctggtaagagaatcggtttaatcactgttgttttattacttatggtagctgagtggttttcgaatgttatctgattgattcgtgaaatatcttaagattgaataagatcatcttttgtttgtgcataaggggaggataagctgatagtagaaaatctagattagacaattgatggtactgagtaataactaataactaaccttaggagtatgattggtttctagggttcttatgagatgtattttgcgatcatgttcctttctttttcgtcatttttatggagtttcatactcggagttgtattagtagctttgatcagtgtcttgcgaaaacaatgtgtttttaaaccaggccttgtgaaaccattagcctttgtgtaacatctggagtttattgtgctgttctctcgtttacttggttaatgcttaatcattgcgacagaaatcagggtggatattcacttggagtaaggtgcagctcgtataaactgttcatcatg

SEQ ID NO: 9004 - DNA, 3000 bp, Unknown; identical to SEQ ID NO: 8984
  misc_feature (1)..( 3000): cDNA_ID_1989336_gDNA_ID_1971953_Annot_ID_177393 3000 nt of promoter + ATG

SEQ ID NO: 9005 - DNA, 3000 bp, Unknown; identical to SEQ ID NO: 8983
  misc_feature (1)..( 3000): cDNA_ID_1989337_gDNA_ID_1971953_Annot_ID_177392 3000 nt of promoter + ATG

SEQ ID NO: 9006 - DNA, 3000 bp, Unknown; identical to SEQ ID NO: 8982
  misc_feature (1)..( 3000): cDNA_ID_3610002_gDNA_ID_1971953_Annot_ID_177389 3000 nt of promoter + ATG

SEQ ID NO: 9007 - DNA, 3000 bp, Unknown
  misc_feature (1)..( 3000): cDNA_ID_3044247_gDNA_ID_1971953_Annot_ID_177386 3000 nt of promoter + ATG
atcctggaataataatttgttgagaatttaattacaaagtaaacgatgacttacatataaaattcgtaaagtcttggtcaatcttaattataaagaacaagttggtcattgcttattataaaaaaaaaatgaaaatgcttgttgtcaagtaacattaactccattttttcttgcatttactcaacttcaccaaatcgtagagaagttggagaaataaatgatcagaaacacacatcaatcgcaaccaagcggtcaataaaatactaaatagacaaagaagaagtagctccagctcctccgccttggattatttttacaccggagaagcaaaaaagaaaagaagatggacatgaaagaagtgcctccacctcctccaccttctggattcaaacgatataagaaaaaaagaagcaaaaagatggacaacaaagaagtgcctccacctcctcctcctcctcctccacctgttctgcctcatatccgatcaagaaaaaagatggacatcaaagaagtgcatctacctcttccacgtcactatcctcctcctcctccgcctcttccgcctcctccgccttatggattcagacgacatcataaccaaagcggcaacgagcttgagaaacgaatagcacgtctaggctttccaactcttcgcccttttcaatccaaacgatatgataaccaaacccttccaaacccaagatgtcctctgtctaatccaacctacccccacacactcaatcctaagttcagcgtaaacactacaaatggttgttttacatgcggtgaaaacacatccccctggattgaccaccataatgtccatttcttctgcaagaggtgccatgtcgagttccactttggttgccacacgtaccctagtgagttaacacatccttatcacctccaacaccctcttattttcacatttcataactatcaaactggggtcatatcagacgccaggatagatgaatccttttgcactacagttttgtctggctccgatcctaagaagtctggctctatagataaatgttcatggtgtggaaaaaatatccaagggaattggttctatcgttgttctatatgcaaattttgtttggatctctcttgctcccaaactgatccacctctgctcgttgcaaacccaaagagtcatcaccattcactcgtattctatgctcgaccactcttgactccgtgtgatgcttgtgggtcggtcaatgtgttggatccaagttatgcttgctttcaatgtaactacatggtccatcaaagttgcatcgacttaccacgagtcataaagatcactcgtcaccagcatcgtctttttcatactccttacctccattccacgattccaccatgtcggatctgctacaaaccagttgacatcaagtacggtcagtattcttgcaaacacgaggatttctcttacgttgtccattccaaatgtgcaacacatgagaatgtatgggatgggaaagaactcgaagaggaaccagaagaacccgacaacattgaagatatcgtcccatttgagaaggttagtaatgatatgatcaagcatttctctcatgaacatcatcttctgaagctagaaaagtatgaccgtgttcgagatgcagagaagcaatgccaagcatgcatccttcctatcaactctcacgacttcttctataactgcatggaatgtgattttttcctccacgaggtatgtgctggtctacttagaaaattggatcatgcgttgcacgttcaccctcttgtcctagacccttctcctcaacgacactataatcaaaatggttgtttgggttgttcgagaaaatctactggtttcaggtacaagtgctccatagagaaatgtgtgcttctcgataacgttcagatagatgttagatgtatcttagttccagattttttcacccatacagctcatgaacatcccctatttatatccacatccgagaaagggaaaagtaagatttgttgcgaggcttgcaaggagatatgtcttgtgtcctacctacagtgttctgaatgcaaatttgctatgtgttatcagtgcgctaccattccaaacgaagtctactacaaatacgacaagcattttctctccctttgctacggagaagtagtgtttggtacgtattggtgtgaagtatgtgagaaagaggtagatccaagggattggttttacgcatgcaacaaatgttgtatcactgtccatcttcaatgtgtattcggatcctctggttatgtgaagcctggtttcacattatatcattacttcacaaaaatggaagttttaagcaacagtaagagcactcgaccgttttgcactgaatgtggtcaacgttgtccaagttccgtctactacaaacttggttggttgggaactagtactttttgttcgttgaattgcttaacgtcaaaagaaaaattgatggtgttgtcaacatgatgagtttttttttaatgtgttattggaattttttttttttaataatgtttttcagagatttgtgtagttattatttagatccagagagtttttcagagattattggattttaatgtgttattggattttttgtttttaatgatgtgcaacaaagagagttttttcttggacatatataattaacattcaatggacattaacgtctgggtagtgtagtcggttatcacgctagtctcacacactagaggtccccggttcgaacccgggctcagacatttttttctccttcatatttacgtttctgccacgtcatcatccgctacacggacgctaggttctgattcactttttctttcgtcttgggaaaaaagcaaacacaaaacctgagaacaaaaacatccgcagaatcgatatccccagaatcactactctacaaattcgaatccaaagttcaaaccctattcttcgattttcgtagagcagattattgtttccctttaggtgtctccatagtttctgaagagagaagg

SEQ ID NO: 9008 - DNA, 3000 bp, Unknown
  misc_feature (1)..( 3000): cDNA_ID_3044251_gDNA_ID_1971953_Annot_ID_177382 3000 nt of promoter + ATG
aagacactcatgcagagcacgtttatctccgatcaaaccagggttggacttgcataaatgttttcatatataacacaccaaaattttatgatatatcattgcatattatatttatgataaaaatcaacattatattatactacttttatgtaccactctcatataatagtataaaataatatgatatttaataataaataaaaattacaactaaatatttgttttttccggcattacagctaaatatatttaaatttttcaaagtataattaatttgaaaattttctatacaagaatttcatttttaattagggctaaacccttaccagaggtagcccatataaatcggaatgggtgaatgcaaacttaagccgattatctttatttttttttattttttttatttttttctcaatgctggaggatttaatatcatcatataaaacattcttttagaaagaaaaaaaaaatcatcagaaggtttaactatcatcatcggacatgagcatgaggcataatcttcagcgacacgcaaagcgaatcctcgcttacagtaacaggcctcgatttttctgctcctacaccaacgtaacactatcgtctccggcgacgaaccaaactctgcagagtcggatcgaagcggcttcacatcagaaagcagaaatcacaacggtgcttgagcaatggctacagcaacaacaacaacaggggaagcagttaaacccttcgttattaagaggaatcgtcgagaagctcagaagttctaaccgacctcgccaagccctagaggtatcagactggatggtcgaacaaaagatgtacaatctcccggaagacttctcagctagatttcatctgactgagaaggttttaaatttggaagaagcagagaagttctttgagagcatcccggagaatatgagattcgagtcaatgtacaattctctattaagaagttacgcaagacaatccggagaaaaagctctgaagaaagccgaatctgttttcaagaagatgaagaagctagggttgctcttgagaccttcaccgtacaactcgatgacatcactctatagctctctcggaaacagagataaagtcgatgagattcttcgagagatgaaggagaacaacgttgagctcgataatgtcaccgtgaacaacgctttgcgagtatacgctgctgtatctgatgtagcgacaatggacaagtttctagctgataggaaagagattacaaggcttgatgggctcacaatgcttgcgatggcaaaggcttatgtgagagacggttctaaacaaaaggctaggaggatgcttcatgaaacagaggaatgattgggtcatgactataaggaactcatgagcctatatggtgaagcaggagagatagaagatgttcaccgtgtatgggacaagtacaaggcgacaagacagaaggataatgaagaatttcgaactttgattggttctctcttgaagcttggtgataccaaaggagcagagaagatatactacaatgagtgggagtgctccggtcttgagtttgataaccgaatccccgatatgttggtgtcgggttatcgcgaaaagggaatggtgatgaaggcagataaactggtgaacaagactttgtggatcagaggattggctacaccaatcactctgttgctggaagaaatggataaaaaggggaataaagtgagtccgccgggcttgagagacctcatcaagaatctacgtgattcaaatcagttgtccaaagcacttgaggcatcaacatggatgtgtcaaaaaaaggtgtttaatctcttttcagaagattatgcaacaaggcttcatctgactgagaaagtgttgggtttggaggaagcagagaactttttcgaaagcagcatcccggagaatatgaaagattactctgtctacgatacactcttaagctgttatgcaagatctagcaacactcaaagtaaagctgaagccgttttcgagaagatgagagagctaggtttacaatccaaactttccccattcaactcgttgatatctctctacagtgggcaagggaaactaagtgtggtcaatatacttctatgtgatatgaagcataagaatatagagcctgatattgtcacgaggaacaacgttttgagagcaaacgcatacatattggccatagactcgatggagaaagtataagagagagtgggatggttttgagagcaaacgcatacatacgtgatcatggtgattataacgtgatatcgtcatctagaatgtcgtttttgttaaccgtactgtcattcctagttctctagatctaccactttgttgatatgctggtattggaacgataccgcatgttctcgaaaatgtgcaacatcgttgaccacttaactcagtcttataattattgtatatgttccattttaataagaggatgttaagataatatttcaatttatttaacatatttctttttaagtaattttactgaaaaaaattaatgctctgttattttaaattcttcatataagatggatctaaatcttgtatatttctttgaatgtgcacagcctggaaacaggtcttgagaacaaaaaagtaatgagcatttattaaaagtaagcgaaagtataaaatagtgttacagaaatgttattactctgttattttaatcctagaactaatcttgatcttaatcttaatcttagtattttattttataatgtgcattactgcattgcacagcgtggaaacaggtcttgcgaataaagttaatgataattctatctattacaaaagtaaacgatgaccgaaatatgaaatcgtattttctggtcattcttaattataaaaacagcaagttggtcattgtctactaggacatatgtgaatgtttgtttattaatatgaacactgccatttactctactccacgataagtggaaataaattagcagaaacatacatcgatcataaccaaaggatcaaaag

SEQ ID NO: 9009 - DNA, 3000 bp, Unknown
  misc_feature (1)..( 3000): cDNA_ID_1989326_gDNA_ID_1971953_Annot_ID_58664 3000 nt of promoter + ATG
acaattattttagttgcgtgtgtaatgtatataaaataacaacatgaaataacattttgtcttttatttttgtcattcttattatttaattttggacccgacaatttcaaataatcttctccaagttgtaactaatccgttacatgcgcgtgaggagaaccgtccaatccacttagactaacgtgccctttatttcttccttttaattctatgttaaaaaaacaatttaactaaaagatgcgcacgtgtcttgacggtggaaaaaaattgtaggcgccgtcgttgatcatgctcagtcgataccaccggtggtcgcaggtagctcgaggacggtgaggctttttggcgtgaacctcgaatgtcatggtgatgccgtcgagccaccaccgcgtcctgatgtctataatgaccaacacatttactattactcaactcctcatcccatggtaaatattttttttttttacatttttgtcagattcaaatttttgcttacgtatgatataattattaaacagatgtcgtggctgtttctcgagacgagacagatgaaaattagtaattttaaaatagacctgaaagagatttttatgtttaataaattatataaaggaggaatcagagagaataatactatacacttgactgtaaaaccacatggccaatttggtttttatttgattactttgatttgttttgtttactcttttgtctctgtagcctccttttgttcattaattaatatcagccgtaagtatatagtttcctgtgaaaacagtctctattttggttttactattctaatttgttaggcaccgtcagttttttttgtgaaaccaaattattgactaataagctggaaagcaaaactgactaaaagcattacaaacttatcaatgacataagttttgaatttattaccatgttttgtaatgttcagatataatttgaaatgcttagaattatatatttgtatacttaaattaatgaaataaagtgaatactaaagatagttttatttttcatattattctatacaattcggtgtacaatttgtttttgatgataataaaaataataaaattgcgtgttggaattgtgaaacagaatatatcatttgctggggaagcattggagcaggtaggagatggacgaggttgatgactgacattcaaaaagaagtgacaactttctagatttttaactttagaatttagattatgggcccatacttggcccaattgtcatagagaaaaaatggacaagaattaatattattagtagcttcgttatgtatttagtatttaactaatttgaaaataaaaataaaagatgagattttgtttctattgtacatttgagtcagaacagaaaaaaaaagtatatgcaaaagatgtgaattagtgtgggtttatagtagttgatatttgaaggctaaaataaaaccaatgaaagctttctatagcacaaaagtcatttgagggcaggtaccccaaattggtgagctaggcctaggctaaaccttatacacatgtagcatgtatttgatgatgaaagatgaattgggaactgttgagagattcatgtgaggagattacgagaagaaaaggtgtgggcctaattacgaatgattaaagaagagagagcatattcatatatagcatgtgtgtaaatatataggttgtgttacatcgccttttatctcttttccaaagccaaagccagggaccattttatttgttgctgtgttacttacactcttcttttgattctctattttgtttttgcattacaaagacagtgtaaaaggaatatgaatcatttttacaagctatgacaaaaatgggtttaggtcccaattctttctatgcatttatgtttgtcttcgtgtttctgcatatatatgagtgtattggtaaatggtaagtggcaacacaaacgcaagtttctgtttctatatatgattaaaacattctaaaacggcaacacaaacacaagcataaacacaaacaaacaatcatgacttttagtcttctttattctctattttttttttgttttttttttaattctctaattcttgtttctcctcttctctctgttctttggtttctttagtgctcttcaaattaaagagttttcggatattaaatcatacagagtgtagtaattacctttgtcatttgaaacatttccatgtagaaaagagaagattttattacttttgatagtgttcccttgtttatataagttcacggactcgtaattaaatcaaagccatcttgtgaaggtaaagtcttcacatacttgtatgaaccttttcatattaatatgcctttttagtgtttgtttcttcactcttatagttgtttcgtcattcccattaatgctctttagtataatgattcaccaatagggatttttaaaaatattgaaattgtaaagcaaatcagcatgtgctacttgtgagtggtggtaatggatactcgaccatacccgaaaagttcggtccaatttaattaattatatctatatacactatatctgcgggctattccttatctatattaatatggtaggcgaagaaattcaacttaaatctctcatcaactatctttcatcatagaataacgattaggacaatgcattgattattatcattagattagatactcagaatcatcaaattgatgtataaggaaattagtttgctatactacagctttaatatattgggaaattaaaactcgtctcgatctaaaagatatagtagaaacgaacatgggagtaaacttctattactatacgttaataaaattatgtgggatgcatttgcattaatacttttgtctgtcacatggatgaattgatgatggatctataaattaatttattaacgaatttatttccctacagaaacatatttattaagacttttctctcgcaaaagaagatcgcagcatattcacattttcacgtctcttctatacgacatacatg

SEQ ID NO: 9010 - DNA, 3000 bp, Unknown; identical to SEQ ID NO: 8996
  misc_feature (1)..( 3000): cDNA_ID_1989325_gDNA_ID_1971953_Annot_ID_58665 3000 nt of promoter + ATG

SEQ ID NO: 9011 - DNA, 3000 bp, Unknown; identical to SEQ ID NO: 8995
  misc_feature (1)..( 3000): cDNA_ID_1989324_gDNA_ID_1971953_Annot_ID_58666 3000 nt of promoter + ATG

SEQ ID NO: 9012 - DNA, 3000 bp, Unknown; identical to SEQ ID NO: 8994
  misc_feature (1)..( 3000): cDNA_ID_2993983_gDNA_ID_1971953_Annot_ID_58668 3000 nt of promoter + ATG

SEQ ID NO: 9013 - DNA, 3000 bp, Unknown
  misc_feature (1)..( 3000): cDNA_ID_2993973_gDNA_ID_1971973_Annot_ID_58670 3000 nt of promoter + ATG
attgctcataaatctctctctctacccaatctctttatttagtaccctattcttcttgactttgtttctttccaaagcttatacaagagatattcattcttaaactaagattttcatatatattgaaaaagaaagaaaagatttctcatcattttactttttggtagagagcatttcaagtaaaaaatactttgagaaacaaaaagagaaaactagtatgagaaacaaatccttaaaaaaggaaataacagtaatgcacgtgatgatataacaaaaggttttgttttgtttgtttttttattgtttttttcttcttttatttgtctgttataataatcaaaaaacaagaagaaaaaacgagacgttcatgcatttaatctcgcaccttacgacaaagagtgagagagaggatcgctcaggtttgttcatcttcaccggacgattagcttttgcggtgggagaaagaacggcctgtcttcagctctgaaacagaggaacagagaggttaggaaggagacaatggttggacccgcgcggcctcagatcgttttgtttggatcttccattgttcagatgagctttggccatggtggttggggcgccattctttccgaggtctacgctcgtaaggtatcgtcagattcatcaatctctctctctctgtggcttctggattcgatattcatccttggttagattactagagcgttgattctacaagtagatcgcttattctaattactctgtattatttattattttccctaactatacatttgttcattgaaattcgtcttttgttttacgattgtaagcgtgtattatgcgaaccataatgttatttctccatttggatgttatgtgtataggccgacatcattctgcgaggatattatggatggaactcttctcgtgctttggaagttgtcgaccaagtgttccccaaggtactctttcaactccctttttttttgcttcttctctctttagactattagtttcttcaatactagattatgataaagattcagcgttttataggtctttatattagtccgtataggttgatgtgtgcttatcatttgacctagtaagaattctttgtgaacattattttactagttcaaaatgtaccccaaaaggattacacaagtggctattttagttgcatagtctttgatttagcatacaagactctgcatctgtttcaagggagatgtctctgtttaagcataatctgtttcatccgagttttcttgatatctcaagctgttttctcttacccattataaaaaaaatttggtagaatgagcttaactttgtagaaaaccatcatattcaaagcttctgttttcttccactttgtcgcctaaaaattgcaacttgttacggatgcaggatgctgcagtacaaccttctctggtcattgtctattttggaggaaacgactcaatggcgcctcactcgtctggactaggacctcatgtaccacttactgaatatgttgataacatgaagaagatcgctcttcatcttcaggtttatacttcctttataattgttagatttattatttatctcctgtcagtcacgtttaaaagccatttcaagtgctaatttcttcctctattttctgtttcagagcctttcagacttcacccgaatcatatttcttagttctcctccagtggatgaggctaaagttcgccagaaccaaaggtaacttccctgaatttcttcactatctctctgtttctccttattctctccggccttattaatatagatgtgcttctttttctctcacaagcccatacttgagcgaggtaatccgcacaaacgacctctgcaagacttattcagatgcttgtgtagagctgtgccaagaactcggcctagaagtagttgatctcttctctacttttcagaaagcagatgactggaaaactgtttgcttcacgtaagtattttttgagttctgaagaaatatagagagacctttgatatatatgactttctcagagtttccaaatgcgataaccgggaatggagtatcgacgatgttcattgaaatgttttaacggtatagtctggtttgttacagagacgggattcatttgtcagcacaaggaagcaaaatagtagcgggagagatactaagagtggttaaagaagcggaatggcatccatcacttcactggaaatcaatgccaacagaattcgcagatgactctccttatgatcttgtatcagcagatggcaaacagacagtaaattcttcagaatggacttatttctgggaagaacaatgggactaaacatttcaacacacacaacaacaacaacaagaccctatcttcacataattcactgtcttaatgtgataaagctttgctttagattgtttacattacaagtgtctctgctataatctgattcagtttcgctcgaaaaacgttaccattttaaagtttatacttatctaaatcttaaatcacagaaacacaccaagtttgtgttcaagtaatttctttttttcttgtttacattttacagacattaacaaatgtctgaaactcatcacataacactcctccagacaggggtttagtgttttgaaggtaaaatcacaaagtaactaaatttgggccgataacaaaaaagtcgcttaggagattggacttatttgggcctaaaacctaacacttaagggcccaactaaaatgccatttacctaaaaagcgacgcatcttcgtctactaccaaaccttttcgctgacgcaaccaaactcccaaaaataaaaataaagtttttattttctctctctctcttatttttcttctccttcttgttccgtctgcttctctccatctccttccatatctattgttctctctctcttcatgcccgaacgcatcgggtctcaaaaaccattgatacagacatcgatccttgtcaactagtactgatctataaatcttataaaaatctgtagagat

SEQ ID NO: 9014 - DNA, 3000 bp, Unknown
  misc_feature (1)..( 3000): cDNA_ID_1989357_gDNA_ID_1971973_Annot_ID_58671 3000 nt of promoter + ATG
gtgggctcgaagtccggggaaaaagggttctcattaccatccagacagtgacttgttcctccctaaagagagaaaggatgtcctcacttctactgcttgttggactgcaatggctgctctgcttgtttgtctcaacttcacaatcggtccaattcaaatgctcaaactttatggaattccttactgggtaatgcgccgctgttactcccctgtttcagcctgagcaatttgtgtattatttcctctgccttactcaaaaaggtttttatgtcaaatacagataaatgtaatgtggttggactttgtgacttacctgcatcaccatggtcatgaagataagcttccttggtaccgtggcaaggtaaaatacatattctctgcttccactgttctttgactacatcgctctttcttttaaggttaaagccaactggtgtgtaaatctcatgattctcccaaaacaggagtggagttacctgagaggaggacttacaacattggatcgtgactacggattgatcaataacatccatcatgatattggaactcatgtgatacatcatcttttcccgcagatcccacattatcatctagtagaagcagtaagtaaattgaaagtaaagactgtttgtgtttttggtgttcatgctagtttccctgactcttgctccactgttatgcagacagaagcagctaaaccagtattagggaagtattacagggagcctgataagtctggaccgttgccattacatttactggaaattctagcgaaaagtataaaagaagatcattacgtgagcgacgaaggagaagttgtatactataaagcagatccaaatctctatggagaggtcaaagtaagagcagattgaaatgaagcaggcttgagattgaagttttttctatttcagaccagctgattttttgcttactgtatcaatttattgtgtcacccaccagagagttagtatctctgaatacgatcgatcagatggaaacaacaaatttgtttgcgatactgaagctatatataccatacattgcattatcttagatacatttaaattctagcaaaaagtataaaagaagatcattacgtgagcgacgaaggagatgttgtatatatactacaaattaagcagatccaaatctctatgtttccgatactgaagctttatactaataaaatatacattgcaatatatattattttagattcatccttctgaaggtttatataccaataattttagggtataattaagaaaatagttttctacttttttcacatttaaaatcaatcatagttattcttcctaacctcactaaatttgtttgattaattaacttaaaaatgggatttaaataagtatttgttacacaatatgtagttggatagtatccacatgtgccttccaaattcagtgaaccatgtttctattattgggaagtcgtcggccttctatttagatggtcaacggaccatttactaatacaagttttgcccataatatatttaaatcgactctccttcggaatttttacatttaaattgtttaaaagctctacttgaataatccaacatacaataatcttgaactaatttttttttttaataatgtagttattagaattataaacgaaaagtgtttgattggtatgttgaatataagcgtacgcctaatttgctattgcatgacacataaataatcatcttttaacactcttgaatttttaaaaattataattgcgattctcaaatttagtcataaattcagttaactatcatcgctaagtggcataaataatgtagttagatagtcaccgtccgttgctaatacagaataaaagtcaccgtccaattacacatacgtatgtaaggaaattatacataacttaattttatagagatggaactggtgagtgctacgttttatattagtacagtactatgtctagaaatatgtctacttttgtaatattttactcaaaagagagacgattgaagaaaatagataattacaagttacagccattgttactctcttcttacaagaactatgcatacagtttatttcaccatctattgaactatataatttcatattattgcctttatagaattgtacaattccaaagagcatcctcttccttgcgtaggttatcattttgaactattaagagcactttgataactgaagtaagttagaaatcactttacatgtagtaaagtatcaataaaattagtgcaattctgagataaggaagttaaagttaaatattattttaaaatgttgaagtcgtcagattcttttagtatatatctcaaggcattaaatatttcaaggttgagtacgtcgttaagctacccaaacattctcaaacagaagaaaatcataccgatcttaatttatattgttagggttaaaacatctacgaactttcacagctaataacaaaaaaatgaactccacgtgatagctaaaattatttgtaaggaagctacaaaacttttcattgcaaaatgcttcgtagttttcacatttggaattattatcaaatacatccacgtcattttcaatcttttttaccacgtatcagaaaaaacattttttatcacgttttcttgaactaacaagcaacaaactttaatcgtatggactctattcgacttcctcatcggttacaaacttacaattacggattcctacatacgttacgattttcttcagttacttattacaaaggaagataattaatattttcgattcacgagaatagtctgaaacatgtcggtccgagtttgattttatttgtgtatgatagttaatattcacaattcatttatttatgttaatccaaatcttgttccctttctctctctctttctctccctctaaccatataaaccaactatatataacagcacttcacaacttctcatgaacaagtagaaaaaaaagagcaagactaataagccatataagagacaacatg

SEQ ID NO: 9015 - DNA, 3000 bp, Unknown
  misc_feature (1)..( 3000): cDNA_ID_1989356_gDNA_ID_1971973_Annot_ID_58672 3000 nt of promoter + ATG
atcgcacaaagaaaagaaaaaacaaaagggataatcatgaaaaaatcttcgatttacctgagcgattacggatctcagattgttgttcggtggcatgatcgaaaattagggttcgcctctgatttgtgattttcttctcctcttcaaaaaaatgggtaacattgtcgagagtaacattgacggatatctcgagagttccgtggttcaatgggcttatactattgtgccctagctgagttactctcattgtttatttcattcacaatcagtttatattcaatttaataatattaaaaaaaaaaacttgaatcccaaagtctgttccattgttactcaattaatgtcgacattcacctgaaattttatatgtacagtatgtactttgttgacaaattatccttgcactgaattacggaattgatcatgaatgtaaattgtgtgcctctagttattttctgatatgtttttttttttcattttttttttggtaaaaggttaagttttataccatttttgattttggacagaattacagagattacatgaaacagattaaaacaatctacagaagataaatacaatattactactcaaattgttttggatcgcttctaagcgttcaagaccaagttacgagatgaaacaccgattccgagctcgcaaaacttagaaatttgcgtggttgccacagagccgaagcactggaatcctcatcttagttgccacgagctaaactattcgagggccgtccacaaaacctcgatatagaagcctacaacttctccacaaaacctcgatatagaagtccacaaaaccacgagctaaactatctgatttctgatatggttttggtctgtttgatttcacacaacacaaatcaaacatcagcacaaccatagattatagtattaagtttgtttcttttcccacaacatcgaacaaaagacgaaacacaaagcaacatcacaagttcacaatcacagattataatgagcatgttcgtttagttaccgccggcggttgcgttttgccgcaggtagttgcggcaactaaacgaacataaatagctgcgtctgccgcagccgcaggtagttgcggcgacgaaacgaacaatctaattaattcattttgttcacaaaaaaaaaaaaactaattgtctgctttcttttctcgtggagtcaataaaaggacgagccaactaaacggatcctgctgtacttcctgaaagagtgaaaacactttagtttttaagaaacaaacaaaaactcataaaatctcccaaatgtttatagaaatccataccacttcgggaaaacgttctctcagatctctctccatcgttcgaagatattcgaatacctggattgtttctggtggaaacaaaaaaaaaagatcaaggatttgttttttttccaatctctaattaagaaaaaaaaaactaaaagaaattgacgaaatatctgaacattacccaacgcacagaaagcataaaatccgttcattaccgatggcacaaaattcttaaactcaacgccgacgtaaacaattctttcggctcttttcgacccttcaaaatcgaaagaagaatcacaaatcgaaaccccatgttccgagaaaattacacttgcgaattttgatagattatgatcagaagaacgttacctctgctacgacggggagaagaaaaattaccgcgtgacctcgtagagaaatttcggctctgtaaagatttcgtcttgttcaatagatcgaaaagaaaccaacacaaaaatgaaagaaaaagatataaatcttcgatttacctgagcgattatggatctcagactgttgttgagtggcatcatcggaaattagggttcgctcttcttttcttcttcgcctcttatttgtgattttcttctccccaaactgaaagaaattcatgcggaatcagagaacgttaccatggtgggatgaagatgaattgcggcactgtaaagttttagtcttgttcaatagattgcacaaagaaagtaaacaaacaacaacaaaaaaaaagactgtagaaaagaaaaaaaaaaaggataatcataacggaatctttaatttaccagcgcgattaaggacctcagattgttgttcggtgccatgatcggatattagggttcgttcgctcttcttcttctttgtctatacgcgatttgtgagaataaaaaaggtcggatcttttgagagttctgtagtttaatgggcttatactattgggccctagcccaaatgagcgacactattgttcattttgtacaaatctcttgggctaatttatttcaggctgaccaactaatttggtccaactagttgggtttggcatgtttaatttcaatttccacttggttcaatttttatgttcaccgtccatgtaacttgactagtagcatgagatttggtttgtccctattgaaacaataggtatagggtgtgaaacattgaaacgtaattgactcaaattctcaaataggtttcttcaccaaactcctcttgttttgtctaacaatcttatatagtcactaaaataatgtgtataaattttgctaccgtcatttaaaagttagtgtcatgaaacatatgcctcattatattttattattttcgttcactttatttcaaaggctttaaactatatgacatcataaccaaaacaagaattaaaacgagatcaatcaaacccgtgttgaaacctcaacttgtgtctaaattgaccgtcacaaaaaaaaatctcacatcacaccatcactaataaatttccttctcctttcaagttgtagctaacttatataagacataagcgtgcgaaccagagacagagatagaaattgagagacgataagcaaagtagaaaacacaagtttctctcacacacattatctctttctctattaccaccactcattcataacagaaacccaccaaaaaataaaaagagagacttttcactctggggagagagctcaagttctaatg

SEQ ID NO: 9016 - DNA, 3000 bp, Unknown
  misc_feature (1)..( 3000): cDNA_ID_1989355_gDNA_ID_1971973_Annot_ID_58673 3000 nt of promoter + ATG
tctcgtaacttggtcttgaacgcttagaagcgatccaaaacaatttgagtagtaatattgtatttatcttctgtagattgttttaatctgtttcatgtaatctctgtaattctgtccaaaatcaaaaatggtataaaacttaaccttttaccaaaaaaaaaatgaaaaaaaaaaacatatcagaaaataactagaggcacacaatttacattcatgatcaattccgtaattcagtgcaaggataatttgtcaacaaagtacatactgtacatataaaatttcaggtgaatgtcgacattaattgagtaacaatggaacagactttgggattcaagtttttttttttaatattattaaattgaatataaactgattgtgaatgaaataaacaatgagagtaactcagctagggcacaatagtataagcccattgaaccacggaactctcgagatatccgtcaatgttactctcgacaatgttacccatttttttgaagaggagaagaaaatcacaaatcagaggcgaaccctaattttcgatcatgccaccgaacaacaatctgagatccgtaatcgctcaggtaaatcgaagattttttcatgattatcccttttgttttttcttttctttgtgcgatctattgatcaagacgaaatccttacagtgccgcaatttctatacgtcccgcagtagcagaggtaacgttcaaatttgcaaccgtaggtttggtttcgaggtatttgtcgcaaggaaaacaaaaatcttttgaccgttttgttgatatcatttgtgattgtagagtggaagagagagatgtttttaattcgaggtccagggatggctctgggattgggcttaggtatgaatcgatgagatatattttatactttagattttctttcattctttctacgagtcgagtcgaaattagtcagcttgctatttttttttgtgtgtgtgtgaaggttatattgtggttgggggaaacgtatcggaacttgaggcagatcggcgacaggttagttagaaaggaaaaaaaaatactaataaaaagacatcgttgttgtgaccattgctattatttcatcttcttctctatgtgtgtttcagtggacgggagaccacgtcgatttaaggaagaagatgtggccagaactaaaggataaggagtggtttaggattacgtcaaggatgtggtctgagtctgatataaggaaaaagatgttgcgtatgaggtctgatctatgggagtctatgggagtcagcaggtcgtctgatctatgggaggaaaagatgtgggattatctaacgaaaaagatgtggtatgatctatggaaaagcatgtggtctgatcgatcttagggagaaggaaaaatcctaattatcttcaagctttttgtatccggtcattgtggagtatttgggatgatctaaggaaaagcatctggtctgattcctaactatcttcaagctttgtaaatgttcaacgtggagaccagaataatcatcaattaagagaatctgtttctgtcgatgattctgatgcctggtttatggattgttaataataaccacctaatcatttaaatgtcgcgcaacgagtaaatcacacacacagtttacttcgacaccggacaagtactgtttcaattcataactccaccaacggatttccattactggatccgagtatttttctcgacatcgagagcttaatttggtgctttttacttgaaagtcttgttgagttaagcaaaggctttccattgacactgctagatacagcaccgagtttgtgtgatcagaagtttgaagaaatcgtttaagaaggaaaggagagaaacgattgataattatgcaactagtctggattgataccatggtccatagacaaccatatccaaagtaagggacatttaggaataatatacgcgaaaaagttgagaatattttcgacaactaaccaaaactttacaagggaacagtgcaggaactttatatagttatatatatgcgcatgcaaataacaactatattacaaactctttgatcatgacagcattccatacactagcttgattggttatttaataggtattttttcttattaacgaaataaatcccttaagttattatttttatttacatccaaataaatgtaatattatttctattaattttccactaccaaaataggaatttcgaactatatatttgtcttgttttagtatttctctgtacacctagctagcagcatctatttatgcagatacattctcatgataagtattttatgattctaatagatacacgtacagatgaggttactcatacatggaaatacatgtttagtaaaatataatatttgtggtaatttcaaaaaagagaatcgttttcccaaatttttactatacaaaagatcttttacttagtttgtatcatattttcctcattatacacatcaacaattcaacaaatatcaattttgtataaagatgattttatcatgtttttcttgtctgttggttatatttgtgtattccttcattttgcgattctaaaatactaataaacacatataagaatatttatcggttcaaccaaaaaacaaatttccgtaattaatcattcctctatgttgttagataacaattttcttaacaaaattgctaaaatctgtaatggcaaacccacatataaataatatttgccgcctctagtttaaacaagcatgtaaaaacgtgttatcggaaaaaataacataataattgtaaaataaatatgcaaaacttatgtcattgaaagaaaaaaaacatgataaatgtacttggtgaatggtgatattgtttttaatttttacaaataagatggtagaaaattaggttatacataatcccgcacgtgtgagtaaagccttatatattccatgcgtacacgcaagttatacatatgttttcacatatacgctctgcctcttccaaagtcacatccatctttca

SEQ ID NO: 9017 - DNA, 3000 bp, Unknown
  misc_feature (1)..( 3000): cDNA_ID_1989354_gDNA_ID_1971973_Annot_ID_58674 3000 nt of promoter + ATG
tacacgcaagttatacatatgttttcacatatacgctctgcctcttccaaagtcacatccatctttcaatggctttctcttcagctcacctcaaccaccaccaacctttgatcaagcacggtggagccacggcggcgcctcctccgaccccgtcatgctcacatctcaacaccaccagcaaatcggagacagcagttgacgctctctccagtcttttccaccgtctccctcctttgctttcactccccaaccgtcgctccatcccttctcttccgatggtatctctctccgccggagatagacttgaatgggacgatcttatctccgccgtgactgatttcggctatttccaactcattaacgatgactccgatattcttttccctcctgggatcgctgaagcagccgagtctgactcactctcgctcttagagctcagtgaagagaagaaggaatcatcgtttccgaagaaatggccgctaggctacgaagccgatgctgaaacgccatcgttttgccttgacgccgactgttcaaccgactcgagcgagttaaatctgagttcgctccgtgagttcactcggactctagagaaagttggactgaagacggtagagatgctggcgaatgcacttgggtttggatatgattcaacccggtttaatactctgatgtgggttaaccaaggtgttcctgatgatgaaccggaggtaaccaacggattttatccttttgttgtttgtttacagtatcagataagggaacagaagtattgtttgctaaccgagtctggttgggtgtccgttttaccccgagttgactcggttcttgtgacgttgggtgacattgctcaggttagttctcttttgcttttgacaattgacagaacacatatatctcttttatttatctataattaattggttagttgtcttccttaaataattatcaaattatcatcctttgtaatggaactttattccactataccgttaactggctgttttaatgtattttaaacattatccaaaataaatgttttccaacgcatcgttcaaaaagagaacaagaatttggatatttccgatatttattgttgacaacaacaacaattgtggagcataaccggggaatgtgttttcacttttcgtttgaaacagatttatggcattgggaaagaaataagaatttggaaatttccgatatttaaatacttatacacatcacatcgcaattgtacttagtgtcctatagaattcaacaattcttttttttttaggtcaaaacctaacagctttctacaatatagttttcaacttttgaacagctaacaaacaacttaaaattggcaggtttggagaaatggagaggtcaaaagagtgaaatatcgaccagtgttgtgttcaggacaaaaagatggtccagtaaagtgtgtaacaatgacattgatgcttacacttcccatggacagtatggtttcatcattgaaggatatgatcagtgacggcgacaaagaagaagagtatgcagaggaggaggaagaagatggaggagcaagaagtgatgagagaagggcatttaggccttttagtttcaaggagtacgcatggagagtgtaccaagaacgtctcttcttcagggatccacttgacagatacagaatcaaatctttaaaagattgacgaaccgatgtttgatttgtttgtttctttcttgggttgaattggtactatagttcttgttgttactttttttcccccataaaatcttttgattttcagcggattgttagcattttagcattgagatatttttgtttttgttcgattcagttcagagaatgttctattttgatagtcactccatcattcaactaattttttcatatatactcatatcaaaactgtcactatttcaaaatcaaacttttaggttacaccaatgactctatcacactaaactcaactcctagattttatatagaagaatctatgactttgatgatgtactttaaaactgagtcttttgagatcataaccaaattctacttcataacttttgttttccaatgttgattatttgttataattagaaggtgacacaaacgcttatagcatcctgtttttgaaaatgaggaaatacagtgttggcttttaatctctcattgaggcagaatatcaatgaatgacttcaaatctacgtatacatgtttacttatttagtgatccatattggtgttgctctttaattttcttgtgagaatgaattatatacatcaaaattgattatatcatttaattcgagttaaaattataagtaatacaatcttcactaaacactaattaaatcgacgtaaatttcttatacgattttttcatgcaacacttaaatcgacataaatttaaatattttggtcttcataccctaattttgataagatataatagaaaatttcgtatatctttttttttttttggtaaaaagtttttttttttttgtttcatctccatatttagaaaatttatttcaaacttcgttctcgtttgtgttcatcttaatttttaaccatgattgagtcattgaccattgctcaaaacatacgcataaaattcccaaaaagtagtgtgtgtcgtgacaaaacccgacccgtcgatttacgcggtttgaaactcgacccgaatactatccgaacccgtaactttggcaaaagcacatcgtacagctcaggcacttgtagcacgtcgtctctcctttggtttctctccttatattcgacgagtgactccgattggatcgctatttcgtcatttctcactttccaaaaagaaaaaaacgaatctctctccaccatcatcacctttctccttcacttgcctcagatctggctgcgatttcaaatcttccttagtttctctcgcatcgctcggccgttgacggtcccgtcctttccgtggatctgattctggccccggattctctcgccgcgatctgaggtcaaac

SEQ ID NO: 9018 - DNA, 3000 bp, Unknown
  misc_feature (1)..( 3000): cDNA_ID_3409615_gDNA_ID_1971973_Annot_ID_58675 3000 nt of promoter + ATG
gtttcctcataactactaaaatgtcgctgaaatatttgaaaaaagagctgaggtgttttttctgtcgatcaaagtttccacgatggtcttggtgaagagctagtagaaataagcatatagttagtgatgttaacttgggcattgaatagccatttgttaaatgggtatgtgcaaaaaaaaataacccatttaaacccatttagagaaaaatatcaaatggggttaaatgggttaccccaattaaacctatttaataaatgggtttacccacaaacaaatgggtacccatttatgttttattttatattagttatttttattaaaaagtagataacttaattataactaaaataaagagcaaaatactaaatatatttaaaacaaaacgtaaaatcacgtttttccgctaaaacccataaaattacgttttcccaccaaaatcacgttttttaccaaaatcgaaaatcacattttcccaccaaaatcgtaaaccgacgtttttccgccaaaatcgtaaaatcacgttttcccgccaaaactgtaaaatgacgttttcccaccaaaattgaaaatcacgtattttcgccaaacccgtaaaatcacgtttacccgccaaaatcgtaaaatcacgttttcccgccaaaatcgtaaaatcacgttttcccgccaaaaccgtaaaatcacgttttcccgccaaaatcacaaaaagtgttttccgccaaaaccgtaaaatcacgtatttccgccaaaaccgtaaacgacattttcccgtaaaaccgtaaaatcaagttttcccgccaaaatcacaaaaaaaaatattttttgccaaatttgaaaatattattatcattatatgttattgaaatctatattttagtaaattataaatatttcagatttagctaatgtttatggactgttgttatttatctattaagtttatgaattaattaataaaaggcaatatctcacttaattggtttaaatgggttcacatggatttactaaatttaaatgggtagggttaaatgggtttcaaaaataaatggatttatatgagtttaaagttaaatggagtgggtttaaatgggatgggtttaattggggtgggttagcccatattaacatcactacatatagttttctaaactaaatatgtcattatcatcatttactggtttacatgcatcttttatacatttcaaactttcttatgaaaacgcagatgtgaaaagataaatcatgatttacaggttatcaaagtgatgtgagttggaacgtaaaacaatttagtttgtcaactgaatcttagacgcaatcgattattgttactcttaaatcactttacaataatatcaaatatcacatcctgcagccaagtaatcgagctaatccatgatcaagtataggtggtgaagcaactaaaaatgtagccaatttcgtttgtacgcataattaaacaatgctatttattttagtatgttgctacttgccagttgctaccattgggatctcgaaaacacacaaacgtacgtgcatgttgcctaatatagtctttattattgttcctaaactaattaagacaaattaaaacaatatataaagtaacaaaaaaaaatcccactttccttcaaacttgagtcttgcttgtacagacagttgtactacttgtggaagctgtttaactcaaattaatattctctttctgttattttatttaaggaaatacaatcacgtgactgagattagcactagtatactatatatatacatcacgacgctgtttttatacatactatatatcaacggccagaattaagtaagtaaccatccatcgccaaccggaaaatgacgtcatcttcaccgtctccacaagcctcgatgcttttgtactggcacgagaatcaatacgacgaccggaacttccagattcatggccggacactcttcttcgccttagctttattctccgtcgtgctcttcttcgcactactcactctctacatccaccggaactgcctcccccgggattctatcaatctccacgcgtcctctcccgatcgactcacgcgttgccgtagcggagggcttgatccggcggagattcggagcttgccggtggtgctttgccggagagaaagggcggaggaggaggaggagaaggagtgttgtatatgtctaggtggtttcgaagaaggagagaagatgaaagtgcttcctccgtgtagccattgttaccactgcgaatgtgtggatcggtggcttaaaaccgagtcgagttgtccgctctgccgagtctccatccgtgtcgactcgtcaagctaatgagacagctagagtgatagtgattaagatatgaatttgttttttttttttgtaattgtgtgggtaaagatttatacatatacttgtgtattgcatggacatggatggaggatgatgtttacacacacacgaatggttatggttttttctaaaaggatttaattttcatattctgtctttatcattgattgtgaagtttttataatcacttcatctgtattttaaacatacgatgatagacatttttgtgtagatgtttataagggtaaatggacttattaattcaggtaaataactaaatgataaaacaatgatatgttcatatttgatacagttacatgtaaaattctgtgctatatttctgtataaataacatgctatttttttctaaatccattatttcaataaaataaaagtattcgttacaatttagaaaggcacaaaacatgttacaatttagaaagtcatcggtatgggctttattgggcataaaattagtatcgatcggcccaatatttggaaaaagaggaaacgagtgtctagggttttgctgtcatataaagaagcaaaatgagtggaagcaacaaaatctttctgaattggcggccgctcattttcctgaaatttgcatagaatcagaggagtgaagagtttatcttctgtgaattcaccatg

SEQ ID NO: 9019 - DNA, 3000 bp, Unknown
  misc_feature (1)..( 3000): cDNA_ID_2781957_gDNA_ID_1971973_Annot_ID_58683 3000 nt of promoter + ATG
aagatagtattagggccagaactcactcaacagtgacctggatgatatctttgttgtcttcattgaattctaggagaggctgatgtgaagaacagaataaacacagagatcatcagatgagaggagcgacacacccagatcaggaagaacgattgtcatgttgtggcaggaaaagtttttgattcatataaaatcaaagacagtaagatggttgaacctgaagactttggcaagaaatgttgtaccatggagaatctgacagttggcgaccttcgagtgaaacatggtaaccaaagccctgaacaaaagagagaagagggtttcagaacatagctgaacataatcataaccaagaaaatcaatgcatgatctaccatggtgttagtgttacaaaataagacctgatcaatctcaccttacctgattgaaatctgagtaaaaaggcaagacttgtggataagtttggactattccccatgacttctcgacaagtgaccaccatctggagagaaaacacatgcatactaataagatccagcgtctcctttacagcaatagtaaaataaagttttaagctcacagtcacagtaatgctagttcaaactttaaagatgacaaggagattggaaaatatttaaaatattacttattctgagctgtgtgaaaattggggggttgtgcagtctcataaacccatccaggagcaaatatggcagctgacacattgtttctcttcagcaaatccagagcagcatttacctagcatgtaaaagaataggaagaaaagaaatatttaagtatagatcattgttttgtactctacaccaatagagaagcaaatattaaagagtggctgagacatacagtccattgcccaccaccaaaagagccccgcccaaaaacatcaattcccatgtagacatcgaattttctgtccccagcaacttcagctgataggtttgggtagctctcctgatacatcattactcactaatagtaaaacaagacaaatagaagaaactgagactcgagagattgatcaaacccatagacagaccttccatgtgtagttcatgaatattccatcgcataagtcaaagaaaggtttgttcagctcagtcaattgatcttgccactgaagattaccacgaacagtgacactgtcatacctgcagaaagttatcagaacaaagtggtatacaaaaagaacaaagaaaaacttctgatcaactcaccatatgactaaagccccaggtgtcgataaatgcaagactttttttagatggctgacgaattccttcatatttggaatctgttcctcatctatatcattctctatatttatctgcaagtgacagtctatatattatagaagtctttcttcaccagccacccatcaaatacagatatcttataaaaaccaagcaaaaaatgctcaccagccacccatcaaagcctagagcagtagcaagttcagccaaacgctctgcatacatttgagcagactcctttgtggcaagcatctctttgcaggtagcttttccttcatcccattctgtgatgaaagtccccaatacctttatatttccataacacacaagaaagtaaacacttttaccaataaaatcctcagcaatattcatatctctgtacacaaacaatcaaactctctaattttatcatcctaatcagcaaactcagagatatctcaataaaaatcgaaactttggatgttgaacaatcaaaaagttttgagcttacttactttaacgccatgcctatgagcagtattggtccagcaaggaggaggaatagtgaccagagaatgagagaagtaaacaaaaatgtccatcaagtaccaatgccaaatcgcaaatccggcttcgttttcacacccttgtacccacttgtcatctacataccctcctttcatgtcatggcagactaaaacccttgggcgattcggtaaacagtcggagtttcggcggaaaggtactgtggagcgattaaactggaaatgaaaggaatcaaagtaagagcgagatttcaggtcttgaagagctttgatcgggaaagatataggtaacgatggcttgacaagatcaagcaacggaacggcttcagattgtgcaacgtcgtcatcgttggatttgggcatgaggagagagaggggaaatgaagtgaggagcttacgggagagggtgaagaagagattgtaaagagatacgagagttcttcgagagaaataggcgcgaagaagttctcgcattttgcagtggtcaacgaaggaagatgatgacgatggctttttatttaatttattcttcttttggtttattcgtacgccaaattaaagaagaaaaaaaacagagcatgtgaatttatcattcttttgatgtgaatctaaacgacatgacaatttcattttttttataaagtaaacttacacgaaagcagagagataagatatttatatgggccttggcctgtgattactgattaaggcatgaaaagttggattcttctttattggatctgataaaatgcttataaggcctttgaatacaaacaaagttaaatgttattgttgatcctttaaaagttcaaacatgtgattagcaaaaagtgtagtggcttttcttgctttctttttgttttataacaccgtaatccaaattggaattcagactaatttggagatagataagttcattggatacaagcaacgaaattgttccaattttgtaagtttgaattaaaatataaacagtcgtgcttaattatgggcaagaacatgggtttggttttggatcgtgcaagtacaacaaattatagctttgtttataaacattaaaatcatatactataataattcagtatactccaaattaaagttttaatcaaaccaaattttgtcattactacaccataaaaagagaaaggcgtaaaaaggaaaaagaaaaaaaaaggtaaacgttataataaaagaaaaaaaaaaat

SEQ ID NO: 9020 - DNA, 3000 bp, Unknown
  misc_feature (1)..( 3000): cDNA_ID_1989346_gDNA_ID_1971973_Annot_ID_58686 3000 nt of promoter + ATG
gattacaaaacatctctcccacaacactcaccatttttatccaacaaaataatgaacaagtctgtctgatacaagatttctaattaaaggatcgcattgtcttgattttttctcaattttttcttttatattacttaaataaagagaagaaaagtagagcttattacttaaagttaattaacgcggttcttagattgcttgaagcagaaggaaatattattcatttactattttactcttattaaagaagtttttttcttttttcttttttgtgtggtttatgaatgcgacacgaagagaggaatacggtgttctagctagtattttatcaagcttcttggtcatgtccaaatccgaatttcttcattgactaagataaaagagggaatattttcttaagaaacagagatcattgtgtgattatcttgatgatcaatagacaatagtcttcagaagattaacttcatcagttgatgttgatgaacgaatatgtttgctaatttgttatttgattctcttatagtattatctcttccaaaattctctttcttcttgaaaaatggaaaaccaaacacaacaaaaagttcagaagttcttgcgattagaaataagattcttctcttagtatagtatgtttagatataaattaaatagaatgaaataatgtattattttactgaaatggagaacaatacataagaaaaatatatgaaataaatgatccttatgattggaacttaatagcctaaatctcaaggtgtataaaatactaaaatacttgaacaagcttaatgttctctacatggtttagatatatgtaacatcacttaccgttaagctcttccattccttggatttcaagtcttatgatcgtgttcctctcgatattgtagtagaagacgtaggaaggcataaatgtagatgggtacttgtacgaaaacacaatttcattggtgcaactgccaaccattccaagaagtcgtagcttggtctcttctccaactacattcttccacagaggaggcaacatgtatacatgcttcgaccaatcatgtttttcagcgtcttctaggacccgcaactcgaaacttttacttgttccactaacaatatcggtagactcttccgtcatcaacaaacctaatttgccattgtagtttatcatagttgttgaactaggcaaatctctatcgaaagtttccatgactttcataaagctgaacttctccgagctaatatcgaagcaaactactatagtaaccattaaagaccctttttcgacggcagtataatacaaaacactgttaatgcatatttcagtaccacgaggaacatggggtttgcaacattcaatcatcctccatgattttcttttagtttctagtgttagaacttgatactcttggcattgatactcgttagccaaaaccttgaactgtttcttagtcttacaaaagtaaaagaattgtgcaatacttgcaacctaaaaagataaacatctaatatttcacacattttataaaacaaaagaattaaaaatttaaaatatgttattttttgaatttatttttagtaaccttgctccaatttctggatttaaacaacaattataatttcagaattaaattaaaaatgatggtaacaacaaatttattaatttttgttttgtcatgatcttaaacaaacctataaaatctgtctactttattaacccagagcattgacgtgattgtcgtacaggcaactgcaacgtctctctgcattctctgatgaataatattacggaaacacccctataactttccattttagtgtcaaagcccaaaaacccaaaagggtaaactcgtctcataaatatttctttttcgcgcttcatctattttctttctctcggaaaataaattgcagtgttttctgcgatttccagtctatacctttttgttttaactctctctctctctctctctctcatactagccattatcaaatcgaagaaactctaagatttttctcttcaaattccatttctctgtgaaaatttcttcatcctaatgcgtttctcgactgttattcgcaggaatttgagtttctgaagattcggttcgcttcgtcttcttcgtctctatcgttcaggtaaggtcttctcttactctagctgttgtttttatttttgaaatttctttgagattttgtggagattgtgctctaatgttgctctgtttgcttatctctaagctcggaaaccttgaatctctcttcggtcgtctccttaaacctcaagtagctgtgcgcttaaggaatctgaggtattattgtctcaacttcgcagatttgttttcatttcgttgtttccgtttcagatttcagttttgtctcttttagaaaccttcgattttggtttgtcactgagcgtttgctgagaaagaactcatgtgggtatgagatctttcatttttctttggtttcttaattaggaactgttgttaacgttcagtgattgaagatcctctctgcttaaggtttctggaactcgtgaatttttttaggtttatgtgttgctaacattgtctcaaaatgcaagttggtcctacttagagtatctgggaacgagtacttcagataataactgcaaattgcttgatgattttaatgacagttttgtgttgacgatttactgtcacttatgcttttgttacgcttttggttttgacatgctttctagtgagaagcaatgggtgcagggaggaagacagagacctatacattggctcaggatggtcaatacatatcaggataaggaaatatgtgtgtgaggaatctgaagaagggagatctttgtggggttatatttggatgcaagttcagcactatcaaagagtgctatgctaagaatttgtttggttagttggctatacaatctttgaggcttaaagtttaatgacgaccaggattttgaaaatgatgcttgttttgtgaacaggcttaccagccccgcacatg

SEQ ID NO: 9021 - DNA, 3000 bp, Unknown
  misc_feature (1)..( 3000): cDNA_ID_1989344_gDNA_ID_1971973_Annot_ID_58688 3000 nt of promoter + ATG
ataatcagaaccagaggaacttctcactaccaaacgctgcttcaccaacttcgtatctttcggtatctggaaaataaaatagaaaatctcagaactttaaaattgttctccattgatttcgaatcaaatcttaaagcagaagactaaggatactaatacaaacctgaaagctgagattcgaggagaaattagagtgaggaaagcgaaaagatggttcggaagagataagcagagacgaaggacgagtactgcatgagcagtccatgatttatttgattagggtttcttcggaatcagaaactgagaagatgattgaacaaaagcattcgtttttgttcgaagtttattgaatgattttagggttcgcagacggaactatctaaaaggctttgttctggttcatacgtttggagcccgagaacgtagtgagagagagagaaggtgaaagagagcaagctgaaattgttatccagtggatcacgccattgatgccgttttacgttcttagtatgagacgttacgtcgttttattgaagtgaaaacaccaggaagtctgcatctgacacaaatactaacgcttaaagtaaaaactttcggatcagtgaattatggactttgttggaatgttgggtatatacaaataggaacgttaatgggccagtgaaataaactttaataggccattaattcaacatggtacattagtgggctaatatatattttttgtggtcataaataattagttcaacatggtcataaatatttaaactttttctcattgttttttttttttctcaattgttttttcttccatatttgaaatttcaatgcttttcctcaagttaaatttcatcaatatagaaacatataaatttactattgttatagattttgagatacaaatatttaaaccaattagataaaaaatccatataagattttatcatgaatttcttgaaagatctccaattattaaatgtatattcctagaaaaaactatatacagaataatgactaatttgccacaaaatacaattattcttacatatataaattgcatcaaaagggtgataagttatcaatttcaacactgatttactcttgaaatatctctttctcaatagaacttccaaaggaaatgaagtaagtctctaacattctcactttcttttgcctcatagctctcctatcccgtaagcatttcttatatctctgagattttgttcatttctgtaatctaaaactcaatcaataagacttattactatttaaaacaatattagcatacatgacttaagttagttttaacggtgtagatataacattctcaagtgttagcgtggtggaaggtagaaacacgttggagcatgaagccatgtcgcatgtgattaaccaaaagacttctccatatgttgtgcatccgcaaaaggttccatgcgctgattgcacttggccatgtgatcctgttgtagttggtgaaggttgtatatgtcgttgctaaaatttccgtttctatcataatttcgccatatataatgtgttggaccttcgataaaaattaaataacaataaaattatatttattattgattgctcggagaaagagatataatgataccatgaatctctttctcataactacatggtataggaagttgaagaaaacaatatgttgatttgcatttctccataaaagacttctccacatgttatgcatccgcaaaagcacccatgcgctgatttgcacttgcccatgtgatcttgttgtatctggagaatgtcatatatgtcgatgctaaagttttttttattttatcgaatatccgccaaaatgtatttggccttccacaaaataataattattattgattataaactctgagaaggagaccataatttctttctcatgacaacattgtcattgttaatcatccaaatcgatttcactctatgtgttgtacacgcatcacatgaacaatacaacatactatgtctcagtgatatcgcacagctgaatagctgatctactttcaagttaacatacaacacaaaaaaaaaaaaaaaactatgatagataagaagaatatggttggtagtaagaaaatgtattttccctagatcaaattccaaaacttgatacaaaaactctaaattaaccactggatggcttcgattctgtcattaacgtgcgagaatctcggtgtaatcgagatcattataaacttaatgatattttatcattctaagagctagtcttggaaggtgtgaagactttattaatcaagtatatataaattatcaaaaaacacaacccaaaaaacagtaagaacaatacacatctgtaacagcttgtcagtaaattagtagtaataattaaaatctgataaatactatatgctaaaacgttttgtgtatcttatttttgtgagtacactaatacaataatgcttttttttttccttttcatgaataaaaaaaaacgtattgggacaataatggcggcctgatcaacgctaagttaactgcaaccacgagaaaaaaagaatccgagactagttcttccccaacgaccaatcttatgttgcatcaatttcacaacagaagccttaccttttcattacacgcatattgcttcttcaaagtttccttttagataaattcttagtctgagtaacatctctttcttgtcttgggggtttctctgtaattgcagctgaatcggatcttgggcaatttttaaattccgattcaacgagtttctcaactaagggtttgattccttttctttttcatctttgtttattcaaatctgaatactttgttaggtttcaatgtgctgagaagtagaagaagcttcgttggcaagtccgaatcttttcttcttcttttttctgggttttatattctttgccaacaatgtttaagcttgcaaagcatatattcctttgagtagctgttttattcctacaaagatttgatcttcaatagagagagataatg

SEQ ID NO: 9022 - DNA, 3000 bp, Unknown
  misc_feature (1)..( 3000): cDNA_ID_2993976_gDNA_ID_1971973_Annot_ID_58692 3000 nt of promoter + ATG
gtaaattcaacccggttaatcctggttacgccgcatgcgttgaagaaattcgaaaggatctaatcgtcgccaccgtagctgcgtcactaatcggttgtgtaatcatgggattgatggcgaatcttcctctagctttagctccgggaatgggaactaacgcttatttcgcttacaccgtcgttggatttcacggatccggttcaatctcataccggaccgcactcgccgccgttttcatcgaaggactgatatttctcttcatctccgccataggtttcagagcaaaacttgcgaaactcgttcctaaaccggtcagaatcagttcctccgccggaatcggacttttcctcgctttcatcggtttacagaacaatcaaggaatcggtttagtcggttatagtccttcaacactagtcactctcgccgcttgtccagcctcatcacgaatatcgttagctcccgttataacgtcagctaacggaaccgttagtttactcgccggaggatcagtttccggcgatattatgtgtattcacggacgaatggagagtccaacgttctggttaggtatcgtcggattcgtgatcatagcttattgtttggtaaagaacgtgaaaggagcgatgatctacgggatcgtcttcgtaacggccgtttcgtggttccgtaacacagaggtaacggcgtttccgaacacatcggccggagatgcagctcatgattatttcaaaaagatcgttgatgtacacgtcattaaacataccgccggagctttaagcttctccgggataaacaaaggacatttctgggaagctctggtgacattcctctacgttgatattttggatacgacgggaacgctttactccatggctagattcgccggattcgtcgacgagaaaggagatttcgccggacagtatttcgcgtttatgtctgacgcgtctgcgattgtgatcggatcgttgcttggtacatctccggtgactgttttcatcgagtcgtcgacggggataagagaaggagggaggacgggtctaacggcgattacggtggctgtttatttcttgttagcgatgtttttcacaccgttgctagcttcgattcccgcatgggcggttggtccgccgttgatattagtcggagtgatgatgatgaaatcagtcacagagattgattgggaagatatgagagaggcgattccggcatttgtgacaatgattctgatgccgttgacttactccgtcgcgtatggattgatcggagggattgggagctatgtagtgttgcatctatgggattggggagaagaaggtttggtgaaattagggtttttgaaaaggaaagttaaagaagaggataataataatggagttgtcaaagctagtgagattgatactaccgtttaggtttttctttgatttgattttacatttttgttactattgattttttagatttctttcttaggatgaaaggacaagtgattgcattattgatttgttgctcttgtagattttttgaagagaaaagtgtaaaaatgttggggaaaaataaagaaaactgttgaaatttcgagctctattatgctttttgacattgacactagtagaggttaagcacttgaatttgactttcattgaataggaattgaaaggttcattacagaaacaaaaagggaagaccccaaaaggagtcaagagggacacttaccttctcttaagttaatctgaatcaagaaagtaacaaaagaaaaaagcctatggaaactttgtatttgatagaacaaaaatgacttctcggtgatcgccgttatgatttttacgatctagctctcggtttgctctctcaaccgcctgatggtactcctaacagtcacagcactagccgtgttcattgtgtatgcaccgcctgctttcactttcccgcaatctttgcacccccaaatgccaacaactttcctcttaacggagtactgcatcagaaatcaactaaagtcttttcacaaaatgcaaaacagagatttgcaaactgaaaacctcattgaattcaacgacaataagttacttaggagatggtaatgagagtacctttccgcagaactcacagaagtacttgttgtgttgactcacttccatcttcttgatctgcttcctaagactggcaccatatcgtgtacctttgcaaacacacaaacacaaacagattcagattgaggattcaatcattacaatagagacatttcagttctctgttcatgatctgaaactaattcttactagagaaacaaggtttaaggtttcaacctatgaatcaacagaagtctaaagttgcatactttaaactatagcccaggattgatttctgaatactcaccatattttccgacaattctagccttcttcgttctcttggtctgaaatccaaataaaacaaataagttgagaatacaaatcgaagagattcaatgcaggcacacgaaacagaagatgcactcaccattttcgccggctgagggagaaaagcagacaatgtgcaagtcccggcgaagaggaaggatctctctaggctttttactcgtttcgataagtacagggtattaggggaaattagggcatctccatccatgataaactcacaaagtttctaaaaaaaaaaaatattaatattatatttgattatttgattaaaaaagtaattttgttaaaaaattgaaccaatagtaagatgagaattgtcatgactcaagtgagaaactttctacactctctctccttcattttcattatttttatttttttaattgtgagaaactcttatgagatacctcaatagagatggttttagggttttattcaatgggctataataatctatcatttaaagcccattaaataaaaagcccaataacacaatgtcgttttcgtttgtgtgacggacgattattgtaaaacacagatatcaatgttgcatcaggtgaagaacgagagatagagaacg

SEQ ID NO: 9023 - DNA, 3000 bp, Unknown
  misc_feature (1)..( 3000): cDNA_ID_2993980_gDNA_ID_1971973_Annot_ID_58694 3000 nt of promoter + ATG
tcacaacacttgtctctcttagcttcaataagttccattagttgataacaacactccaacgttagagatccatcaaaccccatacacgagtctattttgtgtatttactatgtctatttatcagattcaaatgcttggttagaagttgctatgggtctcatatagtcagaaaatttaaggtactcgtatttaattcgtatatgtacatcagtacagataacatgtacatctatgtctaattgatcaagttgttagaataaagaataattatttaaatttagatgatggccattttaggttatactagacataaaaatgataggatatatataaaaagttgaagacataaaaagatcaatacatgataggatttatatatacaagcaaatgagtactgtatgagttgtgaaagataaacatatataccaccacgaaagagtgtgatacaagtaaaattcatttaattaatataaaatatagtaggtggacatggagatggaatactatatcatcatagaatttcattttatgtaatgaaatgatagtcgttgaaagaaaacatgataaattaaaatggaattcgtaggaatacgtaatagagtttgatcatcttcattgatatgaccatgtataatactataacaacacaagtgactacacctactcaatcatgtagtatagtcattacttgtagacttgttgtagcactgtttttcttttcctgacgtcatatttgtagcaagtccgattaaattgtgtaagtgaggttcttctgtgacgtgaacacgtgacctaacattctcagcatatgggcattaaagttgggctagtcaaatccatctgaaatgtgagtattgttctgcgccacgacgtcgtttaacgaacagcggtgttaaactttttttgtattttttcctccagtggtgttaagcttcagacgaaggcaagagttaatttagttgaacaaagaaaccatcttatattcattctggatatggcgtttagttatactacaaatggtgaataacaagaaaagctaaacaaaaacaagtaaaagcattctcagaatcaccaaagttaagctcatgaatctttatccttggataagctccatgagagtctgcttataacattttcgtctactattttgtagtggtgagacaaccgcctgtgaatcgtcccgcaacacttgtctactttgctttgatatttactgtacaaagccggtattgttacagataggatggtccctgttcacaccataaaaagtataaacttcatataagaatttggttcactgagtttaaaacaacaatgtcgcaggaactaaaacgagatcaacaagccaacgtgggggatgaaactgaaggatcaaaaaacatagaagctttttcctttcatttgcatttaaggatcaagttactaaccgatgtaaagaagagtgcagagagatatatagctaccaatggcagagagaagccacagacaaatcaccacctgctaaagaaaaatcgtcagaccaacagttcagatgcttaacggttcccatgtcatttcactcaacatcatcgtgagtttctgaatgggttagcttcataaccttgaagaagagtcgaaaatcgttgccaactgtgacatcatgagccattacaagcaagtgattgagttttatacggaaagaagctgcagcactattcaccatttcctctgatagaacaagctctggcaacgaatgcaactgtctgcttataaagagataacaggtagaaatcatcactaatcagtcacataacagcaaagaattaagaaaaagaagactagtgaaaagtagagcgcacctattcctaaaagcagaaacccgggcatgaacgaatgatatcatgatcacgatgagtaagacatccgaagaaacagataagaaaggcaacccggaaaactcgaatataagccaggctacagttgatataatgataacccccaaagaaagatgtcgcctcctccataagagcaagtcagcagctacatcaaagaacaaagccatacaaaaatcacaaacagtagctttttgctggacctatgaactcatcatgcgtatccagagatttgaatcaatcaatttctcattcaaaatcaaacctaaacctaactttcacctgccaagttttccattttctactatacccaaaatgctaaatgtacttacacacatgacgattttcacaaccaaccaaaatcagaaaccctaactattccaactatcatccccaatttgaattttctgttctgtaaatccgagaaaattctcatcacaaactaccaaaatgatgaaaaaacacaaattctggaaaaaagaactcgcctttgccaccacccatgaactgatgaaccgtaatctgccgacccaacaatcgataatccgatgacgatcctccttcatttcttccatcgaaatcaccatcgatatcacttaaactatccatcggagaattaaaaaaaaaaaaccgaatttacacaaattctccgacttccaggttcctatttcgatctcgccgactccgatttgaaatttaccttaaagatacgatctcagtacaatggtttgtgaaagcagctagattgatgggagaatgacagcgattgggtggattatcaaggaggaaccaaatagaattggctttcacatgcatccaacaaattcaacatttggaaattctccgtttctagtcaactttcttcatttctttatttttttcctgtgaacaaacaaaaaagtaacatttagccgtcacaaaatattaaaaattacgctttattatattaaggccttgggctcactaatccaatattacggcccataaataaaaatcacatgtctacgtgtcaaaacagtcacttttctctatacatgacaggcagtgatattatcataaccctccacttatacacatgttcatttttggcgaccactagaaggagaaacaaatcttcattccaacaatg

SEQ ID NO: 9024 - DNA, 3000 bp, Unknown; identical to SEQ ID NO: 9023
  misc_feature (1)..( 3000): cDNA_ID_2993980_gDNA_ID_1971973_Annot_ID_177523 3000 nt of promoter + ATG

SEQ ID NO: 9025 - DNA, 3000 bp, Unknown; identical to SEQ ID NO: 9022
  misc_feature (1)..( 3000): cDNA_ID_2993976_gDNA_ID_1971973_Annot_ID_177521 3000 nt of promoter + ATG

SEQ ID NO: 9026 - DNA, 3000 bp, Unknown
  misc_feature (1)..( 3000): cDNA_ID_2179992_gDNA_ID_1971973_Annot_ID_177512 3000 nt of promoter + ATG
gcgtcaaaccaggatcaatgttcttgatataagccatgtgcggggctggtaagcctgttcacaaaacaagcatcattttcaaaatcctggtcgtcattaaactttaagcctcaaagattgtatagccaactaaccaaacaaattcttagcatagcactctttgatagtgctgaacttgcatccaaatataaccccacaaagatctcccttcttcagattcctcacacacatatttccttatcctgatatgtattgaccatcctgagccaatgtataggtctctgtcttcctccctgcacccattgcttctcactagaaagcatgtcaaaaccaaaagcgtaacaaaagcataagtgacagtaaatcgtcaacacaaaactgtcattaaaatcatcaagcaatttgcagttattatctgaagtactcgttcccagatactctaagtaggaccaacttgcattttgagacaatgttagcaacacataaacctaaaaaaattcacgagttccagaaaccttaagcagagaggatcttcaatcactgaacgttaacaacagttcctaattaagaaaccaaagaaaaatgaaagatctcatacccacatgagttctttctcagcaaacgctcagtgacaaaccaaaatcgaaggtttctaaaagagacaaaactgaaatctgaaacggaaacaacgaaatgaaaacaaatctgcgaagttgagacaataatacctcagattccttaagcgcacagctacttgaggtttaaggagacgaccgaagagagattcaaggtttccgagcttagagataagcaaacagagcaacattagagcacaatctccacaaaatctcaaagaaatttcaaaaataaaaacaacagctagagtaagagaagaccttacctgaacgatagagacgaagaagacgaagcgaaccgaatcttcagaaactcaaattcctgcgaataacagtcgagaaacgcattaggatgaagaaattttcacagagaaatggaatttgaagagaaaaatcttagagtttcttcgatttgataatggctagtatgagagagagagagagagagagagttaaaacaaaaaggtatagactggaaatcgcagaaaacactgcaatttattttccgagagaaagaaaatagatgaagcgcgaaaaagaaatatttatgagacgagtttacccttttgggtttttgggctttgacactaaaatggaaagttataggggtgtttccgtaatattattcatcagagaatgcagagagacgttgcagttgcctgtacgacaatcacgtcaatgctctgggttaataaagtagacagattttataggtttgtttaagatcatgacaaaacaaaaattaataaatttgttgttaccatcatttttaatttaattctgaaattataattgttgtttaaatccagaaattggagcaaggttactaaaaataaattcaaaaaataacatattttaaatttttaattcttttgttttataaaatgtgtgaaatattagatgtttatctttttaggttgcaagtattgcacaattcttttacttttgtaagactaagaaacagttcaaggttttggctaacgagtatcaatgccaagagtatcaagttctaacactagaaactaaaagaaaatcatggaggatgattgaatgttgcaaaccccatgttcctcgtggtactgaaatatgcattaacagtgttttgtattatactgccgtcgaaaaagggtctttaatggttactatagtagtttgcttcgatattagctcggagaagttcagctttatgaaagtcatggaaactttcgatagagatttgcctagttcaacaactatgataaactacaatggcaaattaggtttgttgatgacggaagagtctaccgatattgttagtggaacaagtaaaagtttcgagttgcgggtcctagaagacgctgaaaaacatgattggtcgaagcatgtatacatgttgcctcctctgtggaagaatgtagttggagaagagaccaagctacgacttcttggaatggttggcagttgcaccaatgaaattgtgttttcgtacaagtacccatctacatttatgccttcctacgtcttctactacaatatcgagaggaacacgatcataagacttgaaatccaaggaatggaagagcttaacggtaagtgatgttacatatatctaaaccatgtagagaacattaagcttgttcaagtattttagtattttatacaccttgagatttaggctattaagttccaatcataaggatcatttatttcatatatttttcttatgtattgttctccatttcagtaaaataatacattatttcattctatttaatttatatctaaacatactatactaagagaagaatcttatttctaatcgcaagaacttctgaactttttgttgtgtttggttttccatttttcaagaagaaagagaattttggaagagataatactataagagaatcaaataacaaattagcaaacatattcgttcatcaacatcaactgatgaagttaatcttctgaagactattgtctattgatcatcaagataatcacacaatgatctctgtttcttaagaaaatattccctcttttatcttagtcaatgaagaaattcggatttggacatgaccaagaagcttgataaaatactagctagaacaccgtattcctctcttcgtgtcgcattcataaaccacacaaaaaagaaaaaagaaaaaaacttctttaataagagtaaaatagtaaatgaataatatttccttctgcttcaagcaatctaagaaccgcgttaattaactttaagtaataagctctacttttcttctctttatttaagtaatataaaagaaaaaattgagaaaaaatcaagacaatgcgatcctttaattagaaatcttgtatcagacagacttgttcattattttgttggataaaa

SEQ ID NO: 9027 - DNA, 3000 bp, Unknown
  misc_feature (1)..( 3000): cDNA_ID_2179988_gDNA_ID_1971973_Annot_ID_177511 3000 nt of promoter + ATG
caatacaaactgaaactgaagcataccaaatcaaggattgacaacaaaagaagagagtattcccttagagccagtttcgaacgttgagtcaaatcatttccatattcttcttccttttagcgcatttgttcaaaagaaagaaagtagctagttaccatatgcttaaaaacttccattgctcccttttagccgaagtatatcccttcttgtttcaagctgcaaagaacccaaacaaaagataagaaagtttgcatttgaagctaggtaagaaaaaaacaaaagaaaaagtatcaatttacgagttttgcaaagtgtttttaccagctccatctccaaagtaatcatcctctcagcttgtttcagctgagtatgcttcaactccttgacttccgccaatagctagcagagaaaaacatattcataatgtttcattagagggtcacaagcaaaactgttttttatagttcagagaacgatggatgaccttaaacttacctcagtcaatatatccacaacagtgggagatccaatttccatcttgaaattatccatacgtccgatgtcatcaaccacgtctcctgtaccggcagaaacatacgatgatccacaaggcgatttagctatacttctttcctcaaagtcatcctcccaactgttaggcaccatagatgaagaagcttgtcctgtgttacccactaagctcttgaaacattccttatccttaggatcctccaaaatcttgttcagtccatcgagatggacttgaaaggaagatgttgcatcccaatcgatgaatgaatatgtatcctcagcaggctcttccttgctaatgctaggtactattctattgttagctgtagtagaggttcccttttgtgttggatggagattttgctgatgatgataagcattcactttgacatcttcaccttccattgcagcatttctgaatcctccactgtcttggtgtataggtggaactcgagcagcagatgtccaaggattttcaacacctttacatgcttgagatgaaccttcatttgttatagaatttttcttctcctgagttgaagaagcggtcatgtgactcagagctgatgagtaagatgtaccagactgtgacactgatggttgagttcttcgctcatctgcattattggaagctgtttcccattctttagtttttccaagattgactaatctcgaacctgctccgagtgcaccttctttcgagtctttctctttgtttttggtagactcatcggaagatttgaacagattgctccacttatcaatacgcgttgctcccgagtcacctatctgtgcaagagaagatgccggaataggctttctgggtggtggtacagcatctctggatatcgttggtggcctaacagatggggatggtttaaacaaacggagcagcttgtttgtctgacctcgatctagttcaaaccaaaacatcttgtcgtcattgtaattctcaacaattactgggctgaacttttcttcaggcaagggctcacaccgcactcggactcgtacctttacctgtggcaaagatttgcagaacgagatacatttctgtttagaggacatttgggtgactcaactaaagaagacgttctgtactaagcaaaggtacctgagcaggatatggacttggatctgtcccatttggagaccaagctttggaatcaatgttcagttttccttcactagcagcttcaaagatgccgtgaagtgttctgtcactgtagttgaacaggaacagcgtcaaaccaggatcaatgttcttgatataagccatgtgcggggctggtaagcctgttcacaaaacaagcatcattttcaaaatcctggtcgtcattaaactttaagcctcaaagattgtatagccaactaaccaaacaaattcttagcatagcactctttgatagtgctgaacttgcatccaaatataaccccacaaagatctcccttcttcagattcctcacacacatatttccttatcctgatatgtattgaccatcctgagccaatgtataggtctctgtcttcctccctgcacccattgcttctcactagaaagcatgtcaaaaccaaaagcgtaacaaaagcataagtgacagtaaatcgtcaacacaaaactgtcattaaaatcatcaagcaatttgcagttattatctgaagtactcgttcccagatactctaagtaggaccaacttgcattttgagacaatgttagcaacacataaacctaaaaaaattcacgagttccagaaaccttaagcagagaggatcttcaatcactgaacgttaacaacagttcctaattaagaaaccaaagaaaaatgaaagatctcatacccacatgagttctttctcagcaaacgctcagtgacaaaccaaaatcgaaggtttctaaaagagacaaaactgaaatctgaaacggaaacaacgaaatgaaaacaaatctgcgaagttgagacaataatacctcagattccttaagcgcacagctacttgaggtttaaggagacgaccgaagagagattcaaggtttccgagcttagagataagcaaacagagcaacattagagcacaatctccacaaaatctcaaagaaatttcaaaaataaaaacaacagctagagtaagagaagaccttacctgaacgatagagacgaagaagacgaagcgaaccgaatcttcagaaactcaaattcctgcgaataacagtcgagaaacgcattaggatgaagaaattttcacagagaaatggaatttgaagagaaaaatcttagagtttcttcgatttgataatggctagtatgagagagagagagagagagagagttaaaacaaaaaggtatagactggaaatcgcagaaaacactgcaatttattttccgagagaaagaaaatagatgaagcgcgaaaaagaaatatttatgagacgagtttacccttttgggtttttgggctttgacactaaa

SEQ ID NO: 9028 - DNA, 3000 bp, Unknown; identical to SEQ ID NO: 9019
  misc_feature (1)..( 3000): cDNA_ID_2781957_gDNA_ID_1971973_Annot_ID_177507 3000 nt of promoter + ATG

SEQ ID NO: 9029 - DNA, 3000 bp, Unknown
  misc_feature (1)..( 3000): cDNA_ID_2179976_gDNA_ID_1971973_Annot_ID_177505 3000 nt of promoter + ATG
agatatgaatattgctgaggattttattggtaaaagtgtttactttcttgtgtgttatggaaatataaaggtattggggactttcatcacagaatgggatgaaggaaaagctacctgcaaagagatgcttgccacaaaggagtctgctcaaatgtatgcagagcgtttggctgaacttgctactgctctaggctttgatgggtggctggtgagcattttttgcttggtttttataagatatctgtatttgatgggtggctggtgaagaaagacttctataatatatagactgtcacttgcagataaatatagagaatgatatagatgaggaacagattccaaatatgaaggaattcgtcagccatctaaaaaaagtcttgcatttatcgacacctggggctttagtcatatggtgagttgatcagaagtttttctttgttctttttgtataccactttgttctgataactttctgcaggtatgacagtgtcactgttcgtggtaatcttcagtggcaagatcaattgactgagctgaacaaacctttctttgacttatgcgatggaatattcatgaactacacatggaaggtctgtctatgggtttgatcaatctctcgagtctcagtttcttctatttgtcttgttttactattagtgagtaatgatgtatcaggagagctacccaaacctatcagctgaagttgctggggacagaaaattcgatgtctacatgggaattgatgtttttgggcggggctcttttggtggtgggcaatggactgtatgtctcagccactctttaatatttgcttctctattggtgtagagtacaaaacaatgatctatacttaaatatttcttttcttcctattcttttacatgctaggtaaatgctgctctggatttgctgaagagaaacaatgtgtcagctgccatatttgctcctggatgggtttatgagactgcacaaccccccaattttcacacagctcagaataagtaatattttaaatattttccaatctccttgtcatctttaaagtttgaactagcattactgtgactgtgagcttaaaactttattttactattgctgtaaaggagacgctggatcttattagtatgcatgtgttttctctccagatggtggtcacttgtcgagaagtcatggggaatagtccaaacttatccacaagtcttgcctttttactcagatttcaatcaggtaaggtgagattgatcaggtcttattttgtaacactaacaccatggtagatcatgcattgattttcttggttatgattatgttcagctatgttctgaaaccctcttctctcttttgttcagggctttggttaccatgtttcactcgaaggtcgccaactgtcagattctccatggtacaacatttcttgccaaagtcttcaggttcaaccatcttactgtctttgattttatatgaatcaaaaacttttcctgccacaacatgacaatcgttcttcctgatctgggtgtgtcgctcctctcatctgatgatctctgtgtttattctgttcttcacatcagcctctcctagaattcaatgaagacaacaaagatatcatccaggtcactgttgagtgagttctggccctaatactatcttcatattcatttcggtaaagccaagaagggaaaaatgtttttgacttttctgagcaacatttaaacaattactatgaatatgatagtgctcgagaggcatcttttaacggaggagggaacatcgtttttagaggaaaactcaagggagatgcgtatttcacaacaaggctcttcaaaccccatcttcagctttcatcttcccccatcacaatctcctactctgtaagtctctgcttctagatacatcacattatgagatcttcttgtttttactaatgggggtttttgagctggtgcaggtgaaatcagatgaaacctctaatcttggaatcctgctttctttctcgtctccatcactagagactaaatccatactcgtggcgccagaggatcccatccgcagatttgacgacatgtccttacagtgtctcaccacatcagtgcagactgtatccgagtggacggtacacgaggcaagtcttgtcatggatggtcacacactgactgaaatctctgccttttgctacagaccagagaattcgacaaagagtgcagaatttgttgcattgctcggacacatctcagtcaaagatcatgttcaaaaccagcagaaccccgagattttacttccagcttcatcgtgggtcatcgaggctcataacgtagagcttgtaccaggcaattccagttccaagatcctcagggttaagctagaatggagacagaaagacctcgaagattccgcattcacaaggtacaatgtatatgcagagaatgtgaagtcgactgatctaagaccgaggaaggttctagagaaaccgaaaagcgagacagtgctccttggaattgctcacgtaccagcctattatgtagcggaactggtggtagaatcagacgtgaaggcagtccgtttcatggttcaagcttgtggcgaagatgcttcattggggaagctggatgaagctcttaaccttcttgtggacctagaaggtctctcagtaaatcacgattgaaaacaatctatatatatttttacagggtatctttggcctaaattctcttgacccggctttaattcatttgggtcgggttttgatccggtttcgtagcaattttatcatcttacgttagatgtacacgacgcttaatttgctcaaggcttattctagagacaccacacgtatgccacaagccttttctcctctttccacgtgtccaacaaacagacaaccacgtcattcccatccctgaaccatcgccgttcccttaaacctctcaccgttcgcttttactccgacgtttacagagactatgctcttcgttcctttctctctctagatcttaagcccaaatg

SEQ ID NO: 9030 - DNA, 3000 bp, Unknown
  misc_feature (1)..( 3000): cDNA_ID_3044392_gDNA_ID_1971973_Annot_ID_177497 3000 nt of promoter + ATG
gagctcagtgaagagaagaaggaatcatcgtttccgaagaaatggccgctaggctacgaagccgatgctgaaacgccatcgttttgccttgacgccgactgttcaaccgactcgagcgagttaaatctgagttcgctccgtgagttcactcggactctagagaaagttggactgaagacggtagagatgctggcgaatgcacttgggtttggatatgattcaacccggtttaatactctgatgtgggttaaccaaggtgttcctgatgatgaaccggaggtaaccaacggattttatccttttgttgtttgtttacagtatcagataagggaacagaagtattgtttgctaaccgagtctggttgggtgtccgttttaccccgagttgactcggttcttgtgacgttgggtgacattgctcaggttagttctcttttgcttttgacaattgacagaacacatatatctcttttatttatctataattaattggttagttgtcttccttaaataattatcaaattatcatcctttgtaatggaactttattccactataccgttaactggctgttttaatgtattttaaacattatccaaaataaatgttttccaacgcatcgttcaaaaagagaacaagaatttggatatttccgatatttattgttgacaacaacaacaattgtggagcataaccggggaatgtgttttcacttttcgtttgaaacagatttatggcattgggaaagaaataagaatttggaaatttccgatatttaaatacttatacacatcacatcgcaattgtacttagtgtcctatagaattcaacaattcttttttttttaggtcaaaacctaacagctttctacaatatagttttcaacttttgaacagctaacaaacaacttaaaattggcaggtttggagaaatggagaggtcaaaagagtgaaatatcgaccagtgttgtgttcaggacaaaaagatggtccagtaaagtgtgtaacaatgacattgatgcttacacttcccatggacagtatggtttcatcattgaaggatatgatcagtgacggcgacaaagaagaagagtatgcagaggaggaggaagaagatggaggagcaagaagtgatgagagaagggcatttaggccttttagtttcaaggagtacgcatggagagtgtaccaagaacgtctcttcttcagggatccacttgacagatacagaatcaaatctttaaaagattgacgaaccgatgtttgatttgtttgtttctttcttgggttgaattggtactatagttcttgttgttactttttttcccccataaaatcttttgattttcagcggattgttagcattttagcattgagatatttttgtttttgttcgattcagttcagagaatgttctattttgatagtcactccatcattcaactaattttttcatatatactcatatcaaaactgtcactatttcaaaatcaaacttttaggttacaccaatgactctatcacactaaactcaactcctagattttatatagaagaatctatgactttgatgatgtactttaaaactgagtcttttgagatcataaccaaattctacttcataacttttgttttccaatgttgattatttgttataattagaaggtgacacaaacgcttatagcatcctgtttttgaaaatgaggaaatacagtgttggcttttaatctctcattgaggcagaatatcaatgaatgacttcaaatctacgtatacatgtttacttatttagtgatccatattggtgttgctctttaattttcttgtgagaatgaattatatacatcaaaattgattatatcatttaattcgagttaaaattataagtaatacaatcttcactaaacactaattaaatcgacgtaaatttcttatacgattttttcatgcaacacttaaatcgacataaatttaaatattttggtcttcataccctaattttgataagatataatagaaaatttcgtatatctttttttttttttggtaaaaagtttttttttttttgtttcatctccatatttagaaaatttatttcaaacttcgttctcgtttgtgttcatcttaatttttaaccatgattgagtcattgaccattgctcaaaacatacgcataaaattcccaaaaagtagtgtgtgtcgtgacaaaacccgacccgtcgatttacgcggtttgaaactcgacccgaatactatccgaacccgtaactttggcaaaagcacatcgtacagctcaggcacttgtagcacgtcgtctctcctttggtttctctccttatattcgacgagtgactccgattggatcgctatttcgtcatttctcactttccaaaaagaaaaaaacgaatctctctccaccatcatcacctttctccttcacttgcctcagatctggctgcgatttcaaatcttccttagtttctctcgcatcgctcggccgttgacggtcccgtcctttccgtggatctgattctggccccggattctctcgccgcgatctgaggtcaaacatggcggctgctaacgcgcccatcattatgaaggaggtcctaacggtgagttctctgtttttaaatctccgggaatcgagctaaaattttggacgattaacatgtttctatagttgtagtctctgatttctatcgatttggttctgctcacactgttatatgattgattcaagtttcattctgttctcaattctacccgatcgttgagatcaagttctctgatcagattttctctgcggacgctcagatctgtgttatctgaatgtatatagtccttagttttaagttattgtgttgcgcaatgtgcttatctactcggatcttgtaactaagttaatgaactatgccaattgattacttttgttttggaaattttccagcttccgagcgttgggatcggtcaacagttcatcacctttacaaatgttact

SEQ ID NO: 9031 - DNA, 3000 bp, Unknown; identical to SEQ ID NO: 9015
  misc_feature (1)..( 3000): cDNA_ID_1989356_gDNA_ID_1971973_Annot_ID_177492 3000 nt of promoter + ATG

SEQ ID NO: 9032 - DNA, 3000 bp, Unknown; identical to SEQ ID NO: 9014
  misc_feature (1)..( 3000): cDNA_ID_1989357_gDNA_ID_1971973_Annot_ID_177490 3000 nt of promoter + ATG

SEQ ID NO: 9033 - DNA, 3000 bp, Unknown; identical to SEQ ID NO: 9013
  misc_feature (1)..( 3000): cDNA_ID_2993973_gDNA_ID_1971973_Annot_ID_177489 3000 nt of promoter + ATG

SEQ ID NO: 9034 - DNA, 49 bp, Unknown
  misc_feature (1)..( 49): cDNA_ID_2687323_gDNA_ID_1971974_Annot_ID_58695 3000 nt of promoter + ATG
gaattccagtgataatgatgatgacgggctcctgggatcacctgcaatg

SEQ ID NO: 9035 - DNA, 3000 bp, Unknown
  misc_feature (1)..( 3000): cDNA_ID_1989378_gDNA_ID_1971974_Annot_ID_58696 3000 nt of promoter + ATG
accatttttccatattaaaattttatcgacgcctcagtttttgctgaaatgaacaacattaaatcatccatagacgacgatccacaactgcaaaactatttcttcaaatataatccgtttttgtaacccggtgtttctttaatccataattttgtactttaatgctttaaacatgaactatttgtgccaatcatcttttttggtaaagcaaataatagaggtataaagaaaaaaagtcccctatttttggaaaaataaaaaggaaaacctctgaagacactatccaatgaaaaagatgccaccattttcaaggcctcgtagcttagttgtgaagaaaaattataacaaaaggaaaaacatggattcttttttgtgttgctatatatcttaataagatgaagatatttttccttcgatttgagatttttctaaatgaacacaaaaactagtcaaggttttcctctataagaaattagggctaagttgagaaattaatgaaaacaatatacattcaattataagctatacgtgtacctatcaaagattattttctaaaaaaacatttcgagatcataggatttaaggagtcaacttactagttatctaatgacaatttaagatattatatatgtagaattagagcttgtgaattgtgataatagaaaaaaaattggaatctatttagaagacagagaggtttaaatttggaattgggttacatatcaatcatataatgattatgaattttattctctcttttatttgtgtgtgtgtgtaagtctgtaagattgttatcttttggggataagtgaaaaaaaaaaactcattcgtagaacggcaaatttctttttatcttttaatttttcttcagtacgtactactactattttattttatttttaaatcaaatgtttttttacctcttttattcttatatggatgctgaaagatattcctttattggaaaggtccatagatatccaactggctaacacatggaatgaaaggagacaatatcataattaagcatattttcacatctgtatatcttatatataaaacatcattcttattaatatatttaccgttgaatcgaaaaataggaatacgaggattttgaataattaactgcagcggaagaaatacggtggaatgaggaagtgttatgcacaaaaatgttatattatgatggttaagtaatttaggaaattcttataactaaagtgtaattattaatatttagaggccaatcatatttagttatatgtacgtatatcatggatgacagtttgttaccgatctcatattgcattaatctagctatcaaattaaagtggaatgctttttcttgatcaacaatatatacatatccatagtatgtgtgtaagcatatattgataaagtcgtataaagatgcatacccatgtatgtattgtgtactaatatataaagagtatttgcagtttgggtagctgaagagtcatgaagaaatgaaaaacgaacaaggaatatttttataaaataaatttatgaatgccgtatatcactgaaaacatgatcatgaaaatggtaactgagaaaatagctgaatgtgtaagaaaaacaaaaaaaaaagacaggacgaagctacgtggggacttgtgtaaacaacatgataagttaatataactaaattagtgcggcgataagcaattccatgcacctggtctgttttctttttctccgtaaggtgacatgaaatcgatattcaccaaattttggttgtatactagtatatttttttttcataaatagcaatagtaaaacaaagttactaaccatataaatgtgatttttaaagagtaattttgctgtaacagtcacgcaatacgtataatttgaaattaatattgtgtgcaaagacgtcaaggtgcattaaaataagaaacaaatactaaaagataggaatgacgtgaatttgattttaatgaattttttaatgacatggtgatacagtgacagggctgtgcaaaataggaagtaacaggatgaggaggaccgttagatgaatgaggatcaagcgtagatccgacactgacccgaccgtcgagtatgcaaccctatttaacacactctggccgaaccaccacagctgaataaaactattttttttaataataataaataactttagagaaaaggtataattcaaatccaacggatgagatctgtttccaagtccactcgctaaagaaagtggaccccagagagctcagaaaagtccacttccgatttgtaaacaagccaatcactttcgatttaccacaattgccccttttcaagatttcgttgaaaaacttttgttagtttttaagtagtacttattatataagaaaataagtaaattcaaccatcatgtcatttttaaaatttttaagcaaagtacgatttcttacatatttgatagaaatttgtagcctagttattctcgatagtatttgctcttctgtgacacactacacaaatatttaatccagttgattgcaaagtgtgagatgtaggaaaaaaaagagagggtataagagtcatttaacgaggattgctggttggtataaaagacggcgcttgttgaaggaaatgagtttagctgagacgctcacattgcaaaaacaaaaccaacaaggaacttgtctctctctctggctctctttctcttaacgtgatcataacgtgattcgaaaattggatatagataggtttcttgttggatcttgatccctctggaaaaggaggggagaatagcagttcatgatgggattttgtatctgcccgttggagtcacctgcgagattactatggagtacaagcttcttccgccataagatcatgatcttctaatccttcctacttcttcccatctttttaatcatcttctcgctatctctgcttcctctttctctctgtttcctctttctcagaactcagaagtagttgttgttttatttctgttgatcaaaaatg

SEQ ID NO: 9036 - DNA, 3000 bp, Unknown
  misc_feature (1)..( 3000): cDNA_ID_4255155_gDNA_ID_1971974_Annot_ID_58697 3000 nt of promoter + ATG
ctgcaaatactctttatatattagtacacaatacatacatgggtatgcatctttatacgactttatcaatatatgcttacacacatactatggatatgtatatattgttgatcaagaaaaagcattccactttaatttgatagctagattaatgcaatatgagatcggtaacaaactgtcatccatgatatacgtacatataactaaatatgattggcctctaaatattaataattacactttagttataagaatttcctaaattacttaaccatcataatataacatttttgtgcataacacttcctcattccaccgtatttcttccgctgcagttaattattcaaaatcctcgtattcctatttttcgattcaacggtaaatatattaataagaatgatgttttatatataagatatacagatgtgaaaatatgcttaattatgatattgtctcctttcattccatgtgttagccagttggatatctatggacctttccaataaaggaatatctttcagcatccatataagaataaaagaggtaaaaaaacatttgatttaaaaataaaataaaatagtagtagtacgtactgaagaaaaattaaaagataaaaagaaatttgccgttctacgaatgagtttttttttttcacttatccccaaaagataacaatcttacagacttacacacacacacaaataaaagagagaataaaattcataatcattatatgattgatatgtaacccaattccaaatttaaacctctctgtcttctaaatagattccaattttttttctattatcacaattcacaagctctaattctacatatataatatcttaaattgtcattagataactagtaagttgactccttaaatcctatgatctcgaaatgtttttttagaaaataatctttgataggtacacgtatagcttataattgaatgtatattgttttcattaatttctcaacttagccctaatttcttatagaggaaaaccttgactagtttttgtgttcatttagaaaaatctcaaatcgaaggaaaaatatcttcatcttattaagatatatagcaacacaaaaaagaatccatgtttttccttttgttataatttttcttcacaactaagctacgaggccttgaaaatggtggcatctttttcattggatagtgtcttcagaggttttcctttttatttttccaaaaataggggactttttttctttatacctctattatttgctttaccaaaaaagatgattggcacaaatagttcatgtttaaagcattaaagtacaaaattatggattaaagaaacaccgggttacaaaaacggattatatttgaagaaatagttttgcagttgtggatcgtcgtctatggatgatttaatgttgttcatttcagcaaaaactgaggcgtcgataaaattttaatatggaaaaatggtgtttaagaagaaaggaaagaaaagaaaagaaaagaagcagaacacctgagaggaacaatgactttaggacgtgttggtagtggactgtgtcgccatgtgtgtggttctctgaaaagaagatcaatctataaaggtgtgagcaccattcttagtttaatagttttccccactatcttttttttccttcttctatatatttcttaatacgaaaatactaacttaaaattcaaaaatacaaggaaacctttttttttgtaataaagggaaactttcactggaatcgtaagtcgtaactatctgtcatgatataatcatattttagcttctttatattaattttttttcagggccacgatgtcattttcagaaagatgaaaaggatataactattaaaatttatatataaacaaaagtatattcagtcttttcgtttgagaaggtccattcattatggtatgggttttcaattctcactgtacgcgaacagtgatattcaacttcatcatctcaagccacacacgtatacacatttaactttacagatacttacatttatagaattgtacaacagttcttgttacgcgtatgtacattcgtcacgtaaccctttactaaagcatatacagtgtcagtattagtatatatatcatgtcgaaactatttttgatttctagcaatttcttttgaaagtgataaattctatatcgtcaagcaatatttaataatgaacttgcgtttcctttttaaccttatacgtatttatattaggaaagaaagtacatgagcaattgagcatacatctttaagtaatcaactaatcaaaaaaataccttattaaagactggattatttatagcatgaataaagtaccagctacaatattagccccctccccccactatatttatatgtaaattacgtttgtgttgacttcatttaaagatgtcagtatgtcactaatattggacgtaaggtgataatgcaagactctaatgaagtccacttccaaacaaatgaagaaaatgaaattaacattttcatcacaaagaaattacatatatgtgttgtgttagttttttttctttcagaaaagtcgaaaccgaaatcacataacggattcactatgattctataactaacagataatacaaacaaagcccaactaacgacccatcatagtaaatcacagaaaaagatgataactaaacagatcgtgcaaagaaagcccaactaacggcccatcataataaattacaaaaagaaagaatccggaagaaaattgaaatcttatccagagtgtagagagaaagaagcggagtcacaaaaaccccttatcctcttcttcttcatcatcatctctaattcaaatatccgacgcagacattttagacaaagttactctctttctttctcatgttcttttcggacagaacaaaactccctaatccaaatgtcaattcctttggtctctctctgaataatcatctctcttcaaaccctattcaattttaactatcgatcttcggctaagtctcca

SEQ ID NO: 9037 - DNA, 3000 bp, Unknown
  misc_feature (1)..( 3000): cDNA_ID_1988791_gDNA_ID_1971974_Annot_ID_58698 3000 nt of promoter + ATG
aaccaaccctgctttgtacggtgagctcgcaaagggtcaaagtcctaaggtaaattaaaaataaaactaatactatgtgtatatcatggttgcttataaattaaaaatgaaacattaagaaaaagtaattaacaaaggtgtgtgaatggtggtgcagtacatggtgtttgcttgttcagactcacgtgtgtgtccatcacacgttctggactttcagccaggagatgccttcgtggtccgtaacatagccaacatggttcctcctttcgacaaggttaataatttaacacgtctgtctctctatagatataaactcttctatcttaaaccttctgcctcttgagtcttgacttttgtcttgagaagtcgtgacattcactttctattttcatttttgggttgctaaattggcaggtcaaatacggtggcgttggagcagccattgaatacgcggtcttacaccttaaggtgaaaataaaataaaataattaacaccttaaccaaaaaaaattatttatcaaagtacatgtaattaatttttgaatgaatttattactgtaggtggagaacattgtggtgataggacacagtgcatgtggtgggatcaaagggcttatgtctttccccttagatggaaacaactccacgtaaaatatctctatatccattttattaaaatttaatcaattttaataacaggatttattaaatgagattagtaaaaaatatatacgttaattgcagtgacttcatagaggactgggtcaaaatctgtttaccagccaagtcaaaggttatatcagaacttggagattcagcctttgaagatcaatgtggccgatgtgaaagggtatacaaacacatgttagatcgatgagctgatcatatataacaatataaatgtattgataaatgcaggaggcggtgaatgtttcactagcaaacctattgacatatccatttgtgagagaaggacttgtgaagggaacacttgctttgaagggaggctactatgacttcgtcaagggtgcttttgagctttggggacttgaatttggcctctccgaaactagctctgtatgaaccaatccatcatcatcatcatcatcatgaccatccatcatcatcatcattattatcatcgtatataatatatatctaccccatatgtaatttgtaatgtgcctttgactgtgatgagttatctctccctctctaccaactttcttcatatatataaaacaaaaaggaaaagcagatgatatagatctttcgtggtttaattatgaacaattgtctttattatttgtgtatcaaatcggttgtatttatggtttgattttattttctatgttgtttggtaggttaaagatgtggctaccatactacattggaagctgtaggaaactctttgaagccttacccgatttcacattgtcaattcaataacaccaagttgttgtttacatgcagatcttgatgaaactggtttttgattttacagaattaaaatcttgggggacagaaatttgaataaaaactaaaaaaaaaaaaatcaaaaaaaaatcattgaatcgtaaataaggatatccgggacgggcggatccggataatgaaaaaaatgaacccggatatccggatccggtaccattaactacatgaaataaaaaggcttggaaacccatttagctaaaagcccatatatttaacaaaccaaatatttttgatacccaagcccaattaattatcacttgccgacacaaacacaaaatcattctttgaaggtcacaaaatcatttcgatctcttctcgatatctcacaaaccctagaactctggatcttttaatttctgggttcgatacccaaatccttaaaactgtcgaattctggtacccggaacccggatatcccagtctaacagatccggatgcggatagtgaaactgtagatttgtagcttcgtagttttttggtcatataaaatataaacatctgaaatttgtctgtgtatgttgctgtttaaatttgtccgcctacacattatgggcctaggcccaagtttgcaattctttattgtggcaattaaatggtcaggttcggtttaggttttacatatccatcatgaaaaagcaccgttgaacgggcttaaatctttgtccaaggacgacgtttatgaatccggtataaatcgatcgaagaagattaaacccacaaaacgaaaaggctaaagcttgaggaaaaagtagcaaagtgaccaagagtcccatgatttcatgaagacatgaactatatatatctactcattgatttgataaatacattatatttgatgttacatatttttatttgagatttctaatatatattttcagaatgataaattttatttttatatttatcttgaactgatttttaagagaaaaatacaccgaaagaaagcgaagagttaattgcctaccaaaaaaaaagagaagagttaaaactttttccttaaaaaatcttaaataaattgaaaaataaaatcagaaaaaaataaatgataacagtatatcagaccattgttttggacttttgggtccggatacaaattattatccaaaagagagttgtgagaagtggagccgacacacgtcgacccctagcaccttaaggacaccccatgtggtcacgtgtaaacgtttgtttgtcataaaagaaaggttttttgagtatgaagaaatctgagaagtctaatcacagagaagagagaagcgagagttagcctcttctttagttgtttgttgcaataaacacaaacacaacttccctattttctgcttctttttgttcaactcctacacactccaatcacacaattcacaacccattgagaaaccaataaaataacctcaatcaaaaaaaaaaaaaaaaaaaaaaaaaagatgaaaatctcaatttagtaaaggagaaaaaagccatttcgaataacttgaaaaggttttggttttgcagaagaaaatg

SEQ ID NO: 9038 - DNA, 3000 bp, Unknown
  misc_feature (1)..( 3000): cDNA_ID_2990544_gDNA_ID_1971974_Annot_ID_58699 3000 nt of promoter + ATG
caaaaacctcttatcatcgaatctcagagcatcatcacaaggcagtggtaactctggctatgctgcgttttcctccaaattctttactcctcagggatggaaacttttgaatagacagagcaattcctttcagtcagggactaagaagaacattctttctccacctatcagtccactggtctctgtcttttcagaagatgttcctggagatggggaatggggttatgggaatttccctttagaggaatacatcaaagcccttgaccgttctaaaggagagctttcttataaccatgctcttggaatgcgctacagtaaggtctgaaatttgtctctttttcccgattactcttgtttcatgattctctctgtctcttcaatctctcaaacaccattcttctcttgttgccttttttcagattacagagcaaatatatgttggctcttgcatacaaacagaagaggatgtggaaaacttgtcggaagctgtgagtcttttatatgacttatattacctacctatggtatgcaaatgatagaattgaaagtatggttttaactggccatacttttctttctacagggaattactgccatactaaatttccaaggtggaactgaagctcaaaactgggggatcgattcacaaagtatcaatgatgcatgccagaaatctgaagtcttaatgatcaactaccctataaagtatgcaaagtcatatcgccttgaggcacattatgtgcgttcatgctttcatttcctaccgctctaatcagttttgatattttggtgccagggatgcagattcctttgatcttaggaagaagctaccactttgtgttgggctcttactacggttactgaaaaagaaccatcgtgtctttgtaacttgtaccactggttttgaccggtcatccgcttgtgtgattgcttatctgcactggatgactgatacctctcttcatgctgcttatagtttcgttactggattgcacgcttgcaaacctgacaggtttttatccatcttatctctgtcttgaccattaacctgcagaccatggatagcttttctgttttaatgaaaacatcagacaagttatatgtattttttcacagacctgcaattgcttgggcaacatgggatcttatcgctatggtggacgatggcaaacatgatgggactccaacacactctgtaacctttgtgtggaatggacatgaggtgactgttgcttcacatgcttttattactttgctgcaattctttatggaactcgtgatctgtagggttgagcaactagcctctgtgttttaagttacaccttggtttacagggggaggaggtattgttggttggggatttcacaggaaattggaaagaaccgataaaagcaacgcacaaaggcggtccacgttttgaaactgaagttagacttacacagggaaagtaagtcatgcttcttttacctttcccgttgatgctttttttaaggttcaacagtaaaacgtctcataatcttccctgcatgttaattgtgacttttgagggattgcaaactgcaaagaaacttatgaaaatgcatttgtgtcatataacttggtgattattgacaatgtggcagatactactacaagtacataatcaacggtgattggaggcattcagcaacttcaccaacggaaagagatgaccgaggaaacacgaacaatataattgtagttggtgatgttgctaacgtcaggcctacaattcaacaaccaagaaaggttactcctactatgcagtagtctcttcttcatacaataggaaaagcttgaataagatgttccacgttatatttgcctgattggttcaagacataaacctgaagcaacttgtacaatgttttgcaggatgcaaatatcataaaggtgatcgagagagtgttaacagagagcgaaagatttaggctggcgaaagcagctcggtgtatcgcattctcagtttgtccaataagactatgcccaaagtcgtagaagttttgttttggcataagttaaaatgttacatccattcttctgtctctatccattcctcgaggtacttaaccctaatatcgttgtgaacaacattgccacattcgcgcactctatgacaagagaatgttgacattatgttgtgtgtttgcatgaaaaaatgtcgacatagtttcgccgttgcccactttacatataagtcccaaaaccaaccctaatgcgttactggtctctgtatttcttcttcattttctctctctctctcgctctctcctaacatgttgaagaaaatagaaactctgttatctaatgttgcctatatgatgatttatggccatggaaggtctgagaggagagacccttcttctctattttttttatttcctcttcattttcatgctaagagttttcactgagtctgttgtttcgtagagtagaacagtccatgatcgatgttaatcctttgcatcttctagattgtgtatacaatagcaatctctggtctagagagagcctagagaagtatggatctttctatatgtataccacaaacaaatggcctaacatctaaagtgggtggtgattatttaagatgagagcctgagagggtaagtgaaagaggctgatccttgttttcatgataagggaccttatcctctaaacctttctgagaccttttatttttttataaaaaaaagaattgaaagaagaaaagagcacgtaaaagttttgaaatcttgagctaatattcctcatccacaagaaaagaagaaagtttgttattcaccgcagctatcgctttcgttatcctcgttcccacaacctcaccatgaccatgagactccgttcttttaaactcccaaatctttcaaccaatcccattattcacttaagtatatagtagcttccataagagtcttagttctaactataaatacacatatctcactctctctgatctccgcttctcttcgccaacaaatg

SEQ ID NO: 9039 - DNA, 3000 bp, Unknown
  misc_feature (1)..( 3000): cDNA_ID_1989377_gDNA_ID_1971974_Annot_ID_58700 3000 nt of promoter + ATG
cctactcaaaagccacagatcctgtattcctttttgaaactcttctctgcatggagagaacaacaacaaaaacccagatttgttatcgtggtctatagtaaaagtttctgttttaaattgatgttctaatgagcttgagaagagaaagagaagaagaagctcgtaacaaccaaaaagatcaagaaagaagaagaagaagaagaagaagaaagatgtgatctgatctataaatacacattatattatatcttcgattaattagagcttctcttttctatgtttatcttttgaaaatcatttctctctctctctctctggtctcatgagcatacactatacagactaatatgtataatggtctgacatgaatattttaatccagttagagcagctacaaaagctctcttaaagcatcaatattctacacatatgaacatatacctatatatcatgtgaatttagtagataaatatcctccgaaagataaaaattattatttttttaagtacaactaatgagtagtaattttatgaaatttacagttaaaatttcttaaacaattcagattaaaatcctcaagtgggtaccgggtataaaacaatacaaaattacataatacagtaattagttggaaacgggtttacaggaaatatcgtaactttgtgtttgatgagtcccgaagacagagagaatcaacttatgggaactcggcccctgatcatgtgcattcctatgcaattcgttctttattcttttttttttttttttctatataaacaattgataaacgaactaaaagaccccctcttttgaacaatttacaatttatagtaacatgacactccaaattactctctttaaattagtctcatatatagtaaaaactgaactttatgtgagccacttggatatttttatatgtagaatgatcatatatgtcaacgagattagtaggagtatttaggagttctaaaaatttaatatggattttatgtacttgcgcataactttacgtagactaaataaacagtttctcaaattaactgtattatttgtcgtggttttcaaaatctgtaataagcagcggcgttgacgcctttttccctcttatgtttgctgcctttagaagcactttgcttgagcccatgcacgtgcgatgctgcgaagaatcacgtgcgccgggctcaaaggccgccacgtcgatgctcctctttaattctttaggtaacaaagttttcaccgtccaactgtcagtatgtcagtgacacgtacgcacacacccaacggtcttcttgcaacaagagtcgcgttctcattctgctgcgtttgcgtcactgaccgcaatatcttcttccgttttggacacagagtatgtaatgtaatgacacgttctccttttttggttgactttaagaagtcaacggcgttagctgtacgtgtgttgtggaccgcatttggataacccgtaatacaagtaattttattaatcacggacaatatactataatgcaactagtcgatctttgtcaaattactggttttgatatgtgtgacactaatatgttcataacttcatatatacgcgttccacggccggtgacggactccattatgaatattcttcttaaatttaaacttatatgcattggaccagaagatgcatgttgacaaaagaaagtgatcagaaagcatagaagagaccaaataagttggtttagtcgaatacgtattcaattcatgttaaaaaaaaaaatcaaatatacaaatataatcattgtcatgattaatcacacatgagaaaattgatatttgatagcacaaaacatccccatttctgcatttctggtttttgttggttcttctgttaaactcttaatgcttaaagcaaatatggagatgttgatctgatttaattagtagtaacccgaaactgcgaagaattagctccggagaaggccggccctgaatttgggcaaatttgggcttgattaggctacaaatagtatgttcaaactcgaactgaaaacattaattagactctattaaaaaatgactatggttaagctgccaactcattgctccacatgaaattgagaaatgtaacatggagatcgatctttatataatatttagtgataattaaaagaagcaatctttggattattcttcgaagaatatgacagattacaattccaacagcaatgtttaatttatatggcagaacatgccaatatggacttcaatgttgctattcgttgggaaatggatattggcatgtggtacaattatttaatcatgcttgtttctatgcctaattttatcaaataagaatgttaatttggccttgagtcatttgtcagggagattttagtgccgacgggttcaaaagacaatatgtttattgcaaagttgttatagcaaggttcggaaaagtcatttataaattcgctaaaagttgcgtttgattaaattatgcttattttgtttaatcttagaggataacaactattggactcctagtgaaagtgaaacatatgataactaatttattttagttattttgactaatcatttgtttgtaactgttaaacttggaaattattcagcaaaaaaacatttcttgtatttgcaaagtcacagaatatgatgaataggttttattataatagaataaatcacgagttcacacaattctttaaagaattacagaaatcgtaaaatgattatgccaaatctgatttcacgtctaacatatttggttggttgataagaataaaatcatactttaggttaccccctcatcgtcagcattgacgtttataatttcaatattctcataaacaaatacctcgaaagcgaccacgttttatcgcctagtattgacgaacaagctaactaaaccactcccacatgttacatgtaatgacattatatatacagacacatagacacagcaagtttacagggacgcgaatcgtaaacaagacgtaaaaaacaatg

SEQ ID NO: 9040 - DNA, 3000 bp, Unknown
  misc_feature (1)..( 3000): cDNA_ID_1989376_gDNA_ID_1971974_Annot_ID_58701 3000 nt of promoter + ATG
agaccgttgggtgtgtgcgtacgtgtcactgacatactgacagttggacggtgaaaactttgttacctaaagaattaaagaggagcatcgacgtggcggcctttgagcccggcgcacgtgattcttcgcagcatcgcacgtgcatgggctcaagcaaagtgcttctaaaggcagcaaacataagagggaaaaaggcgtcaacgccgctgcttattacagattttgaaaaccacgacaaataatacagttaatttgagaaactgtttatttagtctacgtaaagttatgcgcaagtacataaaatccatattaaatttttagaactcctaaatactcctactaatctcgttgacatatatgatcattctacatataaaaatatccaagtggctcacataaagttcagtttttactatatatgagactaatttaaagagagtaatttggagtgtcatgttactataaattgtaaattgttcaaaagagggggtcttttagttcgtttatcaattgtttatatagaaaaaaaaaaaaaaaagaataaagaacgaattgcataggaatgcacatgatcaggggccgagttcccataagttgattctctctgtcttcgggactcatcaaacacaaagttacgatatttcctgtaaacccgtttccaactaattactgtattatgtaattttgtattgttttatacccggtacccacttgaggattttaatctgaattgtttaagaaattttaactgtaaatttcataaaattactactcattagttgtacttaaaaaaataataatttttatctttcggaggatatttatctactaaattcacatgatatataggtatatgttcatatgtgtagaatattgatgctttaagagagcttttgtagctgctctaactggattaaaatattcatgtcagaccattatacatattagtctgtatagtgtatgctcatgagaccagagagagagagagagaaatgattttcaaaagataaacatagaaaagagaagctctaattaatcgaagatataatataatgtgtatttatagatcagatcacatctttcttcttcttcttcttcttcttctttcttgatctttttggttgttacgagcttcttcttctctttctcttctcaagctcattagaacatcaatttaaaacagaaacttttactatagaccacgataacaaatctgggtttttgttgttgttctctccatgcagagaagagtttcaaaaaggaatacaggatctgtggcttttgagtaggttaattaattagtcgacaagaaaacaaaggtatgtaaccatttgatcattctccattgcttgttgtctcgcttagatccttatcatatttaaatgctaaaatggatgattttttttgagacttttttatatatatatatatatttataactaaactttgatagataatctagtttagttagtagttgcacaaaatacattttgaattctccgttaaataggcgtttcaatttataagaataagatttatgataattttcgggttcaaacttacatattacacgttttgttatatgttacacctagttaaacatatagtgtttcatctagctatgcataagagtgtctcaccataaatcaaatgggcagtttgtgtttttttttctttatatagactacacagaatatatagtgtgcactatcttacgtttgtccggtgtgtcaatgttgatttttgcatcaagttctccttcgacaaaacaaaatgacgatatatatctatctatatatatatatacaaactgtattggcttcgtactatatacatacgtcagtcttattaattctacaacgcagatcaaaatttgaattttgactaggctttaatgtgtacgattaccttatacaagtgaaaaagggtcaatcgtacgtttacccttaaatttctttttgttagtaacatatcgaaaaataaaccgttttatatatattttcaaaatacttattcttcttgttaatgctgtcacatattataaatcattacaatgttttgacaaataaaagaaaaatcattattacaaatctaatcgttttaaaatcctagggaatcctactagattattattactattgtagaccttgtttcttttgtcacattaattaataacaataaaataatatatatttttaaaaatatttttgttttgttttgcattgtatattatttagctgtagatttgtaatgggccacgtaattgggccatgctaagacccggcaaacccatgtgagatatatgatctcccgcactatagtccacgttatctcactgatatctcattattttaacaataagaccgtctcttaattttattacaagttttcttttactcttgtagccttaaattttaggctgaaaattaaagttttgaaaaaagctatagggagggactatgtaaaataaaaaaatgtacgttaccatcagattttaccataaagagccaaaaataaaatatgcaaaactccactaaaaataatattaattcccctagccaacaaaaaagattcagattcatatcccacgcgctcgttcaaatcctctcattcgccacctgatcaaaccaatctcaatttgaaaattgaaatagacaaaatcgtgacattgggacataaaaaagcactaggacaaaattctagtcgacgcaaaaaaaattcgaaaaacgtgagtcagcgtatgtggtttacacgcgccaaagtgggagcgtgagtggggtttgaatgcacctgaaactgtctggtcaataagttaaagtgcatgggaaaaatcttggttgctgtttcctatatatctctctttttaccatcaacatgttacatatatatatggacaaaaatctgtatatgtgaatgcatataggagtgtgatgtatttatataagttagtaagctttgttctctttctctatttttttggcaggtatataaaattttaaa

SEQ ID NO: 9041 - DNA, 3000 bp, Unknown
  misc_feature (1)..( 3000): cDNA_ID_2687055_gDNA_ID_1971974_Annot_ID_58702 3000 nt of promoter + ATG
agctgacttgcttgttaaccctgctcaagtcaacattggcaatgttgacgagcttgtggctaacaagtcaatcacacaggtattgcttgaactgattctattggttctgctgactgtttcaggagaatctgattgttgtgcttttttggaaacagcatattgaagtggtagcaccaatggagaaacagaggaggttagagcagatcttgcggtctcaggaaccaggctcaaaggtgataatattctgctcaaccaaaaggatgtgtgatcaactaacacgcaatctaacccgccaatttggagctgctgctatacatggagacaagtcccagcctgagagagacaatgttcttaatcaattccgcagtggcagaactccggttcttgtagcaaccgatgttgctgctcgtggtctggacgttaaggacatcaggtatttatataatccaaatcctcccagtcctgtaaaacaaatgattaaattatgtgacttgatgattatattagctaatacgatttgagatcacagggcggtcgtaaactatgatttccccaatggagtggaagactatgttcatagaatcggaagaacaggaagagctggagcgactggtcaggcattcacattctttggtgatcaagattcgaaacatgcttcggatctgatcaagattttggaaggagcaaaccagcgagttcctcctcagatccgcgaaatggctacacgtggtggtgggggaatgaacaaattcagtcgttggggacctccttccggcggccgtggtcgtggtggcgactctggttatggtggcagaggtagctttgcttcccgtgacaggtaaaattaacataggacctcatcttcgtaaatttatctctgtatgccactgaaaatatgattgtgagtttgagattgtataaatttttgatgtaaagtagaagcagcaatggatggggaagagagcgagaaaggagccgtagccctgagagattcaacagagctccaccaccgtcttccaccggatctcctcctcgcagcttccacgagacgatgatgatgaaacacagatgaaaagagagatacaaagctctgataaagccaagtgacagaagattgtgttgtgggggatttcccttatcattgtgacattatatattttttggccgatgaagaaacaaaagaaaaaaaaacaagaccaagaagactgttccctcccattggaaatttacgctcaaaactacaattgatatcttacagtttgtatttcatcttatttattattgcagctcagagattggtaagaatgtttcattagatacgaacgactttcttctaatactgtgggattctctagcatttaaattacaaatcaaagtggtaatattatgatttcggtttagtattgttagatttggtttagtgtagttcgatttgataaactgattctacccaatcgaaataatcaaattaaaaacccaagtaatatcttaatccaaatacgagctgaacaaaatcacaactatctaaaagcattaaaaaaaaaaaaaaaacttggattatttatgtgtatttcattttcaaaagtgtcatattataaaaattaagaaataaaaatgaacattagaaaaagaagtttggtgagtctatggcttagatgaaagtgtatgtcttgtgtactttgatgataatataattgaggacagcctattaatctccaaatagactcttgttttttgtggttacaaattaattttccttttacaactaaacgaatcatgaactcctacaatctaaaatcaaagctcacactacatgttcacacatggcttatcttcactatcaatattaatctttcattgattgttaggagattactcttttaggagtttatccttaataaatcatcatcaaccaaagtacaaactaacattataaaatcattatacatagaatgacagttcaaggtttttttttacgaattatagtaaaccaactattatttagttttaaacttcagttagtgtatgtgttggttaaatcatcaaactcaaaatatacgataagtagttggttaaattattcttgaaaaagaatattaataacccaatttttatactctcttacaataatttaattgaattgtaagctgacacatcatttagatttccagccacaaaacctcacttactaaatttggcatatgaattacaccaaaccttctcaattaattgcccaaaagcaaacgctattacaactttcatttcattttctctatctatactacttatattttctttgtataaaatgtaaactcgttaacacacacaaacaaaaaaagataacgttgaaaaaaataaaacacatatttcagactgtagtttagatgtggtaaaatatagcaagaatataaaaatatcaatataagtttcaaaatttagagaagaaagaacttcattgattgtgagttctaaataaataatggttagtatatattagtgatagagggttaggaagaagtcgttatatacataaactcagtgtaatgtttctgtcaagctttgctttgatttaagattgtactttcttccttctcactgtttacaattcgtgtggtcgtgaactaatcacgccaagttctctcgtttaattattaatttgatgtttagtttttcttggcaactttagagttatatatatgattaagttttgtaatcaaatacttcatattttcattgattttgcatattaatgcatatgttttcataaaaaaagaaaaacgagtgtaaagttattgatagtttctgttacttattaatttttaaggttatgtgtattattaccaattggaggactatatagtcgcaagtctcaaccctataaaagaaaacattcgtcgatcatcttcccgcctcgagtatctctctctctctctctcttctctgttttctttattgattgcatagacaaaaatacacacatacacaacagaaagaaagatg

SEQ ID NO: 9042 - DNA, 3000 bp, Unknown
  misc_feature (1)..( 3000): cDNA_ID_1989375_gDNA_ID_1971974_Annot_ID_58703 3000 nt of promoter + ATG
tatttttatcatactcaaaaacattcagatagtagaacgagagaaaagtcacataataaagacaactcttctaaataatactaatatcaagtttgcagtatatccaaaaacaaaacaaacttttttcttcttacatgaaaatgaggaggtagactcatgtaacataactcttaccaatagaggaagaagaaaaagttagcaagagtcggttacttgtgagaaattccaacaaatgccggaggatttatgcacatcttggagcatctgataagaggaaaaaattatgttcgctctcacatttctaaatccaaatccaagacttccatctccattgttccttgccaagtctactcctgaatcagcgttgagcagaagaagcagagctttttcatcttctaactcttatccttggagaccgaaccttagatttaatggcttcaagctcaagtcagctacagttccggagaatgtggaaggaggagatttggaatctggaagtttggttaaagggttgaagctaggaggcatgtttggagtttggtaccttctcaatatctactacaacattttcaacaaacaggttccttctttgcttcatttaattaaacagtccatttcaatgcaagaagcagtactcgaacctattatcagtcttcatacaagtatgaaacttgttcattcatcgatccaggtacttagggtttatccatatccagcgactgtaacagcatttcaattagggtgtggaacgttgatgattgctataatgtggctccttaaactccatccacgccccaaattttctccttctcaggtaaatcaaatattgattccgtcaaaccctaaaaacagagagattcattcaattgtaatcctctccagtttacggtgatcgtacaactagcagtagctcacacgttagggaacttgttaacaaatgtgagcttaggaagagtaaatgtctctttcacccacactatcaaagcaatggagcctttcttcaccgtcttgctttctgttctcttgctcggtgaggtaagcaaaacaaagatacgctctgtttcagacttaatctataaccttagattatacaagagagttatattttcagacataatctttgaaattttgattaatgtccagtggccgagtctgtggattgtttgttcgttgttacctattgtcgctggagtctctttagcatctttcacagaagcttctttcaattggtatgaacaacaagaacaagaacaaaaaaaatagtattcttgataaacttttgatgaagttttaattgatttgattaattcatggtattgggataaaccaggattggtttctgcagtgcaatggcttctaatgtgacgaatcaatcacgcaatgtcctcagtaaaaaattcatggttggaaaggtaaaagagtttgaatataagttatccttatgatctcaagaaagaaactagtaatcgaaatctattaatgtttgtatattgaaacaggacgctttggacaacatcaaccttttctctataataaccattatctcctttatcttactggttcctttagcaatcctcatcgatgggttcaaggttactccttcgcatttacaagtagcagtaagtggaaaagcataaaccgatatagctagatgatctaaaagagaaagaactaatgtgtgtttgtatgtggttgcttgacagacaagccagggtttgtcggtaaaagagttttgcatcatgtctctacttgctggtgtttgcttgcatagctaccaacaggttggtccgtctagttcctccgtttcagaaaaactgtactgaattttgtaaagtcggttagtgttaggcttctaatcaacacataaaaattggggttgttgttgtaggtatcgtatatgatattggagatggtgtctccagtaacacactctgtagggaactgcgtgaagcgtgtggtggttattacatcatccattcttttcttcaaaactccagtctcacctcttaactctataggtaaacaactactagtagtatatattagtaaaggatttgttacacttgttcattttattgaagcaatatataatcacttgttaaataaacaggtaccgcgactgcactagctggagtatatttgtacagcagagccaaacgagtccaagtcaaaccaaatccaaaaatgtcttgaattttgtatatagaagctcttagtttattatttatgcgaaaaatgttgatatttttgttcatccatgtcgtttttacatgacactattaacttttgttaaattcaactaatctcattaaataattctattctttacatggaaattatataatgggcctaggaataaaattggagtggcccaaaagggcccaaaagaaggaggcggctcattaaggtgcagatatttttgttgcgacgatggatggttttataaacctaactaacagagacggtctaaagttggacatccttgcttttggtctaactttctctctcttgcttctacgcttcttcttgtggcgtagattgttatagagagggaaaccaaaaaagggaatctcaaaagctcgagttcacagatttgacccgagtctttaatccaatctgctggttcgttttccacattcaaactcgactcttgaatatcaaatcaggtacgcgtttatctgttgacaaaattcctcaatcctgacttagattcctagaatttggtatttaagctctctgtttcaatttctagtttctctctaagattgcgtcggtttggtcgtgtttaattctgatttctgatcgaatccttttattacgtgttagtttttttttttattgttcgatttgaatccagatctgtgactcgattgcagttggatgcttttctcatttatggttgaattaattgaaacctaagtcgagtttggtgatgatttctgtggattaccgatttggtttactgaatcgctttgacatgttgcagaagtctttgctatg

SEQ ID NO: 9043 - DNA, 3000 bp, Unknown
  misc_feature (1)..( 3000): cDNA_ID_1989374_gDNA_ID_1971974_Annot_ID_58704 3000 nt of promoter + ATG
ctagaattacgcatcaaactgatatcatatatgaagtcgcaatgggttacaacttacaagctcttgaaatcgatatttggtcacaaaggtgatccttaaatcgataactgatataaagtactgtacagagttggctaaaccgatggctaccgaccaccaaaaaaacctccaggtggagctcctccttcgttcatcaacttatccagaaccacgttgaggtcaacagcttggccgttttcagtcagttttctcactgttgctctgacttggtcccttgggaatcccatggttgtcaccctgtcgattacatcatcgattggggctctgctttctgatctaggggaactagagccaccaccgctgctgacggctgaaaccattggcaaagcgtgtggcaatggacgtgaatttgagagctgtgggtaaccagttccattgctacttatatgtggcggtttcgctgaggacattggtgaaccactgtatgtgtaaggttcagacaagtagccggacggaaaacctgaattagatctaccacccgctccatcgtacattgatggttgtggttgaggagggttgtagaactgttgagaaggggtagaaccagcaggtggctgttgacgaggagggtttggcgggtaagattgcatctgatatggtggttgttcttcggggttgtagcctgatgatggtggtggctgttgggggtactgtggctgctgaggcggtgactggtaagatggttgatgcggcgtttgggtctgaggagcttggtaaggaggcgggtttgatggaggtggttgaggatgactaggcggaggacaatacggctcttgttgagaagaaaactgcgtaggtagctgaggtggtagttgcgaggaaggtggctgggaaggagcagcagtggaagatggtggctgtgggaaagaagtaagaggaaactgctgcatagggactggagcgggcgattgagcagtgggatcaacgtgtaaagagtgtgttttggcatgctggttggatacctgatgctttgaaagctgagcttcgagaatctcttgtttgtccttcaatagttgcacaccactctgcacctgcacaccattcgcataaagaaggaactgaagtatcaacagaaagtactataagcctggttcaagaaaagacatgttcataaatgagaaaatttctgtataaaaaagatcaatagttgccaggaaaagctataaattctagtttcgaaaagcaatcagcaaagttacctctacaaggatatttttaagctgtctcattttcccatcagtgctgccgtgactattgtcaacagaaactttgagatcatccaccaggttctcgaggttgtgggttctggtctccagctgtgaaagacgtgcactaacaccttccattacatgaagcaaggtatcggtatgtttcttcattgtcctatctataatctcggacataatagtcgtgttaaacacattttgacccttgtcaggaaccaacttggaaggttcaatagaatcgagagatccaaaattctggccgaataaaaaaaaacaaatcaatcagaaatagacaagtcctcttataggcttatgatgtagaatcatgtacaaaaaaaaaaaagagaggaagattcgagaagtagtagtaagtacagtgttaggcgaagtagtggaaacgggtttataatcagaggcggaccaattaaccctagtcgtggatccggcgagatctaaagccgagtgagacaatcgtgcggcggtggtgggacgtatgggatggaaatcatagctaggaacgatcacttctttcttagagtccaatccattatcgccgatcacctgcttcttctggtgatcatcgccgtcatgattgttcatcagatcgatgaaatcagtggaaggtagagatgaagaagaagatagatccattatctgcttatccataaactgacaagtattcatcgatccacccgacaatttctccgactcccgaatttcttcttttctttctaaaacccctcagatcgatttttatttttttatttttattttatttatgtcataaaattgaccaagttgctcatgtcgacgtaccttctgattggcgtagaaggttatggaccctaaatgggccgaaatgtatttagaattcagtttccatcctctccgtttaaagcccaaattgtgatcaatgacctgtaccaacactgacataataagtaaatggtataatcaataatgtgatcaaagcaatgggaccaaccttatttgtaatagtatgaaataacacggaaagaaaagggtggactcaggagcatacaatacaacatccacatgtttcaacgcggcccctttcatatcatccatacaattctcccctgacattttcaaattccacactaaaaatcaattggtgttgtggtcagtaatttgtcatgttcgtacgtaaactttattttaaataattatttatagcgttaccaactttttgatattattataaacgaagaaaaccacggcccctttgtaaagaaatgagtgaccaagtatgtcaaatcatttccataacattatttacagaacacacatggaatggagaacatgagaagaaacaataccggcaaataccactggctcttatgaggaaagataaataaaatcgagccaatgttatattgaaaaaaatgtcggcatcggcatgtgagttatttttatcatactcaaaaacattcagatagtagaacgagagaaaagtcacataataaagacaactcttctaaataatactaatatcaagtttgcagtatatccaaaaacaaaacaaacttttttcttcttacatgaaaatgaggaggtagactcatgtaacataactcttaccaatagaggaagaagaaaaagttagcaagagtcggttacttgtgagaaattccaacaaatgccggaggatttatgcacatcttggagcatctgataagaggaaaaaattatg

SEQ ID NO: 9044 - DNA, 3000 bp, Unknown
  misc_feature (1)..( 3000): cDNA_ID_1989373_gDNA_ID_1971974_Annot_ID_58705 3000 nt of promoter + ATG
gatgaacaaaaatatcaacatttttcgcataaataataaactaagagcttctatatacaaaattcaagacatttttggatttggtttgacttggactcgtttggctctgctgtacaaatatactccagctagtgcagtcgcggtacctgtttatttaacaagtgattatatattgcttcaataaaatgaacaagtgtaacaaatcctttactaatatatactactagtagttgtttacctatagagttaagaggtgagactggagttttgaagaaaagaatggatgatgtaataaccaccacacgcttcacgcagttccctacagagtgtgttactggagacaccatctccaatatcatatacgatacctacaacaacaaccccaatttttatgtgttgattagaagcctaacactaaccgactttacaaaattcagtacagtttttctgaaacggaggaactagacggaccaacctgttggtagctatgcaagcaaacaccagcaagtagagacatgatgcaaaactcttttaccgacaaaccctggcttgtctgtcaagcaaccacatacaaacacacattagttctttctcttttagatcatctagctatatcggtttatgcttttccacttactgctacttgtaaatgcgaaggagtaaccttgaacccatcgatgaggattgctaaaggaaccagtaagataaaggagataatggttattatagagaaaaggttgatgttgtccaaagcgtcctgtttcaatatacaaacattaatagatttcgattactagtttctttcttgagatcataaggataacttatattcaaactcttttacctttccaaccatgaattttttactgaggacattgcgtgattgattcgtcacattagaagccattgcactgcagaaaccaatcctggtttatcccaataccatgaattaatcaaatcaattaaaacttcatcaaaagtttatcaagaatactattttttttgttcttgttcttgttgttcataccaattgaaagaagcttctgtgaaagatgctaaagagactccagcgacaataggtaacaacgaacaaacaatccacagactcggccactggacattaatcaaaatttcaaagattatgtctgaaaatataactctcttgtataatctaaggttatagattaagtctgaaacagagcgtatctttgttttgcttacctcaccgagcaagagaacagaaagcaagacggtgaagaaaggctccattgctttgatagtgtgggtgaaagagacatttactcttcctaagctcacatttgttaacaagttccctaacgtgtgagctactgctagttgtacgatcaccgtaaactggagaggattacaattgaatgaatctctctgtttttagggtttgacggaatcaatatttgatttacctgagaaggagaaaatttggggcgtggatggagtttaaggagccacattatagcaatcatcaacgttccacaccctaattgaaatgctgttacagtcgctggatatggataaaccctaagtacctggatcgatgaatgaacaagtttcatacttgtatgaagactgataataggttcgagtactgcttcttgcattgaaatggactgtttaattaaatgaagcaaagaaggaacctgtttgttgaaaatgttgtagtagatattgagaaggtaccaaactccaaacatgcctcctagcttcaaccctttaaccaaacttccagattccaaatctcctccttccacattctccggaactgtagctgacttgagcttgaagccattaaatctaaggttcggtctccaaggataagagttagaagatgaaaaagctctgcttcttctgctcaacgctgattcaggagtagacttggcaaggaacaatggagatggaagtcttggatttggatttagaaatgtgagagcgaacataattttttcctcttatcagatgctccaagatgtgcataaatcctccggcatttgttggaatttctcacaagtaaccgactcttgctaactttttcttcttcctctattggtaagagttatgttacatgagtctacctcctcattttcatgtaagaagaaaaaagtttgttttgtttttggatatactgcaaacttgatattagtattatttagaagagttgtctttattatgtgacttttctctcgttctactatctgaatgtttttgagtatgataaaaataactcacatgccgatgccgacatttttttcaatataacattggctcgattttatttatctttcctcataagagccagtggtatttgccggtattgtttcttctcatgttctccattccatgtgtgttctgtaaataatgttatggaaatgatttgacatacttggtcactcatttctttacaaaggggccgtggttttcttcgtttataataatatcaaaaagttggtaacgctataaataattatttaaaataaagtttacgtacgaacatgacaaattactgaccacaacaccaattgatttttagtgtggaatttgaaaatgtcaggggagaattgtatggatgatatgaaaggggccgcgttgaaacatgtggatgttgtattgtatgctcctgagtccacccttttctttccgtgttatttcatactattacaaataaggttggtcccattgctttgatcacattattgattataccatttacttattatgtcagtgttggtacaggtcattgatcacaatttgggctttaaacggagaggatggaaactgaattctaaatacatttcggcccatttagggtccataaccttctacgccaatcagaaggtacgtcgacatgagcaacttggtcaattttatgacataaataaaataaaaataaaaaaataaaaatcgatctgaggggttttagaaagaaaagaagaaattcgggagtcggagaaattgtcgggtggatcg

SEQ ID NO: 9045 - DNA, 3000 bp, Unknown
  misc_feature (1)..( 3000): cDNA_ID_1012219_gDNA_ID_1971974_Annot_ID_58708 3000 nt of promoter + ATG
tccgccacaaatctatgtacttttcttctaatctcaatcaaactctctgccagtcctttcttaattcctctctgcttcaccgaatttctcaacttctccacattctcccattctcccttaaccccatacacattcgacattaacatgtaatagccagcatgattagattccaattcgaaaagcttctttgcaacagtttctgccatctcaccattctgatgaatcctacacgcgcctaaaagagtacccaagatttgaggtgtcggtgaaaaaggcatccgctttgtgatttcaatggcagtatctagatctcctacacgaccaagaagatcaactaatacagcatagtgttctaagttgggagcaagtctatagtcattcaccatcaatttaaatattctcaacccctcatgtatcaaacctgcgtgactacaagcagataatattgagagaaatgtcacttcattaggcttaacttctgagctcttgaccatgtgattaaatgtttccagtgctttagtgccctttccatggatgccataaccagtgatcaaagatgtccaaaccacagtgtcctttaaagcaatcccattgaatactttagaagcattgcctagactcccacacctcgagtaaagctctacaagagaagctccgatgaatgggttactgtcaaatccatatttgataacataactatgaaagcatttagcttgttcgagaaagcctaactccgaacatgacccaagaaccttcaccataagaatagcatcaggcctggtattattttccagcaacatgatggaaaattcctcaattgatctgtgagccattccatttaatgtaaagccacttatcagcgcaacccaagagactacatcttttcttggtatcctggagaatacagcataagcttcttcaggggagaaacacttcatatacatatcaactagagcagtagagactttcacttctgtctctaaacctttcctaatggccaattcatgagtcttcctaccttgctctaaatcatgagcagctgcacaagcttgtaaaacacagagcacggtagctacattaggttctgttccatcatccatcatatcattgaagacaagcaacgcttcagcggcagctccattttgaacgtagcaagcaatcactgtgctccaagatataacatctttctctgctatcatcttgaacaaattaaccgcttccttgaaagctcttgactttgcataacaattcaatagcgaatttaccaaagacaagtcatttgaaaatcctctcctaatcacaaaaccatgcacacatcttccaagccttgaattcgaaagctttgtacaagcagaaactagtgtgattaaagttacccgatcaggagtaacatcggaagccatcaccattctcctgaaaaactctacggcctgatagggagacccgtttttctcaaacccagaaaccatagaagaccatgtcactatatcaggcttctccaattcatcgaacatcctcaaagcttcgatcattcttccacatttgatatacatatatatcagagaagatccaacataaaggtcagacccaagagtgacatccttcttcacgaacccatgaatcatttcaccataattaacttcccgcagctccccgcaggccttgagagcaactggaagcgtgaaattatcaggcttttcttcatcgcgaaacatatgactaaagtgatacaagacttcttcccattgtttctctctggataaactcttaagaagagtattccactggtacaagcttctcttcgtcatttcgccgaacatttggcgtgcatccacggaagaagagaacttccggcaaaaacccatccaaatcccctgaaattgaaaattatctcacattcaaaccttctgtttccgaaaaacttccatcaaaattttctcgcttctacattgcttgagcaacccaaatttccttcttgcagtaaactttgcgagggagagaagagaagagaaggatggattcaacttcaaagcaaaaacatgaagcgcgaatacgtttagcaaaaacgtttgggcctgggctgtatgagttgggctaataatggtccactactcgcttacttacttgtagcttttctattggtcaacatttttctttattatgtgctgtagtgtattaaatgttatttaaatactagcatctctccaggataaacataaccaattagagaacaataaataaagattgattaaggaaataaaagaaaagaaggacgtggcagtatcggagctagtgcctgttattgagaattggaaacagctacaaatagtacgcacaagcccttcttcttcttcttcttcttcgtcgtcgtcctcaacaagctcttctttctgactcataacccaaatttctgagaatcagagccttattcaagagaacaccaaggtcagcattttcttctactctctcgatctcaatttctctctttatccttgtgatctatttctctctcgtctacaatttgagctacttttcttgttattatcgtcacgttgtgtgtcgcgtagtggatttgagtgattggttgattgattgatggattttttcacgaaacgcgtagagtttggtggaagttgttgaaattcgaagccgatcgcggactcgtttgctcttgattacgtcgcaatccgtacgattttccgatcaaacgtaagcttgaatctctttcccttttgttttgttcgcaagcgtgtttgatttctgttaatatttcttgatttcccctttttgcggaattgattccggtttttatattcccatattatttttttattctcatgtactgagaatcatgattctagtttggtaaacggttggtgttcttataaaatgcttgatagatttccatctgggttttggttgttgctgtagttaagagtgaaggagatagatttgtagaaaaaggaagagaataagagtgagcttgtggccaaaaaaggg

SEQ ID NO: 9046 - DNA, 3000 bp, Unknown
  misc_feature (1)..( 3000): cDNA_ID_1989371_gDNA_ID_1971974_Annot_ID_58709 3000 nt of promoter + ATG
aatctctttcccttttgttttgttcgcaagcgtgtttgatttctgttaatatttcttgatttcccctttttgcggaattgattccggtttttatattcccatattatttttttattctcatgtactgagaatcatgattctagtttggtaaacggttggtgttcttataaaatgcttgatagatttccatctgggttttggttgttgctgtagttaagagtgaaggagatagatttgtagaaaaaggaagagaataagagtgagcttgtggccaaaaaagggatgcctttgaacttaggcaacgatggcgatgggtcttcccggattattttgactgagcctcgcggatctactgctgaggttttactccttcatctctcttctcttcatcattcctcaatgtttagaccatagcatctcagtggttagttgtttgagcctactactattgtatgtctatacaagatgttgtttatcttggagacgactatgaaatgaaagatgttgttcaactgttctggaacttggattgtgttaagaatactctgttaggggttgtagagttacatattctcggattgaaatctttcaggtgcttctatttggaggacaagtcatttcttggaaaaatgaaaggagggaagaactgctttatatgagcagcaaggtatatctctaatcaaatatcgtctttagttttcatgttttaactagtattttgtttggtacgactcatttaggctcaatataagccacccaaggcgatcagaggaggaatacctgtttgctttccacaggtttggcatctcagatcattttaatatagttgaataaccctttgctctagtttcgtactgccattaagtatactgtgtcatatttgcagtttggaaactttggtggacttgagcgacatggatttgcccggaacaaattctggtcacatgatgaagatccttcgcctctacctcctgctaacaaacaatcatctgttgatctgatattgaagtccacagaagatgacttgaagacctggccgcataggtgtgttttaacttatactctggatctatgatatggatgtcttgtctgtgcctttttttattatcatctctttgtctaactttataattactcggtgctattggcgcagttttgaactccgtattcgcatttctattagccctgggaagcttactttgatccctcgtgtgaggaacattgactcaaaggcattctcctttatgtttgcactgcgaaactacttatatgtatctgacataaggtgtgtgtgccttacaaatttcttccgatctgatttcgtgtacttatgctgcttccttcctctgagtgataaatcatgtggtcaccgaacttgcagtgaagttcgagttgagggtttggagacactggattatctagacaacttgattggtaaagaaagattcactgagcaagcagacgcgattacctttgacggggaggtgagtaatgtcagccattgttttccccttaatagtttcaaagaagagaaaaaaaaccaaagattgatatagagtcagtgtgctgtgcaggtcgatagagtgtacttgaacacaccaacaaagattgcggtcatagatcatgagcgaaagaggaccatcgagttgcgaaaggaaggcatgcccaatgcaggtaaaggataccatttgttcttcgtatttttttttatgaatgaaaccttttgagagttggtttctaatggattgagttggaaacgagcagttgtgtggaacccctgggacaaaaaggcaaagaccatagctgatatgggagatgaagattacaaaacaatgctttgtgtagattctggagtaatcgaacctctggtattgttaaagcctcgtgaagagtggaaaggcagacaagaactatccatcgtctcatcaagttactgcagcggacagcttgatccacgcaaggttctttacggagatatctgatccttttgggggtttatcttacttagtaaaaaaacagtaataagccatgatctcattatcactaccacccagaaacaactctctaagagtcttgtcttgaacttggagattttatccttttgacttgtgttttgagtgagttctgattgttgttgttacacagagaggtcacggtaatattttgtaacgttgactctgtgtttgaccgtcaaacagtgtatcggtttctttgttcggaaatttagtagaatatatcatcaatttagtagaaattttgtgaagtatttctagtcttctctactttcttctttagtattgctactttttaaaagtaataatacttttagatttgttaatttgtaattaacaaatcattattttacactttatagcacttgttttttttgttttttaataacaaaatgcatatagagagcttttttcgtttactgcagatttagtatgacaaatactagagatcatgagtttcttcatttgccaaaggataaagataaaaatgaaaaagggttttacaacgtatagatcataaatagatttgataaaagattccataatgtgaagtctccattatccaacggtaagtggtcttgtctcaactatagttttttaatcattagttaaagacgaaactactgtatctggcttggggagcaaggttagcgggccccacataatctatttattaacaaaattgccactaatcccgatttcccaagctcccaagtgcttcggtgttccgaaccaatttcacagcgaaggtcaataaacacgagtgttcaccgaagctaaggttcgtcaattgtgttccagagaagctttcctcgaagcttagggtcggaacgtacgaccctatggattagctccagtttcccgctcacatagtcttctcggttttgtttttgtcttcacgcgttcactccatttttacttagcctagtgaacaagctcaacaacgctctctctctctctctctccccctctctctgttttgggaatc

SEQ ID NO: 9047 - DNA, 3000 bp, Unknown
  misc_feature (1)..( 3000): cDNA_ID_2687327_gDNA_ID_1971974_Annot_ID_58710 3000 nt of promoter + ATG
gagtgttcaccgaagctaaggttcgtcaattgtgttccagagaagctttcctcgaagcttagggtcggaacgtacgaccctatggattagctccagtttcccgctcacatagtcttctcggttttgtttttgtcttcacgcgttcactccatttttacttagcctagtgaacaagctcaacaacgctctctctctctctctctccccctctctctgttttgggaatcatggcgaggtaagctttgaaccctaattgatataaagccccagactttcgttgattttttcacacaaatcctgaatcggttttcgtaacgcgattcctcttccatttcgttcactgttcctcgaaagggataaaatttatttttgagtgggttacgattcagcttttcctgggaagcaaaatgtgaaatttcccttacaagtttgagttacaaagattggatttttagagatatttcgtctgatttaggcatttactgtatccgcttgaatctctagtgtgtctctaactcagtagctgcttatgaacggatgatcttatcctcttttgttcttgtcacaaatatacagggcttggattgtcgatggtcgaggaattgcagccaaagttaaaaatgcctctctttcttcagctttgcagatccaagactgtggagctcatataaaatgccccaactgcacttaccgcattgacaatagcaatgtgagtgattatatccacacttctctctcttgtcttaaacttacacacactcacctgtgtttcgttggtttcaggtactgattccatggcctggccttcctaaaggtgtcaagtttgagccaactgatgaggacattatcgaatttttggaagctaaatgtgggattggtggctctgaacctcatgtgcttatcgaagagttcattcgtcctgtcactgaagatgttggaatcaattacactcaccctcaaaaccttcctggtaaatgatcaataaagacctttaaataagctcataattgttgttcttcaactgaaactgtaaatcttgtatcttgaatctctgagtctctccaggtttattgattcctgctgagctttactgtttcaggtgcaaacaaagatggagtgagtgtcttcttctttcacaagacagtgcaggcatatggaacaggacagaggaaacgcagaaagatcacaccgacacttgtgaacgatgaaccagttcgttggcacaagacaggcagaaccaaacctgtgatgctcagtggagtccaaaggggttgcaagaagatcatggtgctctacaagagcgctagaaagggaacgaagcccgagaaatcaaactgggttctgcatcaataccatctaggaacagaaggaaaggagataggagactatgttgtttccaagatcacatatcagcagcagaagcttggggaaaatcctgatgaaggtgagagtagttccggggttagaggtggcccaacaacaccaaagacgaatactcctacaccacctagccttgtagatggtgtcgctggagatgaagaagcttttgatgatttaaagatgtttgatccattttttgaggttggttccacaaaatcattggggaatagtaacttcgttttctagagactaataaagtcggaatttttgttgttggttaaccaggaactggacagcattcctgaagctgctttagggaagatgtggtccaaaaaagctcgaatggatgaggaatttgttgtgaacctaagtgaagataacttaatatgcgacgaaagcatggaagcttcgtctctttgggaaaatcaggttctccccaatcctagccttggaactgttggggacttcgatggtttttcgatatcagatctggagaatgcagatttggggactccccctgatttcctcactgtaagatcctgcttgaaaaaaaccttgtttactttcggaaaattcaatggaacataagattctaaattagttgtcatggaggttttgcagttggcttctcaggagagcttgctgaattggattggatggttgtgattggattcttgctgctacacaaagaagctcttctagtacggcgttttcgctgaagaaggaaaaagctggaatatgtcataaataagaaaactttaaagtctccgcaactgaagtcatatctctgtgataattttacttcaggagaccagttttctctcggattcccggaaagctgcttaaatattccgggaataatcattttcaatctctgaatctgcacttcatcattgtaattcaaatagatattttgacctttgtactctttgctgtcttatgatggttactctgtttttgtttggctcagggtccaacggttataactatttatttttgggtattttactattttcaccttatattctcaaaagttctcattatcaccccaaagaaattaattaatccgatttaacctctttaacattactagacagttcacacaccctctgtctagacggaattagggttttcttaagctattccgcagcagtctacggttgttgtgtcggtggtgggcgcctccaaaatttaccctttagtataaataagttttggaaaattcagactttggttattgaaacgccatctcagctctaattcagtacgatggggaggagaggtcgcggcggcggcggtggtatgggcggaggaatcaatcgtagatatctgagtcaagttatggatacgtgcggcaaggatttatctacggcggaggacatcgttgatgatcttcgttccaggtacggcaattttgcgaggttgactcggcaagtgcttctactcaatgtcaggcaagtccttaatgttagaaacaacaagagggttaaagacgaagatgaagatgacaacattggagatgaggaaggttctgcttctcagaggaagaaacagagacgggttgatgagaaagaggagaaattgcagcgagcggagcagtcgcatttaaggaagaggaat

SEQ ID NO: 9048 - DNA, 3000 bp, Unknown
  misc_feature (1)..( 3000): cDNA_ID_1989367_gDNA_ID_1971974_Annot_ID_58714 3000 nt of promoter + ATG
gtttggatgcattttcaatattaatattatgatttcactgaatttcaggctcatcttttttcattagattccaaatcatttgtttattagtttgaattgtgtaaaacatttttcacgcttcatggctctaattctgagattttgtgtagctgaatcgtttgcaaaatgaaggatactacggtggggtaaggttgctaatggcgatatgtaaagtattccgtaactattgcaaagagaatgacattcaacttcaccaagccaacttctctctttcttatgataccaatatccctaggcaggtactgatcattttccttcccctttctctctatgtttttttcttttctctgccaccaacgcttatcttttcaactttgatgctccttccagacagggctttcgggttctagtgccatcgtatccgctgcccttaactgccttctcgacttctacaatgtcaggcatttgatcaaagtacaagtccgccctaacattgttctcagtgctgagaaagaacttggcattgttgctggtcttcaggacagggttgctcaggtctatggtggtcttgttcacatggtcagtgtctcccctcctatctcatacattgccgttggttccatcggttttatgactttttatcatcttcttcactttgcaggattttagcaaggagcacatggataaattggggcatgggatttacactcctatggatatcagtctcctccctcctctgcatctcatctatgctgagaatccgagcgactcagggaaggtacttacacttattcaatgattctggtttatgcatcaatcaagtgaaattcctcaaaaagcatttatgacactagaactcagatctttggggcataactcagtagaatttagaagtatctctctgttagatgtttcataatattagcattgccttctaatgcaggtacatagtatggttcggcaaagatggttagacggtgatgagtttataatctcatcaatgaaagaagtcggaagtctagcagaagaaggtcgaactgcattactcaacaaggaccattccaaacttgtggaactcatgaaccttaatttcgacattcggaggtaaatataattccagacaaaactcgaacctatacacaacttaagattaaactccaagctcacatgatgttgaaatagatgggaatacacacatataatagtgatgtctttttttcccgataggcggatgtttggggatgaatgcttaggagcaatgaacatagagatggtggaagtagcaaggagggttggtgcagcctcaaagttcactggaagtggaggagcagtggtggttttctgccctgaaggtccatctcaggtgaaacttctggaagaagaatgcaggaaagcgggatttacgcttcagccggtaaaaattgcgccttcatgtttgaatgattctgacattcagaccttatgaaagccttgatcaagtcttcttattcacacgatagagccattttccagagaaataaacatgtgagctttaattgggtggttgttctgtttctttttcttgcccatttttgttgtttgttccttggcttatactaatatgtttgttttgtttctttttccacattaaggtccaattttttatattatattaaaagaactaaagaacagatgatcaaaattgaagtagtaatgatatttatttgccatatttgtgctcttttttgttttgttgaaactgtatatacagaagttggcagatatagtgtggagaaaaaaaaagaaatatagaattcagagatcattatttggcagaaaatgaagagaaatcgtgccagacatgttcaatttctaatctatactattactagtaccctacttgatgaaatctgaacaaaacatgtgtgtgtttcagaatcacgaattcgaattgctactagtgttttttacaatcttaatggaaataaaatggttatttgatcgagtaataaatattaaaattttgaaatcggtctggacttggacttggacttggacatggtgggccaataataaacaaatccaactaatcttttccagatttcatgattgaaacgtaaagtgaaagattaaacaagagaaaaaaggttagatagctttctgaacaaaaggagagaatttggggatatagatagaatccgccatttaagatcccttccctttgacctgttgagtgttgacaacctgaaaagaaacaaaaaaagaagaagaccgcttcatcttctcaacaccacctctgtcttattgctctcttttcttcttcgtcgacttctctcacacatacaaaaggtttgggattttttttggtagaatctttttaagttatctatcgaaatcagtttgatctgttttgtttttccctcttctcttctgggttgttggtgaataaatctacttttcatcttaattaggacaaatctctctaattaaaacgcctcagattttgtcttcagttgttttgttttaaaccctaagttacttgtaagttaaatgaaatctacaattcttaatttcttgtttccaaaattgtgaaaaaatccaaacatatatagaatagacacgtaacggctcaaagtcggtaattggaggtaacgtgattgaatcttcttcatcaatcataaatcttctctcttaagaattaagacgccgcctcattacacctgttccataatcatcgtcaatatattcattctgcaaaactattcttcttcttctttcaaagtcgtaattgctctctctcacccctaggttcttaagtcatacccattttcaaggacaccttagaaagtttcgagttttctattaggtaattgcatgttgaatctgttacgttcttcttgtgattccccttttttctggcccaaagaggataagattctaaaaatctgaatctttgtatgcaggtgtattgatcttgaagccttaaagtttgtgtctttttgttaatttgaataaagtttg

SEQ ID NO: 9049 - DNA, 49 bp, Unknown; identical to SEQ ID NO: 9034
  misc_feature (1)..( 49): cDNA_ID_2687323_gDNA_ID_1971974_Annot_ID_177545 3000 nt of promoter + ATG

SEQ ID NO: 9050 - DNA, 3000 bp, Unknown
  misc_feature (1)..( 3000): cDNA_ID_1989366_gDNA_ID_1971974_Annot_ID_58715 3000 nt of promoter + ATG
atacccattttcaaggacaccttagaaagtttcgagttttctattaggtaattgcatgttgaatctgttacgttcttcttgtgattccccttttttctggcccaaagaggataagattctaaaaatctgaatctttgtatgcaggtgtattgatcttgaagccttaaagtttgtgtctttttgttaatttgaataaagtttgatgggaggagggaattccaaagaagagtcgtcatcaccatcttcatcatcatgggcttctcatcaaagttatcctcaatatggacctgatagctacaactatcctcctccacccacttatgctcccgctccatctcctgctcctgctcctgctccggtgcctgctccatctccggcttccagttatggccctcagtatagtcaagagggttatgcatcacagcctaataatcctccaccacccacttatgctcccgctccatctccggcttccagttatggccatcagtatagtcaagagggctatgcatcagcagcatcacagcctaattatcctccacctccttcacagagtcaagttgctgacaggaagaaatttgatcggaggtattccaaaatatcggataactactcttctttactgcaggttagtttaagacaatgcatatgctatacacttggattttcccctcaaaggttctttggaaactgaatctagcatgtgtctgaattgattccaggtgtccgaggctctaggccgtgcaggtcttgaatcttctaatctaatcgttggtattgatttcaccaagagcaatgaatggacaggtttgttatattattcttattcttacgttttgaatgtaaaggagaagccaaactaattggttttggtactgcaggggccaagtccttcaataggaaaagcttgcatcacttgagcaataccccgaatccatacgagcaagcaattactatcattggaagaaccttagccgcctttgacgaggataacttaattccttgttatggttttggagacggtatgcactgttttctctcttctcgattctcataagaatgtatatcaatcggatcatcattgacttgctttcatctctttgcagcatcaactcatgatcaagacgtgtttagtttctatccagagggaagattctgtaatggatttgaggaagtattggctcgttatagagaaattgtacctcagcttaagctcgcaggtttatttcctgctctgacctgcactggccaattctatatctccttgtgaaacgcaagttataaacttaaaactgtgtttttttttcctgcgaacttatgtatttcaggaccaacttcttttgccccgatcattgaaatggcaatgacagtggttgagcagagtagtggccaatatcatgtgttagtgattatagctgatggccaggtactgattaatattttgactgcctaagctgtgtatgatcttctggttttgtgtctagggatatcaaagtggacccattttgttgtttcaggtcacaagaagtgtcgataccgaacacgggcggctaagtccgcaagaacagaagacagtagatgcaattgtgaaagcaaggtgcgaatatttcaatcttttgactaatgtttcttccattttaaagttctttactttgagtgtaatgttataaagtgttatggtatgtaatcagtttcatcctctctattacagtacccttcctttgtcaatagtcttagttggggtcggggatggaccatgggacatgatgcaggaatttgatgataacatacctgcccgagctttcgataacttccaggtaagcttctttttttcatatcatgacattgaagattgcttcttttcttcagtttggaaccatttttctaacatgtttgctctgtttctagtttgtgaacttcacagagatcatgtcaaagaacaaagaccagtctcggaaggagacagagtttgcgctgtctgctctcatggagatccctccacagtacaaagcaacgatagagcttaaccttttagggtaagggacccaaatcaaaactctgataggtgtagctgcgagaaactgctatattgttaaacaaaatgctcacctttctctttcccttacatttttgcagggtaagaaatggaaatatcccacagagaatcccacttccgccaccggtgcagagtggatcatcattctctagttcccggataccgaattttgaaccgagtgtacctccttatccatttgagagcaagcaaatgagtagtgcagacgatattcaggtaattagtagaaacttaggaatctgtttgaaatgttaagtgaaataagagctttggaactttttgttgttaaactcgtttgtgttattttccccttgaacagctatgtccgatatgtctgagcaacccgaaaaacatggcgtttggttgtggccatcagacttgttgtgaatgcggaccagatcttaaagtgtgtcctatttgtcgtgcgccgatccagaccagaatcaagctttactaacaacaccattgacatgcagctttgaccagcccaaatcccatttcttccagagattttcagatctttctgtagaaaattaaagtgttcttttgttctttgattgaattcctaaactttatcttgttcataaaatttctttgattggattgtaagaattatgtatttgtctgttggctttctttgatttttcaagattcgattaaaccaaagttgattgcttaaacactttaattttgatttgttttgtcgacataagcaatgagaaataaatggatgaatagcccaatagaagcccattagcctgaaattgggctacaagcaaacataccaaataaatagtagggaagagcagaaataatcacaccactcatcagttatccattcctttctttttacataaattttgtcactttttctacaaacgattcttcgcttctgtgaaatttgataaagcgaaagtttttttctt

SEQ ID NO: 9051 - DNA, 3000 bp, Unknown
  misc_feature (1)..( 3000): cDNA_ID_1989365_gDNA_ID_1971974_Annot_ID_58716 3000 nt of promoter + ATG
taatcagtttcatcctctctattacagtacccttcctttgtcaatagtcttagttggggtcggggatggaccatgggacatgatgcaggaatttgatgataacatacctgcccgagctttcgataacttccaggtaagcttctttttttcatatcatgacattgaagattgcttcttttcttcagtttggaaccatttttctaacatgtttgctctgtttctagtttgtgaacttcacagagatcatgtcaaagaacaaagaccagtctcggaaggagacagagtttgcgctgtctgctctcatggagatccctccacagtacaaagcaacgatagagcttaaccttttagggtaagggacccaaatcaaaactctgataggtgtagctgcgagaaactgctatattgttaaacaaaatgctcacctttctctttcccttacatttttgcagggtaagaaatggaaatatcccacagagaatcccacttccgccaccggtgcagagtggatcatcattctctagttcccggataccgaattttgaaccgagtgtacctccttatccatttgagagcaagcaaatgagtagtgcagacgatattcaggtaattagtagaaacttaggaatctgtttgaaatgttaagtgaaataagagctttggaactttttgttgttaaactcgtttgtgttattttccccttgaacagctatgtccgatatgtctgagcaacccgaaaaacatggcgtttggttgtggccatcagacttgttgtgaatgcggaccagatcttaaagtgtgtcctatttgtcgtgcgccgatccagaccagaatcaagctttactaacaacaccattgacatgcagctttgaccagcccaaatcccatttcttccagagattttcagatctttctgtagaaaattaaagtgttcttttgttctttgattgaattcctaaactttatcttgttcataaaatttctttgattggattgtaagaattatgtatttgtctgttggctttctttgatttttcaagattcgattaaaccaaagttgattgcttaaacactttaattttgatttgttttgtcgacataagcaatgagaaataaatggatgaatagcccaatagaagcccattagcctgaaattgggctacaagcaaacataccaaataaatagtagggaagagcagaaataatcacaccactcatcagttatccattcctttctttttacataaattttgtcactttttctacaaacgattcttcgcttctgtgaaatttgataaagcgaaagtttttttcttatggattctcttcgattcaacctccaacaatctccatttcaattgaaacctagaattctccgaccaagaatcaccaacatatcaaaccgaatcgatgaaaccgatcctcgaccatcatcctcggccggtaggatccaaaggttagtacttaacaacgaaggtcggaccaaactaaacgccgatcctgaccgtgaattctattcatatccacggttcgtgaaccacgtagatgatagtttcatatcctccttaaccgaactatacagaaaccggttgagacccggttcgactgtacttgacttgatgagctcatgggtcagccatcttccagaagaagtgaagtacgagaaagtagtagggcatggtcttaacgcacaggagcttgctcgtaaccctagactcgattacttcttcgtcaaggatcttaatgaagatcagaagttcgagttcgaagacaagtatttcgacgctgttttgtgttctgttggtgtacagtatctacaacaacccgaaaaggtacgttaccgtaaaccaaaaccgatttcggttatgtcaagaagattcctaaaccgggtctttattatataaaccgcaggtgtttgcagaagtgtatagagtgttgaaaccgggaggagtgttgatagtgagttttagcaaccggatgttttatgagaaagcaattagggtttggcgtgatggaaccgaatacagtcggatccaattggtggttcagtactttcagtctattgaagggtttactcagccggagatcatccggcaacagcctggagctcagatatcggttttgactcggcttatgggttttatcggtttagcttctacgcccgatccttttaatgctgtcattgcttataaaaatttcaaacctatttatgagtaacacgcacataaaaaaaagtgtataagaattggatgggaagtttttgaagaaaaggaaaaaacctctcaaccaagtccagctggagaaacttacaatacaaatttttaaaaagtggagaatgaaattacagatttcaatcaaattggaagaacctgtattacacaagaaataattgacagaaagattacacactttggaaaatataattaatatatagttttcaattagcatgcattgtatgtgattcgttttgttcgaagattcatggacaatatccaagcaaggtagccttgtccctcttcaaacgagtatcacgagttgcttactttatggtttagattctataataacagtatatatattagaaggaagtcttttatattaaaacaaaaatccattgtatatgtacactatctatgttccatgcatgtgtcttcttaaatagctatgaagtcccttattttactatgtacatactaaatttagttatgtttatcaggataactcgttgtaccatcagtatataaactttgaaatattaaatgtttctcactactagtattagactgttgcagttgcgttagagacgtttcatatttagaaataatattatccaagacctgaaattcttattattatgaaaattatgaaatatcgataagggaaaaactgtatggaagtgtaaaagacaccaaaacagatattgaaccaaaggtgaagcaaagaagttgattcaaagttgccactttatttaaccttttgcaccagtatatatacacacac

SEQ ID NO: 9052 - DNA, 3000 bp, Unknown
  misc_feature (1)..( 3000): cDNA_ID_1989364_gDNA_ID_1971974_Annot_ID_58717 3000 nt of promoter + ATG
acattaaccaggtcgggatcaacgtgctcacccaaaagcacgttctgcttctgatatcagacctagaaaacatcgaaaaagagctctacatcctggaatcgctctacacagaagcatggcagcagtcattcgagattctttgggttccagttcaagatttctggacagaagctgacgatgccaagttcgaggcccttcacatgaacatgaggtggtacgttcttggagagcctcggaaattaagacgagccgcgataaggtttgtgagggaatggtggggtttcaagaacaggcctatactcgttgcacttgatcccaaaggtcaagttatgtcaaccaacgcctttcctatggtctggatctggcaaccctttgctcacccttttaccaccgcaagggaacgtgatctatggagcgaacaggagtggaatcttgagttcttgattgatggcactgatcctcattccttaaaccaggtttcttgattgaataaaaaaacagagtactaataaatttttctttctcttgtgttacacgtaacctgaaaatctgtgtgtgtttcaaatgttttttatcagcttgttgatggaaaatacatatgtctctacggaggagaagatatgcaatggatcaaaaacttcacgagtctctggcgtaatgtagcgaaggccgcaaacattcaacttgagatggtttatgtcgggaaaagaaaccctaagaatggaatccagccgataatcaacacaatccgggaggaaaatctcagccatactttgccggacttgttccagatctggtttttctggaccagggtcgagagcatgtgggaatcgaagcagaggatgctgaaagcccacggaatcaaggggagagaagggtttaaagaagaggaaaaggaccttgttctgcaagaagtggttgctatgttaggttatggaggagaaggagatggatggggactggtgagtaaagcatcggacatgatggttcgagccaaagggaacttgttttctaggggtttggctgaatttaacgaatgggaagtcaacatccccacaaagggttttcttacagcgctcaatgatcatctcttaatgcgtctcccaccacatcactgcacaaggttcatgcttcctgagactgctggaattatacctaatgaggttgagtgcaccgagtgccgtaggactatggaaaagtattacttgtaccaatgctgccttgagtaagatcccataatactggggaacaagttgatttggaagccaacaacttgttcctataaaaccaaataagtttgcgtcttttttttcctccttgttgtgagtttctctactcttcatgttgttgttgttgttctgctctactaaaagcagagagtctttgtaataaaatttgtgtgtttgagatttcgaaataataaaggtttatttatcggaagcttctagaacaatgaactgattgaacattgcttctttgttgatttcttgatccttaagctcctagaacactagtgaactaatacacaagtaacacaagtgaccgtgacatttttttaatgtgacagtaatatcttttgacatttagccttttgaaatgaaattacttaatgctagtaaaatataggcaaagtaaaaggatggatcaatcaatcaaaagatgaacagtcttttgagtccaaatcacatatcgtaatatatctaatagaaagttaaaagtgttagtctacattattgaaaaaataaaccatgagactgattgctgtattacaaagggggaatacaactttaaacgacaaatcagcggttcctagcctgtagttaatgtaaaagttaaatcttccaaaccatcaaatactttttaaatattgcatatatcggattcgatttcgaagaagctcttatacgtatttctaatgatgagatattaaaatttgttgcgtatagaaacaacaaatttaatcctacctataaacgttatgctaaagttaatagaaaaaaaaaaaaacatgcatagaataaacccaaagcataacaatcttatttttagaaaagtgattgtctttagataaatatatccttggttactcttttattgctttttttagccttatccaagatatatcattgagcttaagaaattctttagttttacccaaaagagagcaaagaatcttaacttcacacccttttgttcacttcactcttgatgctattttctgaggcatgcatgagataaaatcaatgtaaagtaacttaaagtaaatgacagaagccataaattataatattctatggcatgaggtgaagtaacataagaatataagcaaagtagcaaacaaaatgtgtcttatcttttaatgtcctttagtaacataaaaatgcgagaattaattagtagtccagtgatcatcattatgatggagaaaagtgaggaattcgtctccaaacctcccaagaaaatgacaaaaatctgtatattttaggatctaaatttctagttggcaatgaagttaatatcattagtagcaatattaaaatagtgtagtttttgatccacttttagtcttatatgaatttgaattcagtaatacacacataaagaaagagtactagctctaaagatttacgagtaaaactcgcaacatttcagtgaaccattttcttcccattatgatttagttcttatttactatatatattcgtgtaaagtaggcctatactttattgtgctaacgatattcacgtggacgggaactatatatctcattaaaacttctataataagccaccaaaaaaagaaaagcaaaaaagaaacaagattatataattgatattctttgtatgtttaatttaattgttgcagaagcaaagaagtcgattctcaatttccaaccgtaactaagggggagaaacgagtatttaaggctaacctcacatagcaaaactacaaaccaataaagacagcctcttcttctaacaaaagcaaactgaaccaaga

SEQ ID NO: 9053 - DNA, 3000 bp, Unknown
  misc_feature (1)..( 3000): cDNA_ID_2993228_gDNA_ID_1971974_Annot_ID_58718 3000 nt of promoter + ATG
tgttgaggaggaagacagtgttgctgctcatctctgatctcaacatactacaagatgagctatcgattttcgagcaaatctacacagagtcaaggaggaacttggttggggtcgatggtaagagtcatatgccttacgaggttgtgtgggttccagtagtggatcctattgaagattttgaaagatctccgattttacagaagaaatttgaggatctccgtgaccctatgccatggtatctaacacatttatttcaaaacacacattctagtagttgtaaagaaagatggagaaatataattggaagttatttttttttgtgggggtcaggtattcagtggatagcccgaagctgatagagagacatgtggtggagtttatgagagggagatggcattttatgaacaagccgatacttgtggtgattgatccacaaggcaacgaggctagcctcaatgcgcttcatatgatctggatttggggcactgaagctttccctttcactagatctcgtgaggaagagctctggaggagagagaccttttcccttaacctcatcgtcgacggcatcgactctgtcattttcaactgggtatttcaaaagtctcatccttttttctttttatgattggcctggaaactctagaaacagagcaggcagggtttgacctaaattacattcattcaagaacgaggcgtgattaatgaacaatgatgggtctgatttgcagataaaaccggataattacattttcctgtacggaggagatgacttggactggataaggagattcacaatggcggccaaagcaacggccaaagattccaacgtgaaccttgagatggcttacgtcggaaaacgaaaccatagccacagggaacagatcaggcgtatcagtgaagtaatcaggtctgaaaacctgagccatagctgggccgaacctgccttgatgtggttcttctggactaggctcgagagcatgttgtactccaagattcaactcggtaaagccgatgatcacgacgatgtaagagttgactagctagggttttcaattatttcggttcggttcggttcaattggttaatgaatgattttgtgtgtttgaaaacgttgattaggtgatgcaaggaatcaaaaagatactaagctacgacaagcttggaggatgggcactactgagcaaaggacctgagatagtgatgatcgctcacggtgccatagagaggactatgagtgtttacgaccggacctggaaaacccacgtcccgaccaaaggctacaccaaagcaatgtccgaccaccaccacgatgaggtcctccgtgaaaccggaaaaccttgcggccactttgatttccacatcactgctcggagcggtcggattccggagaagatgaattgcttcgagtgtcagcgtccgatggagaagtacatgagcttctcttgttgtcacgatgaaaagctccacgaagacgagaactacaacttctaaatgatgcaataagctcacgtctcttcccgctgctttttctttttgttttacgtaatttgaattctctatatagtttttcataaataatttctgaatttcaatatctttgtatgagagagaattggtcattccatgtgtgtggtttggcctttgtgggacatgttcgattgaagtattcctaataattttcaataattaacaatttcttctcttaatagcatagataaatgttgaatttattttgttaataaaattaaccctgatgaatacaacaattttgaatatgtcaaattagaccaattcaaaatataactatttgctttctttcttctcataatgtttatatatcccactttagtaaatggacccccacgaagcacaccacagcatactcttttttattctttccagtttctaatggtttacttatatactcttatcattttctaattgatcaatttgtcatttattggcttatcttcttataaatgttttttgtgttagttgttgatatctcattttcttgtccagtgaattatagcatttcaatgtgtccctcatgtcgtcaatataatgttttattttccttgttatgatccatatcttcatgtgtggtccatcttcaaataaagaatggattgttactactcttatcgtttgggctagtttttataattagacacaaaatttgtaactttcattctttttttagtatttaacacaaagtaatttgatggattagtctaaataataaaggcaaaaagttaagtaaatgtcaaaagagatatggcatatgtctaatcataaccaatgaattgcatggttctatctaaatagcaaccatatcatcccacatgccattgtccaccttgtctatcttaggaaaacactttgtttgtaactctattgtactctttgaattatgaaatctatgtaaacccttcttattgtgggggacaaaggctaattttaatggtctgtccacttctgcttgactttgatacataaattaggggtggctcatgtcatatctatgagaattaggtacaaaagagttttcaaatgagcaagttgtatttttattcgattagccgtcgtattatgtcaaatataagttaaaaatatgtaaaagtacaaaatgtagattatgatattagggatgaattgagataaaattacctataatttattactacgcataataaataatttgttacgttaattctcatagatacgttatagccaataccgaacccctatttaagtcaaaagtacttctaagtattttttagcgtaaatcaatttttatgaaaagcaacaattaagattaatgtagtaatctagtaatcgttaaaaaagccactttgttagtattgcttaatactctctctctctctctgttcccaaggagatgaaaagcttcaatctcaaaacatagcagctctctcaataaaccaaacccaaatgcaagctgtgtagagagaaacggagtgaggaaggaaggag

SEQ ID NO: 9054 - DNA, 3000 bp, Unknown
  misc_feature (1)..( 3000): cDNA_ID_1989740_gDNA_ID_1971974_Annot_ID_58721 3000 nt of promoter + ATG
cgccttggaaatgtaatctaactggaagaatctacttattagcaagcatagttcccacatacaaagaaaacagcaacagtgagagagttgaaaacatcttacatctctcagtttttggccttgatggagttgttctccttgattttaccccgtgtgtcgagcttgacaaaacgtttgagatcatcgtagggaagagtctcgacgttcttcctcctaagctcactgagagctggtcgcttatcgaggagatgccagagccaatcagggtaatcagaatcaggcaagatcttgggatcagatccgtctttgagagtattggcaccaacaacagtggtggatttgatctctttggtcaagctggaacctttaggagcatcgctggctccacctcctttgccacctttcttggctttactagctgctgctgcaaacgttctccggactacatccttggatgatgatccccttatcaatccaatacggttcatctcctacacaaattttagataccaaaaacagagcaactttttaaatcacaaatcgccatttcgttgaatatcattgtttccagacgaaattagggttagccaaatccagaaaaataaaattaaaattgccacaagagcgaggaaacttaggattgtcaatcgagagagaaacctttgagaaggaaagagagaaaacttacgtcgaagaagagcacaagtgaagaagaagcttactagcggcgagtttcagagaggcggagcgaaaaaaactctaacagtcaacaataatactaacatagtaacattccctttttctcactagtttctaatccggcccaaatatgttttgggttgggcccgataatataccatatacgagagcccaatattgatagtaataattactcgtcagttttaaatagaagtcaacgagggataatgagtgcactttgcgaacatgttgacgtgtctgaatctgtttcggtgaccaaaaacccatgaatgttctgtcacagctgtgaataatagaaacagcgacatgtacttttgcatattcagacgaccaagtagaaattctttaacacaacttattattaacgggcgttgatctcgatcgttggatcatcacggtaatagaaaccgttgatatttgattaatcataagaaccaaaaggtgataaatttattatgaataatatacgtataactttttattcatcttttaccaaaaaaaaaacattttattcattatcaattaattttgagtttggaatctcatattttcaaaatagtattagaacgagttccgatttctcattttaggaccacaattagattttcattcccacgcaacttcgtgtttatatgttctgccctgatcgcaaaaagaaatgtaatgtttcagagtaatatgtagtatatgatcaatgctaatttgttttaatttagaaattaatctacgattcttaaatgtaaccaaacaataattatccaaacaataattttttgctaattaaagtctataatactatgagaataaaagacaacaaattaaatggggatagtgtactagtttcgtttatcagtacatcgcaaaatttatctgatcgttgtgaatactcgtagtcgaaggttagttggagatcagtatacacgagttgaacttgaaaacaaaacaaggaaataaattcaaaacaaagtaaagaagaagaaaaacacgtcttatattagaagacgaaagccaaggcactaatcaatgttgaggtgattaacagcgggcaagtggtgaaagtggcggcgtttggaggtggtagaagcgtcttgggttcaccaaagtgaccgccgtcagtaccagttggtgacggtgaaggagccatcggaggaggaggagtgagtgtctcgtcgttcccactataggaagacttagactcggccaccataatcaacgttgccaagacgagaacacatatcattaagctgaaagctctcattgctacaatatttgatctcctctctttcttttaatttctctttctgtatttttagttagttgatacagtcggatcatcgcaaaggaaatagtacttatatataaaggtcaacgagggagaatgattctaattcgagggaaatgtgattatacggtcttagatcttgttacgttagtggctaaccatctattttgagtaccataacgtgatgtccttcatcttttttggatcgacacagtaataaaagatatatatcaaaaaggcaaagcgataattacttataagttccaatccaagaacaagtgataattgatcttaaaccaaataataaaaaatgataattgatgaactgatctatgttgtctgtatattattattctacgtttctattagttcatgcgagattcccaacagaaaaaatggagtatactcctccgaaaagaagaaagacataatcaaaaagccatttatataccaaatgtatagtacctaatgacagaaataaatgtatattattgtattaaaaataaaatggatatatagaaaatttggattggtctaatactctatagtatgtttttttgtttgggtgcaaaatagactaatcatgtttagactaataattcttgtaagaaaattgttattgtatttgtttggttattaaaaaaaatatttgtgagaataaaaaaaaaaacacaggcaagtcgccgagttttggacgtatgtgtatgtaaaatggttgccggagtccatggcagccaaaacttgggcgattcaaagagagaatctttgatttattattcaaatgccaaagatctcaactttttttatttattaattagtcacaagtggcagttcttcgtggtcgccactacctaatcataaccatcgacaggtttatagagaagaactaggcaacgcatcgccatggatcaatcatcctccatgcattgactttttttagatcggaggaaaaaagtatgcaaatttagttagggttttgaaattcgaaaatcgagatg

SEQ ID NO: 9055 - DNA, 3000 bp, Unknown
  misc_feature (1)..( 3000): cDNA_ID_1989361_gDNA_ID_1971974_Annot_ID_58724 3000 nt of promoter + ATG
attcatgggtttttggtcaccgaaacagattcagacacgtcaacatgttcgcaaagtgcactcattatccctcgttgacttctatttaaaactgacgagtaattattactatcaatattgggctctcgtatatggtatattatcgggcccaacccaaaacatatttgggccggattagaaactagtgagaaaaagggaatgttactatgttagtattattgttgactgttagagtttttttcgctccgcctctctgaaactcgccgctagtaagcttcttcttcacttgtgctcttcttcgacgtaagttttctctctttccttctcaaaggtttctctctcgattgacaatcctaagtttcctcgctcttgtggcaattttaattttatttttctggatttggctaaccctaatttcgtctggaaacaatgatattcaacgaaatggcgatttgtgatttaaaaagttgctctgtttttggtatctaaaatttgtgtaggagatgaaccgtattggattgataaggggatcatcatccaaggatgtagtccggagaacgtttgcagcagcagctagtaaagccaagaaaggtggcaaaggaggtggagccagcgatgctcctaaaggttccagcttgaccaaagagatcaaatccaccactgttgttggtgccaatactctcaaagacggatctgatcccaagatcttgcctgattctgattaccctgattggctctggcatctcctcgataagcgaccagctctcagtgagcttaggaggaagaacgtcgagactcttccctacgatgatctcaaacgttttgtcaagctcgacacacggggtaaaatcaaggagaacaactccatcaaggccaaaaactgagagatgtaagatgttttcaactctctcactgttgctgttttctttgtatgtgggaactatgcttgctaataagtagattcttccagttagattacatttccaaggcgttattatgctcttgtatgttctcagacactcttagtatatccaagaaattgctgcttcatcttttctctgcatgattctctttgaaaagttggaataggtttattcttacttgctctaagtatattctttcagttatcttacttttccgagtcagtaacattatgcccttgtaagttcttgatccttaagactctttattagtgaatccaagaaattgctgcttgtgtgagtgaaactcttggctcttgtttaatctaccgaatgatatgtccagcaagtgtgtaatacaaatccttctccggatagaggagatgagttggtcggttcttaaagacactgcaggtgtaactgatccatttaacaatcagatttattgtttactgtatgggacctggctcattgatattgcatcactattctgttggtggataccaactcttgttgtctatctctttgtggggtttgataccttcaaaagaaaggtaaagcaaatgttgcatcattatctcccctttgtcttccattattgctcttctttgctttgattgttacttgtctcctgtgatttgcccagttacaatttcatattgctttgtgttaatactagttaggataagtttcaatttaaatcggttttgatttaggtcttattggtctgatattatggcttttctctctctctctctatggtattgtatctgacaagtgctgctacttatttgctttatggttatatcctcccatgcccatgaaaggtttaagagtttgaaaaggagacaccactcatcacatgcttttgtgggtataacaaaaaataaagctaacttttttctctgctcacatgcttattttcctcttttgacaccttaacaatatcttgctttgtttttgtttcgttttttgcatgttccttcttaactatatgtactaaatgtatgatttagatatgttatggatataattatccaaatctgtggtcatgattgatagaggccacgagggcggacattttaaatcgctgatccgaatttgttcttatagtctctctactataatgtaatgggacataggttgggtgtagttgcccatccttatttgttgtctgaataaactcttacctatatttatttatttatatataagtgcaacggtactactatttccagaaagaaattttgatggttcatgtttccttctactcttttattttgctcttaagaggctttatcgacatataatataaattcaaacactgctgcaattctaacggatataaatcatccaataaaatctcagaaataaaaacgagtaacgaattttgagatttgcaagaatctcaaaagatgtcatattaaaaaattcttcgatatccaattaaagactcgattatacggacttgctttggagaatccacaccaacactcaattcgattacctcgaaaacaaaagtagttcaacttttgataccatctcaaataatactaaacaagttcttgatatacatttattcccgatgggtgaaaaaggccacttttctccatgtgtctctatcattactatcaagtatcaaccctttttcactttatagaattaggcatttctcacgatcagttcctccttccaattattattctgtaacttttgaagtcatttctactccctaatgttacgcgttaaacatttatttataaaaaaagatctaagattttttccaattattccttcaaatttggtatttaattcgtgtaatgaagacaccagatttttccaagtacggttacatatataaactggggagttttctttgtttaggctgattaaagagacccaagtgcctcctacgctattcttcattttctccggtgaccaatccttttctttttcttctcctctccgtccttaaatagttatataggagcaggcattgttccttgatcaccaagaaatcgctttgacccctatctccttcttctgcaactctttttcagttttcctcaacacaatttct

SEQ ID NO: 9056 - DNA, 3000 bp, Unknown
  misc_feature (1)..( 3000): cDNA_ID_1989359_gDNA_ID_1971974_Annot_ID_58726 3000 nt of promoter + ATG
ctgggcgcataataagactgcctgaacatcttgtagcctattcgatgtagtagcagcggcatccaagttgaagagaaccttatgtatgtttgctatgataatattcaatggatcatcggggtcatcagctaaaagtggatctagaccttctagatcaatatgttctgcgattgtccatataagacgcccgaggattcttggggtatttacctgccaaattgagatcaagatttttataagacattgaccacgtttcagtccacaagcaatagttctcctccacatttagtattaaatagtacttaagaaagcctaactaaaattcttcgaggaaaattgccaagggttacttctaactttcagctgaggcttaattacctcttggagatccttaacaagctcacgttgcaagttctgcaatcgtgtctcatttaatatttgatcctgggaagcaccatctttcagcctcttcactcctccacgggtatcatagatatggcacagcctaacaagcaatttcaaatagcaatctacagcgtacgtcctgccatcacaatcccatttgacacaaggcctacaaacttccacaacctcaagggctggttctgtccagttcagagcaccataaccagtaccatatgctaacgcaccaatcactctgctctccatacccgagtttttttgttcaggcaaaggtagagacaactggaagcagctttccacaagcattgccaccagctcttcccgaaataagctcttactggtaacactattgagatcatctttaatccttgcatcttcaaagagagaaataatatctgtcccaggcagaggcttctgacctcttcgggcactttctctggcaaaaaggtgaacacagagagctgtccgacagatacaggctaatgcgtgcatcctgtccgattctgctctcaagtttctcaccataagcagcagtcttctaaacaacgaaaccttcgtaacaaattccaaaaagaatgattcagaaatcataggccacagcttcaagacaaaggtacacaactaaccgagcttaaatgaagtaaaaaacgacatacctgcatatgcagatcaagcaagtgcaggttcgtaacaacggccctgactatactctctctagcagaggaaaattcttggcggtcccagagtgttaaaattgcaataatggactgtgaagcccactctggcttgcctccggcaacatctgccaggtagagcatgttaattcccacttcaaaaatcaaagctggatccaaagaggaagccaagaatggcgccaaatgggtaaccaaatctgagacgccaaccagcttctcggcgttggagtccacaacggtggcattagctgcagcagcagcagaggaagccttggaaagctgtctaatcacttcgacactaccggaagcaacagctttgacagcaaagacaagagggaaaacagtggctctgaaggtttcgacaggaaggactaaagacctagccatcaaagcgctcctctttctccatacaatgtcaaccatggaagagacccacttggacctgatggcgagggagttctcgctgtcaacgagcttatcgccagcaagacggctcatccgcttggagtcgaactcctggaagagtctgccgacggactcaaaggcaaccttggagacggcgtcggatttgtcgagcatgttctggccgatccgagcccaccagttggagaccttgtcgaggagacccacattgttctcgcacaaagtaacgagatcatcacgcgcgaggatgcagccaagtgtctcggtgatggaaaaacgaaggttgtcagatggagaatcgaagcaggaagcaatctcagagctgcaatcagagatgagtttaggaagcgagaaggcagggagagccgcaaggatggagacggcagcggcggtaacatccgggtccggaaaatgaagatccgttttgacacctgagcaaacggtgtcccaaagatccggagtgaggcgggtagatcggatgagatcgaatgccagcttcttacaaacagctgaagccggagaagcaacaatctcctccacagcagacttagcgatcacagagatatctcttccggcggcggattgctgcagcgcctgaagaagcgccgatgactggcgaagcgcgtcatttgaacggaggtccgcctggatctgagcaaaaagaatgtccataaccggatcgaattaactgaaattcgagatccaaaatctgagctaactagcttcgctgtcaatctgtgtacgtatgcgacatggaactggaagaagaaggatgtgtaaatcaaaccatcaattgaagaagaaggagaagaaattgttttcgaaggaaaaaagcgcgtgccgttcctgcgattcgagctttcacagcgtgccgtgttgagtcatccgtagacccaataaaggcacattaaaaagttcattgggctttacattataagcccaggatattatttttatgcaccgaagtatttgcattcgattttaattcgagggatcagatccgacggtccagattgagtcctgcccagtagcaaaacggcgttagacgcagcattcgttagggacgggacactagagaagggagggcagagagcgattttgttctctctctacttctcggtcgtcttcttcgtctccactctagggttttactctatcttcttcttcatcatcatcttctacaccaatctctagcgttaatctgtttctgctggagaagatttacgcttgttcctcggttctcttacttctgctccggttcgatcgcttgctaagtgtttcgagttggttagttccgaatttccttttttatgcatattgagtgttcactgctctcctccagcaatactatagggctctaagaattgaattgctttcaggttttcatagttagggtttctcaaaactgacttaaatattttgatttgtgcaggttcgcacttcggtgggcgatatcatg

SEQ ID NO: 9057 - DNA, 3000 bp, Unknown; identical to SEQ ID NO: 9051
  misc_feature (1)..( 3000): cDNA_ID_1989365_gDNA_ID_1971974_Annot_ID_177573 3000 nt of promoter + ATG

SEQ ID NO: 9058 - DNA, 3000 bp, Unknown
  misc_feature (1)..( 3000): cDNA_ID_1989366_gDNA_ID_1971974_Annot_ID_177572 3000 nt of promoter + ATG
tcctcctccacccacttatgctcccgctccatctcctgctcctgctcctgctccggtgcctgctccatctccggcttccagttatggccctcagtatagtcaagagggttatgcatcacagcctaataatcctccaccacccacttatgctcccgctccatctccggcttccagttatggccatcagtatagtcaagagggctatgcatcagcagcatcacagcctaattatcctccacctccttcacagagtcaagttgctgacaggaagaaatttgatcggaggtattccaaaatatcggataactactcttctttactgcaggttagtttaagacaatgcatatgctatacacttggattttcccctcaaaggttctttggaaactgaatctagcatgtgtctgaattgattccaggtgtccgaggctctaggccgtgcaggtcttgaatcttctaatctaatcgttggtattgatttcaccaagagcaatgaatggacaggtttgttatattattcttattcttacgttttgaatgtaaaggagaagccaaactaattggttttggtactgcaggggccaagtccttcaataggaaaagcttgcatcacttgagcaataccccgaatccatacgagcaagcaattactatcattggaagaaccttagccgcctttgacgaggataacttaattccttgttatggttttggagacggtatgcactgttttctctcttctcgattctcataagaatgtatatcaatcggatcatcattgacttgctttcatctctttgcagcatcaactcatgatcaagacgtgtttagtttctatccagagggaagattctgtaatggatttgaggaagtattggctcgttatagagaaattgtacctcagcttaagctcgcaggtttatttcctgctctgacctgcactggccaattctatatctccttgtgaaacgcaagttataaacttaaaactgtgtttttttttcctgcgaacttatgtatttcaggaccaacttcttttgccccgatcattgaaatggcaatgacagtggttgagcagagtagtggccaatatcatgtgttagtgattatagctgatggccaggtactgattaatattttgactgcctaagctgtgtatgatcttctggttttgtgtctagggatatcaaagtggacccattttgttgtttcaggtcacaagaagtgtcgataccgaacacgggcggctaagtccgcaagaacagaagacagtagatgcaattgtgaaagcaaggtgcgaatatttcaatcttttgactaatgtttcttccattttaaagttctttactttgagtgtaatgttataaagtgttatggtatgtaatcagtttcatcctctctattacagtacccttcctttgtcaatagtcttagttggggtcggggatggaccatgggacatgatgcaggaatttgatgataacatacctgcccgagctttcgataacttccaggtaagcttctttttttcatatcatgacattgaagattgcttcttttcttcagtttggaaccatttttctaacatgtttgctctgtttctagtttgtgaacttcacagagatcatgtcaaagaacaaagaccagtctcggaaggagacagagtttgcgctgtctgctctcatggagatccctccacagtacaaagcaacgatagagcttaaccttttagggtaagggacccaaatcaaaactctgataggtgtagctgcgagaaactgctatattgttaaacaaaatgctcacctttctctttcccttacatttttgcagggtaagaaatggaaatatcccacagagaatcccacttccgccaccggtgcagagtggatcatcattctctagttcccggataccgaattttgaaccgagtgtacctccttatccatttgagagcaagcaaatgagtagtgcagacgatattcaggtaattagtagaaacttaggaatctgtttgaaatgttaagtgaaataagagctttggaactttttgttgttaaactcgtttgtgttattttccccttgaacagctatgtccgatatgtctgagcaacccgaaaaacatggcgtttggttgtggccatcagacttgttgtgaatgcggaccagatcttaaagtgtgtcctatttgtcgtgcgccgatccagaccagaatcaagctttactaacaacaccattgacatgcagctttgaccagcccaaatcccatttcttccagagattttcagatctttctgtagaaaattaaagtgttcttttgttctttgattgaattcctaaactttatcttgttcataaaatttctttgattggattgtaagaattatgtatttgtctgttggctttctttgatttttcaagattcgattaaaccaaagttgattgcttaaacactttaattttgatttgttttgtcgacataagcaatgagaaataaatggatgaatagcccaatagaagcccattagcctgaaattgggctacaagcaaacataccaaataaatagtagggaagagcagaaataatcacaccactcatcagttatccattcctttctttttacataaattttgtcactttttctacaaacgattcttcgcttctgtgaaatttgataaagcgaaagtttttttcttatggattctcttcgattcaacctccaacaatctccatttcaattgaaacctagaattctccgaccaagaatcaccaacatatcaaaccgaatcgatgaaaccgatcctcgaccatcatcctcggccggtaggatccaaaggttagtacttaacaacgaaggtcggaccaaactaaacgccgatcctgaccgtgaattctattcatatccacggttcgtgaaccacgtagatgatagtttcatatcctccttaaccgaactatacagaaaccggttgagacccggttcgactgtacttgacttg

SEQ ID NO: 9059 - DNA, 3000 bp, Unknown; identical to SEQ ID NO: 9048
  misc_feature (1)..( 3000): cDNA_ID_1989367_gDNA_ID_1971974_Annot_ID_177571 3000 nt of promoter + ATG

SEQ ID NO: 9060 - DNA, 3000 bp, Unknown
  misc_feature (1)..( 3000): cDNA_ID_2038015_gDNA_ID_1971974_Annot_ID_177569 3000 nt of promoter + ATG
ctcgagaaccttcctgtaacatatatataacaaaagaagagattccattagcaaaagagttgatattactcaagtcactcgaagcccggtgaatatgcaagacttcatataaaacaaaatgcagaaatcatccagtctggtcttaagtgataaacactctttagtaggattaagaatgataagacatcctaagccttgaatcaaaaccagaataggatcagatgaaaaataaagaaacaaaagccaaacctgtccacaaacatcttcgcagatagtatccgtcttcttagaactacgataaccatcggacatgatgatgatgattagttctcaggaaagtcaaattttggacgaaaaaaataagtttttgaataaacagaaaatctacagaaaaagaaaaacaagagagagtggtctagttctcggaggaggatcaaatccgagaatttctgtcttgaaatcgatccttctcctttcaccaaaactgtaacgccaattatagccgtttggtgctttttagcttccatctctacaattatatctgcattcttcaattggccaaataaataaattacattgttcaattcttcttcttctttatagagtaaataatttcatccgtcagatctcgtagaggcggtatgatcttacggctttaaattaaactgttattttctctatttgccaaaatcagaaattcctttttttaacctagttctagttaaaatagtaaaaggaattttgaaccgaacgttaaaaaaagaagtctcgtaactctctcaattatgagacggcgaaatgaaacccccaaagacgttaacgacgacgacggcggaggaggaagaaacaaccatgcggaaacagccgccttcgcctccaaagccaccacgtgtcaattctatgctccaatggtggcggagatggacggtgttggtggccgctatctggattcaagcattcaccggcacgaacttcgatttctctgcctactcttccgacatgaagtcttccatgggggtttctcaatctcggcttaactacatggcggttgcttcagatttgggtaaagcattgggttggtcttctggtttcgccattgcctatttccctgtctccggcgtgcttttcgctgccgccgcaatgggactcgtcggttacggtgtccagtggttatccatcgccgatgtgatcgatctaccttactctctggttctggtttgctgctccttagccgggttaagcatctgctggttcaacaccgtcagcttcatcctctgcattcgacatttcaaagcgaaccactcgttggccctgtctctcgttgtgagtttcaacggaatcagtgccgcgttgtacacgcttggccatgaagccattagtgggaaatcatcggcaagctctgatatttaccttctccttaactctctcatccctctgatcgtctctgttttagccctttggccggttcttactaaccctaattcctctgaaaccgatactacgcgaacgcatgacgaaaccagaatcttcgtagtcttcaatgtcttagccttagttacatgcttttaccttctcttgccttcctcaggcacctacttagcctcatcacctcgttggcatttcctcggagctattttccttctccttttcccattgtgcgtcccgtttctcgactatattcaccgtgctctcgagtcctgtttccaccaccacagctctggctatgcagcggttaacattgaggagcccaagatcctcaaaatcaaaagtcagaagagtaatgcggaggaggaaagtgatcaagtgagactaggagatgaacattctctcggaatgcttgttcgtaagcttgagttttggttatactacgtagcttatttctgcggcggcacgatcggtcttgtttatagcaacaacttaggacagatcgctcagtctctaggacaaagcagctcaaacgctaaatccttagttacactcttctctgccttctcctttctcggaagattgctctcctctgcacctgacttcacacgcaagaagctaaaatacttgacaagaacaggctggttcacgatttcgctactgccaacacctttggcattcttcatcctcgcgtattcacccaagaccaaccagaccgcgctactagaagttgcgacagcacttatcgggttaagctcggggtttgtgtttgcggctgcagtttccataacttccgaactctttggacgcaacagtgtcggtgtcaaccagaacatcctcatcacaaacattcccataggatctctcttctacggctacatggctgggtctgtctatgacacaaatgccagcctcggcaggaaatctgtggtggctgactcggttgtttgcgtaggaagaaagtgttatttcgtaacgtttttgttttggggttgtttgtctgttttggggtttgtatgtagcttgtttctgtttattagaaccagaccggtttatcaccggttaaaattgaacagaatgtaaaactgtgtagagtattatcagctgcctgcttataatggtatagattggtaggatccaagaaaagagtgaccattgccttcacacgactcagccaattatcaaaagtgttgtacaaaacattaatgcttagctctgttccaacttcatatataagaattaacatatactaatacatagttggtcattttaaaacttgctcgtgattcgtaaatttcccatcttaaatgaattagacaaattagccatcattatgaaagagaaaggttaaattagatgattagcgggcaataaaaggttagaattgatattatcatgtcattcgatagtgacacatgtgactagtttgacctttaggagcgccaacgtgtcatatatcagcgtaaattccaaaacaaaacaatctagtgtgggacccaaatactgttataaaaaaggatcattaaaatggatatgttaaaaaaagaaagtaaaaaacgcgtcagggaagagaag

SEQ ID NO: 9061 - DNA, 3000 bp, Unknown
  misc_feature (1)..( 3000): cDNA_ID_2687327_gDNA_ID_1971974_Annot_ID_177566 3000 nt of promoter + ATG
ctaattgatataaagccccagactttcgttgattttttcacacaaatcctgaatcggttttcgtaacgcgattcctcttccatttcgttcactgttcctcgaaagggataaaatttatttttgagtgggttacgattcagcttttcctgggaagcaaaatgtgaaatttcccttacaagtttgagttacaaagattggatttttagagatatttcgtctgatttaggcatttactgtatccgcttgaatctctagtgtgtctctaactcagtagctgcttatgaacggatgatcttatcctcttttgttcttgtcacaaatatacagggcttggattgtcgatggtcgaggaattgcagccaaagttaaaaatgcctctctttcttcagctttgcagatccaagactgtggagctcatataaaatgccccaactgcacttaccgcattgacaatagcaatgtgagtgattatatccacacttctctctcttgtcttaaacttacacacactcacctgtgtttcgttggtttcaggtactgattccatggcctggccttcctaaaggtgtcaagtttgagccaactgatgaggacattatcgaatttttggaagctaaatgtgggattggtggctctgaacctcatgtgcttatcgaagagttcattcgtcctgtcactgaagatgttggaatcaattacactcaccctcaaaaccttcctggtaaatgatcaataaagacctttaaataagctcataattgttgttcttcaactgaaactgtaaatcttgtatcttgaatctctgagtctctccaggtttattgattcctgctgagctttactgtttcaggtgcaaacaaagatggagtgagtgtcttcttctttcacaagacagtgcaggcatatggaacaggacagaggaaacgcagaaagatcacaccgacacttgtgaacgatgaaccagttcgttggcacaagacaggcagaaccaaacctgtgatgctcagtggagtccaaaggggttgcaagaagatcatggtgctctacaagagcgctagaaagggaacgaagcccgagaaatcaaactgggttctgcatcaataccatctaggaacagaaggaaaggagataggagactatgttgtttccaagatcacatatcagcagcagaagcttggggaaaatcctgatgaaggtgagagtagttccggggttagaggtggcccaacaacaccaaagacgaatactcctacaccacctagccttgtagatggtgtcgctggagatgaagaagcttttgatgatttaaagatgtttgatccattttttgaggttggttccacaaaatcattggggaatagtaacttcgttttctagagactaataaagtcggaatttttgttgttggttaaccaggaactggacagcattcctgaagctgctttagggaagatgtggtccaaaaaagctcgaatggatgaggaatttgttgtgaacctaagtgaagataacttaatatgcgacgaaagcatggaagcttcgtctctttgggaaaatcaggttctccccaatcctagccttggaactgttggggacttcgatggtttttcgatatcagatctggagaatgcagatttggggactccccctgatttcctcactgtaagatcctgcttgaaaaaaaccttgtttactttcggaaaattcaatggaacataagattctaaattagttgtcatggaggttttgcagttggcttctcaggagagcttgctgaattggattggatggttgtgattggattcttgctgctacacaaagaagctcttctagtacggcgttttcgctgaagaaggaaaaagctggaatatgtcataaataagaaaactttaaagtctccgcaactgaagtcatatctctgtgataattttacttcaggagaccagttttctctcggattcccggaaagctgcttaaatattccgggaataatcattttcaatctctgaatctgcacttcatcattgtaattcaaatagatattttgacctttgtactctttgctgtcttatgatggttactctgtttttgtttggctcagggtccaacggttataactatttatttttgggtattttactattttcaccttatattctcaaaagttctcattatcaccccaaagaaattaattaatccgatttaacctctttaacattactagacagttcacacaccctctgtctagacggaattagggttttcttaagctattccgcagcagtctacggttgttgtgtcggtggtgggcgcctccaaaatttaccctttagtataaataagttttggaaaattcagactttggttattgaaacgccatctcagctctaattcagtacgatggggaggagaggtcgcggcggcggcggtggtatgggcggaggaatcaatcgtagatatctgagtcaagttatggatacgtgcggcaaggatttatctacggcggaggacatcgttgatgatcttcgttccaggtacggcaattttgcgaggttgactcggcaagtgcttctactcaatgtcaggcaagtccttaatgttagaaacaacaagagggttaaagacgaagatgaagatgacaacattggagatgaggaaggttctgcttctcagaggaagaaacagagacgggttgatgagaaagaggagaaattgcagcgagcggagcagtcgcatttaaggaagaggaatatggaacgttcagtgtcttcttctccgtcttcttcttcttcttcggaagacagtggtgatgtgtcgacttctgaggacgcggtttatggcgagaagctgagtccgccgcggtttgatctgatcaatgacagtctaagagataactacgctaagttgaacagctcctcgaagaaaccaattgggtcgcctgcggaaaagaatgtggaagttgagactgtgagcaacaaaggtagaagcaagttggctaca

SEQ ID NO: 9062 - DNA, 3000 bp, Unknown; identical to SEQ ID NO: 9045
  misc_feature (1)..( 3000): cDNA_ID_1012219_gDNA_ID_1971974_Annot_ID_177563 3000 nt of promoter + ATG

SEQ ID NO: 9063 - DNA, 3000 bp, Unknown
  misc_feature (1)..( 3000): cDNA_ID_2038032_gDNA_ID_1971974_Annot_ID_177561 3000 nt of promoter + ATG
accgatacactgtttgacggtcaaacacagagtcaacgttacaaaatattaccgtgacctctctgtgtaacaacaacaatcagaactcactcaaaacacaagtcaaaaggataaaatctccaagttcaagacaagactcttagagagttgtttctgggtggtagtgataatgagatcatggcttattactgtttttttactaagtaagataaacccccaaaaggatcagatatctccgtaaagaaccttgcgtggatcaagctgtccgctgcagtaacttgatgagacgatggatagttcttgtctgcctttccactcttcacgaggctttaacaataccagaggttcgattactccagaatctacacaaagcattgttttgtaatcttcatctcccatatcagctatggtctttgcctttttgtcccaggggttccacacaactgctcgtttccaactcaatccattagaaaccaactctcaaaaggtttcattcataaaaaaaaatacgaagaacaaatggtatcctttacctgcattgggcatgccttcctttcgcaactcgatggtcctctttcgctcatgatctatgaccgcaatctttgttggtgtgttcaagtacactctatcgacctgcacagcacactgactctatatcaatctttggttttttttctcttctttgaaactattaaggggaaaacaatggctgacattactcacctccccgtcaaaggtaatcgcgtctgcttgctcagtgaatctttctttaccaatcaagttgtctagataatccagtgtctccaaaccctcaactcgaacttcactgcaagttcggtgaccacatgatttatcactcagaggaaggaagcagcataagtacacgaaatcagatcggaagaaatttgtaaggcacacacaccttatgtcagatacatataagtagtttcgcagtgcaaacataaaggagaatgcctttgagtcaatgttcctcacacgagggatcaaagtaagcttcccagggctaatagaaatgcgaatacggagttcaaaactgcgccaatagcaccgagtaattataaagttagacaaagagatgataataaaaaaaggcacagacaagacatccatatcatagatccagagtataagttaaaacacacctatgcggccaggtcttcaagtcatcttctgtggacttcaatatcagatcaacagatgattgtttgttagcaggaggtagaggcgaaggatcttcatcatgtgaccagaatttgttccgggcaaatccatgtcgctcaagtccaccaaagtttccaaactgcaaatatgacacagtatacttaatggcagtacgaaactagagcaaagggttattcaactatattaaaatgatctgagatgccaaacctgtggaaagcaaacaggtattcctcctctgatcgccttgggtggcttatattgagcctaaatgagtcgtaccaaacaaaatactagttaaaacatgaaaactaaagacgatatttgattagagatataccttgctgctcatataaagcagttcttccctcctttcatttttccaagaaatgacttgtcctccaaatagaagcacctgaaagatttcaatccgagaatatgtaactctacaacccctaacagagtattcttaacacaatccaagttccagaacagttgaacaacatctttcatttcatagtcgtctccaagataaacaacatcttgtatagacatacaatagtagtaggctcaaacaactaaccactgagatgctatggtctaaacattgaggaatgatgaagagaagagagatgaaggagtaaaacctcagcagtagatccgcgaggctcagtcaaaataatccgggaagacccatcgccatcgttgcctaagttcaaaggcatcccttttttggccacaagctcactcttattctcttcctttttctacaaatctatctccttcactcttaactacagcaacaaccaaaacccagatggaaatctatcaagcattttataagaacaccaaccgtttaccaaactagaatcatgattctcagtacatgagaataaaaaaataatatgggaatataaaaaccggaatcaattccgcaaaaaggggaaatcaagaaatattaacagaaatcaaacacgcttgcgaacaaaacaaaagggaaagagattcaagcttacgtttgatcggaaaatcgtacggattgcgacgtaatcaagagcaaacgagtccgcgatcggcttcgaatttcaacaacttccaccaaactctacgcgtttcgtgaaaaaatccatcaatcaatcaaccaatcactcaaatccactacgcgacacacaacgtgacgataataacaagaaaagtagctcaaattgtagacgagagagaaatagatcacaaggataaagagagaaattgagatcgagagagtagaagaaaatgctgaccttggtgttctcttgaataaggctctgattctcagaaatttgggttatgagtcagaaagaagagcttgttgaggacgacgacgaagaagaagaagaagaagaagggcttgtgcgtactatttgtagctgtttccaattctcaataacaggcactagctccgatactgccacgtccttcttttcttttatttccttaatcaatctttatttattgttctctaattggttatgtttatcctggagagatgctagtatttaaataacatttaatacactacagcacataataaagaaaaatgttgaccaatagaaaagctacaagtaagtaagcgagtagtggaccattattagcccaactcatacagcccaggcccaaacgtttttgctaaacgtattcgcgcttcatgtttttgctttgaagttgaatccatccttctcttctcttctctccctcgcaaagtttactgcaagaaggaaatttgggttgctcaagcaatgtagaagcgagaaaattttgatg

SEQ ID NO: 9064 - DNA, 3000 bp, Unknown
  misc_feature (1)..( 3000): cDNA_ID_2037157_gDNA_ID_1971974_Annot_ID_177559 3000 nt of promoter + ATG
taataaactaagagcttctatatacaaaattcaagacatttttggatttggtttgacttggactcgtttggctctgctgtacaaatatactccagctagtgcagtcgcggtacctgtttatttaacaagtgattatatattgcttcaataaaatgaacaagtgtaacaaatcctttactaatatatactactagtagttgtttacctatagagttaagaggtgagactggagttttgaagaaaagaatggatgatgtaataaccaccacacgcttcacgcagttccctacagagtgtgttactggagacaccatctccaatatcatatacgatacctacaacaacaaccccaatttttatgtgttgattagaagcctaacactaaccgactttacaaaattcagtacagtttttctgaaacggaggaactagacggaccaacctgttggtagctatgcaagcaaacaccagcaagtagagacatgatgcaaaactcttttaccgacaaaccctggcttgtctgtcaagcaaccacatacaaacacacattagttctttctcttttagatcatctagctatatcggtttatgcttttccacttactgctacttgtaaatgcgaaggagtaaccttgaacccatcgatgaggattgctaaaggaaccagtaagataaaggagataatggttattatagagaaaaggttgatgttgtccaaagcgtcctgtttcaatatacaaacattaatagatttcgattactagtttctttcttgagatcataaggataacttatattcaaactcttttacctttccaaccatgaattttttactgaggacattgcgtgattgattcgtcacattagaagccattgcactgcagaaaccaatcctggtttatcccaataccatgaattaatcaaatcaattaaaacttcatcaaaagtttatcaagaatactattttttttgttcttgttcttgttgttcataccaattgaaagaagcttctgtgaaagatgctaaagagactccagcgacaataggtaacaacgaacaaacaatccacagactcggccactggacattaatcaaaatttcaaagattatgtctgaaaatataactctcttgtataatctaaggttatagattaagtctgaaacagagcgtatctttgttttgcttacctcaccgagcaagagaacagaaagcaagacggtgaagaaaggctccattgctttgatagtgtgggtgaaagagacatttactcttcctaagctcacatttgttaacaagttccctaacgtgtgagctactgctagttgtacgatcaccgtaaactggagaggattacaattgaatgaatctctctgtttttagggtttgacggaatcaatatttgatttacctgagaaggagaaaatttggggcgtggatggagtttaaggagccacattatagcaatcatcaacgttccacaccctaattgaaatgctgttacagtcgctggatatggataaaccctaagtacctggatcgatgaatgaacaagtttcatacttgtatgaagactgataataggttcgagtactgcttcttgcattgaaatggactgtttaattaaatgaagcaaagaaggaacctgtttgttgaaaatgttgtagtagatattgagaaggtaccaaactccaaacatgcctcctagcttcaaccctttaaccaaacttccagattccaaatctcctccttccacattctccggaactgtagctgacttgagcttgaagccattaaatctaaggttcggtctccaaggataagagttagaagatgaaaaagctctgcttcttctgctcaacgctgattcaggagtagacttggcaaggaacaatggagatggaagtcttggatttggatttagaaatgtgagagcgaacataattttttcctcttatcagatgctccaagatgtgcataaatcctccggcatttgttggaatttctcacaagtaaccgactcttgctaactttttcttcttcctctattggtaagagttatgttacatgagtctacctcctcattttcatgtaagaagaaaaaagtttgttttgtttttggatatactgcaaacttgatattagtattatttagaagagttgtctttattatgtgacttttctctcgttctactatctgaatgtttttgagtatgataaaaataactcacatgccgatgccgacatttttttcaatataacattggctcgattttatttatctttcctcataagagccagtggtatttgccggtattgtttcttctcatgttctccattccatgtgtgttctgtaaataatgttatggaaatgatttgacatacttggtcactcatttctttacaaaggggccgtggttttcttcgtttataataatatcaaaaagttggtaacgctataaataattatttaaaataaagtttacgtacgaacatgacaaattactgaccacaacaccaattgatttttagtgtggaatttgaaaatgtcaggggagaattgtatggatgatatgaaaggggccgcgttgaaacatgtggatgttgtattgtatgctcctgagtccacccttttctttccgtgttatttcatactattacaaataaggttggtcccattgctttgatcacattattgattataccatttacttattatgtcagtgttggtacaggtcattgatcacaatttgggctttaaacggagaggatggaaactgaattctaaatacatttcggcccatttagggtccataaccttctacgccaatcagaaggtacgtcgacatgagcaacttggtcaattttatgacataaataaaataaaaataaaaaaataaaaatcgatctgaggggttttagaaagaaaagaagaaattcgggagtcggagaaattgtcgggtggatcgatgaatacttgtcagtttatggataagcagata

SEQ ID NO: 9065 - DNA, 3000 bp, Unknown
  misc_feature (1)..( 3000): cDNA_ID_2037583_gDNA_ID_1971974_Annot_ID_177584 3000 nt of promoter + ATG
cagttcttccttctcacgttgcagtgtctctgggtctcgtttctcattctgatctcacaaatataattttgaaagtcaaagagggagggctaaccagatataacagctcacacctccacaaacacagctaacctgattaagagttatctcttgagccttcaagattatatccgcaaatcgatttttcaatagagcagccctgtaacgcttttctggaggtagttccttctcttttggagcactatttcctaaattattaatgggtcaagagtgagatgccaccctcagatattagagcacagatatttttctgctacacttctgagcttaccatcttgatgaccatctgccccctcaataagacttagcttccctctggatgcatcttccatctgattcaatccaccgacggaatctgcttttagaaagggaataagaaaaccaaggtttattaattaatatcaacaaaacttaacatcttttgcaccaaaagaggagtaatcactgattagagataatatgatcactatagaaaatagcaaacagcgacctgggagtaaaacaagcagaaaatgtaacaggtctatcactatcatactaggtgtgtaatatgagttgctatcagtaaggtcagtaagtttcactccaaaaaaactacagaagtaacattgagtattctagatggacggccacttctgacaagagggaagtaaaatggttccgagggttaagtacatataagaattgcaaacatcaaacgtctgcaaaagctccatagagaaaaagacaaatacaatgtagcaagattaaacaaaccactgtagttctctaacgccatacctttttctgttctgacagttgagatgtgagatatagggtgctcataattaccaatgtcaacatcctcgtcctccaattcactccctgcaagtaacgaggaggaaatgacagcttaatcatagagtaggacatgcgaattagctcaaacaacaaaaccagtgtatgctaaccatcacagtgttgcgtcaatgaatttcctggccctgacccatgtaaaagctacatcaagaaagttttcgctgtttatcagtcatgttaacaaatggatcaagaatgagatatagaaaggtgattacctctaacacacagggttcaccgtttgaatctttcttttgattttctcgcagaaactcatcaaagagatcccgcaactggaacaaggcatcatgactgagatcattgatgtcaatctctatctcatcatctccagatctctcttccttggagctgtgatctctcaggaaatttattatctgtacagggaattctgtcaaggaccccaaatctctgccaagctttactctatcctcatctgtcataacccgcttagcaggctctaagaggctgttacgtttcacagcattcatctttctcttcttagccacaggctcaggtatcgcaatatctttgtgagcaagagtagccaagttacttggttcagatttggttccggatgacttcttctcgatagttttccatctcacttcaaaaaacttgctgagagtatcagcgaagcgatacacattattatctgacgggttataagtcatagcattgcggaaagtaagacggacatcagcagaaaactctgaagggcttgaatacgtgccggaagttaacttgcttttaacagttcctaaatccataggatgtttgataatggtgaaataatcaggaatgttgagcttgacgacgtccacaggggtattaaagagccaacaatgctgctgcgacatcaatcgtttaaggaggctctcacattgcttcatccgaagcatagtggaagtggtgactggctctggtttggttgctgtgaaggggagcaccctttttccagggccagtagagcatcgtgacattccaaaactcttggggcgagacacattacttgcaggtgtactagtaacaatcttagatataggaagaaggtccccaacactcttctgaaaggaccgtagttgttccagctcctgacgaagcgtatgaatccactttctcctttctgatgatgacaagtcagacaagggtaaaactattctcgggacaccaaaagtttcatcatccttggaagcattggggctatcatcacagccgccgggagagtcaaaactgttacgattataatctcctgggaaaccaccgttcctcacagtcatgatatcgcccaccgaagtgcgaacctgcacaaatcaaaatatttaagtcagttttgagaaaccctaactatgaaaacctgaaagcaattcaattcttagagccctatagtattgctggaggagagcagtgaacactcaatatgcataaaaaaggaaattcggaactaaccaactcgaaacacttagcaagcgatcgaaccggagcagaagtaagagaaccgaggaacaagcgtaaatcttctccagcagaaacagattaacgctagagattggtgtagaagatgatgatgaagaagaagatagagtaaaaccctagagtggagacgaagaagacgaccgagaagtagagagagaacaaaatcgctctctgccctcccttctctagtgtcccgtccctaacgaatgctgcgtctaacgccgttttgctactgggcaggactcaatctggaccgtcggatctgatccctcgaattaaaatcgaatgcaaatacttcggtgcataaaaataatatcctgggcttataatgtaaagcccaatgaactttttaatgtgcctttattgggtctacggatgactcaacacggcacgctgtgaaagctcgaatcgcaggaacggcacgcgcttttttccttcgaaaacaatttcttctccttcttcttcaattgatggtttgatttacacatccttcttcttccagttccatgtcgcatacgtacacagattgacagcgaagctagttagctcagattttggatctcgaatttcagttaattcgatccggtt

SEQ ID NO: 9066 - DNA, 3000 bp, Unknown; identical to SEQ ID NO: 9056
  misc_feature (1)..( 3000): cDNA_ID_2026743_gDNA_ID_1971974_Annot_ID_177583 3000 nt of promoter + ATG

SEQ ID NO: 9067 - DNA, 3000 bp, Unknown; identical to SEQ ID NO: 9054
  misc_feature (1)..( 3000): cDNA_ID_3044430_gDNA_ID_1971974_Annot_ID_177578 3000 nt of promoter + ATG

SEQ ID NO: 9068 - DNA, 3000 bp, Unknown; identical to SEQ ID NO: 9052
  misc_feature (1)..( 3000): cDNA_ID_3044438_gDNA_ID_1971974_Annot_ID_177574 3000 nt of promoter + ATG

SEQ ID NO: 9069 - DNA, 3000 bp, Unknown; identical to SEQ ID NO: 9043
  misc_feature (1)..( 3000): cDNA_ID_3044444_gDNA_ID_1971974_Annot_ID_177558 3000 nt of promoter + ATG

SEQ ID NO: 9070 - DNA, 3000 bp, Unknown; identical to SEQ ID NO: 9042
  misc_feature (1)..( 3000): cDNA_ID_1989375_gDNA_ID_1971974_Annot_ID_177557 3000 nt of promoter + ATG

SEQ ID NO: 9071 - DNA, 3000 bp, Unknown; identical to SEQ ID NO: 9041
  misc_feature (1)..( 3000): cDNA_ID_2687055_gDNA_ID_1971974_Annot_ID_177556 3000 nt of promoter + ATG

SEQ ID NO: 9072 - DNA, 3000 bp, Unknown
  misc_feature (1)..( 3000): cDNA_ID_1440865_gDNA_ID_1971974_Annot_ID_177555 3000 nt of promoter + ATG
ttcttcttcttcttcttcttcttctttcttgatctttttggttgttacgagcttcttcttctctttctcttctcaagctcattagaacatcaatttaaaacagaaacttttactatagaccacgataacaaatctgggtttttgttgttgttctctccatgcagagaagagtttcaaaaaggaatacaggatctgtggcttttgagtaggttaattaattagtcgacaagaaaacaaaggtatgtaaccatttgatcattctccattgcttgttgtctcgcttagatccttatcatatttaaatgctaaaatggatgattttttttgagacttttttatatatatatatatatttataactaaactttgatagataatctagtttagttagtagttgcacaaaatacattttgaattctccgttaaataggcgtttcaatttataagaataagatttatgataattttcgggttcaaacttacatattacacgttttgttatatgttacacctagttaaacatatagtgtttcatctagctatgcataagagtgtctcaccataaatcaaatgggcagtttgtgtttttttttctttatatagactacacagaatatatagtgtgcactatcttacgtttgtccggtgtgtcaatgttgatttttgcatcaagttctccttcgacaaaacaaaatgacgatatatatctatctatatatatatatacaaactgtattggcttcgtactatatacatacgtcagtcttattaattctacaacgcagatcaaaatttgaattttgactaggctttaatgtgtacgattaccttatacaagtgaaaaagggtcaatcgtacgtttacccttaaatttctttttgttagtaacatatcgaaaaataaaccgttttatatatattttcaaaatacttattcttcttgttaatgctgtcacatattataaatcattacaatgttttgacaaataaaagaaaaatcattattacaaatctaatcgttttaaaatcctagggaatcctactagattattattactattgtagaccttgtttcttttgtcacattaattaataacaataaaataatatatatttttaaaaatatttttgttttgttttgcattgtatattatttagctgtagatttgtaatgggccacgtaattgggccatgctaagacccggcaaacccatgtgagatatatgatctcccgcactatagtccacgttatctcactgatatctcattattttaacaataagaccgtctcttaattttattacaagttttcttttactcttgtagccttaaattttaggctgaaaattaaagttttgaaaaaagctatagggagggactatgtaaaataaaaaaatgtacgttaccatcagattttaccataaagagccaaaaataaaatatgcaaaactccactaaaaataatattaattcccctagccaacaaaaaagattcagattcatatcccacgcgctcgttcaaatcctctcattcgccacctgatcaaaccaatctcaatttgaaaattgaaatagacaaaatcgtgacattgggacataaaaaagcactaggacaaaattctagtcgacgcaaaaaaaattcgaaaaacgtgagtcagcgtatgtggtttacacgcgccaaagtgggagcgtgagtggggtttgaatgcacctgaaactgtctggtcaataagttaaagtgcatgggaaaaatcttggttgctgtttcctatatatctctctttttaccatcaacatgttacatatatatatggacaaaaatctgtatatgtgaatgcatataggagtgtgatgtatttatataagttagtaagctttgttctctttctctatttttttggcaggtatataaaattttaaaatggaggaggaaaaccaaaagtcgcatcgagtttcacgtaaagaccagagtggatcccactggagtcaaggagccgatgaagagccgagagccagatgctccgggaaaaggtgccggtcttgggcggcggcggcgatcgctgactgcgtggcgctctgctgttgtccctgcgccgtggtgaacatcttcactctcgcctttgttaaggtcccgtggatgataggccggaaatgtatcggccgtggtggcccgagtaagaagcggatgaagaaaatcaaccgtgaggatcggtttcatcaccatcaccaccacaggaggtcggccgagatggtgagtggtggatgttgcggtggcggagatggagatggagagttcgatgaccatcggtttgtggtggaaagagacgggagtttgaccaaagaggaagccaaaacggcgtcgttaaaagaagaggaagagacgagaataagtgcgagagtggaagcagagagagtttggttagagttgtatcagattgggcatcttggctttggtagagtctccttcactggcattcatcaatgataatagatgaacttttaattattaggcgtatatgattaccaaaactaaaaatagattttgtgaaattctttagtgcagcaagtaagattccacaagtatgcatagaaaaaaaaaaaaagattacacaagtattaatttatagaggttttagtgcaacatgtaactcataaggattaaggaaacaaaaagtatttgtgaaataagagagtacattatattatagaaatgggctaatatacatttgggcccttgttaaagggctttcacatgaaccgcattaaagggtagtttaggacatttacgatagaacttggtaggcgtagctagctgtcctgtaacagaaaaaacctgcgcattttagcatgcttatgaaattcatttgctaaaagacgcatagacacgtcgtgggcgaagggttctttgtcttcttcccccaactgagcaagattgttttccttaagagcttcatcgtcatcatccgagaattggagcagagatacgaagatttggcgaaaa

SEQ ID NO: 9073 - DNA, 3000 bp, Unknown
  misc_feature (1)..( 3000): cDNA_ID_3044454_gDNA_ID_1971974_Annot_ID_177550 3000 nt of promoter + ATG
tggacgatggcaaacatgatgggactccaacacactctgtaacctttgtgtggaatggacatgaggtgactgttgcttcacatgcttttattactttgctgcaattctttatggaactcgtgatctgtagggttgagcaactagcctctgtgttttaagttacaccttggtttacagggggaggaggtattgttggttggggatttcacaggaaattggaaagaaccgataaaagcaacgcacaaaggcggtccacgttttgaaactgaagttagacttacacagggaaagtaagtcatgcttcttttacctttcccgttgatgctttttttaaggttcaacagtaaaacgtctcataatcttccctgcatgttaattgtgacttttgagggattgcaaactgcaaagaaacttatgaaaatgcatttgtgtcatataacttggtgattattgacaatgtggcagatactactacaagtacataatcaacggtgattggaggcattcagcaacttcaccaacggaaagagatgaccgaggaaacacgaacaatataattgtagttggtgatgttgctaacgtcaggcctacaattcaacaaccaagaaaggttactcctactatgcagtagtctcttcttcatacaataggaaaagcttgaataagatgttccacgttatatttgcctgattggttcaagacataaacctgaagcaacttgtacaatgttttgcaggatgcaaatatcataaaggtgatcgagagagtgttaacagagagcgaaagatttaggctggcgaaagcagctcggtgtatcgcattctcagtttgtccaataagactatgcccaaagtcgtagaagttttgttttggcataagttaaaatgttacatccattcttctgtctctatccattcctcgaggtacttaaccctaatatcgttgtgaacaacattgccacattcgcgcactctatgacaagagaatgttgacattatgttgtgtgtttgcatgaaaaaatgtcgacatagtttcgccgttgcccactttacatataagtcccaaaaccaaccctaatgcgttactggtctctgtatttcttcttcattttctctctctctctcgctctctcctaacatgttgaagaaaatagaaactctgttatctaatgttgcctatatgatgatttatggccatggaaggtctgagaggagagacccttcttctctattttttttatttcctcttcattttcatgctaagagttttcactgagtctgttgtttcgtagagtagaacagtccatgatcgatgttaatcctttgcatcttctagattgtgtatacaatagcaatctctggtctagagagagcctagagaagtatggatctttctatatgtataccacaaacaaatggcctaacatctaaagtgggtggtgattatttaagatgagagcctgagagggtaagtgaaagaggctgatccttgttttcatgataagggaccttatcctctaaacctttctgagaccttttatttttttataaaaaaaagaattgaaagaagaaaagagcacgtaaaagttttgaaatcttgagctaatattcctcatccacaagaaaagaagaaagtttgttattcaccgcagctatcgctttcgttatcctcgttcccacaacctcaccatgaccatgagactccgttcttttaaactcccaaatctttcaaccaatcccattattcacttaagtatatagtagcttccataagagtcttagttctaactataaatacacatatctcactctctctgatctccgcttctcttcgccaacaaatgtcgaccgctcctctctccggcttctttctcacttcactttctccttctcaatcttctctccagaaactctctcttcgtacttcttccaccgtcgcttgcctcccacccgcctcttcttcttcctcatcttcctcctcctcgtcttcccgttccgttccaacgcttatccgtaacgagccagtttttgccgctcctgctcctatcattgccccttattgggtatacatttttacattcatcactgtttcttaacctacattatttcttacataacttacattgctgtttacgtataataggggtacattacatagatagcaaactaaagttacagaattttaaaatttgtaaagattttacgaaattattatatagattctgcaattgccattttagtgataggaacaaaaatcttctatagaaactagcttacgaaacttccacaaatcttggaaactgtcacatgtgtttcacatttcagtttttttttcccttggtatttccttatattatccttactattatcatccgtgtttgacttttggtctttagcgtggtactgaaagaattacccaaattaacaagaatcaaactaaagttgcttaattagtgaatcacaagcaagggaagagttcattttcaatccttattctatacagatcttcaaactacttgcttcgacatctagtgaagttaaaaacaaatcacctcgaaatattaaaagcgttgtctcattcctacccaagatccgacatttttgaaattttgagagttagaacgtacgtaggatccacgtgataaaagaaaagttgctagtagtagcttcaacaaaaacgattcatgaaactgagacgtgtgtgtatgcacatgtaccatatgagagcgtgtggagcatagtggtgattaagtcgccatctatatttattcattcaacctaccgatttggttcctactagcgaaaataaaatcataatataaaagactataaaattgtactttatcgtataatgaagttctgaacaggttgattgtagtttcaacatttaaaacacgtcatgactcgctctctacttaattacgttcacgacaataaaatatactagtactcattttcttctaattttatttggtcaaccaacttgcagagtgaagagatg

SEQ ID NO: 9074 - DNA, 3000 bp, Unknown; identical to SEQ ID NO: 9037
  misc_feature (1)..( 3000): cDNA_ID_1988791_gDNA_ID_1971974_Annot_ID_177549 3000 nt of promoter + ATG

SEQ ID NO: 9075 - DNA, 3000 bp, Unknown; identical to SEQ ID NO: 9036
  misc_feature (1)..( 3000): cDNA_ID_3044458_gDNA_ID_1971974_Annot_ID_177548 3000 nt of promoter + ATG

SEQ ID NO: 9076 - DNA, 3000 bp, Unknown; identical to SEQ ID NO: 9035
  misc_feature (1)..( 3000): cDNA_ID_1989378_gDNA_ID_1971974_Annot_ID_177546 3000 nt of promoter + ATG

SEQ ID NO: 9077 - DNA, 3000 bp, Unknown; identical to SEQ ID NO: 9065
  misc_feature (1)..( 3000): cDNA_ID_1989358_gDNA_ID_1971974_Annot_ID_58727 3000 nt of promoter + ATG

SEQ ID NO: 9078 - DNA, 3000 bp, Unknown
  misc_feature (1)..( 3000): cDNA_ID_2038130_gDNA_ID_1971978_Annot_ID_177607 3000 nt of promoter + ATG
atgagcacataatacgagacgagcaagatcattagatatgggtgacaaaaacaaaacaaaaatctagatctagcaacgccggcaagagctgaccccgtcggaacatgactcctcgaaggttgtgctagagagagaaatagctagggcgaacttttttaaaaaaaattgcgactttcaaatagcttttcaaacattttagattagatttctttcgaatgaatattgatttcttcatgattagttttaatgaaattttctgtttgggcttctacaaatttcttcttcgctattgtttgatttggatcacaaatatactttcaactattttagattagatgaatatatatttaatcacgattgaatactaatatcatgtgaaccaaaaacatcacgcttatcttcttccaccatgaaatagattgaatgcagaaggattaaaatcgataataaatttacatatatacatgaataaacaaacgagttttcttcctagaccatatagctacatttttaacgactaagaacagaatgcgatttaataaacaatgtagctaatgtgttacaacccgtagcaaattagctacatattgcgagacaaatttttctgtaacaaatttgttaccaaatgtgtttaaaattttgttgcaaagttccacaaaacaaaattcgtcgccgattttgtaaaaatagttgaatagaatatcaattaacgttttacgactattatcaactagtcaatttgtagctattagcgacgattgatgacaataaaggatatcaacaaagttgattagtatcaaaattgttgttgtaatttttcacaaaaataggtttcgccacaagcttttgtgacaaaataagattattactattgtttaaactttgtaacaattgtgtcggtcgcaactagaaacgaagtggagactcacaatttctttcgtagcaattatgacaacttgtgactgaccctatctctgaccaaaggccactctttctgcggtagcaaattggtcaccaaaaccactactgttgtgacagtgtaattgtagcaagttgattacaaggccacatcttttgtggcagtcttattctagcaaattgataggtgtcttgtcgatcttccaccaagttgttgcttaatttttggcttccttctttgccttccacctaagctgcgcaggaaaagcccaaagccaatcccaaagccaatcccagggacagtgaagcttcagagggtctttctgtccaggtgctggtagtccgcatcttcacagacatgtctatttcaccgagcctctctccgagacagtgcccagatcgttacgctgcctcattctttctttgttatatattcattcgaatctttggcttcgttttctctcttcttcatatctagcaaaaaataaaaaattctttcatattcattctaaaattttgcatttgagtaaaccatctctttttttcctttaattctattctattatcttcttctttgtaacaaaaaatgtcttcaagcaataatatataaatcgtaagaaagtggatatataatcgtattaatccacgcactagacgtgtatccgacgaatatgaagccgggttaagtcaattcatggaatttgcaaactatcgattatatgatgggggtcgaatatggtgtccatgtcgaaaatgtacaaatagagaacttatttctatagctaccgtatctaaacattcgtataatagagggtttcaacccaacttttatgtttggacagctcacaatgaggagtttgagcattgacactatgggttctgaaattcacactagagatttgtaatagagattacgagaaaggagcgctagttcttcacagaaaccttgagagttatattgctaagaacgaatggactttttgtattgataatgacaaagattttacaatgtgaaaggagattacaagtgtaagagtatgtgtgtgaatataaacagaattgaatgaatcttccaagtcgtccttgttcccttatataggtctacgcacgtggtacctccgtccgggatctgcggagatcgtcctggatattcggcaggtcagttccgagatatcaggtccgctccgtgaatatctcctcatcagttcctaggttgttattcgcttatctcccttcatcaggtgactgggcttatctggcccaagtacccattcgcgtatgtgagctcattagctgcgtaggtcctctacttggtgggcttggtgggcttttgtgggttggcttggtatttttgcaggtggattcctggagggaaatccagctccaacatttgccccccagcccattgagtgagtaggcgaactcgatgagcggacatataggtcaggtaagattgcgaaaatattcttgatgagatgatagatgtgataagatcagtcggttttgaggataaactcaacaaaacgatttgatttcagattccttaaccgaaagatttcgaggagatacgcgagataagtcgttgctgatgtgaacgactgagatggagcgtctcttcagcgcaccgcatttgacggtctagatcaggcgcggagaagagatctctgcaatctcgaaaatcatggtgatgacggctttaaataacttcccatctctccacttgacgtcacaacaactcacacgactgtcaaggtaacttctctcctcctttattatttactgtgtttcgttttgtaaagatagaaaaatctcgtcttttttcttttgctatctccttcgtttctctactagtactcccctctttctcgatctgccctcttttgctcttttctttcatctctctcgtccttttctgtcgaaacccaacgatgagcgacttcgaagattcccagaataaaagcaaccacagtacaaagacgtgtcataaccctaggcgaaatgggtccaattcgtccgccatcaaccagagccgattagccgaagaagaaaaaggctgccaagcaaggaggaggcacgccgatg

SEQ ID NO: 9079 - DNA, 3000 bp, Unknown
  misc_feature (1)..( 3000): cDNA_ID_2038053_gDNA_ID_1971978_Annot_ID_177628 3000 nt of promoter + ATG
ttccgcttggttctctgagtaaaccgtctgcgggtctccggactcatatcgttctttgagaatttgctgggaagattttttttttcttcgtcttggtgtttcgtcttcgtcagaactattcattaagcatttttcacaatcacaaatatcgaagaatttgtgacctgtctcataagcgaacgagtagacgggatctccgagtgaataaaaaaattctattggaatgccgggtagatgctttgctaactccttttgttctttttggttgttatcaattggagagattgtattgatttccgtatagaaagctgcaggtcttggcttttcttcttgttgtttaaaagcaatttccatcgctccatcttttcttctatgaatagaggaatccattgattgaattagggtacttctatcatggagtttttcgtaatttgtcacccatgactctggaaatagtttgaccagttcatctctaggtatttgtcttaggatgtggacgcatgatggactgtgttgtgactccagttggacaagtagggcatcttctgtgtctcttggtagacttagatccataacatgattttggactcgatacgccacctcgtggtgaagtgttgttgcataagtatttccaatttgtggggcacccgtgatttgtatgttgatttgcatgttctgatatttctggggatcttctagtaccacaataaagtttggaaataatgtaaaaaatattgttccagcgtttaaggttgtttggattgttgcgatgcatgcatgttgatattctttgtatctggtgtcgagaagggcgacccttgccacaacacgtagacctttccgtccatgaagagttagtgctagtcgtattgctccatagtaaagatgggtgtaaccatggactctccattgatgcaacattccttcattgagtcggaggggaatcatttgttctgtcttaattgccggattaagatgttgttctagttgagaggctagaagaatttcttttgccgcatgtttcttaggaccgaatccatgccttatgaattttgggaaagtggagtttggttttgtgaaggctttgtagggcttgagtaaagggagttgggtaatagggactttgctctcacatattctacttcacatagataatttacgttactagcattggattttctgaaagaagaggatgatataaaagaagatgtactttccatagtgtatgtggaagtcagaaaccataacaaaatactttgcttcttatctctcttgaagtaataacaaaccttgaattgtttttcttattataaataagtgctaagattaagaaattaatcaagaggtacttagctacgcaaactaaggcaaaacacttatcaaccttaaaagtctcaaggtacttcgagctctaagacctcattgatttctttttttatgttctctttttcttgctaaaacggatttctgatgtagaggatccattaatatggcaaccatagagcatactttccataatagcatatggtagaaaacagttataagatgtatcacgacttgagaagttaagagccaaagtttagactgccatagctctgataccaaaattacaaacacatagtaggtacaatcatgaaggaggttttataagatcgagatatataaactagtatatgaaagggatgaagtgtttatggaagagattagagtgggataagtatttttacaagagaaagcttttattatacaagaacactctcaagagaatacaaaggactcttaggattttagacactcacgcttgtgttcaactctcttcaccaagcttggtatctatagtaaatggcttaaggaatattacaaagcatattcctttcacacatatttacacacatactacacactatacatcaagtcttcacaccacatattttacatcatatcttcacaccacacatttcacatcaatgttttatttcacatcaatacttcatttcatactttcacttcatgtctttatttatattacatcaattcttcatttcacttcatactttatttaaattacaaacaaatagtaggtacaaccacgtaggatgttttataggatcgagatatataaactactatatgaaagggattaagtgtttatgaaagagtctagagtgagataagtatttttataagagagagcttttattatacaagaacactctcaagagaatacaatggaatcttaggattttagacactcaaacttgtgttcaactctcttcacctagcttactatttatagtaaatagcttaaggaatattacaaagcaattcttttcacacatacttacacacataccacacactttacatcaagtcttcacaccatatattttacatcatatcttcacaccacacatttcacatcaatgctatatttcacatcaatacttcatttcatactttcacttcatctctgttatgattatgatccaattccggtttaatgttggtctagtgatattcggtttagcagcagattggagttggttattgaagcggttagctttggtttacagaagaaggaagtttgattggaagactctcattcagaaagaggcttcgagactcgaagtcaaacacatataaatagaagtctgttatcttcttcttcttcattccgttagaaaagtgttgacgatctctcttaaacccagaaaattagggttcttagttgatcttgtattgagctcagagaagcttgtaaacatctcatatagtggattgccggatctatctggccccagacgtagatctaatcacaccgattagattgaactaggtaacaaattcttgtgtgttgttctctgtttcttctttgattcacacaaacaaacttcaattgagagtttgagagcaaacagagtgaggctcgtgttcgtattgggatctgttttacaacaagtggtatcagagcgaggcttactcgtttcttgattctgatcg

SEQ ID NO: 9080 - DNA, 3000 bp, Unknown
  misc_feature (1)..( 3000): cDNA_ID_3051510_gDNA_ID_1971978_Annot_ID_177620 3000 nt of promoter + ATG
ataagaggaggccacaaaacacttgaacacaaaaaaggaagtgggagagaaaagagagggacgaggcaccaaaaacaaaaccgttgttgctcagatccgttgagagaagaagaacagtctctagtgctccaaacaaaataagacacctgactagagacaagacgaagatccacatcatgaggcataagcgagaacatcgactatatttttaccatctactttaagggttgttgatttcagttttttagaaccaagcttttttacaacccaatctacctcgtcaaaatcagcacgtttcacaatcgtaaaaaacaaagataataaaacaagagaagggaccggcgctataagaaccgttacacgccggtcagatctagtcaaggcaataggttggaaaaaaacggcgattaaatttttttttaaaaaggtttaaaaataaaataaaaatctataatccataaattattttgaactactttgatatatataatacaatctggccaacatctattcattaatatgcgagagttttttgtgattattagatatgcgagagttataaagtagaaataggtgtttaaagagtgctgaattgccatttgtggcaataaacaattttcgcttttatgttacgcaaatattgtcaaagtttgattataattaatgttgagattggaggattaatgacgttatgacaacaagtcaacaactacgagctaaataatcaagttaggcgatcaattgaggtaaaatatctcacaagtttgacgactcattttttaatgactttattaaaaaggagaataatagtttggaaaatgacaaaccaccaaaaatgataaaacaatgtaaagaataaacaaacgaccgcttttagaaacgtcgtaaatataatttcttcatatcactcgtccctaattccctatattaactatactatatatattgtattgattatcttatttgtaaagttaggtatataaaaatcatatatattgaaactgctatatgcaagtagtcttatttaagaaattgtgctatgaaatagaaattgttgtatggatagtaatagtcttcgcaacaaatttagttttcattgtttgacactttaacatgaaaggttagcataaaaaaaaataaagtggaaacttgaaatcaactaaattttcatgttcctttttaaagtataaaacttaaacataatataaatagtaccatatgatttaaacttaaactgtcttttttacttttttttctttcacagatttaatcttcatctcacatctcaaaagataaatttttattctgcagtaaaaaattcattagcaaactctctttaattaaatatcaaaatatgttttttaatgtaaaaatattaattaatatcttaaactttgtctttttagtgaaatatcttatatattataacagaagaagtatatatatatatatatatataaaaaaaataaagatgtatattggttacccaaaattagaagttcacaagaaaatcaatattcaatatttactcaatgaaattttcaacaaaaaaaagtcttaaataaagaaagatttacccactgaatctgctgaacccgtggctccgtcggttttgattagtcaccgccattctttccgaagaaaaacaataataacagtaatactaatatataggtggctgtaatgttgcatcttgatcaaaaagagaaataattttgtagttattttaaggaaaaagatgaacgtgatcattttccatcattcagtttttttttttttttcattttccaacattcatacataggtattttaaacttttagatgattcaaggaactattttaggttataataatgtatacaaaaaattagattactcaataattaatatctcatcaatattgctgaaaatcacatctgttaattttatcaaaaaaaaatattactaaaaaacagtttaataagaaaatattactgaaaataacgtttaataagaaaataaatattgtatgattattagattttttctgataatatgtttaattgatttatcaaatctcaagaataaaaggaacgttgttcctatgtttaactgaaggatataagaacattgataaacttctaaactagaaccaggggtaaaaggattatcaaatctcaataataaaaggaacgttcttcctatgttaacacattgataattctttaatttactggtaaaaaatatacggtttacaaaatatatatatatatatatatatatatatatatatatatatatatatatacggttttaatagttaccgatcacaaaaactattaaaattaatagtatgaaaatattatcaccacgatttttgtattactaattttattgctcttaattattttgtcatcttttatcgttatttttccattaaaaataaatacggctttgtgtcacgaataagaaaacatattttttagtaaaacaaattcgactaaaataaaaaggaaaatgttttgatcacatttttatattgtattacaggaaataaccaatgatagataataatatattattcaattgtcatcatttcttagttgacaaaaaaaaatctatacatgtttccgagacgttaaaagtatttacaaaactactccaacaattcacatttgttttataacaaatagggacaaaaatgatcattttaagcttattgaataactatgatcgtttatttttgtcaaacaaatggatggtttatttaattaagtcaagtcataagaaaaaattaatagtaagtgtgtaagaaaaaaattaaaaagtcacaaatggtcccatacgtgtgattcggcacgatacttcctaaaagcataccactaggctctctcctatataacttcatctccaccaacgatgcattttcgtcctcagatctcatctcactcacaagagagagatagagagagaaaaaggctctgctttctacattatttacgattatacactttccaacatg

SEQ ID NO: 9081 - DNA, 3000 bp, Unknown
  misc_feature (1)..( 3000): cDNA_ID_3044505_gDNA_ID_1971978_Annot_ID_177615 3000 nt of promoter + ATG
gaagcctattctgtaagggaccatctttgtctcacgaccttttaccttagccaaatgagttcattgatgatgcattgcttgattcacgttccagaagtaatgaatgttaaagggattggtagatttgaaaacttgtgtaggtcgagcatatgagtcggattgattgatgatgaggcatggctaacgtttttaagtagaattcgatcttgcagcttagaactttcaacttggacattgatttcatctggtttatctggtgctttggctctgagtccctgctttcaaacctcacctccagcttgttcttgattgtttgcttgagggcaagcaaagactaagtttgggggagttgataagtgtgtattttgcatgttttgagcatccatttgtcatcactttagcatcatatcatcactgtttaataccatttctcatcatttgtcatcactttacatgtttaggatagatttgcatgcatgttgcatatttgcgttgatttcaggtgatttggagctgttaacgagctatctggaagaagcgggcctgatcatgtcaaaccactcgaccccgaggtcgagtaggagcttcaagatctcaacagatgactcgaccccctggtcgagtagaggacatcattacttcaccacatcactcgaccccgaggtcgagtgtcttcatcccatcacctgaccatcactcgatcacatcactcgaccccgaggtcgagtgtcttcaccttcattgccagaccactactcgacctcatcactctacctggaagtcgagtatcaccatcaccaccactcgactgcatactcgatgacaagcttcagagccttcttcattccgcactcaaccagacactcgagcacaaggaagaaaagaagactccagctattcttaattcgtcccaatactgcgtcgttttaagtattagggtttcggaatatttggctataagtagcatgtacttcacattttcgcaaacaagttttatatctagttttattccgcagacactgtgttctagacctttgtaatctggatttctctttatctattcagtattcagcattcgttcttgatttcttttactgttgttcattctgttatcatcctgctgttacactgttgttatcatgtttttaatttgttcaacgtttatgctttctgttatgatgtctgagtagtgaataggtttctgaggatgggttagagtagtgtagaattctcagtatgctaggtgattgagtattgattgatagatcccttctggattagttgttcttaatgtctattgctttctgatcaactggaatttgagcctagacatttccgcgcccaaaaggtgttcgatgaaatgtctgaaccactaattccagagattcgtgactctataccaaggtattggttgcagagagcgttttggctttaacttgttgattcgtaatgcctgttaggctagctctcgtcaatggtgattgagtctgggactaggttaacttgagagtctctgttgcggtggcacttagatttggttaatgaacttgttgtctagggttaatttattgagcatgtcaattacctgtaaactgaggaaacgaagctactcaattaccccattctcgggaattctttatctgattactgcatcttgtcatctgttgtttaatttctgcaattctttcttgttactcgacctcatactcgaccacccagttgtctggcaacagattgtgcagtcgagtatctgtgttgtaattcctgtctgtaactcgacctgtcactcgacctcacccagtgctctgcaaagagctatgttggtcgagtattttattgcttgaatttctattttctgcatgttcacttaggactgctagaacacaccaaaacctgttattgtttggcttgacttagtgacttctgatcacatcttgattattagcatcacacccatttggattgataacctaaaatactacaacgacgtgagtggtgttttaggataattgattaaaaacctattatcagtaatcttgaatgtgataaatgcatgcaggtgattgaaaatctttaataggagctgccattgtgtgttgattgggtatcaagtactttttctaagtgatccaaatccttctctttttcgcagttccaactctttggaaagattgtaggaaaaatctatttgctctatatgttaagtcttgttgtgagtaattgttctctctgcggttttaggttaacttgctttaaatccaaataattgttctgtgttcgtgttaccttgagatgtatgatatgtttcagtttgtatttgcagtacttttattcctctgttgttttgattctctagggttcattgttgctctctgcctctcttgttcttccacaatagccaagatcaactctttggttcaatcgatcgctttgtctaaggtactatcatcattcatcaaagctatgttagtactcaattggtattttttatatattgaaaacagagcttgatcaattgctgaaaatagagcttgaaacttcctttgctttatttgattcaaatcttaagctctctgaattgggactgtatatatgtgtttggttgtgattatttgtgaattggaattttcagggacttagttctagttattcttgggaaaacctgttaaagtaaaaaaaattgcaccaagtctcattagtcattagacgtgaatctacttcagttttttctttatcttgtatacctcctaacagaaaatgatagatgatttcatacaaaaacttagtttaccaattcgttattgaacagtttcgtggtcatgctctcttttcacttgtcgccgttgtttcactttcaggcaagtcagagattcggtgagaaaaaggtaagctttttaaataatctttgcccatttctaataaacccttcttgttaaagattgggaattttattgcttgattaaattttgaaactttttcgtgttttgttttgatttagcc

SEQ ID NO: 9082 - DNA, 3000 bp, Unknown
  misc_feature (1)..( 3000): cDNA_ID_2180117_gDNA_ID_1971979_Annot_ID_177645 3000 nt of promoter + ATG
tacaaccacaatgttcgaaaccttaatcacgaaataaaatttcagagagacagagattggaactaatcattgttggatcgatgaaactctaaaaatccacaaagtctcaaaataaaagtgtctgctcaaaagacaaacaacttaacttaaacaccaaataaataggtagcgcagcctataactctaaaactttttttatgatattgtgatatttatttgaccgttagaaaaatatgaatggaaaagccattcaaattggtctaactatattaatggggtgatttattgtttcattcatttttatatagttatgaaaattgtattaatgggctaagttattatctattatgtgtgttcttttgacattgctaacacacaaaaaaaataaaacgttttgaaaacaatataaacatttgtaacatggctttccgtttcttacatttattcagtataactaatggactattaatgtaacattatatagcataatatttgtacgtttatttagtatacatggacaaaaaaaaaatatcagttggataaaatgtagtgttaacaatgattttaaatatttataagctatatataatggaagaaaacttattcagtttatttcaattgaaatggcattacataataatgtaataatcatgttgtgtgaattatttattttaaagtgaagagaaaaaataagattatattggagaatatgccaaatgtaataaacataaaaggaaaaattgaacaccaaacaattattccaataagattattggaataaaatataactctttagttccatatgcaattttccatttttctatataatataccatttggattaaatatgtaagcaagatttataaaattgtattgttgtccccattattagtgtgggtctaaatgtattcaacttaatgtatttctaatttgtaaccactagaatgttcaaaccaaaaaacattactatggtttttacttttttatttacaatagtcaactggtcttcttaaccttaatcattattcattaattacattgatggatttttcttttttaaaaaatacagatattattggaaatgtaaaataataaaaatacagatttgatttaatcatctattatattacattttacaaagttaaaagggtaaatgtaataaaatatagatattgttagaaggggaatagggcattcctcaaacaaccgcatttatatatatatatatatatatatatatatattataataaatcttatggaaaaacgaattcaaaaagcttagtgtaaatgataaattatatggaaaaacaaattctaagattttttatagtactatatatatttttgtatttaaacttcttatgtatttaattggttaaatgttgagatattagtgtatatattaaatgtcatactaataaagttttgtagagaataaatatttaattattgtatatgccacatgtcgtaaaaagagattgccaaatgtcatgataatagagctccattatataataaatcttatgaaaaaactaattcaaaaagcttagtgtaaatgataaattatatggaaaaacaaattctaagattttttatagtactatatatatttttgtatttaaacttcttatgtatttaattggttaaatgttgagatattagtgtatatattaaatgtcatactaataaagttttgtagaagataaatatttaattattgtatatgccacatgtcgtaaaaagatattgccaaatatcatgataatagagctctttacaaaaaaaacttgtcttataatataagattcacactaacttaccagagaattaaatggtatatttattcgttaaaagaaacaattttcacgatacaaatatggatttaaaacaatctttggacctccacatatagatctatacaaagcgtatatgcatatttaagaagcgtagatgggcgatacaaggctcatgcattcattttggataagcatgtcccatttagttaatgaattaatagttaactataaatttagctacatgtcgatacgctttcatagagttatatatcgatttatagagtactacatttagtaatagatatctacgcaactaggttagtggtttagattttgtaatttccgcccatacgtttttgttacttttttcaaattaaaaccggtcgcatttaactgtcactagtttttgtttgttgcttcgtaaaggtcaattcaaccgggagaaattaaatctaatttgaacaaaaatactcttattttatatattaagtatttttgaaaaagtttaattttgataacatgtagatctagaagaatatagttgatttaaatttgaattaaaatacccctatttttgtatatattaaggtgatattttgaaagatacaattttttctaaaattttttagaaaacgatttctagtgatatacttattttagaatttctattctaattttttgtacatattctacgatatttagactattttcgctctaacaatcttagaaaataggaaattcaatatctaaaaattttagaacatgtcttctaagatttcctgcatgttctaaattatgtgcgaaattgttttctacgaatttctatagtttctgaaaacagtagaaaacgttttctctcttttagaattaatatttaaaacatatttaaaattttgtttctaaattacttagaattcctaaatatagaaagcgaatctttgaaaaaagaaattaaatatttattaaatattacgttttaatgatatattttctgttaagattacgatttttactgggtttagaaaacaaattctaattatttttagaatacagaaagaaaaaaacaccaaaaaaatttgtaaacaaacgatttgtgccctagtcaatttgtgccctattattgatcttttcttcttcacgttcttctttttccatctcgtgttctgtttttcattatacatatctatgtgaggagtggcatg

SEQ ID NO: 9083 - DNA, 3000 bp, Unknown
  misc_feature (1)..( 3000): cDNA_ID_2180137_gDNA_ID_1971979_Annot_ID_177650 3000 nt of promoter + ATG
atcactaatcaggctttttcaatttgggcttgtttgtttactttatgcctaaactcatatcttgtttagtaacaagtttaactctgcaaccaaacagcatctttaaggtcttatctcacatataaaccaaccccacacacgaagaactcaggattggctaacaatggcgaagaagaaggaactgttatcaaaagcaccgtggagaggcgacgacgaagatgattccgataagtttagcaacgcaaagcttaaagtcacaaaggattctgatggtatgtcgaagatgcacgtccctagccgcggaaccaaaaaaggaagtctcgctgatgatgatgatgattcacttgagattgatcctcagcttcgttacagcttcaatcgcaactatcaggtctacccttctctcattactgtaattctaggtttcatatagtgaatttgctcctctctgctctgttcttaggaaattgtgaaattactagtaaattgtggcaatctttcttctgtcatttgttcacacatctttagattattgggtattggagaaatgtgaaaaagattttatcttttatgtttctgcaccactttggtactgttctgtgtcttaagatattgaaagcttatgtgaagcttgagaagaagtaattttagctgcaaagaatggatttttagctctctctgttacataaagctttgatttttaacacattgtatccagttttagttttgaatgaattggaaaattctgcaatggttgatacacttgcttggtgtctatacatcattcaaattcgaaatcttgagccttttgcacattggatagaatctcagatagcagattcacatttgttaaagaactataccgtaactgtaaaactggtttaaagggatctttgtattttcacatgtattggtttcgttattgggtggtatactttcctgtaaacactctgtgtagttcgatgtagacctacttccccttcgactatagtatatttattagttctggaaatcgtatgaatagttggttagtcagttatgtaaattcctctactattgttcatggtcacattggccatagactacttagtgatttagtatcttggttaaggaggtactttatagcctctgctttgttatatagtcatgttgttataatccttgggtatggaacaacttgaatcatgacacattgcatgcatctcgaaccgtctttacacagaaacatgttttatgcattcacaaagtgttcacatacaagcgatttttgaataccattgatttcctttcgatagattgtaacatgtgtttatatttttatattgttaaaacgcttttcctaagctgtaaagtctgcttctctattacagttcctgcaaagtgtattcactatagacactttggtgaagcctcttcctccttcaatggcattcaatgtctctcgcaacttgagcttcttcacccgcattttcactcaattctttggtgagcattatttttcgaataccttgttaatgcaacggattatatagtcaaatgttttcttgtcgtacggtaaaagttgtgatgacatcctcagtgttttaaaaccttatactcctcaatgacccttgatttattgtcttggtatgcggttttaacggttgatatggttaatgcagatcctgaaggcattgcaaatgcacagaagtctctagggttggggcaggaagagaaagctcgccgtgttcgttgaaatatgaccatatttcaatcttgtgaatggacccagcactgttagattgattaaaatatgtcctcaaagagatgttttgtatgaattttcctaagtacaatgaaatttccaagttccattttagcactaggcttccctgtttccatcaacataaactacttactttgattcaaacccaaacttggttccatatgtgatgcctcacctgtttaaagatacatctgttaactctggatgagagttcacgctcttacaccaaaccaacctttaaatcttagttgccattctctttaacctcttctaggtatgaaaaagtaatgtggtatttagaacttattagttggagaacaatttttctgttcttgtaagtatgtaatattgtgattttacacgacaatttttaaagctaaaaactaagagccaagaaaaatactatgttttcttcagaaaataaaataaaaaatgctatgtctttgtctaggataatgatcttgggatggaactaaagaaattttgtgaaatgctagttcagtttttatagttgtacaaagaagtagagtaattggtgattagttatatgtttcttaacttctactcatatctatgttttactactatacatatgagttcggagtatgctatatctactcgataactaggcttatgcgaggacttcacatcaccaaaaaattgggtccttcttagtggcaaacatctagtttacatttaattgcttcatatcaccaagaaagcagtaaaaaaaaatgctcgatcataatcttccacaattgcagatatgaataaaaatactatttttccagtgtgggaaagttttggaattctaaaacttgaaactttacaattaataacaattacatacgtatcttagtttttgcctagaatagtttttactgtcctcgagtactgttccaactgttacaaaaatagcctttgtgacttgtgacacaaacaactggaaagcaacacattagactctgagaccctcacgagactgcatgcatgagacacttgtgaatatagccgcagctaaaaagaagtttggtaagagagagaaagatagagaattaaaatagaaaaaccaactgtcacaaaattatcaacacatgaaaccaattataacataccgaaccaaaccaaccaactacatttcctcattatataactatgaactccactcaaatcaattttcaatctcattcttcttaaaaaccattacaattatttcactaaattataacttaatg

SEQ ID NO: 9084 - DNA, 3000 bp, Unknown
  misc_feature (1)..( 3000): cDNA_ID_2180154_gDNA_ID_1971979_Annot_ID_177657 3000 nt of promoter + ATG
cacatgtttgtaaatatcaaagtgtcaaaattttacagaatctgtcgaagccttactctaagttaaactcgataagttatggttgttgcttcaaggccaagtacgtaactccataatccgtcatgattctatgcgaagtagtttgctagtttgctaatttcacttttatgttttaggaacgtaaatcaaagcaagatgattatcaaagaaagatttgatgcataatataattacttgtgcgagcacaaagtgttccactatggattaataagtttgataacggagtcatgtggagccattccagctctaccttcaagacagtacgacgaagcgaatgtggtggagatgattttagagacattgctagggtttttcttaattcgaaggtcgtcgatgttgctaatgtaaccttagcatgatccaacatgactagtactactcaaagttcaagatttcttaagaaagttttatattattttatttttttttttgttattttaaaagttaaataacataattgttagataaggttttttaaatatttttcaactatgttagatgtggagtttttatgttaattaatttggttgttaaatatatatccggacgtaccccggacttaatccctagtagtaatagaaaagcaataaaagtataacatagattatacgagtaaccgagattcatatcaatcccaagctcttcacgcaggtccggcttagtacatgtgctagagcacatagttctaaggtccaaaatatttttaatttttttttttcatacaaaaatcccaactattttttacaaaataaccactaattcaagaattataccttaaaaatccctaattttattataaaaaaaaacaatatgaaaagatccaaacttttaaaataatatttctataacgaaaaaccacaattatttgaaaacaaattggtatttattttttaaatataacaatataccaaaaaaatttttgtctaaaatgtccttagctattatggatcgggtcttccaccgggtctcgccaatatttgagtcgggtctgtctccactcatgagaccatctagcatttccttgatgtgggcaattgatgcaccaagctcattcatgatatcatgaacaccagttaacaagggtatttgatatatccttgcattaacatactcatacaatttattatttaaataatttattagattgaaaaagaaacaaatttaattaattacttatatcagtaggtgagggtgtcccccgtaaagctcacaatgaatctcgtagagttacatcatatattcgtcagggtccaagtgtgtcacgatcatcttacttgagagtatcgaagttggtctcattacggaccaaccatggcaaaatacaacgacctaaaattttcaaaaaaaaaatatctaatatatcttaagaaatcaagaactactcgcaatttccaaaaactacctttatatactcgaactcattctaaaaatgttgtcactcttttttattaaaataatatatacatatatatatatatatatatatatatacttcatatgagtttttttaatccaaaatgtacataatactacccaaccttatactctaaattagcaagtctaatatattgtataaagcaattatatttaattttaatacatatttttaaatcaaagttacataatatacgtgtatatattcttcttacacgatattttatagaactcagtcactcaaaggaactaaatttaaatgagatgaaaataaaatagaaaccatcaaattaaagctaaccataactcatgatattttggtgaatgatttgattcagtttctagtaagataaacaagagaaatgcaagcacttagaagaagatgagctttctctcatttcattcaaacgttttttgcacatttaatgctccgaaagtaacatattgtcagtcattagtttttatttttgtacaagtttatcatacttcttgttttatttgctccacacaattttccttttatgtttttcgtagacgtcacaatgaattagaaaaaaataatcttaaattattcaaatgaatatatatatatatatagtatatactaaaaaatagttaaagatatagtatacctctttcaaaacaaagcacaaagtaacatatacttattatacatcaatttgataaaatacctagtggacatgactaatcactaataccataaaaaagaacaaaatctggataatggatccaaatgatccatctaaatgtatccattgtatgttgtttgtttttgaatttggcaatccatctagttgaagcatttgaataaagctttgttagtttgagtaaatttgcatatgcatcacgatttatgttgtattaaaatgacttagaaaaaaaaaatatcttcatcttcttcttaatcatagtttaatgatttaaaattacatttacaactaaataaattttaatactttttttgttacacctataaccttttataaaatagtaaaattagcatctcattttcagagcagtctaaaaccacctaaaactaaatcatagaatctgatattattgtactgatgtttctcttctacttaatttcaaaaccatatacagtacctgggctgtttaaccgaaccaaaccgagattttcggatttggttcatgatcggttagtagtctaaaaccgatcggaaataattatgggcttagcccactaacattggtgggattattaatctgtaaccaatcaaaatccaagaatttcgctataaataaaaagcatattcctttttttaattttttttttcctatcgttgtcttcttttgctttcttattttgtcttctcacaatctgttcctatcaatcacacagataataatcctcagcttctctctcgctggatttcaacattcttccactcatcgcttctctttaccaaatcaaactcaacacttcactcaactcttatcggaccttccaaactatatccttca

SEQ ID NO: 9085 - DNA, 3000 bp, Unknown
  misc_feature (1)..( 3000): cDNA_ID_2180145_gDNA_ID_1971979_Annot_ID_177654 3000 nt of promoter + ATG
aagatctgtagtcagtttccatctatgaacagtgagaaaccaagtagatttacatgatctttagtgatttgaaagacattttatgacacaagaaattgggatatgaaagacattttttgctatgggatgatgatctttagtctatttcatatgtggacaatgaagtaacaagtagattaagagaaactaaagtgacatttagaacacccgaaattggattgaagttatctcaaagttaattaacttctccatctttctttgactacctttctatgagtctgttttgttaatacactaaacacatattacaccacagctttctttgactacctttctataagtctgttttgttaatacactaaacacatattacaccaattactttatctcaatacacttaatccaaactttattttcaaacaaaattataagtgaacccctcatgtttctaccattgaacacgtttcttaacaactcttcaaaagtttctcaatattgaaatatcaaaaaatttaaagtaaaaaattggtgagagcccatggactatcaatggatatgttaaaatctcatcaaaacaaacatcgaacatacgttaacattgaatttctgataaaattatcgatgttctccaaatatcttagtgatagtagacactttagatttcaagtacccgttaaaaggatagagtaacgtactcaatagaaaactaattaattagtactatatttggataattttttgtccatccagccatatcccttacgtggaatcaatgctcacaactgtttcgttagaagataacaccgacattgactaatgatgttggatttagtgtacgagctatggaagtggaaagcagcacgaagttcgcagaaccttgttctttattattattgtgaatccaagatccgaccttgtacgtcgacccttttttcttactttatactagtaataatgtttttgatgcataaatcatcacaacaagacaaacctttctcagattttgtgaactgcaagagacaacctttgttcgctatatgggagaccatagcagagatatactcacatatttatatattatcttttgttttttctttcccattatcgatgccagagataaatgagcagataaagtcatatttctacacggtccgcatcaatagtccaaatcacacatttccataatccattatcttttcatagaattttcttcaactctttatgtcaaaacaataataaatattatagagttgaaagaaagtatctaaatacattgcttatttttctaataatccatatttctatcaataaaatactatcgtatcaagtaataaataaatacaaaaacttagaatctatattatttataaaggatagtaataccttgcttacatatcattaggaaatgcattaacttaaaaacgatcgtaaaaaaaggtaatacaaaaatatgtaaactataactcaccaagcaaaaaaaaaaatatttgggtttatctttaggggtgaacctttatattctcctccttaagagaaggcgaatgaaaaaggttcatccctaaagatcaaaatggactatccaacacttctgcgtaataattctacaagaggtaatattattaccggaatagcatcaaatacatatgttacaatttttactgcccaataaggcaataacctatttgatcctaatgtaaagaataacttgttacaccaaaagatgcggtcaatacacccaaaaccacatcagtaaccgaaattaattcgtgaggtttactaaaatcttactaaaatcttatttaaagtttttagtaagatttttccaagagcattttatgaatgagtatgaaacgatatattgcatacggcataatacccaacattgcatgagtatgatgcaatttaaaagtacatctcttcatatcaaacttggactgacgactaatgaatgatggatgactctctttgtcttaacttaactcataaacagttaaacttactaataattaactttattacttgaaaagtaccaaacatgccattttcattttgttttcgtttttttgtttatcacaatttctcgctttataacataaattcggaaccacaaccaactgtattaagttttttttttgtttttatcggtttctgtttggttacatttctactcttaccagtaggacattatatgtaatctctcattaaatgttatttttatcgtattatcattttactatttcttaggaaaactctccttgggatatgaggctaccctcaacaggaaatgatttcagttaagatcataatagcttgaatcgtcaaccaacaaaaagttgattgtggcaagggaaaaatcaaaaggttccgtaatataggatggtgatttatgaaataatgagtagtttttaaaaaaaaaagactctagtggtgagtggtttaaaatagattgagatggtggacaaaaagtatggctgatttttgtaatggttagttttagagtctttctttattcattggttaacaaattatattgcatcttgcaaaaaccacgaggggttctatataccaaaatgacaagtgggttgctttatatgattacacaccgtccaccaaatgcaaattaaaaaaattatttgttctatataaattcagtatttccaaagacaacggtgtctaaatctcagcttcgtttcccatcttttaatcaccatctctatcttctttctccagcatcatcagagaggaaagtttccttcaacattcatcagaggttagatctttcttcaacactactaacttccgtcagacttgctttatatatattatataaatcaccttagaaacgttatataagcatattgttttaacattgttgtcatcctacaacaaaagaaaaaaaatatatctaaaggataaggtaatggttttaatggtatgacaatggaagttaaactatatacacttatttcagttcatagagaatcaaatcagtttgcgatg

SEQ ID NO: 9086 - DNA, 3000 bp, Unknown
  misc_feature (1)..( 3000): cDNA_ID_3044527_gDNA_ID_1971979_Annot_ID_177668 3000 nt of promoter + ATG
taagaaattcttaagtattacaacccttaccttcattctaacgagaacacaaagcaataacgaacacaataacaattagatgattcattttttggatctagaatatttcttaaagtacaatgaatccaaaagcttaatgttcataagccaacaaataaatttgaacaaaaatataaaccaaaaatgaacctatggcgggaggagcatttcctgtcgaaaactaaggttaatcagtaatataatgatcaatcctttctctctctcaaactaagattcaaaaagctccaatggagtaacctgaaagacaagaagcgcataagaaaattggttgaggaaatgaatcataagaagtaaatcgattagacagaccattatagagattctgcgactatctcttaaacaaaccaacgtcttaaatctctaaactcacacttaaacaatatgaaaacaacctctccaatactctgataacaaaccatgcctcaaaatcgtgttgcttgtattctacggaacaggcattatactattataagatcaaaatatattgaacaaaatctcgcagcttaatttaatacttaaaaaatcacaggtcaataagatatacaagagggattaccaatatcacgcttaccattccaatgacatgtggtcaagtcttaagatcgagattcacattgatatcagatctctttattttgttaattaaggtctatatcatggagtatctcttttaccgacagagagttgattaagcctgtcatgggaatataaaatgataattgtcatgctgtaattacggacaccactaactatgcaagaaaaaacacgtttgaaaatgaatagaaatgaaatcagacctcgagtcgacgacacttcagtcacttctctcattcaacaaaacaccatgaactcttgttccttccctctcttcctctttgttatctttctccggtgtttaagttccacgggagctgccacatgtcatcctgatgacaaagcgggtcttttagctttcaaatcgggtataacccaagatccttcgggtattctcagctcatggcagaaagatattgactgctgctcctggtacggtatcttttgcctccctacgattcatggcgaccgcgtcaccatgatggcattagacggaaatacggatgttggtgaaacctttctctccggcactatctcaccgttgctcgccaaactccatcacctcaacgagattcgcctcaccaatcttcgaaagatcactggatcttttccccacttcctcttcaaattaccaaagctaaggactgtttacttagagaataaccgtctctctggtccccttcctgccaacatcggtgcactaagtaatttggaaattttgagtgtggcgggaaaccggttcagcggttcgatcccaagttcgatgtctaagttaactagcttactccaactcaagctcaacggtaaccgcctttctggcatcttcccagacatattcaaatccatgcggcaacttcgatttcttgatctctccagcaacagattctctggaaaccttccttcatcgattgcatctcttgcaccgactctttctacccttgaggtgggccataacaagctatcggggactatcccggactatttatcgagattcgagcttctctccgcattaaatctctctaggaatgggtacacaggggtcgtgccgatgagttttgccaatctgaccaacattatctttcttgatctctcccacaatctgcttaccggtccattccctgtcttgaactcattaggcatcgaatatctacatctttcgtacaaccgatttcaccttgaaacaatccccgaatgggtgaccttgtcgaagttcatctactcattgaagcttgcaaaatgtgggatcaaaatgagcttagaccattggatgccagcagacacctctttctaccatcacattgatttttcggaaaacgagatctcagggagtccaataaggttttttaaccagatggattttatggtggagttccatgcaccggggaacaaactccagttcgacttggggaagctaaagtttggaatcttcttgaaaaccctggatttgtcaaggaacttggtatttgggaaggtaccggtgacggtgaccagactgcagacactaaacttgagtcaaaaccatctttgcggaaagcttccatcgacaaagttcccggctagtgcttttgtcgataacaagtgtctttgcggctttccactttctccttgtaaagcttagggacaagaaaagcacagttttgtatttggatttattatgacacgtagctccaaataaaatttgtgtgactataataaagtgatttaaagatcccaatgccaataagctccattacaactatagtgaatgttagtgaaagtatgatttcaacccttatgcactatttccatgcagtcgttatgttggtacaaaattgaggatctgaaggcatttgaaaggtcaccaaacagtctctctgagaaacatgaagcgaagaaattcatatttagtcaatagaaccactgagccggacaatgattacctcaacatgatacgaaatgattaaatttaatgagtagtagtagtattctaatacaaatgttccgatttatgtaacgttggcttgtattaatgatgcatatgttatgcttgagtgttcttataaatttggtcgaacacttgaaatgtaaacggatcagatcttgtatttaattgtgcatgggctaaattaaatacttctcttttaccttttttgccaatgaaaagttgaataatagtaaggtccgataggcccattaaaaagcccacaaaccctttaatcagctatattcccattccactgctcccaagtcgtcaccaccacttcccgtcctctctccagtcactgtttccgaagccctaaagttttcaaggtcgccgattaaatcaccaaaggaggcgtttttatactattcccggttcaacacatg

SEQ ID NO: 9087 - DNA, 3000 bp, Unknown
  misc_feature (1)..( 3000): cDNA_ID_2180167_gDNA_ID_1971979_Annot_ID_177660 3000 nt of promoter + ATG
ggtatgtgtgtgagtaattggtttaaatgttatataaatagttgagatatttttaaaaatcgaattgattatgtgctgattttttggtaagatttcaatatcattaaaaaacctataacgcaataaatcatgaggaaagatttacacataattcaaattaggaatatgcttgaatatcattagtctatactcgtaaatctgtttctatatttggatttttatttgatacgggggtgcaaaaatatcggagaatatataatcaaataattctagatatggttagttaggattgattttcgaattttgctaattaggaaataagcattcattaattcggtagagttttaggaattgatttgtgcaatttatgagggtagtacttaacaatttatatgtttaggcaagtaattagtgcaatatgttaattgttaagcaaaaatttggtgattgttctaaagaaaatatcttgtctgattgattttgtagagactaaacatacaatatcgaaattgaaaaatgatttttcgacacaaatcgtccccaaaaatgtatatgtagattatgtcatatttgtcattatttatatatgcgattcgcatatatgacaaattcatataattgttttctgacaatttcatggcatcatctaggattcgagatcctcaaattctaaccaacaatgatttagcatcgtttaaaaacaaccaaataagccacacatctagctttttcaacacacgaacatctttcctctttgtggagtcgaacctagggttcgtttgggaggcgccatgaaacgcaagaacgatgagaaaggcacaaccctaagtaaaacttagattcgctccctctggatctaaaggatggctatatttactatattacctatcaagtcttcttttcttctttggtatacccaattttgagatgctgtccttctgtgagctttagtttccattcagggtcttgcgcttatttccatggcattctcgttattgaagctgaaggtcggttgatgatgtataaccctagaaccgagcaattcattaagttacctagaaccgctacttttgttggttacgatccgattgatgatcagtacaaaggataatggggatgatcgtagtggtcatctaaagcacaaggtgttaacattaggaggtgttcaaggatggagacacattaaaaatacctatttaccttagagaaggatataaccgaatgtatgcatcaacggttttctctactatggtattttaatacaaccaaatgttagatctgagaaactaagttttatcaatgcacctgctgttgtcctgcaatgggggaaggacgaaatattcatagaaatatagaatagaaagggaacctagcttccattgtgagaaacccttatggagctgtctctagttgtaatttatggagtagaagacgtcaagaaacacatgaatggtcaaaacaaaaatgtgtgtttcccaaatctgtgtgggattcttatgagtctggtcgaatatcttttccaggtaccaacaaggctggtgagatcattatagctccacgtttgttgtcacgcaatgttggaccacataatctactacaatgttgaaacaaaaaacttaagaagagttagggtcctagggattggagacgataaaaaggcgctcttatgtatttggaagaagcttgattgttttgtgacttttgtccataccggccgcacatcaacacgccgagagtattaccgtttttaaggatcctataatttaacttgattccaaggatcctagtgtgcgaaagcatgtaaaactctgcggtatatttatttgtacttttattttcaatatgtaagtgacaaattttaccgctggattgcattgacaagacacaccgacttttattgacaagaataaagacaatgagtcgttctttaggatatttaataaattttagtcaccaaattaaatttcctacaagtgctactttgccaaatagattgatatattaactagtacaaaaacagttttcgtagaaatttggaagctaatttcctatgagaattgatgtaagaacatcgtaggaaattaagtttgttgtaaaaaactggtagaaaaaggaaaggaaaaagtctcgtaagaatttcactggaaatcgctgtttttctgtagtgtactaagactttgtcctctatattttgggtagccaaaaaggagttgtagagccgttcccatgcgcttatgaaacataggaacgatcttgcgaaggtcatcaccaacatcgtcgcaggcggtgccaccaggttcatcaccgaactcagcagaacaaccatttcttcttctagctcttcccgctactctgatctttcttttgaaaataaaatttcaccttctttttttcttgttgcatagataaaaaattcagagatatataggatgagataatcaaagcgttgaagaaagtaagagggttttagtagaaaaacgtaaaaatgatacatagtatctgtctttacgaaggaaaacaaaatgcgtttagttttgtcgtataaatgctccaaaccatgtttgcatgcatagtagtgttcagaaccacgtgtttgtgtttctctttgtttgaaattttttaattcaaacatcgagattctacttaaattgggagaatcaatcccattaattctacgtaattaatttcacatggttaatttttctgaaaaacaatttttctataagtaaattgttagctgcacactgggataaagcaatcaggagtaacgtgattgtgtagattccctataggtaaatgaaccttatcattttccctcgcatttttttcggatctcatgtgcacgacgatgccatttaattttttgaccacttttaaatccgtcaataaatgttacatgactgggattccaatgatgtgtatttaaagcgtgaccacaaggtacagatgagaaagctttaggaaaaaaaaaatcaaatacagaagagaaacaaaaaaatg

SEQ ID NO: 9088 - DNA, 3000 bp, Unknown
  misc_feature (1)..( 3000): cDNA_ID_1989400_gDNA_ID_1971984_Annot_ID_58728 3000 nt of promoter + ATG
tagcaaacaatctcactaattctccctgcataatcaaaagaacatcttttgagacaactgactcattaaagctatagatacccgagaaatcccggtattttacctgacgaccttgatcatccattggaatacactcaacagcaatcagtttatctacatcatccgcagttacaatatactctggatgggtggctcctgcatatgtttaaaccatagtccagtttttaaatagctgaaaaaagctggtaagacaaataaatcaaatcttaccctcgatgtattgtcttgtgccatcttcaagatgccgaacccacttttcaagaagaaacaacaaaccgggaattttttaaaatttttcatccactaagtttgttttcaaaaactcttactaccaaaagatttacaaagattatacctgaaacatacagagagtggttcctcgcactggaaacccacaaccaagaactttttctccaggtatagcatctccaataatctgaaatccatcgattccaggtccctctgtttaagattccaacgtcagattaagatttctaacgtatagccactaggctctaagaaaacgaacaaacacttctcaaccttcataaacatgagaagcaaactcttcattcccattataagcatcaaacatggaagaattctcagctttttcttctctttcttgaatcatttccttccccgccacactactaagaggatatccaaaattttccctacaagtgagcataatgaagcaggcattcatcaccgtgaaagaacttcatcggtaaaaactgaaatcaatgaaaagtttgggaggattgagaaacgataccgtaccttttcggctgcgggaaaattccttgagatccaccaccaatctgattattaaatctcaaactttcagtgtcttgcataatgttatgatacgggtttctcgtaacattttccattggtggcaagagttgttcattggtctgataatcattaccacgatcctgtatcaagggtagcatatgaaaacagaaagtaagatttcttctgaaaagatgtcacacattttgtaaaaggtcttaaagagcaaatgataattaatttagcaaattacttgctgagactaccgtggatccataagaagcttgagtttttgaatttctgggatcatggttgtctttactaataaaatctgttcccggttggttttccacaatagatgataactctctaatcctatcctgtgatttaaaaatttcgtcacaacatgttcgaaaggaatccatgaagagtattcacattccagcagaggtctaataaggccaaaggacatatgcagacaacagtaatccaaggaaatgtgtataaacactaaaattaagaatttctagcggttgttcgattgggaaactacaggatagagagcttacattgcaagctttagtcttccattgcaactgatcatgcaagtgctgcatacaaagaaatatggtatatatgttgagattgtttagagtataaatttgaagaaagatgaagtgaaaaacaaatacctttatgccgctggatatagcggtagcattagcaacacgaggccaaacaccatactcagctaataaaccaagtaaggacgtcatgaatatatacctctcgtcttctgtaacctaaagatagaaagtgagagaaataaagacggaaaggtaaaaggcaatcaaatatttgaggttactacataatttgaggcaagacaattcacctttaaatcatgtgccaacttcaaattttcttcaagatcaccttttctacgagccaactcattcaacgcagacgtaacagattcattttgtttctcatcaattgcctaaggaaataagaaactgttagtcaaacaaacccagaagccaaagatgaagactttcaattccatgaatcaatctttatagaaaagcaaaagacaaaccactcgaagatcagcacattttctctctagtccatacttctcattcagcagctgcatatcctgtaaccaaaagatgcaatttcactctcaagttgattagaaagattcatatgagcgagcatcatgttctcataatagtatataccttcaaacaagcagcagcaattcgttcctggagactatgaatctcctcttcttgtgatctcactttcgcataaagtgcctgaattttcaaaagctaatctaagtttgattcaagaactagaaatcataagattcttaaatcagcaccagtaccatttcttcaggatcttgtattaacttagtattagtatcttctagcttcctcgacgcaatagtatctttctcaatctcatgcctataagagagacagatcgaagaacaagccactaaatattcaacaacactgcttcaaaatcaaacgctttgtttgtgggtttaaggcaaaacagcgataccttttgattgattcagaactccgattatcatccatcgtgtttaagtcgtaaaacgaagctcgactttaaggtcatcggatttccaaagtctatgatttttgtttttttttgtttctctatttcatctatgagaaaactttaatcagcagtcaattttcatctccacgaaacaaagtgaatatttctataaagcccctaaacttaactattgttttcacgatagaccatcaactaccaaaattacaaaatagtcttccatctaactcaaacctcaatattgttgactttgatctaaaatacttataacaatcagattaatgacaaatcaaaattttcgacccaaaacataatttatactcctaatttgtaaattacaccaaaaaagtttaattataaaaaaaccagaatcaattagacaaatttcgttggtaaaccgtccggtacaagatttttagtcatccaaaaggtcgattcgccgatctagaagacgacgacgacgactaccaaacactccgatcaacggtcctccgattctctctcgctttcgtggcgacctcaaaaatg

SEQ ID NO: 9089 - DNA, 3000 bp, Unknown
  misc_feature (1)..( 3000): cDNA_ID_1989399_gDNA_ID_1971984_Annot_ID_58729 3000 nt of promoter + ATG
gaagagaaagaagtatcaagcaagtgatgaagctttatctctacctaccgtttccatatcagaggcggaaatctcacttaacaagcaaaacgcttggactggtgacgtgagaaaaatggtgaaaaggctaccactaggttgacgagagaaatcagcagagataagcggaggagtatgtgatggagacagaagtaacgcggctggttctcctttctccgctccacaaatattcttcacagttcaaggaaagaaatattcatatcttctcaatttactaaacataggtatcaaatgaattttaacataagaatgatggaatcaggtgtacttactttaaaaactgtgctgctatcactgtcaatgattatgaaaagaggtttccttgtaaatggaactaaatcagagggatatatgtagcttgatcctgagggaaagacagttcagagagacttcaggaaatagcaaattctagataaactataatgacaaaagtatatgttgccattagttgtttatgaatgtctggaaatttcggtgttgttttccttcagatgtgaaacatatttagttggattatttacagaggtccaattttaacaaagatttttctcttacaagtatcctccctctgccctctagaagataacaaggtttgatactacttagtggatcctatctctacatgcatatagccaaatatgatagtcttagatggatttttacataaaagtttcaagaactctagagtggatacctgtgagcccatgactgccaaaagacaaaccacatggggtactgactgcgtcctcactgatttgcctcaaagactgaccagatggcgtaatttgaagtgatggttctgtctcttgtttgattgtgtgagattcaaagtctctcaagatattctcctcaacactggttgcacttctagcactcaagggagatgatgaaatctgtccaatcttgcctgaataaaaatgtaaatgtttgaagcgaaggaactcaatattccaaagagaagaagcataataccagacttaaactacacacattaccagaagcagacagatataataaaagaatgccatgagaaggaagctcctcacaaatggtggccaaaacctaccaaataaaaacagggttaacagaatgaagttccatagagccaataattccagttagacaagtaaaaaaccaaaaatcgacttacagccaaaaaatgtgttatggatggacgataaaggacagctttgcgagggttaggtggcaaagtaggatcattcatgctctgggagttaatacgagcaactccaacgggagcattctgacccattttagcaccagttgattgatatagtgaaccactcggttcccactctaagcattgaagcatcctaaaagaatcgagcgtgagctccgaatacttgacctggtggaaatcatacagcaagttttcaaatttcagagggtaagatattaaatatgcgttcatactaaacatgaacaagtaaaaaattacctcgttacagtaataactgctcaagatagcatccgtcaaccttaaagacctacttgcacgcggagtaccagcatccagattaggatccaatacaagactgtatcttagaggtctaatgttcatgaatgcagtgtccgatttcagaaatctaactatttcctgcgccaccaccttccattccttaaaatcggtttcctgataacatgaaaagttgtttatgtaacaccgaaaaaaaaaaaatagatagagacgggatctcttgtaaggcaggcaacctaattgttatcattgttccactaaaacagttacacctaaagatggagagaatagggtatcagaagaaaacctggaatgtcctcttgcattcatcaatcaaccgtttaaactgatcaacgagttgatgcaccatctcacggcggccaagaaccaaacacaccataagaaaccttgcaagaaaccgaagctgcttgtttgcaatattgagatcctgaaacaatccatctttgaagtactccctagtgagtattgcttcgtagaatacataggactcggataagtaaccagcatcacttgttcgcatataatgtccatagtaaagctgggcaatgcgagaagcgatctctccaatctcccatctcttaagtccagcttcaacaagcttctgcctattctcttgctgaaacttccatagttgtgtgtatactttgaataccttgaagaaatagttctcatacctatgaacaattccatcaacaacaatcggaatcaatatctaccaactctctaatcaacaattctaggtacggttatctcaggggaatgggaagaggtacctggagcgttcatagaagggcaagtctctgatcttggagaatttcttatcggctttgttaacgagagaccagtaaacttcactcagcgggatattattattaccgctgatttgctgcgacatttttgaggtcgccacgaaagcgagagagaatcggaggaccgttgatcggagtgtttggtagtcgtcgtcgtcgtcttctagatcggcgaatcgaccttttggatgactaaaaatcttgtaccggacggtttaccaacgaaatttgtctaattgattctggtttttttataattaaacttttttggtgtaatttacaaattaggagtataaattatgttttgggtcgaaaattttgatttgtcattaatctgattgttataagtattttagatcaaagtcaacaatattgaggtttgagttagatggaagactattttgtaattttggtagttgatggtctatcgtgaaaacaatagttaagtttaggggctttatagaaatattcactttgtttcgtggagatgaaaattgactgctgattaaagttttctcatagatgaaatagagaaacaaaaaaaaacaaaaatcatagactttggaaatccgatgaccttaaagtcgagcttcgttttacgacttaaacacg

SEQ ID NO: 9090 - DNA, 3000 bp, Unknown
  misc_feature (1)..( 3000): cDNA_ID_1989396_gDNA_ID_1971984_Annot_ID_58733 3000 nt of promoter + ATG
agtttaaccggctcggtgttagggttccgactttcttcatctctccttggattgagcctggcacaggtgaacataattactagtcataggcattaatcaaatttagtggtcttatattttctaatcaagatattaatgtttaaatcaaagtaaatgacaattttggtaaaatgtgtagttattcatgggccaaatgggccgtacccaaggtcacaatatgagcattcgtcaattcccgcaacggtcaagacaattttcaaactcaaagatttcttgtcaaagagagattcatgggctggcacttttgaatctgttattacgagagactcaccaagacaagattgccctggtaattacatttttttctttcatcttctctatcaatttaggtaggataatatcgactaaaacttcagttttttttctttaaatagaaacattatcaactccgattaaactaagagggacaatggcaaaagaaaatgcacaattaagcgaatttcaagaagatctcgttataatggctgcgggattaaaaggagactacaaaaacgaagaattaatccacaagctatgtaaagaaacttgcgttgcagatgcatccaaatacgttacaaatgcgtttgagaagtttctggaagagtcaagaaaggcaagagatagaggatgtgatgagaacgacatcgtttattgcgttgatgatgatgatgatcatgttgtgataccaccacaatcacattcagaagcatcaaatgctgctgctcaaccaaaaacgcaaacgtcttttttcaataagttattctcttgctttattcgccatgattgaaagagactaagagaataaatgttataataataatttgtagtcacttctcttgtgtgtgggtggaatttatttaagacaaaaaaaaagaaaaccttactagtctcttgcatatttaatttcgttgtataagaacttccacaattatttgcacatttgatattcttgtataaaaattatatgttagatgagatctactctaactagttatttgtttttcattttttcttgtcaacagctatattaaattgactaaaatgaactaataatgagagatattatttacatatgtaattatatgcgattagattcaaatttttcataccatgactgaaataaacatttaaagatttcgtgtgttcctttccactatcgttcttaccccgactcatcatgtacaattattgaatttgaattttcaagcataactcccataagacttttgatcaattctaagtctctgattcattgtagcatcacaaccctgtcacgattcaggttgagaagaaagtgcagttgtcacccctcctagagtccatattacgttaagaaacttgtgttgcagatgcttcctattacattacaaatgcgtttgagaagtttctagaggagtctagaaagcaagtgaaagaggatatgataaggacgacatcgttttttgcgtgtatgatgatgatgatgatcatgtcatactagcacaatcacattcgaacaacttgtagtaatttgtctgtgtatgtggaaattatttttgtcgtagaagaacttacacgattatttgtatatttaatcgtctttttttgttgttgttgtaaaagttgtatatttaatcttcttgtgtataaaagcaattatatcttagatgagatctactttaattattcgattggtgagtagattataccaaaagactaaaaactaattaaagtcactaaaggcaaccaatctagctactgggtcccaaattttaattgtaatgattataagaaatactgtactaactaacaccgtatgtatgcaacattctgtcataataccacatattattagttacgctatttaaacattagttagtacacagtaatcaacgaatgtatggttagttttttccctgaggaaaaactctatttaaaacgactcatgcggagacgtgctatagactatggttttagcaataataattggtcaacacctaattcaatctactccattgttattttcatagatagagagattaataagtaataatattcaatgtatatcgccaataaccttattaattttcttataataatggactaatggtagaaccgtagaaatagttatgagaagcacttgtatctatataaactttcattttggagaacgtttttcatatgcactaaataaaagatgagtaatttcttctgccacctcaccgaacgtgagagtaaacaaatgtgacgatatccaaaattcaccgtctatgttttatttatatgcaaagatcactgagttgattcgaatgtatatgattgatagtatatagaaaaatagttttttaatcttgaggcagagtttttaaggtgacaacaaaaaatgaaacaaggtgtattcaatcaaatatttaagtgtttttgtgttaaaataatagatctaatgttattaattatagatttttaaaagttttatgaaatctaatgttattaaatttgtgattttaaaatctacattaatttttttttattaaaaatattttaaaaattagatttaataattttaagagacttaaatgaattttagtgaatttccttaattaaaaaatacagaattttaagtctcatgattttaggtaaattttgagaaaattttataataaatcataacaacttccttaaattcacccaaattcttcaaaattatataaaaatttaaaataacttaaatcattcaaaatagaagattgaatacactcccgggcccaagagttttgcaaacaatcatatacatgtaaaagtttaagactataccatttatgtgatttactaatcatataaaataaattaaatacacatcgtttagttaccagtatataataaggctaccatttagacggacacagctaattatgagagatagacagagagggaaaacaactacacaagtcaaaatttctgttctaaaaaagtaaaagaagt

SEQ ID NO: 9091 - DNA, 3000 bp, Unknown
  misc_feature (1)..( 3000): cDNA_ID_1989394_gDNA_ID_1971984_Annot_ID_58735 3000 nt of promoter + ATG
gtagttatatagtattgcacattttacgtgtgttagtttggtattatactattatgagatttcttttgtctcgactctagaatgtattaaccttaaacaatagatataggtaaacacatcaatactccatgtagacacgattttttttttttccactaatcaaaataaaaggtgcaaaggaacgctttggcttaacttatttttaaagatgtgtattcagttgggaagaatgatattgtgtgattggctattatcatcgtaaggctttttgtgtgtgtgaaattccaatcataattgaaacagagcttttgagttttataacacaagagaaaaacaaacgacatataattcttgaagctgtttggccccatcacatgatacagcaatttggcgaggactccagcatctctggggatctgtagataaaataaacatgaaacattggttcattttcaggtaagggagatccaaacccaattgagaaaatgagatacagaggaggaaagaggaactcacatttggccaagacttgcgaaatcaaacccgggatcaatctctttaactatatcactcgggggttgtccacattcctgcatcttttgcatgatctccattatcttagatgaattgttaggttcattctcgtacactgcattgagttcttctattagtttgtactgttgtgaatatcgtttgtagtcttctttgcttagactggcttcattctcttttagccatttcggatatcttgcgccaagctccttcattggttcgtggagaatatccttcgacaatagctgttgcatcatcgtctcgactattgattccaagtcctagtatgcaaaaacaagatgagagtcaacagagcgacaaataccaagtagataatgagctctatataaccttaacatagcataaagaacaaattctaatcaatcagcgaccagttctatgaactcataaccttgaagatacaatagaagaactcacagatcggttccgcaatgaaacatcatccagcagaatgttctactaaaatctacttgtagtacagtaaaagacagcataatattttcaactgatgatcgaaagactaaactttcgagtttcaattcaattaagtagagacagattcagtttcacggtatattaccttagatccagcaagatcctcgaattgtttgagaaaatcctcaaccattccatcatcatcagaagcaggcagctgcttagaagaaatggattccaatcctttgacagtttccctagtttgttccctaagcttatcaagagcttcagcaacatgatcctctttggaaaccttttgttttcctctcttcttgcttctcatatctggtaatcccattccaagaccttgaactccactcggtaataaaaccgtctcttctttcctcttcttttcctcctcctcttgagcttccctttgatttctacaacaacacatcccaaaaacgattcagagctaaaacacagaaatctctaacttgggaattgaaagtctctaaactcaaatccaaaaaagtttgagactatggaggtaaacacataggaaaaaggagtaacctttgatgagaaagattgagatctttgaaatcatccaatgcacctgagacagacaaaaccacagaagataaaccccaaaattctcagagaatcaataaaaaccctaaaagacaaaacctttaaacaaacatgataaatgggcaggaacacaatttagatagaattcgagaaaacgccgatcaaattgtagagaagacttactatcgagaagctcgtccaagtcatcggtgtgactgttcgccattttccttaggcggttctcttcctctctatatctctgtgtaaacaattcgcagatgggacgacgaagaatatcagagagagagaggagagaaagatttgacagaagaagaaacctcttttgggtttgccttgtttcgacacagacggtgcgattgatttatatgatgacgcttcttttagttgcggtgaagccaaagtacacgatccaacggctgagatcactttatttttagccaaagtactcgacccaacggctgagatcactttgtttttattttatttatttttccaaaaggaaaaaaaaagatttttcaaaaaaaattgatcaaattttgcaacagaaacagaagagaagaacaagctaaccaaactataaatcagaattctgatgcagcattaaggtggtatcagcggcgttcaaggggaaatcatcagtgaacagtcgaaggatgatgtataaagaagccatatgggaggagcttcagaatgtggttcatgcccttgctcagatgaaaacagaacaaagcttacacaagtgtgactaaagcgattcgaatctttatttggtcgaaacttcaatgccaacaatgtgttacttcaatcttgcttccaattattctggagtaactgaagaaaatgtcagctaagaagatgtttctgccttcattgactctgtcttcagacaggtaacacttctattatcttgtacacatttcatctatttttggtcttcaggtggtctagaaaccaagacatgcctgcctttgtatgtgcgtttgacaaaacatatgacttgtactctttgttcttaataatatcacagatagagataactcttatttttattccttactctaatctgacacaagttaggttaatacgaaaagtatttgtttactgtagataatctattaaacacaaaggttagtcattttactcttcaagttcaagtaaatccagatcagagttttgtagcgtctcttaaacctcaaactatctcaaaagtcaactctttgtgttgatcatatgatcaaaccatatctttagggttaagctataaacacaggtacataacctatctatatatatatatctccatatactttaagaacctcaaagagaagaaagaagtcacagggatctgttagaaccaagaacctcacggtgaaaatg

SEQ ID NO: 9092 - DNA, 3000 bp, Unknown
  misc_feature (1)..( 3000): cDNA_ID_3044555_gDNA_ID_1971984_Annot_ID_58736 3000 nt of promoter + ATG
aagaaggtgaatagagacttatgatttctcaagaatgaagaagaagattgtagagtgttagtgtttagttctgttcttctggtaatctgtgttttttttaatgtaaattacacaagtatgcaaaacttttgtaaggggctactgttatatgatgtaatgggatttataagaaaaaatgtaaaaatcaaacatcataactgggtttacacaagacaataagaagaagatacaatgtatctgatacatagttacaacttctaccaagtaagcaacagaaacaacataattttggtattgaatgagtttttcttttgcaagtattaacacacaacagcagaaacagaagatgattgttcttttgtctctttgatcagagatgatggtacaattctgttgagagacaccatttttactggtctgtaagcaatttggaacctggataagaaaacaacctcacagaattcacataacttaactccgcaagctcttccttcttcatgtttgacaggttcgcaacataatctagtacctattcatcacggaaaagattagacaagtaatgagctgaaataagcaaaaagtcagatgatgataagaacatacagcaagaatgtttgcaggctcattgagagttggttttggatccgaagaactctcatctgattttggtaacccgtcaggtgaatccgtctccaataagagcctatcggaaggaatctttaccagaccaggtaaaaagaattcaatacattcgttttccagaagtttgtataattacagaggaaaaaagcaaaccgatttcaaagtcttcttggcaattttctcatcaatgtaagtgaaccagccagaaaaagagaagtatgcaccaagctcagcgagtttaggaacaacttcagctgaaccattgaatgaatgaagaatcaccccagcaggaaaaggccctatggatctgcgtgtatttattttgagaaacttagtgctatatctttgtaaatgcaacatgtagatatacatacctcattatctctaggagatcatcaaatgcatcgatgcaatgaactgctactggtttgttcagttcttttgcaagttcaagctgtgggcgaaacacgactagctggtctgagtaatcaattcctcctgctaagggacctttgtctaaaccaatctgcaaaacacacattaaattttatgaagatgttaatctaatgagatctcagccaaaaggggtttcattacaacatatcattttgcagtttacactaaatcttgaaccaacaaagcaaacatttcagaattcaaaaagaaattgaagacaaagattttagtttagatgaataagtgataaagacacaaacttctccaacagcagcagtaggagtggtctcaaagaacttcttcaatgttttaaaccaatgagggcttctatcagcaataaacctgcaaaccaaaacagagaaaagaaaaagaagaaactttgatctgaaacttttgtgcatcaattgcaaaaaggatcgtctgtacataaaacccatatataccaaggatggagtccaaagcaaggaacaacagaaggatacgtctctcccatctctttcaccaagttccaatctttctggctccattaacaaaacctcttaaaaatatgtatacgtttgtgtaatatagatgacagtgaccaagcgatcatgaaaatttgggaacaaacctcggaggttccattgactgcgaaattggtaacaccgacagctaaagcagcagatatgagctgcgaggctttgtcgatgaccctcttgtcttggaggtgacaatgagcatcaaacaacttcattttcaccgtgaggttcttggttctaacagatccctgtgacttctttcttctctttgaggttcttaaagtatatggagatatatatatatagataggttatgtacctgtgtttatagcttaaccctaaagatatggtttgatcatatgatcaacacaaagagttgacttttgagatagtttgaggtttaagagacgctacaaaactctgatctggatttacttgaacttgaagagtaaaatgactaacctttgtgtttaatagattatctacagtaaacaaatacttttcgtattaacctaacttgtgtcagattagagtaaggaataaaaataagagttatctctatctgtgatattattaagaacaaagagtacaagtcatatgttttgtcaaacgcacatacaaaggcaggcatgtcttggtttctagaccacctgaagaccaaaaatagatgaaatgtgtacaagataatagaagtgttacctgtctgaagacagagtcaatgaaggcagaaacatcttcttagctgacattttcttcagttactccagaataattggaagcaagattgaagtaacacattgttggcattgaagtttcgaccaaataaagattcgaatcgctttagtcacacttgtgtaagctttgttctgttttcatctgagcaagggcatgaaccacattctgaagctcctcccatatggcttctttatacatcatccttcgactgttcactgatgatttccccttgaacgccgctgataccaccttaatgctgcatcagaattctgatttatagtttggttagcttgttcttctcttctgtttctgttgcaaaatttgatcaattttttttgaaaaatctttttttttccttttggaaaaataaataaaataaaaacaaagtgatctcagccgttgggtcgagtactttggctaaaaataaagtgatctcagccgttggatcgtgtactttggcttcaccgcaactaaaagaagcgtcatcatataaatcaatcgcaccgtctgtgtcgaaacaaggcaaacccaaaagaggtttcttcttctgtcaaatctttctctcctctctctctctgatattcttcgtcgtcccatctgcgaattgtttacacagagatatagagaggaagagaaccgcctaaggaaa

SEQ ID NO: 9093 - DNA, 3000 bp, Unknown
  misc_feature (1)..( 3000): cDNA_ID_2180069_gDNA_ID_1971984_Annot_ID_58738 3000 nt of promoter + ATG
ttagagaagaatgaaacagagtttagtttgatgtaaaaggagttacgtgtaggtcacgcgattgaaatgctgtggatttatcttcgcactccgcttcaaccataccatgaccgatggagccggcctgtcgctctttctgaaatcactatgcgagttggcgtgtgggcttcacgcaccctcggttccacccgtatggaaccgacacttgttgactgtgagtgcttcggaggcgcgtgtgacccacacacaccgtgagtacgatgatcaggtgggaatcgatgtggtcgccactggacaccctttggttagccggtctttctttttcagagcagaagagatctccgctataaggaaactccttccgcctgatctacacaatacctcatttgaagctttgtcgtcatttttgtggcgttgtcggactattgcgttgaatcctgaccccaacactgagatgcgtctaacttgcatcatcaactcgcgttccaagcttagaaacccaccgctagagcctggttactacggaaatgtgtttgtcattcccgcggcaatagcgacagcaagagatctaatagagaaaccgcttgagtttgctttgaggttgatacaagaaacgaagtcaagtgtaaccgaggactacgtccgttcagtgaccgccctaatggcgactagaggccggcctatgtttgtggcatcagggaactacataatatcggacttgagacattttgatttaggaaaaattgattttggaccgtggggtaagccagtgtacggtggaaccgctaaggccggtatcgcgcttttcccgggagtgagcttctacgtgccgtttaagaataaaaaaggtgagacaggtacagttgtggcgattagcttgccggtacgggcgatggagacgttcgtagcagagctaaatggagtgctaaatgtgtctaaaggatgagagcttagtcgagactcgagacgttattagtaatgtagtaaatagttccttttcttattcgacatcatagtgtagtaactaatatttatatcattgcatctttcaacgattttttgtttttctgaaaaaatgcatatatcaatgaccaatcaaactctttagctcttttgaatattttttatgttttggtagacggaggtgaattttgtagagctttcacgatcgtagaaaacctacaaaatttcttcactatcacgtggcgacttcagtgacaagtttcattagtttgaatttttcatatttatcaatactaacttgttcgtatatttacgcaaatactttccatacctaaatttttttatagacacacatattttggtcataaaatcaaataaaaatcttatgatataatataattgatttgcgggtaaaaataatctctaaattaagggtgatatttttacgaagcttgtaacaataactttttccataagtgtgtttatttttagttttttatcgatcatgctcaaaattattccagcctataatataatttttgaggataaatgactagaagaggtttattctcacaagtcacaatccactgattgtcaattggttttcaaagacacatagaatttaaaggttaaataattgcataccaccaagacagtcttcttagcggctccaattggttttgatctcatggataggatcgtgacaatcacaagaacttatcatctattaatagtcctcccaatacatttgggaaatttcttggatctgaatacgctcatggaaaaatattagtggctttgtgccacaagatagacgactatctaaaccaaattatggaacattgttatcaacgacgataaaaataaatgaaaacaatgaaaaagcatgccaaaaaaattgaacgaagacacttaagctacaaacttacaaagtaactgaaattgttaagctctggatttattacacgattaaaagaaaacaaaactagaagcagcaacgtacacgatactacttttatattttctgtcacttgtcaatttccttacactcccattcgagtatttttttgtgtggataatatatttatttttgttaacgtgaaactaaaaatttaatactagatttataacaaattacacgatagctagctaatcaaaactcacaactagtaaaaaaaaataaaaataataataataataataataataataataataataataataatgagagttaaattgttcatttttcattttaaaaaagatacgcttatacgaaacagagtgtgcataaggctatatacatcggttgattgaataaatattgtatattttaattgaattcagataaagtattaaattttaatttaaaaaaataaaatcaaccatttctggaaaaacacatggtcagaaacgtctatcagagtttttgaaaatatggacgattctgacttttctctattctttttaattactttgtattattttaataataagtatcttactgatgaaggtgccctaaacacatcgaacagttctgaaaaccattatcggtcggctgccaacaaaaacgttaagtaatttatagattatagacctacgacataatgtttgtttagcttgtttttttaccgtgttcgtatatatgcgtatttctcttcttcttttaaatgtttttttcgatttttgtttgatgatgacaccacaactcgttgcgtggaccaaaataaacaagtgtacagagatatctacatcaaagtcatgcgatattagatcaatggtctagaaaatatcaattaaaaaagtttccaaacatcatagtactacttgacgtttaactatcaaacgaatccaaatctagatagctccgtaaaaaagaaagaaaaaaaacgttctctcgtttctttctattattcaaaatattttcaccaactaaaaaaagatacatcgaaacaaatctctctaatcatatctaagttataacttttctttataaacaataaacaatagctttgatttgaagcaagaggagcaaca

SEQ ID NO: 9094 - DNA, 3000 bp, Unknown
  misc_feature (1)..( 3000): cDNA_ID_1989391_gDNA_ID_1971984_Annot_ID_58741 3000 nt of promoter + ATG
tgattagctcactctgtaatttgagatattcatggaaaaagttttaattatttcgtgtaatctagggtttagggttttggaatcacttgagggtttaaggagtttaggatgttaaatcacttgtttgatttgctttggttatattggtctgactttgaatgttgtttgattagacccaatagtgaagtttctgatggagcaaatggagaaatctgggtgtagagttggtgataatttcgttaaggctgttgtttgtactggacctgtagctggaggttacactaaaggaagaggggtaaaaccatttccatgtttccttttttcgagctctttgatgattgtcccttgatgctgaaatcttgctttgtttccttttgttttctatgtttcaagataactgtctgcagtaactatctgaccattcaagatgaagtgaaccaagtagttatacatgagttgattcatgcttatgacgagtgccgagccaagaatttggattggactaattgtgctcatcatgcttgcagcgaggtgattacaatattagatcaaacctttgatatactcttgtcaaagtacttgataggttttggtgtgtgtgttttctttaacagattcgtgcaggtcatctaagcggtgattgccatttcaagagagaacttttgcgcggtttcattaaattaagagggcatgaacaagtaagtctctttaaggataagagttgtgttagctagttcattttgtagaatcatggatgattcttgttaataataacctgattctcggtttttcaaaaaggaatgtataaaaagaagagtgttgaaatcacttcgtggcaacccgtattgctcggaagtagctgctaaagacgcgatggaagcagtgtgggatacttgttacaatgacactaagccttttgatagagctccttgaaggtaataagtctatttacactctcaaaagacttatgtttgcttcaaagttatgagttcaacttcatctttgaagatcgacataaagccagaaaaaaaactgttggattcagccgttgattatccccccatgtatttctctcaatccaacctttttggccaagtcaaacgatagagtatttgtttagattctttacattgttgtttgaaacaaaggaaaaggtctaatacacaatcttgatttcaagtggattttgcttgaaagtataattttgatttatggatttgtattttacatcacactctggagtctggagggataagtagctctgaatctaacagtgtaatagaaagttgatactttagggacagagtaaaatcatatcatatttgaagaaaatttattgatcgacttatgcattactatattgttatgaataaacttcttttaagcagaaaagttaacaatgttttaccaattgattatcacaatcagttttagaatccaagttgatttcagttatgcataataaaataaaatatgggtttgagctgaaaatgatagaaaggtaaaaaaatgttaacttatatcgtcaaatattgatcaacttctttcactattttgttcttgttgtaacaacaaccaccaaaaaaacaagtttgtattgacagttaatgaaagaccaagtcaaattctaattttggtaattcggttttctcattaaatcgcctaatttaaagcatagcctcaacttcttcacattcaaatctctttatataacacttatgatcatctgatctctccgacaaaaagaacaaaactacaaagtacaaacaatggctgacgcaacagaaaaagctgagcatgaccgtattttcaagaaatttgatgctaatggagatggaaaaatctcagcggccgagcttggagatgctctcaagaaccttggctcggtcacacacgaggacattaagcgtatgatggcagagattgataccgatggcgatggatacatctcgtaccaagaattcattgatttcgcaagtgccaatcgtggtcttatgaaagacgttgccaagattttctaaagtaaaatgaacagatctaatctatatttatatgaaagggtttgagaattaatcgtgttcaatttgttttgtaatgacaatcatttgatgaagtatgtttttttttctttatgtctttattttcatgtaatggaagatcttggattattcttgaagtggattgtaacgatgtattgaagaattctccattctttagcttttttttttttttttttttttttgcggttttggctgatctaattttatgctttagcgtggttaaaagctcaagagcttaaaaccaaaaacaaaaaatgctcaagagcttctttggttctatacaagaatgtgttgaccaagaccattagggatgaatacgaataactaaagtgtagtcattgacataaatcaaaatataggaaactcttataaagaaaatcaaaattgtatttagctctttaagtttacacgcttttagcatttaaattatttagctaaaagatctcccccatattattgtttctaaatatagctacacataagataaagaccctataacaaagaatggttggtaattgatcttgatatcgaggaccaaacatatattacttaaataatcgaataaaatctctcaaatagctttgggccatcttacatcatttcttcaaaaaaaaatatctttttacaactaaaagttaaaaacaagagaaattgaagccatccccttaaaaagtctttcaacccaaattctcttgttgatttgtattgttttcatacaatttgctctatacaattataaccaaaaagcatatgaaaaaagacttcctaaataaaatatattttttagtcacaaatacataagtacatatattgccactcgtgtgtagtataaatatacacgtactatgtaaccgttggccaacgccttaatcctacgtctctctctctctctttctctttctctttctcaagcagatcttttcttctttctcctgaaatg

SEQ ID NO: 9095 - DNA, 3000 bp, Unknown
  misc_feature (1)..( 3000): cDNA_ID_2180096_gDNA_ID_1971984_Annot_ID_177700 3000 nt of promoter + ATG
atcacaagtgaaaatttacagctactcctgagttttaataagcttcatatgttgattcgctatgttttttcatttacattttattgttgaaaatagcacaatcaattacaaaaactaacagttagtttacaatcatctgtgcatggtttcagttctgtcagaagggaatcaaggttaccgtcgtttgtcctggtccaatagaaacctggaatggtacaggaacatcaacttcggaagacagcaagtctcctgaggttggtacttattatgattgtgattatttgattaagttgtgagcagcaagtacttctcccattgcttgattcattatttccttgtagatacacgtagaatcatattctttgtcaacatttggagattctaacttcagctccttgctcaacttgatttctctcaagcatctattctctttgctacgcagaaacgtgtgtcatctgaacgatgtgcagagctgactataatcgctgcatctcataacttgaaggaagcttggatttcatatcaggtacatctttataaatattgcatatgtgatactcggtttagatgtctgatatataagtttctttttcactgtttttcagccagtactactcgtgatgtatctagtgcagtacatgccttcccttggcttctggctcatggacaaggtactttgctcatccattaattttcttcaaaagttaccggtatgagatgtcgttttgtttccattataatgtgacaaacacatctgacaaagagaaaacaggggcagttattactctgttgaaagcagtcttttgattaaaatgaacggcttgcaggttggaggaaagcgtgtggaggtcgcggaaaagaaaggcaacacatactcgtgggatttactgttcgggaagaagactaaaacaaactgaagctgattctctagaagatacacatagatgtggttggttgagccttagtccgtaaatgtggttggtgtttgtttgctagtttgattgttaaataactaccaaagcgtcgaaaaatgttttgttgccttgtgaggtgctcaataagtaagaaaagatgtgatcttctgtgatttagctactcgtacacacaaacaaacacaaatttaacatcatccgagtgtagagaaatcaaaacccttcaaattgagtagtttctctgcgcacaaaggttttcagatgcagctacgaggtaaccccagctgtgtattcatccaacaggcttttgatcccactggacttcagttcctacaaaagaagaaccgaaaagaaagctatatgatgcatacattgaagactaacgaaagcttctggagtttgacttgctgccagaaactcacagacaatactcctgccaaagctgcagaaggctgattagctggttttgcaacacgaatagctacaacaccgttcattctttccttctcttcagaataaaagtttcggtaaacttgaacacctgcagatagaacatcatttcaggttagaacaaagtccacatagcaaaagagacgctttccaaacgttctatgttatggtaaagatcttcaaaccttcttctatactttcaactccaggaagaactttggcaagaccctccactttcagcatttctgagaatgaagtataacggtgaacgtcctgccctcatcaaaatggttagtaacaagaggtatagtgtttgcctcacaaggaagaattgacagagatacaagattgatgactacctgaacttcaagcagcaagcatttattgaacaaaagaaaatctcctgaactaattctgtgagtaaaccaattttgaagtcaataagacaatctaaagctattggaatcagcaaaacagaaaacccggaaaagcaagcacaagagatgaatgtgaattaacatttgcacaaagataaaaacatcagacctcatgtagtctcccactgcgcatcttccttcaacagttttcaaaccatctgacaaattgagaggcacccggaaataaaagtgagattgagcaaatataattgtaatactacaatcaagtaaccagaaaatgtacctttcaattgggtgaagtaaggctcttggacatgaagctcaaagttcacctccttcaacatctgaaacaaagaaccttttctgtgtaaaaattccaaaaactaacttttcccactctgttttgatgcaataatagttgagaactaaagttttcatatagacttacatttattaagtcatatcccaagccatgaatcagtttgctgtatttttccaagttagaatttttatcaccctcggaagctagacattcagacaaagccgttgctagaagcttgtacaccgcagatttttctgttaattgaaacatttatgagaaaatttcagttatttctctccagcattcaagtttcataatttgcttcctaattagcaaaacgtacctgttgaatctgtagcttccccaaggagatgaagacaaaaatctctggtcaggtcaagatcgaaacttggaacagattcgtttaaatgagatctcagactaaaacggagaagtgattccatgcattctcggagatccaccgacttcgttcccggcgacattggttgctccattttcgtcaaaaacgccaacgttaagcctcttaattaagaaatattcgtgtaaaacaccctcaagtttgtagatattacaagatgttctaacccaatctgaaattggacagtaacaccttgatgtcgttttaaaacggaagatcagagatcagacgttgtcgtttgaagacggaagatcagagcgataagtcaggtatctagaaggtgacacgtgaggagcacgtgaagcttgcgtgtagacagtcacagtcacagatggcatattctcagaaatcctcattgttgactaatgtacctctgataagtcccacttaccattttctcctgaactctgtagaaagatccgaattgaatatttcggacccgaaacctgacccgctttg

SEQ ID NO: 9096 - DNA, 3000 bp, Unknown
  misc_feature (1)..( 3000): cDNA_ID_1008855_gDNA_ID_1971984_Annot_ID_177696 3000 nt of promoter + ATG
ctggctgaaaaacagtgaaaaagaaacttatatatcagacatctaaaccgagtatcacatatgcaatatttataaagatgtacctgatatgaaatccaagcttccttcaagttatgagatgcagcgattatagtcagctctgcacatcgttcagatgacacacgtttctgcgtagcaaagagaatagatgcttgagagaaatcaagttgagcaaggagctgaagttagaatctccaaatgttgacaaagaatatgattctacgtgtatctacaaggaaataatgaatcaagcaatgggagaagtacttgctgctcacaacttaatcaaataatcacaatcataataagtaccaacctcaggagacttgctgtcttccgaagttgatgttcctgtaccattccaggtttctattggaccaggacaaacgacggtaaccttgattcccttctgacagaactgaaaccatgcacagatgattgtaaactaactgttagtttttgtaattgattgtgctattttcaacaataaaatgtaaatgaaaaaacatagcgaatcaacatatgaagcttattaaaactcaggagtagctgtaaattttcacttgtgatttcaataagtcaatttctgccaactaattagcaagcacaacagtttctttacttctaacatacctcagaacgcaagctgtggaagtagccatgaagagcatgttttgaagcagaatatatagcctgtccaggtgatggtacctttcctgcagcactgcttatctgagcataattgacgtgaattattactcatgacatttaacccaataaaatggacaattagtgcatgatcatagcctgagttccataacattcaagctatggtaaatactaacctgaacgaaaccttaaattgtctatataccctagtatcctcagatttaacatatatagtcaagattcaatactgtgattacaacaattaactaacatataaaacgcaatgttatccacatatataaactatgatatgaagctcaatccttaaatataattccacaaaattaacaaaaactatcccccagtagtctccacgtaccacaacaaaatgaccccctccttgttttagcatatgaggagctaccaactttgtcagagatatcgtcccaaagacattaacatcgaatgtagtctgcacacaaaatcatagattaaccatatgtcagaaagaaatatcaaaatcacccatgtcctaattgttacaggctaactatggcaatagaaacaaaaaataccttgagagtttcctcaagaattaataatcttgcctacgaattttacgcaattaattttagtaccttgagagtttcctcacttgcatccgatgccttggatttctgcaaggaaaagagtatgatgatgacacccgcttgagtaaacatatctaaagcctaagactctctattgagtagatacaaaactttagcaaggaaattacttaccggacgctcaaaggcagcattgtgaaccaaataatcaacaccagctccagggaaaagcgacactgcttgctctacaacatgtttgagtgactcttcgccgctagctaaatctaaaggcaaaaccttgacatcttctggtgcaaatttacctagaagaagaatacagagtcagttacatcacgtgtcaacaaaaagctcacaattgtaaactggagagctttctttgattcattgtgtaagaaagtacctttaagctcactcttaacccgatccagttcagctttattcctagcagagagaataagcttggcatctaaacttgcaaactgtttagcaagaatttcacctgaatccaatcataaacatgaagagtaagcagccacaataaaagttatctcttcacagatatataatcctaagaaaacattcgttaccaattccacggctagcccctgtgatccagacgacctgagcaaaaccaagaaatctgaattaatgctcagagattgaaataatcgaaaactcaaatcaatcccactaaattccattttttcctctatcaatccagtaccttgccttgtatggcctcacgcttcacatgcttcttcgaaatcaaggtaaaatctcctacacaaagcaaagatcaatccttttatacataaaagaagttaaacattgcattagaaatcgtcagagttattaccatcggcgaatgcaaatttgaagagcagaacgataagaagaagcgctccgagagagaagaagagtagagtcagcattttctcggattgaagcaaccagcgagagaccaagtcttcttacccgtgggcaaaatatgttgacagaaataaatgtaggagtagaacataaattattaatatatagggacctgtatgcaattaatcttatataccaaaatcttattacatccgaatgccattgttcctatcattgtgttgtctttcgatcaaaaaaccccaaatctctgtttgcagagaggacgaggaaagagagagagagagagagagagagagagagagagagagagagagagagagagagaacgactatggacgctataaggaagcagcttgatgtgctcatgggagctaaccgaaacggcgacgttcaggaggtgaatcgcaaatactacgaccgtgatgtgtgtcgtctttacttgtctggtctctgccctcacgatctcttccaattgacggtgcttacctttatattttttcagtttattacttagttgtctctttgaataaaaaaaccctaatttcacttttgagctaatcttttgtgtttctgctttagctcgaattgataactggtatttggttacttgatacagtgtgcagttttgtatcttatagagtatatctgaattctgaaacttgtatcgcttcactgttttctatgagtatctgtctagtaatttagtgcatggctactttggtttgcctaataactgatgctccttttacatttctgttgttatcagaaaatg

SEQ ID NO: 9097 - DNA, 3000 bp, Unknown
  misc_feature (1)..( 3000): cDNA_ID_3044595_gDNA_ID_1971984_Annot_ID_177694 3000 nt of promoter + ATG
tagtatacatgttgctagctccatattagtttttcgtcttcttctctcaatctgatgaaagttgttgtttttaggtacaattcattctattcaaaacaattttgacgtctctcaatcccattttagatacaattgattctatttcaggttttggggttatttctcaaatcgattcctgtcaccaaaatcaaaatctgaaagcaaatggttgatgaggatcacttggaagattttgtctgtgtttgactatggagttgcacataaatggttagggatcagaggaataagttgactcaggaagtttcttctgctttcagcggcaagctcaacatccttgtaagttcccttctcatgctaaagacatttgttgttttctatgctttttttattgaattttctacacattggaatcttcaccaatcttgaaattctacatatcacattagctcgtatccttgcaagtttcttatccgatagaacaatcttcgaaccattctgccacacttttatcaggtttctatatatgtttggtcttaggattgaatggtttagacttttggtggttttgcctcgaatgatcagctatctgtctattccatacatgtaatgtgaaggcttacggttttttgttgaaccatatagtgatgcttgttgatctcatgtaagttttccatctattaggcaagatctgttatatgttaacatagttaagattaccagcaccggaggaaatcgcgtcactggttgcttttctttgccttcctgcagcctcctacactacaagacaggaagagctaaaagcatgcttaaatgattgcaaatccagtggtttagtggtgtctggttcggttagagatcagagggataagttgattcagtggcaagctcaacattcttgtaagttcccttcttctgcaaaatgcttgttaaaactgactctctagttttttctcagcattgtgatcagaatcgtcattgatcttgaaatagtttattgcattagctctgcatccttataagttccttctccatcaaaacatcctcatacaaatctatttgctggctacgcttttgtcaggtttcttcattaggtttgtcttagccttgaacggttgagatttgtgttggttttgccttaaatgctctgtaccttagttttatgtcgtttcatcatcatattttttttcttgcagaaatccaaggcatcggatgcaagtgaggaaactatcaatgtactaaattaattgcataaaatccgtaggccatacaatggtttgcttggtgacatatgattattcaatgactttgtgtgcagactacattcgatatcaatgtctttgggacgataactcttataaagttggtcactcctcatatgctaaaacaaggaggcggtcattttgttgtggtacgtggagactaacgagggatagtttttgttaagtgccctaattttgtggatttgttgaaggattgagcttcatatcatagtttatggatatggatatacattgcgttttttatatgttaaatctaaggcttttaagctatgtatagatagtttaaggtttcttttgtatttttgtcttctgcttgctaaattccaaatcatgttaccgtatacacatcttgagaagtcaaactacggttagctattcttgtatgtgttaattttccatttccttgggttaaatgtcatgattaataattcacgtcagtctatagataagcagtgctgcaggaaaggtaccatcacctggacaggctatatattctgcttcaaaacatgctctgcacggctacttccacagcttgcgttctgaggtatgttaaaagttaaagaaactgtggtgcttgctaattatttggcagctaatgacttattgaaagtcacaatagaaaactcacagctacctcagagttttctgatttgattttttcttttacattccttttcactaattgctgagaatagcaccataaagtaacaattcacagttggttcacaatctgcctatggtttcagttctgtcaggagggaatcaaagtgaccgtcgttattcctggtccaatagaaacgttgaatggtacaggaacatcaacttcggaagacaagaagtctcatgaggttggttaactgattgtgatttgttgattaagttgtcagttttttgtacttgtacctttcctttaagcaactaatcagtcttgtagacacatagaatcctcttccttttcaacattaggatcttctatctccggcttctttctctttttatttccactcaaagatcttttcttttgctacacagaagcgtgtgtcatctgaatgatatgcagaactgactataatcgccgcgtctcatagcttgaaggaagcttggatttcatatcaggtacttgtttgtcaaaatcgcatatgtttcactcagtttagatgctgatatacgatcttctttttgctatttatcagccagtactgcttgtgatgtatctagtgcagtacatgccttcccttggcttttgctatttagtttctttgcgctcaagaggttttcagatgcagctacgagataaatcggactactgtatatagtaatccaacaggcttttgagcccagtggacttgagttcctagaaaagaaaaaccgaaaagaaagttatgtgatgcgtatattgaagactaatgaaaagcttttggggattcacttgctgccagaaactcacagacaacactcctgccaaagctgtcacaaggctgatcactgttcattctttccttctctgcagatatgtgccggcagtaatttaatttttggtaactgctttctccttcttctcctttactcatttcccctatatttccttccttttatcatcattatatacaaattggtaaatatcatttttagattgtgatcttcgaaaatttattatagatgtcaatagatctaaaagtttatacaagaagaaaaggtgaactcggaaaccgaaaagatg

SEQ ID NO: 9098 - DNA, 3000 bp, Unknown
  misc_feature (1)..( 3000): cDNA_ID_2180086_gDNA_ID_1971984_Annot_ID_177692 3000 nt of promoter + ATG
gtcaaagcaagtggcttcgtttctgcaacttgtgcttaaaaccatatcaacattagagttgattgtcgcaaggttggaaggttatatcaaaggaagacgttttgtagagttgcgtcagatggttccaatgcttcctcgcaacaacgatgtctccattgtgctcagctcaagaagaaaacgattcagagtgacttaagtcattttacatttaagtagtacactagatgaaaatctcttgtttgtttttcttactgaaataatcgaattctgttaaattgattttaagttgtgaaattgtttttacgttttaccatttccaatctactggctaacctcggaaaaacggtctagtgagcgagcattgccttgagaaacagtacccgccaaatccagctctcatgtacacagtttgatattatttctttccagtacttttgattcagcaacagagagttcttttcgggctatgtaagaatcaatttgcattgtctgcagcctatccggtggggagctgagccaaggagcaagatttgctccatatccattttcttcaattctagttatgcatgccttgagatccacgtacctaagataaacaaagaatcagtcagaggtgacaaacctaggacaaaagaagttgcggaatcgaacaaattttggcctaaggaacagaagcaaggcatatcaaatatcacaagtctcaaggtcttggatctctctgagaacaatcttgatggatctctcccttcatctcctgggatacaggcatgaaagaatctctcgtaagttcatcttcgcttttgcgtttcatatacagcttcactatcgtaatacataacttagcagtgaactggaagaattcaaagcaaggtcttgccaacaataacgtctgcctctacactctgatagacctctccataacaagctattcggagaaatcccatattctttaggcaatctcaaaagcttaaagcttttaaacctctcatacaacgacatctctggattgatcccacaaagttttggaaatcttgagaaggtagacctttcacacaataacctctcaggcgaaatcccgcagaaactatccaagctcagtgagctgaatgtatggagttgagcaacaacaaacttataggtagaatccatgagagtcctcagctagacagattgaacgatccgaacatttacgcaaacaacaacaaaatatgtggaatgcaaatccaagaaccatgctcgacacagaccaagcagccagagaagcaatgttttcatggaaagctgcagtcataggttgtccttgtggaattctaatggcagttgtctaaatgtatatggttggctatttcagagactcatcaccaccaccaaggcgatctctcaagaacagatgactgaagaaatcaaaatctctgttttttttaaaacgaaatggaagattattcagatgctgtaacattgaaaaataaaacagtctgttagcaatccctatgaagtgatgttatcaagagagttaaacaaagtaaattgtcaaatcactttccaaaaagttgtattttgatcctctgttttttactcgatgaaaacagaatcgtttaatgtaaacattggcagcatataacaaattcacaaaaatctgtgtctttttggtgacatcaaggattttaagataacagcagagatttgttaagcaaaaagattgtttaaacaagaaatatcaccttcttgcgatgacgatcagtgtgagacatatattccaatggaacacgagcacccctagaaagctttgaaagaacagatactaaatctccaagaccggaaatgtcctcattagcaaccttctttatgatacaaaaatggttgcagatacaatttccatcttacttatcctcactcctaaacttaacaactgcatacaagtagccaatgcacaaagtaatatctagctactttactatacccaagagggatctagaatgtcaattgcatagagtccatggtcatcatcagggaccaatacttcaatattatcatccaacggctctgtataacctgccaacaaaataacattcaagttcaagatctgcttcataactcacttttctaaaagtccatagtcaaacacagacaaaatcttctaagtgatcctcatcaaccatttgctttcagattttgattttggtgacaggaatcgatttgagaaataaccccaaaacctgaaatagaatcaattgtatctaaaatgggattgagagacgtcaaaattgttttgaatagaatgaattgtacctaaaaacaacaactttcatcagattgagagaagaagacgaaaaactaatatggagctagcaacatgtatactatttcactttttttagagtttttcaaccaatcagaaggctgtatttcacccccactctcacaaagtgagcgttgagcgcgtgagagcacttctgtgggtgtacccctttggaaatcatgccttttttaatctacgcactcctctctgaaatccccatcgcgtgcaattgtttttgttttcttctcttaaccagtgtaaaccgaaaccaaaatcaattctaatttaaacctaaccgaaaaatcaatttcaatttcatataagaactccactatcaaattaacaaatcatataaacgtaagtctttaagtataatatttttattaaatcgcggtacaagcctagtcagaatatactgttttattttttccaaaacataaattatactataatttcattttgtcttaacagatatttaatttcattctatgtgctatactctaatacttaacaactaatcggagcactaagaatatactaataaaaatcgcttagaaaggcaaaacaaattactatcatcagatttcttccccaatcttcttcttcatatccttgaaggagagagtatagagaatccgatccaaaaaccctaaaccccatttcccgcggattttctcccaagctgatacggagatcaaatg

SEQ ID NO: 9099 - DNA, 3000 bp, Unknown
  misc_feature (1)..( 3000): cDNA_ID_1989389_gDNA_ID_1971984_Annot_ID_177688 3000 nt of promoter + ATG
ttattagaaaagttaataaatcaccttcacaaagagccagaggaattatgatgtatcatcatcaattcaatatgtataaagtattcacaacatagcttcgggggcttactaatgtgtacataagaatataagataaaagagatagatttcattgttgttctgttttctttttaaatatctttcagtagacctcttcatattgcatgagatgggagaaaccaaattaataataaagagtaaatcttgtacaaagaataagagtaaatgaaacacataaatatttaggctttgtgaaatgagactaactatctcgtttaatttcctccttttgcatcttaatgtagattacttattgattcgcttatcaagtgcgacaagtctcagcgctctgctttgtagtttccttttgcctcctgctggttgcttgagttgcactaaacttggaacataagagcacgcttgtgtccaacagtttgtgtagatagattctcctagatccaattctcttaagtatccattctctccaagaatgtaagatattcggtgtttaaaaccctcactaaccatgacgactttcttctcttcgtcaatgatgaaactctcaagtactaatgaaacttcaggtcccgtattcactttcaagaacttgctccaagacaccttttcggtgtctagtttcaatggttgcagaacaaaataaaaatgaaatttttagtatctcaaaatctagatttcatacaatctaaagttgtctcttccgttgtaaagtgtgtcatcatctaaaaacctcaagattttgtggctacgacaagattttttattcttctccaagcatccgaaagcgtaactgcacgtgtcccatcccttcacgagtttgatcgaccttgtttgcccgatataaggattccaaaccacaagcctagtattgtctccctttaagatgcataacaataaaaccctcacaatggaaaacttcagatatcttgactttatttgaatcgtttaagaaagtaagttgacctagagtctctatcgatggatctccattgacgtcttcaacgacgttcattaagtaaagtttataatccatcataaaaatcatccgaggcttccctttcctccaaggtgcatctttataaagctccgacttttatataaacagttccattttttgcaagtaactcgaactgctctcatcaatttcgtaggaaccccagagataatctcctctaccaattcctttggaagatctgagatcgtcgtcattgtctcagtttgcaactggtttttttttccctgtgatttcttgcggataaaggtagaggctgggaataaactcaataataatgagatacataaaccctaaatgatgctgggccactcttgggcctatgaatctatttgggccctctcgaaaatttgttttgtggacattttcttaattctatatgtttgctttgatatatactcgtcgttgataaccaagaattaagagtttaatcaatacatacacaccgttagtttttgcttatttttataagaaaaacaacaaattttactattatttcagatttcaatatactttataagaccagtacatatggctaatgacccaaaacatttgtcttgttgtatacgttattcaacaacaacatgcaccttcaatttatttaaactttttatatataaacggtcgagagaaacctctaaaaccgaagaaactaaacatgaataaacctttcttattcatagaacaatgtataagcgataaaagacacttagtaaacaagcaatttatatgtcaccaataaccaaagccataaactcgtcaaagttcaaatagccatcaccatcgacatccgccgctcggaccttttcggcagaagtctcctcggtgaatttctttccgaggctagtcatagtcacataggactcgctggctggtatcttcccgtcaccgtcaacatcacagaaaacaaacacttccttcaacattttctcaatgcacgaagtaaactcgtcggcgtttagctcgccgttaccgtccacgtcgatctcttcgaaaaactttacgatatcttcctgagtaaagtaaggagagaacgcaagagccacttcacgaaactcgtctaatgatagtttaccgtctttgttcttatcgaacttctcgaagacacgttttgcagacatagttgcttaagtgttttatatatgttatgtttgatactacttgttcctttgttttttttttttaaaaaaaatagtgtgaatatttatagggtttggaaacaattaattataaaaattgatagatagtccaattaacgattaattaaaaataaagtatgcatagaaaaatttagtgattcaaaaaataaaggaggatatatatatatatatatatatgtatgtagattttatcctagaaattggatttgttcaaatctgtatattattaatagttcttcacttacttgtatctcacagtagctcatattatgttaaaatggatttggctatctggaatagtattaacctctaaagttttgaaaattttgtcaacaattagatgggattcagtttgacacatgtaagtaagtaagtaaggggaaaaaaaaacaagaaatgtaagtaaatcaagtttatttatagattaatattaaaaatgatagtttctaaataactaaagtgtatttgttatacaaacttaattagatatgttccactatctatttattttatttttaccaacgttcaccacaacactgacgtcacctgtgcctaccaaaaaaaacactgacgtcacctattacgtaaattggcaaaatagaaaaatattagtacaaaattaatgtaattttacacatttaccctttcactcattttctctccgtcctcactcgctgaccatcgatcttaggccactcccgaaggatttctccggcttatacaaatcctactgccgtcaaaatcgattcaaagcgaaccagagattgaatg

SEQ ID NO: 9100 - DNA, 3000 bp, Unknown; identical to SEQ ID NO: 9093
  misc_feature (1)..( 3000): cDNA_ID_2180069_gDNA_ID_1971984_Annot_ID_177683 3000 nt of promoter + ATG

SEQ ID NO: 9101 - DNA, 3000 bp, Unknown; identical to SEQ ID NO: 9092
  misc_feature (1)..( 3000): cDNA_ID_3044555_gDNA_ID_1971984_Annot_ID_177681 3000 nt of promoter + ATG

SEQ ID NO: 9102 - DNA, 3000 bp, Unknown; identical to SEQ ID NO: 9090
  misc_feature (1)..( 3000): cDNA_ID_1989396_gDNA_ID_1971984_Annot_ID_177679 3000 nt of promoter + ATG

SEQ ID NO: 9103 - DNA, 3000 bp, Unknown; identical to SEQ ID NO: 9099
  misc_feature (1)..( 3000): cDNA_ID_1989389_gDNA_ID_1971984_Annot_ID_58743 3000 nt of promoter + ATG

SEQ ID NO: 9104 - DNA, 3000 bp, Unknown
  misc_feature (1)..( 3000): cDNA_ID_2180086_gDNA_ID_1971984_Annot_ID_58746 3000 nt of promoter + ATG
tgttcttgttcgggtgaatggaacagtaagttgtcttgattgcatcttcttagtgagaatttaaattttttttgcctcaagtaatcgagaattgtgatatcttttgcggcaacattagtaaagaaacgtattgtttagagattggttattacctggccacagaacgtattaatcagtgcacttagattgtctagttcctttttcctcagtttgctaaatcttcctttatgcgtttgattgttattacaggtgctcacacaatttttgaacttggagaatctgcttgatgacggtgttggccagatacttgaattggagattgaaaggggtggacaaccactatctgttagtgtatcagtgagttccattcttctatttctaactttggttttatgttcctcgtagtcttctaggatcttgtgtttagtttctgccctgtcacatactgactagaaaagcaggagactatgcaaagactagaagtaaaatatatgtagccgtctcttctcttttattttggtcattaaatttgttcttgtagctcttttcgtttcccctgatagatggagttcctcaatacttaatttgcatttagaattctgccttaatgtgatttatacttcctatctatcataaaaatcaagagccttatgtgtttgtgtatttcctgccacaggtacaagatttacactcaatcactccagatcacttcctggaagtaagcggtgctgtaattcatccgttgtcttatcagcaggtaacttaactatgacttgaaaagatattatctggaaatttctgtgcctgcatgcatgatattcttgtgtcgtacaggtggaactgttgtgtttaattatggcttgtaactatttaatgttctattagttggagaatcatatcaacatgctagatattttattcataataaatgctgtggatccactttatcccccacactgtcttgctagatctgattatggaagcataactaagtgaaatagtgatgtgactacactacctcctgctaataaagaagcttacacgtatttcactgacactttcttattggcattagctgatcttaaaatattgtgatttaacaggctcgcaattttcgttttccttgtggcctggcttatgttgcggaccctgggtaattccctctacttccgccatcaaaattttcacgttttcttgatttatttttgactgatgtgtcaatattctgacatgtgagcttattgttaatgtaaatgattacgtgtctctgtatttctggatttactttgaagagctcttttctattcagatacatgctatttagagctggggtccctcgacatgctatcataaagaaggttgctaatgaggatatttccagtcttggagacttagtatctgttctttcaaagctttctaggggtgctcgtgttccattggaatatatgtctcacactgatcgtcatcgcaagaaggtgatatttcttgtttaaacaatctttttgcttaacttcctaacccactgtaagcatatacttgtcaaaatttgatgctagcatttatatatgatattttcttaggctactccatatcagcatcttcattcttgcaaacagtttgttgattctgtgataatattacctctctactcggtgttcctagtgtgtgaaattttgtgctactgcagtgctgctagatctctgtgatcactttttacggaaaaccgttatctttaagactataattttcacaactgtggatctttttgcgttagcaacgttcctgttattaacatgcttgcttgtccacgtttcgttttgaactctatgttaatactcaaacgagaagtacttattgtcgggttccattcctgcagtctgtgttagtcacgattgatcatcatgaatggtacgctcctcctcagttgtatacccgtaatgacagttccggtttatgggatgcgaaacctgcaattgaacctgcttctgtttcaccatctattggtaataatggctttcctataagccaagatatttctctatgccatcacgatacggaacccatgcatgaagtgaatgttcgtggggttactgatattgcagcgattatggaaacttctagtggggatggttctcagaatgattttggctcagaagcaaagaaacaaagagttgacgaggattcttcagatgggattgctgcaaacggttccttatatggcagtgaatttaaatctgatgatgcaatggaaacagatactacagttttaagagacttcgaaggtgcaacagcactgtctgctaatgcttcattggctgagcgtgctattgagcctgcacttgtcatgtttgaggtaaagacgaaaacttctctcaaagttatcagtttcaccagctgttgaaatttaatactttttatgtggtgtgctatttctcactgtttcttttttgattcttagtagtcaattgatttttcattcacaacatttgataatacttgagtaagtttgggtgtatcagttgattcaataatttgcacagaagatgggtgtgtcactgaacgtacctgtataaaatagtatacaatgttgacttcaaggttcagagttcctacatcatcaaagagtacaatttgataacacaaagtagttacttagattatttctcaagaacatgttagatttggtaactacttttacaagtctgatagataacaatctatggaggctacaagaaaaccatagatgtatgacctggtgaactgaattactatcttggttaaatatgtttctggtatatgcaattttaactatttctttatatcgtttttttggtaaaaagtaattatacagtagttcttattgtgattcaaggcaacttgcatctgttgaatctaagttctcttatacaggttcatgtgccaccatcgtgcagtcttgatggtgtacactcacaacatttctttgggactggcatcattatatatcattcttctaacatg

SEQ ID NO: 9105 - DNA, 3000 bp, Unknown
  misc_feature (1)..( 3000): cDNA_ID_1989814_gDNA_ID_1971984_Annot_ID_58747 3000 nt of promoter + ATG
aaccatatcaacattagagttgattgtcgcaaggttggaaggttatatcaaaggaagacgttttgtagagttgcgtcagatggttccaatgcttcctcgcaacaacgatgtctccattgtgctcagctcaagaagaaaacgattcagagtgacttaagtcattttacatttaagtagtacactagatgaaaatctcttgtttgtttttcttactgaaataatcgaattctgttaaattgattttaagttgtgaaattgtttttacgttttaccatttccaatctactggctaacctcggaaaaacggtctagtgagcgagcattgccttgagaaacagtacccgccaaatccagctctcatgtacacagtttgatattatttctttccagtacttttgattcagcaacagagagttcttttcgggctatgtaagaatcaatttgcattgtctgcagcctatccggtggggagctgagccaaggagcaagatttgctccatatccattttcttcaattctagttatgcatgccttgagatccacgtacctaagataaacaaagaatcagtcagaggtgacaaacctaggacaaaagaagttgcggaatcgaacaaattttggcctaaggaacagaagcaaggcatatcaaatatcacaagtctcaaggtcttggatctctctgagaacaatcttgatggatctctcccttcatctcctgggatacaggcatgaaagaatctctcgtaagttcatcttcgcttttgcgtttcatatacagcttcactatcgtaatacataacttagcagtgaactggaagaattcaaagcaaggtcttgccaacaataacgtctgcctctacactctgatagacctctccataacaagctattcggagaaatcccatattctttaggcaatctcaaaagcttaaagcttttaaacctctcatacaacgacatctctggattgatcccacaaagttttggaaatcttgagaaggtagacctttcacacaataacctctcaggcgaaatcccgcagaaactatccaagctcagtgagctgaatgtatggagttgagcaacaacaaacttataggtagaatccatgagagtcctcagctagacagattgaacgatccgaacatttacgcaaacaacaacaaaatatgtggaatgcaaatccaagaaccatgctcgacacagaccaagcagccagagaagcaatgttttcatggaaagctgcagtcataggttgtccttgtggaattctaatggcagttgtctaaatgtatatggttggctatttcagagactcatcaccaccaccaaggcgatctctcaagaacagatgactgaagaaatcaaaatctctgttttttttaaaacgaaatggaagattattcagatgctgtaacattgaaaaataaaacagtctgttagcaatccctatgaagtgatgttatcaagagagttaaacaaagtaaattgtcaaatcactttccaaaaagttgtattttgatcctctgttttttactcgatgaaaacagaatcgtttaatgtaaacattggcagcatataacaaattcacaaaaatctgtgtctttttggtgacatcaaggattttaagataacagcagagatttgttaagcaaaaagattgtttaaacaagaaatatcaccttcttgcgatgacgatcagtgtgagacatatattccaatggaacacgagcacccctagaaagctttgaaagaacagatactaaatctccaagaccggaaatgtcctcattagcaaccttctttatgatacaaaaatggttgcagatacaatttccatcttacttatcctcactcctaaacttaacaactgcatacaagtagccaatgcacaaagtaatatctagctactttactatacccaagagggatctagaatgtcaattgcatagagtccatggtcatcatcagggaccaatacttcaatattatcatccaacggctctgtataacctgccaacaaaataacattcaagttcaagatctgcttcataactcacttttctaaaagtccatagtcaaacacagacaaaatcttctaagtgatcctcatcaaccatttgctttcagattttgattttggtgacaggaatcgatttgagaaataaccccaaaacctgaaatagaatcaattgtatctaaaatgggattgagagacgtcaaaattgttttgaatagaatgaattgtacctaaaaacaacaactttcatcagattgagagaagaagacgaaaaactaatatggagctagcaacatgtatactatttcactttttttagagtttttcaaccaatcagaaggctgtatttcacccccactctcacaaagtgagcgttgagcgcgtgagagcacttctgtgggtgtacccctttggaaatcatgccttttttaatctacgcactcctctctgaaatccccatcgcgtgcaattgtttttgttttcttctcttaaccagtgtaaaccgaaaccaaaatcaattctaatttaaacctaaccgaaaaatcaatttcaatttcatataagaactccactatcaaattaacaaatcatataaacgtaagtctttaagtataatatttttattaaatcgcggtacaagcctagtcagaatatactgttttattttttccaaaacataaattatactataatttcattttgtcttaacagatatttaatttcattctatgtgctatactctaatacttaacaactaatcggagcactaagaatatactaataaaaatcgcttagaaaggcaaaacaaattactatcatcagatttcttccccaatcttcttcttcatatccttgaaggagagagtatagagaatccgatccaaaaaccctaaaccccatttcccgcggattttctcccaagctgatacggagatcaaatgggagatccgttggagaggttgggttctcaggcatcaatg

SEQ ID NO: 9106 - DNA, 3000 bp, Unknown; identical to SEQ ID NO: 9097
  misc_feature (1)..( 3000): cDNA_ID_1989384_gDNA_ID_1971984_Annot_ID_58749 3000 nt of promoter + ATG

SEQ ID NO: 9107 - DNA, 3000 bp, Unknown
  misc_feature (1)..( 3000): cDNA_ID_1989382_gDNA_ID_1971984_Annot_ID_58751 3000 nt of promoter + ATG
acaaggcaacaaaacatttttcgacgctttggtagttatttaacaatcaaactagcaaacaaacaccaaccacatttacggactaaggctcaaccaaccacatctatgtgtatcttctagagaatcagcttcagtttgttttagtcttcttcccgaacagtaaatcccacgagtatgtgttgcctttcttttccgcgacctccacacgctttcctccaacctgcaagccgttcattttaatcaaaagactgctttcaacagagtaataactgcccctgttttctctttgtcagatgtgtttgtcacattataatggaaacaaaacgacatctcataccggtaacttttgaagaaaattaatggatgagcaaagtaccttgtccatgagccagaagccaagggaaggcatgtactgcactagatacatcacgagtagtactggctgaaaaacagtgaaaaagaaacttatatatcagacatctaaaccgagtatcacatatgcaatatttataaagatgtacctgatatgaaatccaagcttccttcaagttatgagatgcagcgattatagtcagctctgcacatcgttcagatgacacacgtttctgcgtagcaaagagaatagatgcttgagagaaatcaagttgagcaaggagctgaagttagaatctccaaatgttgacaaagaatatgattctacgtgtatctacaaggaaataatgaatcaagcaatgggagaagtacttgctgctcacaacttaatcaaataatcacaatcataataagtaccaacctcaggagacttgctgtcttccgaagttgatgttcctgtaccattccaggtttctattggaccaggacaaacgacggtaaccttgattcccttctgacagaactgaaaccatgcacagatgattgtaaactaactgttagtttttgtaattgattgtgctattttcaacaataaaatgtaaatgaaaaaacatagcgaatcaacatatgaagcttattaaaactcaggagtagctgtaaattttcacttgtgatttcaataagtcaatttctgccaactaattagcaagcacaacagtttctttacttctaacatacctcagaacgcaagctgtggaagtagccatgaagagcatgttttgaagcagaatatatagcctgtccaggtgatggtacctttcctgcagcactgcttatctgagcataattgacgtgaattattactcatgacatttaacccaataaaatggacaattagtgcatgatcatagcctgagttccataacattcaagctatggtaaatactaacctgaacgaaaccttaaattgtctatataccctagtatcctcagatttaacatatatagtcaagattcaatactgtgattacaacaattaactaacatataaaacgcaatgttatccacatatataaactatgatatgaagctcaatccttaaatataattccacaaaattaacaaaaactatcccccagtagtctccacgtaccacaacaaaatgaccccctccttgttttagcatatgaggagctaccaactttgtcagagatatcgtcccaaagacattaacatcgaatgtagtctgcacacaaaatcatagattaaccatatgtcagaaagaaatatcaaaatcacccatgtcctaattgttacaggctaactatggcaatagaaacaaaaaataccttgagagtttcctcaagaattaataatcttgcctacgaattttacgcaattaattttagtaccttgagagtttcctcacttgcatccgatgccttggatttctgcaaggaaaagagtatgatgatgacacccgcttgagtaaacatatctaaagcctaagactctctattgagtagatacaaaactttagcaaggaaattacttaccggacgctcaaaggcagcattgtgaaccaaataatcaacaccagctccagggaaaagcgacactgcttgctctacaacatgtttgagtgactcttcgccgctagctaaatctaaaggcaaaaccttgacatcttctggtgcaaatttacctagaagaagaatacagagtcagttacatcacgtgtcaacaaaaagctcacaattgtaaactggagagctttctttgattcattgtgtaagaaagtacctttaagctcactcttaacccgatccagttcagctttattcctagcagagagaataagcttggcatctaaacttgcaaactgtttagcaagaatttcacctgaatccaatcataaacatgaagagtaagcagccacaataaaagttatctcttcacagatatataatcctaagaaaacattcgttaccaattccacggctagcccctgtgatccagacgacctgagcaaaaccaagaaatctgaattaatgctcagagattgaaataatcgaaaactcaaatcaatcccactaaattccattttttcctctatcaatccagtaccttgccttgtatggcctcacgcttcacatgcttcttcgaaatcaaggtaaaatctcctacacaaagcaaagatcaatccttttatacataaaagaagttaaacattgcattagaaatcgtcagagttattaccatcggcgaatgcaaatttgaagagcagaacgataagaagaagcgctccgagagagaagaagagtagagtcagcattttctcggattgaagcaaccagcgagagaccaagtcttcttacccgtgggcaaaatatgttgacagaaataaatgtaggagtagaacataaattattaatatatagggacctgtatgcaattaatcttatataccaaaatcttattacatccgaatgccattgttcctatcattgtgttgtctttcgatcaaaaaaccccaaatctctgtttgcagagaggacgaggaaagagagagagagagagagagagagagagagagagagagagagagagagagagagaacgactatg

SEQ ID NO: 9108 - DNA, 3000 bp, Unknown; identical to SEQ ID NO: 9095
  misc_feature (1)..( 3000): cDNA_ID_1989380_gDNA_ID_1971984_Annot_ID_58754 3000 nt of promoter + ATG

SEQ ID NO: 9109 - DNA, 1831 bp, Unknown
  misc_feature (1)..( 1831): cDNA_ID_3044640_gDNA_ID_1971986_Annot_ID_177713 3000 nt of promoter + ATG
gaattcctcctcttgtttaaacgttccccataccaaaaaatagcaccacacttgtctgaaattgttggcgagttggagaatcgagtagagctctggatatttattctgtatggatgagttgttgatcgatatagtcctgtcgccttagtcactgaaaattcctcgatgattgtccagtgtcctatcttcacatacctctgtagtttgagtagatgttccttttttattcctgcttgaattttatttccctgaaaatagcataagaaaacgtgaatgcgagagttaaaaacaattaaagacaaccattaagattatagacaaattgtaaagcctaaaatacttacatcctcatctgctaacatcatttcataagacatcccagaacctttggtataatgattccacgcatggagaattttaacttgaatacaccaagaggttttgaacggtttcaagtttttgatagctgtgtatggactcacttcatccattttgtttggttttgcagtgagtaatgaattggtttatgagagaaggcacatagatatcgtgaaggtattcttactcacgtttatttataataagtgctgggtggattagatagatagagattttcgatttagatagagatcttcgatttgataagtgtgtttcgatttgttatatagaatattatttgttaagaggaagatataccaaaagaaataattgcaaacgtatctttgcgagaaatgcgtttaccataaattgttcaaaacaacaaaagatacgttttgcattttctcaaataacaatatattgttttgagtcgtcgagtgttttaattaatattcgtgataatatcctaacctttgcaacttctcaaacaacaatatattgttttgaagtcgacgagtgttttaattaatattcgtgatatctaatatagtatagtaagattatgcagattttgtgcaaaataaatatctctaaatattaattgataagtaaaactcaaaaataacattccttttgtcccaatatataaaatgttttaggctttttcttttgttacatgttgttctttcttttcaatttttatccataaatgcgacagagagaatatttcatttacaaataatttacagcttattaacatttactaaatctttacatatttttatgtgttattatattatttaaattacacaaatattaaatcaaaaatggaaaatagagactaagaaagaaatacgctaatcgattttaatgtcagatcattttctttaatttagtgacattgattttttttttttaaactttaaaactttttatcattattattatgatgtaagaaaaaagagtatgattgttgatttgttatttattatacataacacattatactgatttaaattaaaataaaaatgcaagcttcaatctttgggggtgtagctcatatggtagagcgctcgcttcgcatgcgagaggcacggggttcgattccccgcacctccattccatttaaataataaattttgtgacaatattttatatcagaaagttcaaccgtccgattgttttttttttctgttttcgggtgaaaaatcgaaaacagaaagttcagaaagttcaatattttatatcaaaaacatttactaaatctttacatatttttatgtgttattaaattaaccgaagcaatagatagaaccaaaaaaaatactatcattagagaccgttggtttcttcttccctctttcttagcctctcgtttctcatctccgagaaccaccaccgatgctcctccgtcttcttcgccggtgattttgtcttccgattgttatcaatg

SEQ ID NO: 9110 - DNA, 3000 bp, Unknown
  misc_feature (1)..( 3000): cDNA_ID_2180329_gDNA_ID_1971986_Annot_ID_177736 3000 nt of promoter + ATG
taaaataaataaatgactagaataatttgttaaatatggatcgcagaaacatgagcaatttacttactattcttattctacaatataaagcatgacttattgacccaaatgtccaaccaaaaccttctgtctttgttgttgttcttaaataaaatgatttacgtattggtgattttcaaatggtaagattgtgtaatatggaactgatttacgtcaacccccgagaatatagggcgacccatcgttgagaattggaccacacatcagttggacaattggttagttatcatccagttcatcgtcctataaaatgaaattggtactgttgtagggtcagtgcaaatagggtagaaataaagacctagtggtagggttttgaccgcatagtcttccaaccttagcatatgaaatcaataataaaattctctaatgcataatttgttgggtttcaaacttatttttttgttaaattttggttttcaaacttaatttcagagttagtttgaatgcaataatttgttttcttttgaaaaagtagtttgaatttaataaacttacttaattcataaacaacttgtcaaacaaaaagtctaaccttataagttgttttcaaacgtccaatatagaatttaacaaacatcttcgaaatgattactattttcggtgcatctcaaaccaaatcccttaactatatttcgaccattttatttggatcagtgaatcaaaactttaatattgtattaagttttatgggtttttaattatcacaattgacgacaaatagatgaattacgtatatatcagttgttacttcatgtcacttgtgaaattgctaatgtggaatcctaacatgtggtcttggctcatgttcatctccttggttggttaaatggttagaaattctcaaattagaatgattcagttggtaacataactccgcttgctcgaaataaattagtatacacaggttttttgttgggtttcttcacaactgagctacgaggctacctagtgagagcccatttaagagttttcacgagtggctgactttttggaatttagaaagcccaacaattatttagctccttttaagaaaagcaaaagctcaaacaacgttcttttcacgtctgtctctccgcaccacgagaaacgtgatatcatgtggagagtgaggaacctcaacacccacggccacgaggattgaacacacgactgactcttcttctatgactcctctcaccaattcctttttgtttttattcttcattttttgcacattttatttccctcaacgattagtctatgattttattttctccaactaatttaacaatactttctccgtacggcattttatgaattaatttattagttgggtgagtgagtggtagggcttggaatatttttattttcatggacgaactattgtcaacaaaatacaattagaaaaacacgtaaagttacgtgtgctgaataattttttttatttatatttggtacacgaaaatggaaatgtagagacgagtctagtctactacatatacgcttattaatatctatttaaagctaattaaaagatagggatttgtagtagaaaaaatggatgcaccagtttttttaataattaaggttatatacggatggaatatccaaattttatgataattggatttcgaaaaatatttatttgaattcatatccgtaaaaatacacatatatctagctaaaaaattggtgtgttgtaatagtttagtttttcgattgtgtttaagaaaagagataagatggatatgagaccttttttaaaagtcttttggtgtgagaagactaagaagtgtagtggatgataatgatataatcatcatttgctttttcttaataacatattgaaatttgtggtaaaataacgaaaatactagcaaaacccatgtaaccatataatcctacctaattctcatcaattcaattttttacttttctgttaccatcttgttaaatattcatcctcggacgttattgaactaattcttacttacatgtattttttttgctttttctaatagagttgatcaaagaaagcaatgaaaaaagtttttttgtaggtgtttagaaagcaaaagtttattttgaaaaagaagtaaataaatgagtaaaaaaaaaagagaataatgagagtgcatatatataaattgaagttagtcagtgaaagtggttgacaattaaaaaatgaaaattggaaaaatcaaaagataagagaaagagagaacaaaacgacatgcaatttttgtttgtttggttcgtttgtatttgtaccctatttccttgaacctttcttcgtaccaccgaagaaaaatcccatctttataaaaaaaaattgattaagaagagagtctccctcccttccgttaatctcgctaataataatcgcgagtgacgactctcttaaaccctttcaaagaactaaacgctaccaaagggtttcaattgaaagaagtgccaatccaaccgacagatactttcatacccgttcgttcggtttttaataacccttccttctccgagaacaaagttttgctttttttagaaagatcacgcacggactcgattcatcaactattgtgtttggtgagactggtaagcaaaatcctctgtctgagcaattgtttattagacgaatttcgttgtttatagtttacttgtaagcaatctcttccacgttatttatttagttaggtcgtctactattaaactatgtacaattcctccatttttgtggcgaaatttcagatttttctattttggtctttgggtttgactctgcatttctctgttagccttttcaaaatttgtctacttttttagtaaatcacgagtctttctacagtgtatatgaattgactaccacgaaagcatgagacttttttgttttggtagccaaagttgaactctttctcacggctttcctttttgtttcctttacggaatagagagtgtgtgatg

SEQ ID NO: 9111 - DNA, 3000 bp, Unknown
  misc_feature (1)..( 3000): cDNA_ID_2180325_gDNA_ID_1971986_Annot_ID_177735 3000 nt of promoter + ATG
ctgcacttttcaatagagtgtgtgactaggtctgggagatagagtttccttcacttcttatgatgattataaaagtataggagggggaccatatttaaaatgtaaagattcggaggataataccattagaaagttggacatcattagtaaatagtgagtgttacccaaaacaaggcactatctatgcattgtttctgcttttatattacagtttttctttatatattttggacgattatggtttgtattcacataaatttcaattataattttgctatatgattcatcttcctctatcattcctcttagtcaaatagagttggctaactaaaccttttattttaatcaaattactccgttttaacttgttttggtgccaatcaaaaccaaattttatacactaattatttttactcgtttttttttacaaaaacattaagaatgatacaacataaaaaaatgttgtctccctttatccgcatttgttcctcaaagatgtagcactataaatagtctcatcaccctaagaccaaaaccccaacactcaaactcaactgctctcccataaccgaaaccgagagaaaatatagaaaaagatgattgagacggttaaacacctgatcggctccggtggtcccagcggattcgggtcaagatccaccgccgatcatgtcacttgtaattctgatctccgttctctaactgccatcatcactggttagtcataaacttaaagttacttcttctttttcaacttaaccgagtcgcaaaatgagtttcctaactaatagtctctctgtttcttttctactaggcgcgacgtcggggataggagctgagacggcgcgtgttcttgctaagcgtggcgcaagacttgtgcttccggctagaagcgtcaaaaccgccgaggaaacaaaggctcgtatactgtcggagtttcctgatgcggagatcatcgttatgcatcttgatctcagctcacttacctctgttcgtcgattcgtggacgatttcgaatctctcaatctcccactcaacatcctcatgtaatttaaactctatcttcataatcatatagcgaaaatgtttttatctgattttttctaaccttttgtaaacttttttggtttgtgtttgtaacagaaacaatgctgggaaatatgcgcataagcatgccctctctgaggacggtgtggagatgaccttcgctactaattatctcggtaattaagttttcataaatccatcattgacttataatatatcattcattgatttatatgttctctaatagtaattcatggtgtgtttaggccattttctgctgactaaactgctgttaaagaagatgattgaaacggcggcacaaaccggcgtgcaaggccgtatcgtcaacgtcacgtccgtcgtccatagctggttttccggtgatatgttgcaatatctcgccgatatctcacgaaacaataggtaatttttaattagtataagctagaaaatatcattccaatcatatagcgaataattaatcattgtttaataataagtacaacaaaaaggtgatgcgacgacaaaaataaacgccgtcgtcctctcgtctttttcctttatttaaaatcatattttcagagagaataataatagtttatactttgtgacttgagtttgacccactaattatagctttaactttgcgttttacagaaattacgacgcgactcgagcctacgctctctccaagctcgccaacgtgctccacactgttgagctatcacggcttctccatgtacgttattatacaaatttaactatttggtaggaagtaacaatttatctcctcatttctaataataaactacaatatatatgcagaaaatggatgcgaatgtgacggccaattgtgttcatcctggtatcgtgaaaacccgtctcacaagagatcgagaaggcgtcgtcactgatttagtgtttttcttgacatccaagctattgaagtctgttcctcaggcagcagctacgacatgttacgtggcaacaagtccaagattgaggaacgtgtgtggcaagtacttctccgactgcaacgaagctaggtcatctaaatccgggtcatgcaatctcaaagctcagagactctggactgcttctgacttgttggtttctccacctaattccactaccaatctttctcatacctccttttaaccaacaaaccatcctagctattttctacgtgtaaatcttaagccctatatatagtaatataattagctttataatatatatagttatagaaatatatactatagatgaaatgggatgtgtgtgtgtagttgtgttacgtgtgcatatagcaagcctccctatatttaatatgtggttatggtttgacattattgctaatatatatatatatatatattacttagcttgtagggttttgtaatcctagctagctaggtccttgttatgtaatatatacatatatcaatcaaaaacatcacagaatttcataatcttgatcttgatactcttataaaaatttgtttatttctgttgatcactgaaatgaaatcatatccatccacacaatccaaatatggttcctttgcaatattagcaaccactcttcaaatgggccaataatgctagtcactgctataataaagggcttttaggcccattaaataatcatttggtctttcaaaggcccatcacgctaagccctagaccctcctccaaagaatgaaatgaaatcctatccacaagcctaatttggttccttttcaaaatacataccaaatttcgatttgtcaacaactcgtcaaatggatctcgaataatcactaatcactgctataataaaggcctcattaggcccattatagaaacatttggctctttgaaaggcccataacgctaagccctagaccctcctcggaggctaaaacctctcggctcctcctgcaacttccatttcagttcaagctccggctgaaa

SEQ ID NO: 9112 - DNA, 3000 bp, Unknown; identical to SEQ ID NO: 5433
  misc_feature (1)..( 3000): cDNA_ID_1828706_gDNA_ID_1971986_Annot_ID_177751 3000 nt of promoter + ATG

SEQ ID NO: 9113 - DNA, 3000 bp, Unknown
  misc_feature (1)..( 3000): cDNA_ID_3044612_gDNA_ID_1971986_Annot_ID_177747 3000 nt of promoter + ATG
gtgagtaatgtctttttagttgacggtgatctcttcttggactcatcacagcatttaacaacatctttcttgaagcacttcaccagcttagtgagcttggtgaggagtgaagggcgagagtagagtgtgtcggagatctcatccagatagatctttgtccttgtgagtgagaccaccttcgagtagtctcctgatctttccgacactatcatcttaccgcctctgttccctccagccgagattggtttggcctcgggcggcggacagcagtagcagggtttccactcggactcgaagaagaaatcaagagtcttgtaggtaaagcaaagcaggaaatcaacaatgtcgaggatgaagaagacgaagacgcccacggtgcggttgagcgaccgtgagaatcccatgctgtggagtttgagtcttgtggaagacgtgtatgtatgtaagttgtatgtatgtatggtggtgatgttgcaaagacaaaatgcgtgagagagagaaattaagttaatgaagagagagaggaaaacagatggcagctgcatgaatttattgatcgcatttaacatacattgttggctaaaatgatgaaatttggtggccgttgaatcttcttcctttttttttgcaacactagaccacgcatatccagcacataccgtaatatcttttttaacttcaaaacaggaatcaatactaaggaacatgtgatgtcgattggtccggtgatgatccaaaatgccgctatagctacatacacacaaagtcagtcaagtcattatggatgtgcggttccttccttagggttacaagaaattatgtttaataatgtgaaaataatatgctaagaaggcatgtaattttgtatttgaaaacaatcaaaaccctagatagtcccaataattaatgatactcatatatgctctgtttggtaaggccactattgaggattttggccggttgatgacttttggggtctaaaactacaaggagggcaactaaactatatggatataaatgtgttttttttttgggctatggatacaaatgtgattacgtaccgtgaaagtgaaactaatacagacatcaaataattgaagtaatggcacagagtagtaaatgtaaatgttgatagcgaaataagataaagaatggacaagtgatatgatggcatgtggccacaacttatatccatcactctgaatgcccagcagcccatctaaacagcctagctgacctgtttttagacaattctataatatgtatacacattttggtaaaacaggagttaaaagagttagtctgtcagtatccatatatagatagtagtattggtaatatttcatgaggacaaggacgtgtgcgtggcatcaagcaacagctaatcgcatctctttactcaacataccattctctctaatctgttagggtgaaaatattaatgaagtagaaatattcgagtgtgcttttatgagaaaagagtgatatacatatatagtagtatggtaaggaacgtgagaccatgtgctatgtttaataggttttcaaaagtcttgcgtcacacaatcttaaagagggcctgagagcttatttttaataatacttaaccaaacgagtggcttgattctaactagatcccggtatgtagtatagatacgacaagctactgatggagacagatatatatagtccccctcaagtcaagccttctatattcattttctgtcattgtatgtactcttcttgcaaccttttcatatgtatcactataatttgttttttcctcttgaagacttgaacaatctggtggagcaccagaagattcactaacagccaagtatttttttgatatcattcataagttttagggtaatggagtgaaattagctagaggaatttagtctaaagctcaaactgcgaccacccgatggagttgttttggtagagcagaaaaataagttgaaatgtaagaaagagaattagttacaactgtaagttacaagtaatgacacaattgtaatgcagaggtcaacgacgactgacatacatataagtgcactccattccaacatgtagtagcattcgaattggttttggactgacaaaattgagtaactacaacaaataataataataataataaaagtatgtgaaggaaaaataaaaaagtcaaaagaccttaaatgcgtagttgatggaggttggtagggagtgtctttaatttatagttttacatattttgaaacttgaaaagtgctcctctcctctttgatttatccctacttgctaattattttactcatccacgttaccatatcaatgtaatgacactcggtatatgattggccatcgacatgtatacatattgaaaaaatgtcaaaaacaagtttcacctatcaaagttggataagaaaaaaccccgtttaacagctcgatgcactacaatatcaagtgatttaacgacatggctaagttaggtttagtcaaatgaaacttcgttattacatatttacattgacaagtcaacgaaaatttaagagtttaggttcttagccgaaagttggtgattatttttattttaactaactttgaaaggtaatctttttttttttgtgatatttttcccataactttaagaatcagtatatgttttacacataattgatatatataacttaaaacataagcttatttgggcaaagttaaattaaataaaaattcgaaataacttgtaatctaacacatattaaataattgaataaatatttgaaaaaaatattctcaatgaaagataggcctcagtgaaacgggccaatgttttttgtgtgggcttatatagtccacccaaaactttacttgtttaagaggcaaacaaagtggacacttgtaagtggtaaggttgtggtcacgtttgtgtggcccttaatgcagtaaaagcagagtatgagatgatggtggtagggaagaagagcaacgagggcgagagatatcttcttatcc

SEQ ID NO: 9114 - DNA, 3000 bp, Unknown
  misc_feature (1)..( 3000): cDNA_ID_2106396_gDNA_ID_1971986_Annot_ID_177744 3000 nt of promoter + ATG
ggcagcttgggtgccttcgagagcagccatctggcggctgaggttgagcacggtggggttgaagtgtcggctgtatacgtagaagtcgttgtccggtcccagttctccggtgaacatccgcctcatggtatccggttccatgacggtgaaggtggcggaggcttcgatggacatgtttactcccccgtgctccccaaactcatgtcggatattcgctatggccgctgcagggtcggcatcacacaccgccagtgctgatttcttcgcaaccaaggcgtcaccgtcttcgtcatcgcgatcgtttcgtttcttcccggagaatacgaggggctcctgtgtctcgaggaaatgagccatagtagttaactaaagaaaaagtagagcctttgttaggaaacaagaacctaggtgttaacgaaatgtaaagaggaaaggcttcaatttatagaaaaattaatcaagatttttttatcttatcaaatcaattacagacgttacttacacattttttttttttgttgtttacacatttgaattgatagtactattatttttttaaaaaaagtgggagtcattcacgtgtaccctgtctaaatgtttggaacgtaacgcttttttgggggttattttttctgttaggtaagcttaactagagttttcgctttgccaaagcatgaaagctacatattttgcccttgtggccttgttgctttaggattagcatcccacgtacgtatcatgtgtttttgtgagtcactttttgatcatgtgtttttatttgaaaactattttgtaatgaatattgctgtgatctctatcggattacttttgctctccttatcatacacggcatcttaatctattgaatataaacaaaagtagaagttaataatcacgaaccttatgatgaactactttcattattccaatttattattatatatcccttgggtaattgattgacaaagagtgccaatgcttgaccaaacaaaaaaaagactgctttttttattggttggtaaaagaggaatgggcaatacaaatacacaaaagtgaagaaaatacgaaagtgtgtctacatacagattcataaagctgagaaataaacatgcgtttagtgactgtggaatattcaaagtcatcagctcatgataactagataagatcatcatttctatggatagtttctcacatggttccaattagtatcagaaacccttttgatagaaattagggtgacatgtaagctttctcaatgcaaaatcttatattacttagtcgtcatctaaagtttctcaatgcaatttatttttgtatggatttctctaactaaatccacgatagttcatttttattttatttgtctatatttttgtaaaatactaggttttaacctgcgggactattttgttcttttaaaaataaaagtataatttgtttagtcgattaaaaatatatatgatttaatattttgtattttctgaatgtacaactcttatatctatatattatttagtatacaattactatgtttaacttttactgtttaaaatataagaacaataacgttcagttcattaaattaaaatctagattataactaaataatttaaaatttaattatatttttattttataattgttttgtttagtatttaagataatataattatattttgattgttatatctagaacttcacacgtggtataccgtttcgtattactatcgactcaaacccgtcctaccatctaatcccgttcagtgaaactaaacatatctaatggatttcacccgtgctataccgtctcgtattaaatagttgtcgaaatctaattcaaatattggagaaataagatttagtgaactgataagaaatgtatttaggtgcgttttgctcattttaagggattgcaattgtattttggtttgtcaaatattttttgttttaaataatttccgaaatctagttcaaattttggagaaatctgcatgatatatgagattggaatatatttggaatattttttgtttgttaatcaatttattgccaaaagaaaatcaataattaaaagccagttacaaccattgtaaataagttccaactctaagatttattttacaaaatagatgcaaaaatgtatatatagatatttgagaaacttcacatgaagataagtaataagcattacatttcatcctaatttctacgctttcttatctttttttttttcttttttttcttattttcctactcctttttttattcagttatttgcgtaactttcattcatatatatagtcaaacaaatacaagattgtaacaacatttctctatggttgtgaattctgtttcacttactaaaaaatctagacgcatctctatacaatttttggtacgttaaacgctcggttgtattcttaggaaataagaatgttaggtttgcttatctctccttagtccttatgattatgagaattattttctattttaggtgttccatgagatatttataaaaaaaacatgataatgaaactacagttttttttttttaattcataattttccattaaaaagacatattacaaggcccaaacagaaaatacaacacatgcctcagggccaaacagaaaataccaaaaaaccaacaacggagcataaagcccaaaggggaaccatggaaacaagacccaaaatacaacgttatgtgtttcggctgcatcattaaaatcacaaatctagtccgtttgtaagcccatttgggtaaattttagttttgaaaaaaaaaaaaaaaaaaaaaaacattgttggaaggttaggaggttaataaatgaaaaaaagaaatgaattagagagaggcaaaggcacataaacttattattatttagtccgcatttaaatcaacgatatatacttaatacttgcacacacactctacaaatctgaaattacaaatctcatcatctccttcctcccttgcgagatctgatcgtatcaatg

SEQ ID NO: 9115 - DNA, 3000 bp, Unknown
  misc_feature (1)..( 3000): cDNA_ID_2180343_gDNA_ID_1971986_Annot_ID_177742 3000 nt of promoter + ATG
cgataacaaaaataagaaagattaaaataagttaagccttaaatattagaattaagataaattacgaaaacacggatattacatgaagtcttaaagatgttgacctcgaggggatgcatgttgtgtaaactagaaaattgatttttggagtttttcttcttcttattcgtatcaagttcattattactttcatttgtcaaccaagaaaatagttttaatatcactaaacttataataaaaataaaaaatattcttttttaaattgggtgaaaaatccaaaacatcattctttttaaaacatggaaagtataaattaactctgaaactcatttctattttatgtagactagggtatagggctaacaaaaattggtctcataatagatatcgaacaaaagacacagaacctaaagcaataacaaaggagactaataaccacaaatttttctcatatagaaaaagtttacatattctccatagctattttttcgaacaaattaagagtcaaatgcaaaagattttaaaaattttgtgtgctttcaaagatgaagtttttagcggttaaccatgacatataaattcgtaatattttgtagttgtttttaaaaatatgattggattatataataagttttaccttgttttccacaactcattgaataaagaatttgtcacataaacaatacatatttgcaactgtcatagtaaaaatatattatcaaatctaacaaaaattatgtatattatgaataaaatactctaaatttaaagaaaagtatgaatccaacactatctctatcttagtacatatatatgtggactaatggtagttagttagagttactcttaagttttaagcgataaaggaattttgttttgtttttgacagaaaaatatgttctctagtcacatattttaacgaaaagttttaaaatagcttatctaacaaaaagcaagtgtacaacataaaatccaacttttggatttatttcaccactttcggacacaattgtaataagaacggaaagtttcgaaaagggacaataaatcaactaaagacgaaaaaggattaaggtgaaaatcttgatgccgttgacttttgttctcaacggccatgattgagcgtgtgatgagtataagagaccaaattatggctatttctaataaccccaaaaaataaattgattgatgagtttttcttcatttgatatgtaattataatcacttattccatttcaagatttgtggatatctattgatattctctaccactatcaagaagctaaaagtgtattaagtgcatgtacattagcttaggccgagaagttttttttttttttttttaaaggtgatgtatttgtggcacttaggcttaggcatgtaatgtgtggtgtgagatgttgcgcgacttgcgagtaacaaaaatgggtctcaaatattgaggcatgtatttctaacgtttgctatatatgcctttgatgttctctaaattctattttatatcgtatttccatagtaatattcagtaaaatcatgaaattcgaaggttgatatcagagtttatatagtataaagttttaagatataaataatccattgaaaactcaaaacataggtacaaaatagcaccatgtacaaataaatagctaaaataaagtaataaagtaacaaattaaaacacgtttaatactattcatgaactaatgttcaagtctatttaacattcacatttttccttgcttgtgatcttctatataaacttaaaattaaacatgcatggtttcctgataataataagatgtttagttatattaaagaaaaaagatagtagctctcaagacttaaggcggaagcataaccttattttttttaggttggtaccacaagagaccacaactaaacatttggatgaatataggtataacaaatctcttatgatatgtatatatctggcttatatatgaatgcatactctacgaatgtatgtgactgctgacgacattggtgttagactgttgatataattatatgaggcagtggatcgagatttgagaactacttaagtcaagattatcataccgagaattcaagatttaggtgacacatattttgggaacctcattggcccatacactaaagaggcggtcattctttctttataactctaaaccatattttccaaccaaaaacggtcgatgttaagctttaatatgatgttcaagatataggatacgagggagaagatgatcgctagaaactccacagcaccatttatcttcctctgttgtggggatcacattctcctcatttttatttttccattgcaccagtttccactatagaaattttcatcaaatgttagttaattaatcatatctaaatatattgaatactattaaagtatatcataaattcgtatcgagtatttaatgaatcgatgataaaaagtaaaatcaaaataaaatctccctttatggaaattataccctcgaagatcctctcccgtcctaaatttttcaaaagacaacaaataaatatatagtaatcaaagcaaactttttcactaaaccggcaatagccggtgtaattcacgtcacttccgggacaaaagcgtgactggacaccggcagacaaatcacatcaaataaataatagtaatatatttaattcctcagacaaaaaggctcttccacttcttatcgaattacaaacatttcatgttattgtttggttatatatatagagagacaaagctcttaactcctttttaattgcttgaacaaaaagcaaaactcaaaggaattttctctgtatttttttctatctgcagaaaattaaagaaaaaaagagaaaactcaaaaacccacatttttcctctgtttccagcttttctttatctttggagtttggtttctggagaagacaaaagttgttgtcctttttaagagttcgagatcctgcagaaattaaaagggctcttcccggcttggattcctaaat

SEQ ID NO: 9116 - DNA, 3000 bp, Unknown
  misc_feature (1)..( 3000): cDNA_ID_2180333_gDNA_ID_1971986_Annot_ID_177738 3000 nt of promoter + ATG
tattttaagttatatctttaggagtacgaaatttgtttacacattttaaaaaggtaatagtattttagattttgaatcatagatatagaaaatgatacaaaattttgttttacctggatcaccatttttaaatggacggccaccatattagacatcaaatgcccatttatctaagagccatattggttgtcttggtcccaaaaacctagatttctaaataataatggattctatagataccaaagcaagtgtccatttacactagcttgtagcttcgcttaatttagttgctatatatgtccacatcattcgcatatgctatctgacacataaaataaatgtaatttagtatatttagttcatatttgattaatttcggttacaattttcatattgtactctattaaaattctaataattgatattttttttgtacaaaggttaaattaataattgatattttgtaggtataagtgaagcttttcttgttaacatgcgtttaagatggttaatagttttttttgacatgtaaacaatcgatcatatggatcgttcttaaaagatttttatgttttttttacttgagatgcttaacacacttaccatgcatgtgagatgtgtcatgcatattaggtatttagagcaaatccagtagtggtttctaagcaaaatttctaacctataataataataataaaataataaataatattatttaattaagatagtttttaaggaaatgtgagagagtttctaattcaagagattttgaatactcttctacctattttaagaaacttttcaaattaaataatattatttcttattttattattactttagtagattagaaactatggttagaaaccaccattggacatgcttaggttaaacttgaatttcaatcattttccggatctgtaaagaatatgatattactactcttaaacaattatcaagggtattaaattggaattttattatcaatcgaattcgtggaatatttgtcacgtttaatcaaaaagtcacttatgtaaagcgtttgcatggtaactgtcgcattttaagcaaattaaaacactattgatgcatatggaggatataaagtcattgattaattatgtgttttttttttttggtatcaagattaattatgtgttatactaatgatatctaacatgtattcaaggaagaattgtggatacagaaaactgaagtatataatttgcgtgggggaatttatattgggcacacttgaacagcatttgtgaaaattcttgacgttaaaggaaaatgaaaaatgtgtgtgttcgtttacataaatacaaaaaataaaggtgctctatatcctaatacaaaacctagggggtagaagctgaggtggatcgcaatagaagaagatggtcggctctcactctcgagatcggacggctgagaagagaagagaagagaagagaaggagaggatgcgtttcttacggggagagagaaataaggccaaacaggtagagcccacaagatgactaatctccaccgtccaactcaaaaacaacatcaacaacaacacatcacaccaaatattattcggtttctctcttcaggtccgactcaatactgtcatacaccacatccactactctactactacagactttttggtgctcttccccctgtggagtccaaatcctttgacacgtgtcgttttctcaagagattcactgtcccactctctgcgtgattcccccccacatctgacggctgcagttcgccgccggtctactcatccgtcaaacgccggttactgctcagactttggtttgatcaaaataaataaaaaaagatcaacggctggaagaggaagtagaggttgaatctggacccttagatttatatatactaaaaaaaggtatttgggtcttcatgtcagtagaggcgtttctcttgcttgtttaacacaacactcccccactcttcacatttcttctattttcttctaatttctacatctcatcacatgtagcacacaaagtcacaaacacttgtactggaaatgattgaaagagaaatatgtcttatatttgcggatatataaatgtgctttcacttcaatatcatttaaaaaaaaaaaaaactctaattttctctgctaattgttacgtttgtaaatatattttttaatagaaaataactatgaaaaatccgagtgcaactatagattgtagataaaagggacaaaagttgaaaggaagtggaagcagcaaaagatgtttcaatggataggggagtcatgacgtgactaatacacttctttttataaaatgtactatacattagtactaaatacagtattgtacaaatattcccgtaaaaacagttttaatttttaatcaaaaacaactatcaaatatggataaattagcgtccatagttaaacaaaaaatgctaccctagctaaaatctccatttcttagaaaagaaaaaaaattctataatatataatacctcaaatgaaaaatgacacattgtacacgttcatcaaatgggaatagtattagtactagtaacctaaagatttggtaagaattaagaacaaacaaaaactagagaagagagagatatgtaagaagaaacacatgaataatgggacaattttattattagaattaagagataaatgaaaaagattcgtgggacggcgggcgcatagttcagagtgtgtcagagtcagaccaaaccctttctcttatctctctctcttacgaagaatccatcaaaaatcccacatacacacaatatacgtgtatctatatattccttcaaataaaagtgacagttttttaagaaatataattaaattgtttaaattctcttttttcgtcttcttcttgctttttcaaaaaccagctttacctttccacacacacttcttcgtttctctctctctctttctccttagcttcctcttcaagttttttttgatcagctgcaaatttccatagcc

SEQ ID NO: 9117 - DNA, 3000 bp, Unknown
  misc_feature (1)..( 3000): cDNA_ID_1029576_gDNA_ID_1971986_Annot_ID_177720 3000 nt of promoter + ATG
ttgattatgttatatagagtagatctttagacgtttcttacacgtccaccaccatgaacaaagttgtcatagcatattttatgcgcctaaaagctttaaaaaatattaaattaagacgtaattaggcactaagtgcgtgttgtgggtgagtagaataacaacgactactataatttattcaataataatgatgttcttagcaaataattatgataaacaatgcaataattgacgacaatgaaaaaaacgaatctcgctttgggagatgaataaaaaagcgaggacatctaatcgtgattattcttactcagccattttcaactacttacccaaagtggatccttacttaagcccttttgcaatacataaaatttttattaacagtaacttgttttcctagtggggacatctaatcgtgattattctttcttttaatgttataataacttccctaatttgttatttagctgttaatcaatattttaaccccaaggagaagaaatgcttgcaacgtaaatccccacttgtttcaagttgatgagtgtttggcaattgacaattgtgtgtcccttgttctgtaatgacaatccttccttccttcttccatatttggactaggttgttcatcaaaggaaggaaggccccggctacactacgttagaggctctccaaatctgtccttttcatccacaactaaaccaaacccaaattcaaataaccaaactgaactaaaacattccaccgcaaaccaaaccgaaattgagtatcccggaccacggtaactctgaattccaaactatacctagttttgaacacccctagaattatggacatcatgttcaagcaaagcatcaaagtgaggaggacagagtctccaattgaaaacgagtgaacactaaacaatagaatataacgtaaaaggatatggaaaaacagattgatatcacaacaaagtctcattgacccggagaaaatactgagtcgctcaatatcggtcattacatgataacaaagttttctgacccagagatttccaggaacataacagaagagaagagacaagcagtgagaaaagtcgaatcttacacgatacgctccagctctctggcgtagcttagagtctggttgatgagttgcagagacggaatctctttgcacggtgcagtttctttggctttctggaagacaacaaacccttccttcacttcccactcaggatgctcctataagatttgataaaacctaaatcgcgtcaatggttcatgaaactaaaaaagattctaaactttgcacaaaatgttttttctcttacatctgtgacataggttaagagttcttgatcagaagagaacaacaacatctgccgggcatcgctgatagagacataatcataagctttctcgctgcatccagctatttcatctctgtgaattcagtcataacaataaaaaggtgagataacacgcgagaagacataagactgaactaattcagagaaggacagactcattgatgctaccttatggtctttgccaagagatccatgaaatagacgtaagttgcatcaggcgcggtctgtctagcactcaacacacggttataggcaccctccatgaaggattgctcaagctctactgcatgcttgatgcaaggatcctctagtgtagctgatgaaagtaattcaagctcggtgtggaattcagcaattctattttgtaccagcagcctcagaaggttaagacccaggataagattctcctgtggagactgaggaatacggttcctggtgcagaggaaaagaagatatgttagaccaaaagaaaatgaaaaagataatgttcagacagttggttctttctttacctggcatccacatagtaaggtttcagctggaagaaatctctctcaaaagcatcttgatcctcggttttgacgcttagaacaacagcatgctcataaatgtcccctagaatacaccaattgtcaaagttttagaaacggataatcaataagaacaaaaattaccaataactcaatccaaaccaatgcagcattcaacgattaatgtatacatatagggatagacagacaaactaaagcagtacaatccctcagacactcttcagtggtatttaagtatagttaacaaataactcatgagaatagacaaatccaaaacactccatgcaattgaaagcaaaactctaaacttactagcaaatagctcatgtaaaaccaataatgaaaaagagaaacttacttgcaatagtcaattccttggctgcattaggtgaattctcgaacaatggaggaagacttgtgaatttggtaagaagaacctgaagaacacaacaaaaccccagcgacatcagagactcgcaccagtaaattgtaaatctaaaccaatcccaacaatcccttaaagtagaaagttaaaaatttcatagcacttagctcttctaaaagatccttaacacacttatatgctaaaaattctcacttcaataaatcaaagctctcatagatttaaactctcgcgacataacccatcaattttcccaaagttggttcaataagcagatatgcaaagaagtgaattgaaacaaattagggttcaaagaagagagagagatgtagaccttaagctgagacaacagatcgctacaggtattgtaatccttcctcgcaaacgccgccttgaatctctcgaactgctgtgaaacttcagttagctgcggatccatcgcttctatggttttttctcttcaccggcgacgattcttttcttatagatttgattgctccgagaactggcttgatcgcgaagacaaataatacagatagaaataattgtctttacaaaacgggcctttaacaggcccaataacctaaaaaggcccatggtgtacaatagaattctgactaatgtgtaccatcatcatctcttatccaaattttactctctcatctcctctttgctttcacaatctcacaacaatg

SEQ ID NO: 9118 - DNA, 3000 bp, Unknown
  misc_feature (1)..( 3000): cDNA_ID_3044630_gDNA_ID_1971986_Annot_ID_177727 3000 nt of promoter + ATG
gtttcttgactattctgcttttgtctcccaaggctatactattgttgatcgtatggattctctcgttgaagctagactagatcttcgattgtgggtgtcaactgattcttatgatagtgattatgaagacaaagattttgatgtctatcgtccatatgatgtttttggtgatgttacaagcctggtttcagggatacgcaaagttaagacccttcacctgtctcctgattctcttgaggtcagttctgttctgctactgctgactgatgggtggttttatcggttttgtatcatgtctatatgtgtttactggttgtgattataaaccaggcgtttttcttctgctgcaatcacatgccggtcttcaacaacctccgtaatctatctcttgagagcgacgaagaaaaaggatggcaagcattgcctcttctgctcaataattctctaaatcttcatactctatctatcaaagtatgacatgtttttgagaaattaatacacaatgttctttttggctcttatgtaaaagaagtttgtctgatttgttgttatggtttttagggtcttgtgcacagagttactagtagatgtggagacgcatgcgcctgcattagcgagaggaagacaggaatgtgttgtttatcggcatgtcgaatcaaggtgctagagattacagggtatggaggaagttttatagagctgaaacaaatgaggcattttttgggaaaactgcaatgtcttgaaactgtgagaattggtgttgaaagggacggcaacaacgagcacctgcgagccaatctaagctctcttcatagagcttcatcagagtgcaacatccagttcatttgatctctctttaaacaagttatagataatatgagtttgttagtaataaaaatatgacattttgtttaatttggtaaagttttgcactgattggcgaaacaattaagaggtctagttttggtaaaatccaaattgctaatctatcatctctcaaacatgtgttaacaaaaacaaaattgaggacttttgatttcacaatggccttgagccatgttaagagggaacaacgttaaccggattaaatcataatatttggtttggtttagtaaattagaaaacgtactgtatactctctctgcctgagggagaaggttccaaatagccctaaaaagcttcgccttctctccttgccttcatttcgggtgtggaggaaagttatcaaatcagtttttgtggaattttgaatctcgtcgcttctgtgttggctatgactgaagttgcgagctcagtggtgtatgaagtgctcggacgcagagctcaggatgtggacgagccgattatggactacatcattaatgtcctcgctgatgaggatttcgacttcggtgaggaaggtgaaggcgcctttgatgccgtcggtgagctcctcgtcgctgctgaatgcgtttccgatttcgaagagtgccgtttggtaagtaaccattcgcagcttgttgcttggctttcttcatttcaattatcgtaattctagattcgttttatctttgcttgtttgtatttatgggattttttcgttagggcctctgtgactgttgaaatggtttcaataaggtctcgcttttgaatgagctgagatatttaattggatgtggtgtgtgtaggtttgtagcaaactgtcggataagtttggaaagcatggattggtgaagcctacacctactgtgaggagtcttgctatgcctgtgcggatgaacgatgggatggatgatggacctgttaagaagaagaagccagagcctgtggatgggcctttgctcactgaacgtgacttggctaagattgaaaggagaaagaaaaaggatgatcgccaaagagaggtatacagtaatggcagtttttttaccggttttgaactgagaatttgtttcttatcttgtgtttatttactggtttcttgtttatgcagctacaatatcagcagcatgttgctgaaatggaagccgctaaagcagggatgcctactgttagtgtcaatcatgacactggtggtggctctgctatcagagatattcatatggataactttaatgtttctgttggaggccgtgatctcattgtcgatggatcaatcaccctctcttttggacgtcattacggtgggtttgatcttcgtttttatttgttttagctgtctgtttaatccaaggaatagacggtatggaaaatctaccttacaaatgggtatttgctctctttggatgactttacaggtcttgtaggacgtaatggtaccggaaaaacaacttttttgaggtatatggctatgcatgctatagagggtattcctactaattgccagatattgcatgttgaacaagaagtcgttggtgacaagacaacagccttacagtgcgttcttaacactgatattgaaagaaccaaactgttggaagaagagattcaaatactagcaaagcaggttagacacaagctactttactaatatgtattagcatttactcactcaggtgttttaccttttcgtataatctgtctttggtggtaatgttgacttttgtttggttatctgaagagagaaacggaagaacccacagctaaggatggaatgcctaccaaagacacagttgaaggagatcttatgtctcaaaggcttgaagaaatatacaaaaggcttgatgcaattgatgcttatactgctgaggctcgggcagctagtatccttgctgtaagttgctctttaccattataaattttctgtagccctttagagttttcatttgatagcatagatataaacgatatctggacccaagtcgtgacccatcactacataaatcatataaaatgctagatttgggtgatatctcctgttgaaatcgttgcatgttcttttgttaccttcaacttctgagtactgctaacttgcaaacgttcgctgtgcaatattttcagggtctaagtttcactccagaa

SEQ ID NO: 9119 - DNA, 3000 bp, Unknown
  misc_feature (1)..( 3000): cDNA_ID_2180306_gDNA_ID_1971986_Annot_ID_177730 3000 nt of promoter + ATG
acacttgaatttctctgtcccaacctagtaagaaatagagcttatgcagaataatgaattttctcatctgagaacatcaatatgcagaagatagaatattgctccctcatgttggcccagtccaacaagttatgaacattccacaacaatatataaaactgtttcacaagtcttgttaaacacaacttgcttgctttttcgtgctgcccagccagcattattgaatatcatatctcagtgagatgtataatgatgtgcctcatttctatctttttccttcgtgctttgctcgagcctcgacctatcaagcgttgctcaatgatgtaccttcgctaacaggaagagcttcaagagctaggcacaaaggattaacagaagttgaagttttctttatagcagaatattgaattttaatgctgcccagctccagcaacatatcttccaattgtccatcaatttgcagttctccatatgagcagatcattgaatttatccccatcaatatgcagatcattgagttattaagcagataattgaatttctaacacgctgcccagccagcaatatatagatctcttactgttaaacaagtcttacagtgttataatcacacagcttgcccaatcggacatcatagacaagtcttacaaaaggcaatttatccccatcaataataagcagatcattgagtttttatgcagatcactgaattttttcccatcaataagcagatcattgaatttatccccatctatataagcagatcattgaatttatccccatctataaaagcagatcattgagcttttaagcagatcactgaatttatccccatctataagcagaccattgagcttcttttaagcagatcattgaatttatccccatctatataagcagatcactgaatttatccccatctataagcagatcattgagcttttaagcagatcatagagcttcttttaagcagataattgaatttatccccatctataagcagatcattgaatttatcctcatctatataagcagatcattgagcttcttttaagcagatcattgaaattatacccatctatataagcagatcattgaattttccccatctatataagcagatcattgaatttatccccatctataagcagatcattgaatttatccccatctatataagcagatcattgagcttcttttaagcagatcattgaatttatccccatctataagcagatcattgaatttatccccatctatataagcagatcattgagcttcttttaagcagataattgaatttatccccatctataagcagatcattgaatttatccccatctatataagcagatcattgagcttcttttaagcagatcattgaaattatccccatctatataagcagatcattgaatttatccccatctgtataatcagatcattgagcttttaagcagatcattgaagtttatataatgctgcccagccagcaatatatatagaagataatcgcaaagatttgatctttgaacataacaagacttacaatgtttaatcacagcttcttacgattcaattatccaatctttgtgcataatttgtcaagacttacagtgtttaatcacagcttgccagccttacgattcaattatctaatatttgaacataatttgacaagacttacagtttttgatcacagcttgcctgtcttacgattcaattatccgatatttgaacataaatctgacaagacttacagtgtttaatcacagcttgcccctgccttacttaggcaacatcgggacaaattttcccaagttagaaaccggacaaacacaatcatataatgtgtagttccctttcttttgggtttgaacaaaacataaaactttctttgaaacgaaaacagagaatcgatgatggggtttctaatccagaaaaacgaaaaacaaaatctttaaaacacgatccgtattagaaacccaaacaatctttcacaaacgtataataagaaatcgcagattttaaaagagggtttctgatttaaaacagaccaaaaacaaaagaatagaaaccctaattggtaaccacaaatatgtataatttttgaagaggaatacaagattgaaattagaaaccctaagacaaaagacggtttttttcttagattagcgatataaaagaaatcaattgaaactatgattctgaattacaagtttttggaaaatcaagaacctcaaaaatcagatctaaaagagggttttttcgatttgcacaaaaaaaacaaacataaaatcgaaacgcaatttggaaattaaagagagagaacttttggataaaaattcaaaatcgaagtagtgaatctggaaaaagggagtttcaaaatctaagaaaacgcaaacaaaagtctccccaaatcaaaagaaacacacgaaatcaaaagaatataaaagaacaaacgaagaatcagacaaataaaagaagtaagcatggcgacgagcgagtataaataaccgttgtgaaatagaagaaagacggtggtctctgtgttgggcctaaatgaatatgtaagcccaaatacaagttgtgttgttttttccctcatcgtaatataaggcccacatatgtttttttttgtcgtcgaaatattttataaagcccaaacgaaggcccacatatgtttaactgaaagttatggattttccaaagagaaaaagaaatacaaaaattaggatccgacccggctgaacccgagtggtttgttcttgttcccacggagaaaaactttgctctccctttcctttgtcaatcggaatctgtcccatttatcgattcttcacagacacgttttcttcaatctttctccattggtttcgttctcaaggtttgtttgtgtcgatcgaatttagtttcaggacattgatcgtaattggttctgttgcagtttgagaattgcaattgttgtcatgtttagatagtggaaccctaatttgagtc

SEQ ID NO: 9120 - DNA, 3000 bp, Unknown
  misc_feature (1)..( 3000): cDNA_ID_2180319_gDNA_ID_1971986_Annot_ID_177734 3000 nt of promoter + ATG
gtagaaatcttgatcacttgaaattcataattaatttaggcgttaaagatcttcgataatggttcaagtataattttctttgaaaatttttgaaggttgaatctgactaggtatttaacacggagacgtttcatgtaaatccatagctcatgaatctcgtggctgtgctttgatcaacgaaactcgtgcttacttattttaatgtgattaatattattataaattaaaaccaagatacgatcttgtattaagacgtaagggatctacacttatacatcacactatcaaaaattcaaaaacgtatcgattaaagaaatcattttttaaaactttataggatatatcgcccgccacaagttattcaagtctaatatatagtcaacgtgtaaaaccacaaagttacaaacttacaataacattcactcgacccggttggatttctctatatttttttttatgtattgttgtaacaagaagaccaatacatgttgttgtgatctatcaagaggatttaccaagtaggcaagtaagtaaccaatgtttccaacaatttttcgttcaaaccacaaaatcatagaaatagtccttaagattgactgatttgagtatgtatcttgctaattcagcttgtgatatagtagcataaggaacgggcgttaattataccaacttaagcaaaaaaaaaaagtatatttatatgtagattctttttatataaaaaatagcgtcggtcaacaaatattagaatctaaccattcatggaagaaaagagtatgaaactgattacaaaagagagaatcaggtagccactcacaaaaatcccagactgtatggaccataatagcttgaatatatgtaatagttctccaaaaggctaccaataaaactaataaaatgattggttaataacaagataaaaatggtagcaatagtggcatgccaaatagaaaaaggatgtgaccaactctctcttggcaagttggtgtccaattacacaacctaacccgttttatacataaagcaaagattccaacattgtcaaggtcgttccaattccaaaggtggaggagtctcttttcttattcccattaatcaaaaagttgtatataatgtatattcaacgtctctcacccaacgatcatatttttttttagtgtgggatccttggaagagacaacgcctcccaaggtggaggagtttatttattcaaaacacttcatcaattttgagtttatctctacgtctcttgtatcattcatattatatcctgcaaaatttgcttaattattgattcttggaggttggaccacctttttctttaatagagagaaaaaagaaatgaattttcgatccataaatctttcaaaatttaagaccaatcattgaaaatatttatgatagattcacaaaatgtagatcattgaaaatatgtataatagattcacaaaacgtaaatcattgttttgtagacgaaacgtggtctctatatagtgaaatgatagcaacttttctctctttttttcatgagatgatttttttttcatataaatacatttgaatatgtattccataacctaatgtatctttgcaaattcttctacaattaaaggacatgatgcaaattaaataatctgataacttactaattatattcaatttctctgtaaagtaatattctatcttgatgagaaaacttcaagattatccttatattgaatttgacgtaagatgatttataattatgaggaaaatttttaatactaattagatggatcattctggacctgcaaataggacacatgtatatagagttgaaacatattataaataaaaataaaaatagaaattagtggaattgttagtgggtagtagttggatttgggtaagattactttatgatgaatttcatattgaggcttgaagatcttcttctcatccattgacggattggatcctccaagaacagagagaccaattagcttactctattgtgccattctccaccgtatcttttgcttcaaccacttacaattttacaaaggaaaattaactacaagacaatttacctaaaggtggaatttaagaatattctgaaaatatcactttaactacgtgtttgatgtatgaatcatatacaaatgatatattataagaggctttaaaaaaggatcaagtctttgttatattccttcgtttagagtataagcggtcctaaatgcacttgtagcattcataacaattattgtagcgcggtatacaagtattacagttatttacatacaaataactgtaaacgctctatggagttgagaaacttgtatgtaataagaccatcatccctacagttgggtttatacattttgtaaatgaaaattggatacatcttaggtccatgtagataaacctgcacttttcaatagagtgtgtgactaggtctgggagatagagtttccttcacttcttatgatgattataaaagtataggagggggaccatatttaaaatgtaaagattcggaggataataccattagaaagttggacatcattagtaaatagtgagtgttacccaaaacaaggcactatctatgcattgtttctgcttttatattacagtttttctttatatattttggacgattatggtttgtattcacataaatttcaattataattttgctatatgattcatcttcctctatcattcctcttagtcaaatagagttggctaactaaaccttttattttaatcaaattactccgttttaacttgttttggtgccaatcaaaaccaaattttatacactaattatttttactcgtttttttttacaaaaacattaagaatgatacaacataaaaaaatgttgtctccctttatccgcatttgttcctcaaagatgtagcactataaatagtctcatcaccctaagaccaaaaccccaacactcaaactcaactgctctcccataaccgaaaccgagagaaaatatagaaaaag

SEQ ID NO: 9121 - DNA, 3000 bp, Unknown
  misc_feature (1)..( 3000): cDNA_ID_4359977_gDNA_ID_1971986_Annot_ID_177721 3000 nt of promoter + ATG
gatgatgatgatggtgatgacgctcctaaaacatgggaagaagtcagcaaatctctagaaactaaacttaaacctgccgccgttaaaccgccggaagtagactctgttaaacctccggcgactcctccacggcggcttccgcggaagagcgcatcgttccacacactggacgagcttgaagtgagggccaaaagaagcatcgccgcgcaaatcccgacgacaatggttaagcttaagagaaccgagtcgatgtccaagctaagacccgagtcagatgatcgaaccgagtccactcagtcgtcctactcggggcctcggtcagtgaaggagaacatattcgtcaagagagacagagaacggagggagaaagaagggaacaagaagccggtgatgaactgggacccacttagggagttcccggagaagtgtccgccgggaggaggggaaggtttgattgtctacacgacgtcgttgcaaggagtgcgtcgcacgtacgaggattgtatgcgtgtgagggccatcatggagcagcaaggagttgtggtggacgagagggacgtgtctttagacgccggagtcttgagcgagcttaaggagcttctccaagacgaagcatcagtggcgccgccgcgagtgtttgtgaaagggaggtacttgggaggagcagcggaagtgacagcgatgaatgagaacgggaagttagggagggtgttgcggtgggcacgtgtggagagagtaggggaggaagggaggctcacgtgtgaagggtgcggaggagcgaggtggttgccttgtttcgagtgcggcggaagctgtaaggtggcggcggttggggcggccaaaggtgaaaggtgggagaggtgtgtcaagtgtaatgagaatggattgattcgttgtcccgtgtgttttgttaattaagaacattattagtttacacaagcaaatagaggtgtgtcaaatatactttgtcccgtttgttttgttatatgtatgtgacacgtttgattttgtggaattgaaaatgatttgaaactatgctaggattttcataaaatgttaaagcatgaacgtgaaccattataatgctaagcttgcaaggtctctcactcgtatatgttgatggttttgatcaattacgtaaaggagttcaacaatctcactaatttaagtttggatcgtcagaaggtaaaagctggcaaacaaagtcacttctgcctgaatactttacaaatttgttctttgttgctattttgtttgattgttatgcatccgttgaggattttgtgctatgaaacagagtaatatgaattccatcattatagtaactatggcaagttagtgttagttaaaatcttttaatgaaaatgcatacaagtatgcttctcaaacttagctttaagagtttctcacagttacataagaaagcagagcaatgcacaaaaaaagatacaaaaaagatagatttacttttgttcttacaaagaaacaaaaaaagaatctgacatttttctcacatacacaatgttcatggtcttcagttgtacttcctcttctttatcttgaaggaagatgatcggataatgtcatcgtcggcagtgagaacggtctcgagtggaactattgattcgggtttggtgaagtaagtgaagagaaggtagattccatccaagtaagtgttggtttctccagctttgttcttctttcttatgctgtaagccaacggaatcactcctctgttaaacacttccacatacattccacctcctgccacaagcaactgccacacacaccaaaaagaaatcccagcaacataatgaatctttcagagtctgcaccaactaaaaacttccactactccgaacataaatttcagaattcctcattagattaaacatgtgatatagcgtaaaagaacccacgcgtaaaccacaaatgataactgtgtattagctcgtttcgagcatcaaaggacatttcaagaattgagttaaaatgttatggtaaaacatgactaaaaaactaagaagtgcactaagggctcctatcttgtttcaaatggttgagacttaaagaattcacagcccacagaaggatgagatttgctcttagaaagttaaactctttacttcaattttaacaaggagtcgtcacaaacattcaattgatagctgcaagttacacaactctacattgaaaccattttctcttgctttgtcattaacgtgtaagaacagacacaagatacaacttttagtgatctcttactcaacttctaattgaatcctaaaatctctttctctctcaaataatcaaatttccctctgacatgaaacagaaaacaggtaaagttggagacttttacttacctcttcgtatttctgggtaagaccaagccgttcatcttcagacatgtctggtctcaaaaccgccattgtttcgtactgcctgagcccaggtgggcactgaggttccggtttgtcttcaagggcagttgagactcccgacccggaaggagaagtcgggtcatcatccgacccgaatccaccttcaaagaaagttccagagaagtcaagagcctgagatttcaccacaaattgagagccatctctcttctgtatcgaggcacacataggtttcgacttggaaatgaatggcctgagagagtgggagaatgatagcagcggctgcgaagatacattaggcagagggcaaattgtggaatttgatacacacagcgaagacgccattgttgtgagattgtgaaagcaaagaggagatgagagagtaaaatttggataagagatgatgatggtacacattagtcagaattctattgtacaccatgggcctttttaggttattgggcctgttaaaggcccgttttgtaaagacaattatttctatctgtattatttgtcttcgcgatcaagccagttctcggagcaatcaaatctataagaaaagaatcgtcgccggtgaagagaaaaaaccatagaagcg

SEQ ID NO: 9122 - DNA, 3000 bp, Unknown
  misc_feature (1)..( 3000): cDNA_ID_2782011_gDNA_ID_1971986_Annot_ID_177716 3000 nt of promoter + ATG
acgcaacattatacctaattttaatctatttatctttcttattatgacattaatattcctatatatttaatatcttttttttgttaaagatatatatttaatatcttaatgatgttgaatttgtgaatcgatttttacaaacagacgatgctcgaggttgatacaaacaaagatgggaagattgatgaagaagagtggaaagagctcgttgctaagaatccttcaatcctcaagaacatgactctgccttacctcaagtagacttttatttcaaaaatatttctctttcttgtttttattgacatataaagtaagtacgtcgtcgtttctatgatttatagggaagtgactttagcatttccaagctttgtactcgactctgaagttgaagactagaggaaatctttagaagaagctagaggctttttcgaattatacgtttgaggtcttttaatcctttttatgtataattcggaattcattcgacattatatggtacaaggctgaaacaatttgcaattctttttgtttcgattatgtctctcggtcgtttagttacttgttgataatctatttctaagggaatttttttacaatgaaataacaattttctttaaggttttatcatttaaatggctttttagaaaaatggcgttgtggacaataatctcaaaatataaagaaaagtgaactcttaacggtcactggtgagcaacggctataggaggagccactgcagtagcaacgtcgggtccacacgtgtgtcgaactgtcgatatatgtgcggccaattggttttgaattttaaatagttatcttttgatgttgttgtattcatgtaccaacaataatcgtgacaacattaacttatcttcttacaaatattgaaatgtatataaatacgtcaggtcatattattttattgtcagatgaaaaccaccggccataccagatgttatcaactactcttattaaagcttagatgatacttggttgatttcgtataaaatatagtaataatgtaagatcatctctaatagttaagaaccaattacttcttaaccttgaatattaacgttattttaaattaaaatttcactgttttgaaggtaagaaaaattagagaagattttaacaaattactattccaatgattaagaatcccttcttaagaagataaaaatcaaattattgcaaaacattgttttggttaacaaattactattccaatgacacatgtgtcattcttaccttaagaaaaacatcttagttaaaatacatatcttaattggtttgattaattataattgcttttaatgctaagatgtttgctaagattaggctaagatatacgctggggatgctctaagatttttaccatattttaattctggttaagctaatttttggtgatgcatatcgatcagagtctaattttgaacacaactcgtttcatcaaataatttataattctatttaatcatatattgacaacaacatcaaaaagatattgtattacttaaaaaaggatcagaaatttagctacggatggtagatgcatgaactggtcaagaaatcttgtcgaaagaaacgtttgttgtatctttaatgttatgttatgttatgactcacttttcctttgaaccttctttcgtggtacaactcccttgaaacgttcgcattattgaaagttcataaaacaatttcaaaattctttgtcatcaatggtgaaatgaaaattatatatataattatcatgagattatgtaatatattagtattatgttaatggtgtattaaataattcaaagctagaaatgtaaagatttcgtgaatggtacttgttgaatgggggtaatcgtaatataggaggaggattctacgaacctacatgattcattagtactcataatgcatttagatatttttcaaatcatacaatattataaagatatactaatgtataatgatgatttaggcttttgagatatgaatttttgtagaaagaggacccatccatgtgcaacggcaataatctcggttttcagaccagttcaagtttcctaaatgttagtattttaagtctctgattaatccctccaatctcttttaaagaaaatgattaatcactttaattaatggttagtttttgttccctttacaaagaatcacacgtggcaagatatcattgcaagaatgactcacaataccgtcgttagcctgcaagccaaaagccacgttaacattcccgttagattaatgacggcaacatcaccacgttacatagtctcccttattccgtttatcagataagatcataagaatgggtaaatcaaaacaattaatttttctaaatggagaaattataaatggtacttatcaatccataaattttaaacttttaggagatattaaaataaatgaaattcaatttaaagtataaaaataaagggaatattcgatgacttattttataaaacaaatttgatggataaaaaataaaatgaatgcaaagaaacggtcgtagatgtgaaaagtaacggcgttaagaatatacaaaatccggaaaaggctaagaagcgcgtctatttaaagaaagagctctctccttcttccaaaaaaaaaaatctagactttgcctttcttttagcgattttttttcaattcattcctcaggaaaaaaaaaatcatcgatccgaaaaatctacaacgatctttccagaaatctgtggttttgagatctaaagatcttcaatttcatcaccatttcctcgatcttcgtttgattgttgttgcttaagaggagattcatgaatttataggtgtacttatttgggttcgtctctgttaggttcgtgagggaggggttgatctagttgttgttgttaggatttggatcgattcttttcatggaagggtgtctcttattgatacccgtacgagaagattattgtttagatttggattagagctaggttttttttgtttcaataggaaatg

SEQ ID NO: 9123 - DNA, 3000 bp, Unknown
  misc_feature (1)..( 3000): cDNA_ID_2991955_gDNA_ID_1972003_Annot_ID_177762 3000 nt of promoter + ATG
tctacttctttactctttctctctcttccatcttttacacagaaagtaaaaaacattctcacaccttctctcccaagtgcgtgccacgcagacaccattatttgccatgagtagttagttgctagttgctactaattaagaaaaatgaattaagtttttaaaacaaacgttgtctagttatataatccatgtccatatacatctagatatatgacttagataccaatgtttcgactcttttaggtctacacgtacgttgcccaaacttcatatttgagacatctttatttatttgtcaacagaaatattgaaacatgcatggatcttgatattctaaaggtgcctgaattaaaatagaacgataacgttttaaaacctaattcccaatttgtagtttatatatttcttgtttgatccatattattacaagcctatatatagtgtatataaaactcaattaagcttcaaaaagtcagaaaactcatcaatagctcaagttccactaattaatgcccgaatttaaagttcatctctatagtttaaaatttgttcgtagctagattttgcatcttggagtggttagttatgtttattagacacttggaatgcttttgaatgtacaatgtccggaaaaaaaaactaatactgaaaaggggatttgtccaagtggtggtagataggaggaggcgcgtgagattggggaaacattggtttcttctgcaatgaatgaaacgaaagcagctatcatcattttctttttcttacttcacaagccgcagaaaagcctctcctaccttaaaatggacatgtacgtgtcgcttttctattgcttcctatctattcgacaacattgaagttttgttctattactttcgtattcaatttttaatttttgtttgagaataccaattttgttttggatctaaactcgttctaatgtaaaaaataataatcagccgcagtatatcaatatgttacattgtatctggacgtgggatatctgaccatgtctccatgaatccatgatgattgacagatttatagggataagtatcctggtttaggtaatccataagtatttatgaatattatgaaaataaattttgatcagaaagattaattagttaagactatgatgtagggtattttaaaatattgctaaaaattttgcgcgctttcagtatgtatatttattttactagttttcggttgatatatgatttcttgaagtaattaaggttattagctaaatggaagagaacgtgaggaatataacacatatgtgatcacatacgaatatatgtaggtttaacttaattggttcgttgattattctttataaaagtgaaagtagatttaaatttgttttccaatcttctatgtttggccattgtttgcaagagttttgggaattaaagtctttttaggtgagaccaagaagggtaaaatatgagtttttgggtctagaatttataagttaaatagtttattctcatttctaattattgttgaccaaaaaaaaaaaaaactgtttggttttgaggtttaattacttattgtatatgtacactctcaatcataatgttttggatatactgtatagtaaatttttaatcaatcgtgtttattagtatatatgttacaagttacaccattcgtcgtctcagtatcactctaatatcattctggcggatttactacacacaattatgcaattgtaaataactaaatacaaataattttccttcagacaaagaatctacgagcaaagatctttcttctcaggtgacgtagcaagtccgtatgtagtaatttagagagacagctaaaaaacgttaaaaagtaaaaaaaaaaaaaaaaaaaaaagtctagacagtggaaattacgtaataggatgggtgatgtggttcgaagtacacgtgtcgatatatgactgaatagtaagtaagctttgacttttgtggtagggggctggcccaaagggaggagtcacctttctaacagtgacttgtccctcttgttttttttttaccctttcaatttgtttgatattttaccgtcttattactttgttaattgtggactataatctcttctttataccttttacaatgattcaaattgtctagtctcatttaggttatatatatatatgatttgataccggaaagcgcaacacgaacgcaaagagcaaatgaccattgggggaaatttcaatagaagaagaaacacatgtatcatgctcacatgggtttcatattcacccaaaatcctccaaagtagaagaaacatgttgccactgtatatagtaaggcttattggcaaaacctgaccttacctaacatatgttttgaaaatttcaacaaaaaactattatttgtttagaatcattcaagcaatatgttttgtaaacgaccggttatgattttatgaatgcgtcaatggtggcacctagaagtagaatcaaagaatccatcattgattaagctttgcatgtcttcttaattacctatgacgatttagattcgaataagtaaaatagacactaccattcgcaaatggcccattagctcagttggttagagcgtcgtgctaataacgcgaaggtcgcaggttcgaaacctgcatgggccatgttttaacacctctacttttgatatttagtctctgatccctctattttgtgttttcttacattcacacccgttatcttttatttatttatgcttggtccaaccctgtctttggttttcttacattcatacccattatcttttatgttgatcttggggagtttatgtagtagggttttaaattaaagctccttcttctttggtattttgcctctggaaatcgaagcgggtaggactttttatttatttattgcatacacgtatttgtgattcctcgtcgagttacataaatcaatagcggaagtaattggatttgtgagtagagagacttaagaagaagaagaagaagaagaataccaaagcaatg

SEQ ID NO: 9124 - DNA, 3000 bp, Unknown
  misc_feature (1)..( 3000): cDNA_ID_2180608_gDNA_ID_1972003_Annot_ID_177774 3000 nt of promoter + ATG
atccttggtcctaaagcttcctgcatttccttcaaggactctgcttgtcgttgcttcggctacatggtctccaagaagaagtacatcttcactattgatgacgattgcttcgtaagtttccacaattctgtttatagatctgttctttttttccttcttcataggttcagtttgagatctagtgataaagtctgtagatttgactgatctttgaattgaaaattgaaaatacgatcacaattctctaggtcaactttaagaaacacactgttttgacttagatctatatattcatctgcttgatgggtttcgatctgttttcagaattgaaattgtgttagtcttatgtttgtcggcattgccatgatctctcttatgtttaggtaatgtcattgttgttggaccaacctttctatgttatgtcttaacagttaacttcacaagattcttgcatgtcattgtcctgcacatttatgttgtggtcataaggcttaaggcaaagaaaagtccaaactttatttgtggggctttctttttagaattgagttttcagttacgccatgattgtagcattgatgttgctttcatattgtgttggtttagtcatgtgtaacgtattgtctctttttcttatttttgttggctttagatgcatttgaatattctttgcttataatttaaatattattgttgttgtcatgtgttataggttgctaaggatccatctggaaaagctgtgaacgctcttgagcaacacatcaagaaccttctctgcccatcaactccatttttcttcaacaccttgtacgacccataccgtgaaggtgctgacttcgtccgtggataccctttcagtctccgtgagggtgtttccaccgctgtttcccacggtctgtggctcaacatccctgattacgatgcccctacccaacttgtgaagcctaaggaaaggaacacaaggtagtgttttatttaacatcttctgtctacattttttttttccggtttttataagctaccaatgcttaactggcatcactattaggtatgtggatgctgtcatgaccatcccaaagggaactcttttccctatgtgtggtatgaacttggcctttgaccgtgagctcattggtccggctatgtactttggtctcatgggtgatggtcagcctattggtcgctacgacgatatgtgggctggatggtgtatcaaggtacttactttccccattccactcgttgcttcaaaatgaatttaaatgttaatttgtttactgatctccctcttatgttcttcaggtgatctgtgaccatttgggattgggagtgaagacaggtttgccctacatttaccacagcaaagccagcaacccgtttgtgaacttgaagaaggagtacaagggaatcttctggcaggaggatatcattcctttcttccagagcgcaaagctcacgaaagaagctgtgacagttcaacaatgctacatggagctgtccaagttggtgaaggagaagctaagccccattgatccttactttgacaagcttgcagatgctatggtcacttggattgaagcttgggatgagcttaacccacccactaaagcttgagcagcaaaaaaaccaccaccgcagttttggttattagctcaacatatcatctatcttctccgttttgtttttgttttgtcttttctcaaattttccggcgattcttcagttcgtttttaagttgccggagtttatttaaatagtgaatggtgtagttctatttatgaccgagacaatctctcttttgaggtttttcgtttttgtttcaataataaaaaatcatatcccttagtcgttggtgtctttgcttgctggtttgttgactgttattttggatcaaattagttgaaagacaggaacagattccaatcaaatcaagccttaaacatatttgatttagtagaacccagttggtgtttttggctgtatccgacatgttatgtaaaaatggccaagagactccaacatcattattaaaaggattttggaaaagagatgatgaaaacaacatctttatgtatcagcaaatgcttttagacttaaatcattaagccggactgcgggaatacgctggtctgtattgataagctcttgaacaaactctaaaaaaccttaaccctttttttatgatcacccaaagaaggagaccaattaggcttttatccatctaaggattaaagtcaaacacgtattttccctggggacgacttttaacagaatcggacttgtactcttttaactttttatacttaaaaaattggcaagtagctctgataatttggtgctaatcagcttcaaatggacagaacgatgcagctcatgaaaaataataattgcttttgactttgttttcttgttttctaattactactagatgtacaagggggtttcattgtagcatctaactagttttagattgaaaagtggcatcggtacgtagtagctctatacattcagtttgtgataattacttaattagtgataacatatggtatttggtaataaaaattattaattcacataatgatgagaaatgagccgaaatcaaatactgtaatccagaacaatttattttccctcacgtatatttatcgaattttgttacatatatgaaaggacgttaattaagaactttataaactcaaccattttagattttgactttggttttctatatatataaataaatacatatatcatccacaaaaacatatgacattcactcacatcagaatttcaaaaccgtaaagaaataccttccttttgaagtctttattctctccacgattgacgattaatggagatgaagaagtggagttatgcgaatttaataaccttagctttgttgtttctcttctttattattcttcttttggcatttcaaggttcggcttcgatcctcttgttattttttcttccatatctataatcatttacttgatagtgatg

SEQ ID NO: 9125 - DNA, 3000 bp, Unknown
  misc_feature (1)..( 3000): cDNA_ID_2106821_gDNA_ID_1972003_Annot_ID_177776 3000 nt of promoter + ATG
ccacggacgaagtcagcaccttcacggtatgggtcgtacaaggtgttgaagaaaaatggagttgatgggcagagaaggttcttgatgtgttgctcaagagcgttcacagcttttccagatggatccttagcaacctataacacatgacaacaacaataatatttaaattataagcaaagaatattcaaatgcatctaaagccaacaaaaataagaaaaagagacaatacgttacacatgactaaaccaacacaatatgaaagcaacatcaatgctacaatcatggcgtaactgaaaactcaattctaaaaagaaagccccacaaataaagtttggacttttctttgccttaagccttatgaccacaacataaatgtgcaggacaatgacatgcaagaatcttgtgaagttaactgttaagacataacatagaaaggttggtccaacaacaatgacattacctaaacataagagagatcatggcaatgccgacaaacataagactaacacaatttcaattctgaaaacagatcgaaacccatcaagcagatgaatatatagatctaagtcaaaacagtgtgtttcttaaagttgacctagagaattgtgatcgtattttcaattttcaattcaaagatcagtcaaatctacagactttatcactagatctcaaactgaacctatgaagaaggaaaaaaagaacagatctataaacagaattgtggaaacttacgaagcaatcgtcatcaatagtgaagatgtacttcttcttggagaccatgtagccgaagcaacgacaagcagagtccttgaaggaaatgcaggaagctttaggaccaaggatacggttgatgtcgttcctgttgtagagttcgtaatcgaacccttcagggacagcaatggtcttcgatggatctccatcttggacgataatcagatggtaaggctgaagaaaaggcctccacatctccaggaaatcgaggttacggatcgtggggatcacgatatcgagctcatccttcaacaatgggatgtggttcaccggaattccaacggtgttcgccggctcaaccatgattggattgattcagagagaagagaatttggagagaaaagattgtgagatttgagatcggaggtgatgggagactctgaagaccgtcgctttggcttttatattagttggcacgtgagagggctttgtgtgagttttgacacgtggtggattataagtcgttcaccaggtcaaaagaatttttaaccttgttatggtgaggaagtgaagactttactattttgtctcttaattgtccgttttctaggctattaataatttgtcttattggtttagaaaacatttgttaattaatttcccataaaaatagaagcttataatattgtctagagattatattttagatatttatcaccacaaataaaataaaataattgtcaatctttttaaacagatacttttgaagaatatccatactttttgatattcttgtttagttattaaattaaattatcagatatacctacgaactaatatggatttatatatttcagttacacttttggttttataacttgttgtcaacagaaaaataaaattgttgtcaagacatttgaattttagaaactaacttattttggttaattaaaaggtcaaaagattcaaaataaatttgtttctcaaattttagtggtcaatattaaatttctgaccaacaaaaatcacaaaacctcagttttgatcatttattattaattatataattgtgaattttgttttgatttaaggctttttaataagttaaaaagttttgtttcttgttcgtttaggtttttttttttttgttatacttataatcagttttagacttagaggaaattgaacagtttagaatagtaggtctagctaacctctttttttttggccggtctacataaccttgcgaaggatagatctttcagctagcaatttaattcatttctgcttaccattgtttcttacttaaattagttacattaccatcaatgtacctcaattcgtgtgtgagcgtttttaacaaacaaaaaaagtcgttcgtgagaattaaaagatggggggatacaaaaaccgaacaataattgaatactttttgaccggagtgtaacatcaataaaggtgttaattagagaatgtaattaggctttttactaacgggaataataaattaaaaactgtcctcgatctactttactatgtatggaaggaacattcgcatgtggcattgtgggaagctgaatctcaaaacttattttaagttttgacattccttacacttatgaatatactatacgattttttttttatcatcaatatacggattagtacattgatgataaaagaaaccacggatgataactattaataattattttattatatgatgaaaatgattatgcatttcacgaaatttcactaaaaaacaattattatgaacaaattcattttgtttatctaataacaataaaaatcattggactttgattttatacgtcgtgggaaggtcgtcgaagcacgttgcgtttgatcattgcatgcatcgtgaaaattccactaaacatcgtcttttaaaaaaagaaacctttaaaacattacaaatggaacgtgaacctataaaatatgataggtagatctcacactttatttacagtattaaacaatatggaacattgacgttaaattattattttctacttataacaatttacacctcccaaaatttggaaaggataaacccaacaaggcaacaagtatcacaaatgtagctgaaatagatgggcttttaaagtttatggattgggccgtcatgaacacatattccataacataacctaattgggtgctccgacttcttttcgcgccgctcgcttgtacatgtcctcttcttcgacttccagataaaatcgcttcctctgtttttttccgatctaaattcacagctcatcgaaa

SEQ ID NO: 9126 - DNA, 3000 bp, Unknown
  misc_feature (1)..( 3000): cDNA_ID_3044666_gDNA_ID_1972003_Annot_ID_177778 3000 nt of promoter + ATG
tctcgaaatttccttaaaataatacttttgttcaacacatgggaaaaagaatgtaaccataatatgaaaagaataaaatgcacaattacacagcaaaatgtggggtactgcaattacaaaagatgaagtatggaaaccatgtaagagtatcatatactttctctgccgataacaagtgctagaacttttttttttctttttttcttatcttcttattatccttgccaataaaattgataatcaatgtcatgtaatgaaagaaacagaagatttttcttttgactttttaacattttaaatattgaatgttcttccctagcccacactacacattgaacatgctttgaaaaaaaaaaaactatgactaaagatcacaaacttattagtaacagattgtttttttttttcgttggcaagcaactattctgccttaaaagcgtttttgtaaactaaactttcattcctaattgatgatgatattcacattcacgtatatataaaatatgtaaacgatataggaatcacactttaacaaaaaaaattgtactaattaaaaatagaagaagaactggcgcaaaatgtaaaagcaaaagagagattcaaagggagatttgagacttcagtttcatgtgtcgtcattgccatctttcaacatcacctaaaatcttcagagaagtcaacgaggaaatctcgtccgtaggatgatgaaatcgtacaaactctgatgatgcatgatcctcaaagtcatgggttcacacaatgtggttaagtttcttctttcgtgtcagaaattatcaaatgaaaatgcgtctcattattctcgcctacttttgcttcttcttagaaattgcctcctccatgcatgttatttcaaaaaagttcttcgtcatgcatgtctatagaattacataagcccaaaattattcctacaacctatgaaactttgttctatgtctatggaattaccaaaagcccaaatcaaagcccgtataagcccattcgagatactttttgtgttcctcattttcctctcggtgcatatccatattccatctgtttctcttccttgattatcggccaatcatagaacaagaagtagagaaagcagaagatacactacagagacagagagaggtaaataaaaatcaatcctttagatctctcttattacgtgtctttaatgattcaatgataatcttttttgggatcttcttgctcacatttaactgatctgatctgatctgataaataaacaaacttaataaaacattttcaaaattcagatcttgacaagatgggtaaagcaagaggagtgaacaatggcgtgaatgaaagttctctcggttatctttttggttccggccagccttcttccgctgctgctgccacaatggggactactactactacaaccaccacaactaccaccgatgggaccggaggcagaccgataaccaccacgacgaccacagtcactgataacaagaagacatctgcaggtgttagaggaagtcctaataattacttcagatcagaaggccaaaactgtggaaactttctcacggtaacaggagatctttagtctttacaaagttttgagatcaaagaattgacttttgatttggaaactgataaaaaccaaaaatgtttgttgatgagaacaggacaggccatctactaaggttcatgcagctcctggtggaggatcttctcttgattatctgtttggaggaccaagtcctgctggatctggaaacaaatgaagttacttgtagtttttttcccactattcagattcgtgtaaatcatcaaaagtgttggcttttatcccttagtgaaccctgtgtgattcaattgtgatgtttgccttttgttctcttctttgtcttgttaaaaggaattttcagacaatgttctctttaagagttccaagaaaataaactaagtactgatcaaccaagagatctatatcaaatgaaacaaacaatgcccacaagatcttgcgttgaatcagccatgttcaaagctctgatcaatcgtaggagaaatgattcgaattcagccatatacttacgttttatcatagagtagaaagaaacagagtcaaatcaacgaccaattgtaggagaaaggattcaactattataattcataatcatgcactcttcttcaagttctaagatttaaacatagctataagccacaaaatccttaacaaaaaactaaaacttttaggggtcaaagaccacaattccgatacaagaaagcaattaagaaactcggacgaatctgagtcacggtgagagtgctctagaatcctagcttggtacggcgccagtgcctacgcttagcgttgtacctgtgtgaaggtgatggaacaatggaactcagtatcaaagtctgcaactttttcacggatcgaatgaaaaaagtttacgaaaatctataaacctgattttgttatcagtacggagacggatccaattagggatcggtctgttctgtctcatcttcttccctagcttctttttgatcatgaacgacttgtgcgacggctaatatcagagaccatgaaatcgatcaggcgaaggaaatatttaagagagatagaacaaaggatacagagagggagagagtaaaagtaccatcttgacttcaacggtggcgatccggcggaacacggcagcgtttaaaccctaatcttctcaaatgttaactgaggaagaaatcgatttttataagggttgtggactagagctcaatcctgaccgttggagttttctcataatttattagccgtcagataggtaaaccgttaatttaggaatcgtattcggttccggttacctttaaccggaaaagaaaaaaatatagagatttagggtttcattttcttctctctctcttgtctctgctggtcggctgctgaaacaagttgtaattgtggtgcatttgttcttcagcgcagccgagaagattcgaaaccggagctaagctatg

SEQ ID NO: 9127 - DNA, 3000 bp, Unknown
  misc_feature (1)..( 3000): cDNA_ID_2180622_gDNA_ID_1972003_Annot_ID_177781 3000 nt of promoter + ATG
taatctcatcttaacgggtgaagtatgtttggtgcatttcatctacacatatctttatctaagaaaaaaggtcatataactggtcaaccagtttattctgaaggttacatgctatttatagtctttcgaagtgtatatctctttaatctatcattcatttcacagtttaacattttaaccacgctgtttattactttgatgcaatcatgaaaccatctatatacacaatatcatccaagaatcgttataagatttattcgcagaaatgagtgtcaattagtaataatcatatatgtgtttatcaacttgacactcaaaagtttttccccaaaaatggtggctcatctctaactatgtacccacacatactctcgtttctaaaacagtgattagttaatctttggtaatgataacaaaattgtttaaacacaagcaaccaagagattgcatgaagtttacataatacatttgcagtaagcttaaataaggttatgctagctataatctgttgttactcacaaattgttattagtgcataaaattgaaaaacgacccaagaattcaaaccatcaaatcatacataaaggtaacgcgcttgaaattgattatggtacaatatttgaaagcaaaacctaatacccatgtgtaatagtatattcctcggtacttccaaggtcaaatcaattaattttgtttttttatatgaatagcaaacaatatacttgttatgaaaaaataaatagataagaagtcacaaaccccacctggttcacagcacattgtggaacaaagcacgtgatatgcccacaagctttttgtgattagtacatctaaggacataaaccctcaaatcaaccaagacaaaatactaaaagacgacgacgactttattccatatatataataattttcttcctcattttatatgccagattccttaatgttgaatgattcacatgcaaaaagttattacatcatcttaagcactttatttaatacattaagcaaccgactaattgtttttaataatcagaaagtaatgaactttttgatctaatcgtttcttcagtttgataaccaacttgtggttttgtccacaacacttaaaacatcatccactaaataaatcactctactattcgattagggatctaagagcgctgaaatatcacaatctttaactggttaaagtaattatgcatgcctggctataaattcattattgttatattgatttgacgcatactcttaacaacaggaaagagatgtatgagtaaaaagaaccttgcacaataatgtcttagtagccatctaattatagaaataggttcctttcatgatatttattggtgtttaatcgaaagaatcaaacaaatgaagttggcttattttttaatatgagatcggatacagtttccaataccaaattcatgtatgtatatataaagtagaagatgtagtctatataagctgtgtcgacatctagaatcgattcttacttaatataatgttgaataacctataattcatcttcacctagtggacatagttacaaacacacattaatacacgacacattatccaaaactttgaatgtggttttttaatagccactctttaataaactataatttatgacaaaccatatttagtgtttgtggatattcacaaaaatgtggtccttcgtatatgcagaaacttgaatccatattttgctttaactgtttaacttgcatttgcatatgcatgcattattatgcatcagtctctcgctaaactattgaagtctatgaatcaaagtacccaaaattaattattttcaataactaaataatattgacaaatttaaaataataatatcctagtttgaaagacccaccaatctcagaccatgcaagctttcttccagttcaccaatccactttcccccctaataatttattttgattttatgttgccattagaatacaaattttatttattatctcttattatcctttaagataaatatatgtattatcaaatgctgtgtgttcctgacaaactccacatgcacatgtaaaagaggcaccaagacttataaagacccaccaacattattttgttcacatggatgtgtaaggctaacttagctaattatcaaaactcatagataaatatttttttttttgctaaaatagataaaacttctaagagaaaaaaagagagagtcatatttggagagaaaaaaaatatgtattataaaatgtatcaatttctcattcattgacaatttgagataaatcaatgaatagataaacatgcctaacatttcttataatagatccaaaatataaccaattttttccgaatttcaaaaagcatttaattttgttttctctaaataagttgccttgtgctgtcatgtgcgtaactatcatcttaggagatgaaacagattcctcattatttggcgagcagaatttttcagagctctgacataattaaagaatatataagattactagtgtatataatactaaaatacataaaatctcatacatgtataaactttatatgttaacacatgtacatgcattacattatatatgcttcaaacttcaaagcctcctttgacagttgtatctttgcctttaaagatagaaacctctctctctcaaagaccaaaaacaaaaaaaaaactttttttttttcccccttctcttctttcttcttcaaggtagcctccaagccaaacacggaggaacctaatctgttgtctgctcgtaacttcacaagaagctataatttgtcgttaatgttggcttcttcttgtccatttcttcttttcttcttcctctgaaacacaagaaaaacatctttaacccctgagcagagtaaaaagacgaagaaactggtaactccaaaaaacagagtatatatatgaagagaaacttgagtttgtgaaagtttttttagttatcttgtttttgagataagagttaagtagaggaagaagat

SEQ ID NO: 9128 - DNA, 3000 bp, Unknown
  misc_feature (1)..( 3000): cDNA_ID_1398573_gDNA_ID_1972003_Annot_ID_177779 3000 nt of promoter + ATG
ttaatattagatggttaactagatccccttgaaaatggctaccacttctttgttctctatctccatgttgggaagtaaaagatattcagtataaacttttgaaatagtgtgtagcatcaagttaagaaacattactagcaaaaaataatgtataggaaaagtctccgcatatgtttcagggacaaaaaaaagattcaaagatcaaaaaaaccctgcagccaaatacacagagaaaaagctttaaggaagacaaaagattcgttatagaattgagcttctctggggatgaaacggtttttcttgatagctttttcaacgaacactcaagccttgaatagctgcagcagatgatgatgatgcctgagaaccttcctccgttaccttattcgattcgatggtagttatgatacttgaaatgttgtcctacacaaccacacataagaatcagattcaggagatgttttgtaataaaattctgtaataagtgaaagcttttgtagttaccttccaagtcgcaagctttgttcggagagattgccattgctttgtcccaaattcacgttcggaagagcggctgtaagatatgaatcaaaccatcaaataatgaatgttgcgtttagataagtgcagagtttcaatagatgtgtgacttgcctgacaattaaaacttggttcatctgatccatcttacactcaatcagttttgcagttattgccttcacgatccataactcgacatcctgttcatttacctgaaaacgaaaagaaaaatgagaaactaaaagggtctcaatatttcatgttaagtgcaagcagaggagagtttttacctgaagagtgtctttaatcgaggtgtaaggtattttgccagattcatctgaggccaaatccactagtgacaacaacctcatcttcgtaacacaatcttcattggaaagtcctagaaacaccacaggattcatcaggagatcatatttcagcaaaaacagttagtgagttaacaatgtagtaccatagctttgcagaaatcccgaatttgcattttggaattccgtgtaggcatttaacctctgagtaagaaaaatcttcagaagttggtaaacaggtgcatatttagcatccttttccaattgtgctacggctggcaagtccaataaatcacactgcaagatttaagattgccatcgttgaaattccaatcaaatataaaagagcagtgtcaggacaagaaagacaaatccaattcacattatgatacctggaaaatactggaagctttgacaaattcgataactgcacgcacagcctcctccttggcttcatccaggacctgagcatcctcattggagaaagttgctaggtacttcgtcaagaacttaagggattcattcaccaagctggagtattaatagaaaaaaccatgaggctattgttatacccaaacggaaacaaaaaaagaaagagacagagaatgactgatgagcatagttataaagtataaattatgtttcaataccttttgttttctttcagcacattagcaatggcaagaaagagttccctctgatctttaatgtcaatattccactctttcagaaagttatcgatcttcttaaaagaagaaactatgtactcagtaaccttcccatcaacagctagtgtaagagctttcatgtatacttgaaatcgagcatacgggtggtcaaccaggttatagagattgaagaggctacacaaagattaagacaaaaaaaaaatgagaagtgtgataaatgagcaaagcattcagaaataagcagaaacgattcatacatcttcaaacgaagtgaagctttgtcactgggttgttgagcaaccttggaagctatagctttcaccatttcaaggacttgctcagggcttttcgcattcttgacaatgctgcaaatgatggtgtaggtacactcaagatctgaattaaaaaaagatgcaaatcactgagaattgaatactcgaaagacatacaaaataaacaggtataagtaagaataggaacacaaacctttctcagatatcttagaagataccaattcagctgaagtgaccattaacgaagacaattcaagccacttctctgctaccattgactcctcagcctccctacagagcctggtaatttctggctctgctgcctaaaatttgaaacgataactagttaagtacaggcaagccttgaaaacttaagaagtcgcttaatgaaactaatcttagatggttgaactaatcggatgcatcagaatcctcaaagattacaaactattctagtccagaaactatcaacaaacccttccataaccaatcagattcttcgaacgaaacaacatataccagatcaaatttcccatctcacttaagatagacattcttaaattcccactataaattcacaaccaaggtgtggaggttacctcgggaccagcatcggcccaggcgagctgggaagtgaatcggacaacagcgagaaagggattttcttcggaggtgggaacaatcgtcgtcatagcttagctccggtttcgaatcttctcggctgcgctgaagaacaaatgcaccacaattacaacttgtttcagcagccgaccagcagagacaagagagagagaagaaaatgaaaccctaaatctctatatttttttcttttccggttaaaggtaaccggaaccgaatacgattcctaaattaacggtttacctatctgacggctaataaattatgagaaaactccaacggtcaggattgagctctagtccacaacccttataaaaatcgatttcttcctcagttaacatttgagaagattagggtttaaacgctgccgtgttccgccggatcgccaccgttgaagtcaagatggtacttttactctctccctctctgtatcctttgttctatctctcttaaatatttccttcgcctgatcgatttcatggtctctgatattagccgtcgcacaagtcgttc

SEQ ID NO: 9129 - DNA, 3000 bp, Unknown
  misc_feature (1)..( 3000): cDNA_ID_3610136_gDNA_ID_1972003_Annot_ID_177784 3000 nt of promoter + ATG
ttattaattttattaaattgtacattgtcttttaaataaagtgatataagaatattagaagtggacgaaagcaatatatccttatgaatcgaaacaaaggagtaagagaaaaagaaagtgtgatgatgatcattttatcttaagacatcacatgggaacaaaggagaaatcggacaaacttagaatccattaagtcatgtctacttcaccgactccagaattttgttgtctcatgaacaaagattggggttttaatagcttttctatagtattttcacatccataataataattaatgatgtgaaggatatatatatcaacgacaataatatcctaaaaatcatgttaaaagttaaacacatttctccatatttgataaatagcaatcaatatcagcgtatataaatgagatgaagctaaagttagcaagacaaacaaaaacgtatgaattacgtgagcttacgtgaatattgcaaatagaacaccaaatcattaatttcggttgacgtggatattcaaataatgatctacacatatacagtaccgtgggtacgcatgccatttcgagacgtatacaattcagtttcttccacttgagtttcagatctttatcaaaattacaaacacgtttatatatatatacacatatagatagattgatagccacatttctgagattcgatagtcatatatacgactatatattaaatattccagaagatatattgacactttttctgaaagactaattaagaagaacgcgcaagtatgactatgcgttactaagaatatttaatttccattagaaaatgtgtaagtttatctgatatactagttaattagccaaatgattttaaaatttacgttaagaaaatttcgtaggttcaactttttagtgtgtaagttattaattgtgaattatacagctaggaacgtccgttatatgtaaacaaagtaactatatataaaatttaagacttagagtaagtatttattatgtgattgttatatatactcgctaaagagtactagatgaagagtgaagaggttgggcatctcgagagagaaactgaagaaaacagaagagaaagagagttattcactcgatggtccccctaattttcctatcactttttctctctcaatttaaccgtctcttgtattatccccaatagttacatttttaattactcttatcatttcaatacccaacaaagcagaaacagcccagcaaaattttcacttccagaaattataacatggttgaatacacaacactaattaactgcaatatgaatcataaataaatttattaagatttctatataaaaactgttgggcagcaaatgcatgcgtacgatatctatagaattggagtttagtgcaattgttggtatttctttctttggggaaagtgacacgttaaaatatgaaaaatgtaaaaatttgaacaagacttacaataactagaaaaatcagagatacaaaatttactactctatcagtctatctgttgtcttatacactacacctttattatgcactgttcctatcccaaacaccaatccctatgctcagtccatatggtagatactactagagatggtaacccaacacatatgtgttagatggccccataggcagtaagcaaaacattactttttacaaccatatctttgtttataaattttaaaagctatgtgaatttaatttagtattactatcctggatcacaatcttgggccaacaaaagaaatgtgtatgggccaactgtgatgaaagaaaagcccaatggatcaaagttcagatgctttctgtagctcttttgtagagaagtttttgtaagtttagttatagaagcaaaaataggtaaaccacaaaactgaagcccggttgactaaatccttaaatgtgatcatgtcacacagcaacttggctacatgttgtcgtgaagcaatgaataaagtggtacgtggtgtattctagaagcgaaacgtgtcactaatcttatcacctttttagggtaaaatagatttgaaacaaaacatttcttcaaacatacaaaaaaagaaagaaatagtacaagttggccactatgcgtgtcccacttctcgatctcctctttgattgtttgcgtctctttaggagatcctcccattcattcattctttcctctccaccttattattactattattctgctgcatgaatttcaaaaaattatgtaacaacaatttaccgaaatgaaattaccacaaaggattagaaactagcacattcttaataaccaatattgaactcttattagtattgttgttagaacttgaagttaattaggccacaagaaaaggcgcgtagaaatgtttagataaaaaaaatgtctaacgtatttctttggtttgccgtgtcgggggcccagtcaggctggatacacgtggcaataaagggactgtcgtagttgagcacgttgattattagacacgtgtcgagttgtatatgaacaaagtagcctacgtctacgccacttgatgcccttttccacgtggcgtggtgggtggtcgtctatcttttcctataaaaaatcataaatcaatattaaaatgttttcaagaagataatccgaataattccctatattttgtgtctgtcaacgagaaatcactatctattttcattgattatactaatgcaaattggtatattaactggaaattatgtctattttaagccaacttgtgtgaaaatatactaaagtaaagttttaaaatccgtactacatcgtcaactatgcttgtaatataattcaaaaacatgattttctttttttttccctgaaaaatataaaatatgcaaattgaagtactatagtttataatagtaagcatttggtgcttgttttaagacaaaattgtttcgtctctctcaagattgaaaatagaaagttaagccaaaaacgtttctcccttctctttcgaatttctctgactttgatatttggtt

SEQ ID NO: 9130 - DNA, 3000 bp, Unknown
  misc_feature (1)..( 3000): cDNA_ID_1567735_gDNA_ID_1972003_Annot_ID_177783 3000 nt of promoter + ATG
aattaataacttacacactaaaaagttgaacctacgaaattttcttaacgtaaattttaaaatcatttggctaattaactagtatatcagataaacttacacattttctaatggaaattaaatattcttagtaacgcatagtcatacttgcgcgttcttcttaattagtctttcagaaaaagtgtcaatatatcttctggaatatttaatatatagtcgtatatatgactatcgaatctcagaaatgtggctatcaatctatctatatgtgtatatatatataaacgtgtttgtaattttgataaagatctgaaactcaagtggaagaaactgaattgtatacgtctcgaaatggcatgcgtacccacggtactgtatatgtgtagatcattatttgaatatccacgtcaaccgaaattaatgatttggtgttctatttgcaatattcacgtaagctcacgtaattcatacgtttttgtttgtcttgctaactttagcttcatctcatttatatacgctgatattgattgctatttatcaaatatggagaaatgtgtttaacttttaacatgatttttaggatattattgtcgttgatatatatatccttcacatcattaattattattatggatgtgaaaatactatagaaaagctattaaaaccccaatctttgttcatgagacaacaaaattctggagtcggtgaagtagacatgacttaatggattctaagtttgtccgatttctcctttgttcccatgtgatgtcttaagataaaatgatcatcatcacactttctttttctcttactcctttgtttcgattcataaggatatattgctttcgtccacttctaatattcttatatcactttatttaaaagacaatgtacaatttaataaaattaataatttgatgaatgttattgattcatatagatatttaaaatgtatttgaaaaaggggtacaaatcttattgtgaatggataattaattaagttgcatacttcaaaagacaatcatgtggatacttttttattattagttttatggatttgaaattctgaaaaatactcgtctcaattattcttagaacattaagtttgacctaaaagaatggtttgactagtaatatgggaattatataggtgccccttttcacagatgatgcatccgaataacaaaatcatattacttcttatatcctaccgtccatattaattatattagattacacatttaaatataatatatacatcattagatctaatatagaaaatcttattaaaaaaaaatccttatataaagaaaaatcacaaggttaacacaaccttatcgataaataaagatgttaaaactgatttttatatatgaagcaaaagtaaattagggcttagtgatgtctagttaaagtacttgtgttttgaaaaggtaatgagtcatgactcaacaaggtacacaaggcgtgcatcgggtaaaccacaaccttttgtaattgtcgatataacagcatgccaatattcacatggaccatatactgtgtgtatattatatattaccatatatgtgagttacatttcatattgtagaaccaaggactaaatttaaacataatgtaccatattcttttaattagattattcataagatatccaatttaaaagatgagttaaaatgatcaagaaaacgctacgctgaactctaaagtctaatctttatcatttatagaagtgttatgaaacaaatcaatacctggttaataattgatgtagtttcatttttttttttaagaaaagaaagtgatgaagtgtttaactagtcataatattatagatccaacttcatttcaatatatcacgagtgcattggcggctgcaaaacatatttttgaaaagagcaaaaaaaaaaatcaaggatcataaataatataggtcttggctttttaattctaccaatagatttacagtggacaattaaagaaaaaaaatcacgaaattatcatggtttggctaattgagataaaattcatacgttttccatcaataatcgtacatcatccatttcacaacaataattattcctaaaatgtcgttattttcataacattggttagatgttctaataagctactattatatataacttcacgtcaatgtatgtttgattttggcatctaaaatttctgtaaaatttagatattcgcgtatactttttttgggattttcttcttagccgtattataactgcaactcatatcacatacgtggatgataaaatattcgagtttaatatctcctccgtatgtagatttgatatgatccataatattaaagatgaaaatgaacttgactgattattcagcgcattcattttattttcccttcgaggatagcgaaatccgccacgtggcattactacatccattgctttttttaacataaatacttaagtcgcaattcttctaaattttggaggcttatgatattggtagggttctcatattcacttccaaaagcatcttcttctttctaattttctttttctttttatcttattttcattttattcatatactttttgaaaagaaaagtcgaatcacatactttcttctctctatttctcattctctcttcttcatcatattactcattttatagaacagcaaaaccctagatttcctgttcaagctcaagaccgtacaaaactttggaactcatgtaagaaacagtacacgtttttttttttgtttcttcttcagtccggattataagaattttgtcgattgaagaaaacaggctaaattaaaccctaattttctctcttagacaattcctactttctctccatttttctggattcgctctcgttttaaaaggattcagaaattaactatattatttgaattcttttgccataattcccttatgttttctgctaatggatatacatttggtcttctttctgtattagatataaagatctcgagaatagcattatg

SEQ ID NO: 9131 - DNA, 3000 bp, Unknown
  misc_feature (1)..( 3000): cDNA_ID_2180614_gDNA_ID_1972003_Annot_ID_177777 3000 nt of promoter + ATG
tgagcgtttttaacaaacaaaaaaagtcgttcgtgagaattaaaagatggggggatacaaaaaccgaacaataattgaatactttttgaccggagtgtaacatcaataaaggtgttaattagagaatgtaattaggctttttactaacgggaataataaattaaaaactgtcctcgatctactttactatgtatggaaggaacattcgcatgtggcattgtgggaagctgaatctcaaaacttattttaagttttgacattccttacacttatgaatatactatacgattttttttttatcatcaatatacggattagtacattgatgataaaagaaaccacggatgataactattaataattattttattatatgatgaaaatgattatgcatttcacgaaatttcactaaaaaacaattattatgaacaaattcattttgtttatctaataacaataaaaatcattggactttgattttatacgtcgtgggaaggtcgtcgaagcacgttgcgtttgatcattgcatgcatcgtgaaaattccactaaacatcgtcttttaaaaaaagaaacctttaaaacattacaaatggaacgtgaacctataaaatatgataggtagatctcacactttatttacagtattaaacaatatggaacattgacgttaaattattattttctacttataacaatttacacctcccaaaatttggaaaggataaacccaacaaggcaacaagtatcacaaatgtagctgaaatagatgggcttttaaagtttatggattgggccgtcatgaacacatattccataacataacctaattgggtgctccgacttcttttcgcgccgctcgcttgtacatgtcctcttcttcgacttccagataaaatcgcttcctctgtttttttccgatctaaattcacagctcatcgaaaatgggctcacggcaaggaccaccgaagcatcagaacaaattcgcctgggttcccaaagccggcgtcaagatcaacgaaacggtaagctatttgctcggctatgagattaacgaaattgagtgagtactgtagctagacccttgattttttcggaaatttatgaattgttaggaagtcggcgggagatttagaccattatccgagattaccggagtttgctaccgatgtcgagagcagatcgcctggaaacgcaaatacggcaaatacaaaaccctaactgaagccaccaaatggtatcgtttgatttgaatttagagtcttctttgtcattctctgttggattttgaaattgatttgttttgttgtgtgggtttttttttcttaaaagagcaacctttttgtttgtgggtgcagtcagaagtgtacaaagcgaaatgttcgtcaagcataccataagttatgccctggttagtgttttctttctttgcttttgttctcgtactttcttggctaattagagtgtatagatcagtatcttgttttataagttgatgtgttatggtattgaaatgggtatgaaactgataacaggttgtgccaaggagcaaaaggtgtgtgcaaagtgttgtcaaagtgttgatcaaatccttggaaggtacttgtaccttgaagacagtctttcttctacttatgctagatgctggtttccttaagagtgggtttagtagacaagatattaaactaatcttgaggtaattattcgtttctcgcagagatatttacgaagtagaggctgaacagaagctgcttgatgaggtttgtcttttaattattccgcttttggcttctaatgttcaatttcatgcttgtttttgggaggttgttgctgatttcttattgatgtgatgcagactatcaagaatgctagggaaagagatcgaaggaccctattacgtgctgtaagcttctctagttactttgaagagtttttgagatttgtaaatgtgtatgtttgtgtgatttggtcctgaagttgcgtatttgcttgacatagatgaacaaagataacaaaccaaataaatcagatgaagaagcgtcaaggagtgatagcagcaaggttggtgatgtgtttccctcaacttcccttgaagaatatgcaaacaagtccggaagagttagcgggattattggtcatggtagtgtgcctgatcatgcccatgatgatgctagtggacctgaatcagatgaggatgacaatgttggtgatgatgagcatgatttgcgcgaagacagtgatgaaaatgagcaatctcaactgcagaaataaactcatgtttggttgtactactgtcaatttggtaggattgtgagattttgcaagactgtttattcctgttgttttgataaaacttttacttggtcacctgcaatgcaagactagcaaagaatactataaattttgttctgttttcttgtatgggacgggcttaaacgggcctaacagtcgttctttatcggcccactttaacaacacctaattgtctagtctagtagtagtattctctagagactttcaaaaagtctttggattactaaatagtaaatgcgaatataagtaaactataaatgtgaataagaatgtttgaaattgaaaaaaagaattgctagctaagtgcattaatgcttgtgcattaagtcaaattataacacttggcacgaaaaaacccatctcatcccccactaaagcagccttcttttggctttcattaatctctctgcacacaaaaacccaaaaagctggatgtctccattttcaatgaacaattatgagttctttttttaaaaactcattatactttgaagattaatcacaaagatttcgaagctaattcgtcatttcttgttactataatcttttcattgttattaatcactttggcttaagtttctgtatattacgtcgagcttcttcagtcttcatccttgtcttgtcacttgtcagagacagaagattaaagaagaagaggcgtttctctctctttttttgcttcagaaaaa

SEQ ID NO: 9132 - DNA, 3000 bp, Unknown
  misc_feature (1)..( 3000): cDNA_ID_3044670_gDNA_ID_1972003_Annot_ID_177775 3000 nt of promoter + ATG
ttgttatctttgttcatctatgtcaagcaaatacgcaacttcaggaccaaatcacacaaacatacacatttacaaatctcaaaaactcttcaaagtaactagagaagcttacagcacgtaatagggtccttcgatctctttccctagcattcttgatagtctgcatcacatcaataagaaatcagcaacaacctcccaaaaacaagcatgaaattgaacattagaagccaaaagcggaataattaaaagacaaacctcatcaagcagcttctgttcagcctctacttcgtaaatatctctgcgagaaacgaataattacctcaagattagtttaatatcttgtctactaaacccactcttaaggaaaccagcatctagcataagtagaagaaagactgtcttcaaggtacaagtaccttccaaggatttgatcaacactttgacaacactttgcacacaccttttgctccttggcacaacctgttatcagtttcatacccatttcaataccataacacatcaacttataaaacaagatactgatctatacactctaattagccaagaaagtacgagaacaaaagcaaagaaagaaaacactaaccagggcataacttatggtatgcttgacgaacatttcgctttgtacacttctgactgcacccacaaacaaaaaggttgctcttttaagaaaaaaaaacccacacaacaaaacaaatcaatttcaaaatccaacagagaatgacaaagaagactctaaattcaaatcaaacgataccatttggtggcttcagttagggttttgtatttgccgtatttgcgtttccaggcgatctgctctcgacatcggtagcaaactccggtaatctcggataatggtctaaatctcccgccgacttcctaacaattcataaatttccgaaaaaatcaagggtctagctacagtactcactcaatttcgttaatctcatagccgagcaaatagcttaccgtttcgttgatcttgacgccggctttgggaacccaggcgaatttgttctgatgcttcggtggtccttgccgtgagcccattttcgatgagctgtgaatttagatcggaaaaaaacagaggaagcgattttatctggaagtcgaagaagaggacatgtacaagcgagcggcgcgaaaagaagtcggagcacccaattaggttatgttatggaatatgtgttcatgacggcccaatccataaactttaaaagcccatctatttcagctacatttgtgatacttgttgccttgttgggtttatcctttccaaattttgggaggtgtaaattgttataagtagaaaataataatttaacgtcaatgttccatattgtttaatactgtaaataaagtgtgagatctacctatcatattttataggttcacgttccatttgtaatgttttaaaggtttctttttttaaaagacgatgtttagtggaattttcacgatgcatgcaatgatcaaacgcaacgtgcttcgacgaccttcccacgacgtataaaatcaaagtccaatgatttttattgttattagataaacaaaatgaatttgttcataataattgttttttagtgaaatttcgtgaaatgcataatcattttcatcatataataaaataattattaatagttatcatccgtggtttcttttatcatcaatgtactaatccgtatattgatgataaaaaaaaaatcgtatagtatattcataagtgtaaggaatgtcaaaacttaaaataagttttgagattcagcttcccacaatgccacatgcgaatgttccttccatacatagtaaagtagatcgaggacagtttttaatttattattcccgttagtaaaaagcctaattacattctctaattaacacctttattgatgttacactccggtcaaaaagtattcaattattgttcggtttttgtatccccccatcttttaattctcacgaacgactttttttgtttgttaaaaacgctcacacacgaattgaggtacattgatggtaatgtaactaatttaagtaagaaacaatggtaagcagaaatgaattaaattgctagctgaaagatctatccttcgcaaggttatgtagaccggccaaaaaaaaagaggttagctagacctactattctaaactgttcaatttcctctaagtctaaaactgattataagtataacaaaaaaaaaaaaacctaaacgaacaagaaacaaaactttttaacttattaaaaagccttaaatcaaaacaaaattcacaattatataattaataataaatgatcaaaactgaggttttgtgatttttgttggtcagaaatttaatattgaccactaaaatttgagaaacaaatttattttgaatcttttgaccttttaattaaccaaaataagttagtttctaaaattcaaatgtcttgacaacaattttatttttctgttgacaacaagttataaaaccaaaagtgtaactgaaatatataaatccatattagttcgtaggtatatctgataatttaatttaataactaaacaagaatatcaaaaagtatggatattcttcaaaagtatctgtttaaaaagattgacaattattttattttatttgtggtgataaatatctaaaatataatctctagacaatattataagcttctatttttatgggaaattaattaacaaatgttttctaaaccaataagacaaattattaatagcctagaaaacggacaattaagagacaaaatagtaaagtcttcacttcctcaccataacaaggttaaaaattcttttgacctggtgaacgacttataatccaccacgtgtcaaaactcacacaaagccctctcacgtgccaactaatataaaagccaaagcgacggtcttcagagtctcccatcacctccgatctcaaatctcacaatcttttctctccaaattctcttctctctgaatcaatccaatcatg

SEQ ID NO: 9133 - DNA, 3000 bp, Unknown
  misc_feature (1)..( 3000): cDNA_ID_2105710_gDNA_ID_1972003_Annot_ID_177772 3000 nt of promoter + ATG
aaatgtgaagattttgcattttgattttttttaaaaaacttctaactaaagtgtggagtaattaattttgttacatttacgtgccattgttaattcttagtggatacgtgtcttctgaaacgaactatcattgaactaaatcttgatttgcaatccaagttgggtggtacatttaattggatcccctctcgcgttacgcccacctcagtcccaacacatttacgttcacacaaacccactatttatttactatcaatctacgtactgagacctaaatgatcacacttaaaacaatggggagttaaaaacaaacaaacaaatagaaactttttcaatggttaaactcgtcgcgtttgaattaattttctttgtgtttttgattttttaaatagaattttgatgtcgtggactagaaaatgtcgaaatcgtatattactattatagaccctctttaaatttgtcccaaaaaaaagaaagaccctttttcaaaatatatagttttcaaataaaaatcatttcatacattacaattctgtatatgatgagacttaaaaacattaatttcgctgtcgagggccttgcatattaagagcccttttctagacctataaccacaaactaatcaatcataaatacgttatcactcacgaaacaaaacaaataaagaatcgttttcagtcgacaacataaacttttaattcaatttgtacttatggtttttagaaattaatgtgtgtttctggttgtattttcttttgatttctaaaataatttcctaactttgtacatgatgattatacattagcaatctacatatgtatgtcagtatgtgtctatatacttatatgcacacacatgtgacatttctcaaaattgtaacttgagaagatagtaaaatacaaacaaaccaagcaactcgccaggtcacgggcctttgtctttttatcctcttttggtgaattttctcaattctcatattaactatgtaacttctgtttctgtgttttttgtccacaaaatctgctattggtaaagcatatagtataacgtatagttcacgtgaaggaaaactatttaggtataaaaatctttggatttgatggattcttatccatatatatatatatatgaatgaaaggatttggccatccaggtaataagttgtatatttatttgtcttcctcataaataaatctaagttttaaaaactaaaaatgaaactgatatgctacaaatgtatactctgatatgctaaaatgaattctaatttagtttattgttgacatttatacgatgcttcaaacgaaactaaggtaccgaattctatttaattatctttgttcttctactcatagaaaacatattattactttcatattttcctttgctttcatttttttcatattattacttacaattattatattttagaatatagtaagaaaacaatacatagttagataccatggacctacctattttgtaatttgttgaaaaatctatatgtccatgggtatcaacaagagagatccataaaactagaaaatgcctctttgtattcgttttatgtatgtttattgctaaattagtgggttcagcatattcgttccttatatataatacgaacaacaaaatatcacagtagtatatatttcaactaacaaacaaatgtatgaagtatgtttactaattccataatcactgatcaatataaaaaatgatatacctaagaatatttaaatcagtaatttttatttttttcttctgtttatgcgtttaatttaagtttggcattgagttacttcatcggttcaatttagtgacaaaaattgtttgagaaaaggacctatatatcgatgtggtttagctataacggaaattatatactatgatacttaacttcttataaaatactaaaatacaaaaattggatttggtaattagaatataattaataaacgatgtggtcaaacaaacttcaaaggttgactcttttcaatcctatgtaactttgtgaagaaaaacataagagtttggtatttgattaagataaagttactatacgtatataaaaaaacatcttttaaaataatatttgtgatgaatttaagtattttgattatactcctcatcattaatctttaagacttagttcaaatcggtgtagtatttgtttttgaattttgatgaatcaaatcaatgtaattggcaaaaacgaatccgtgttatattttaaagatattgttcccttaagagatattttattttgatcagtatatataaaaagatgaagcaaatataacaatgggttccaatttccaactgtctttacacagaaaaggttaacaaaaacggtcagaaaaaaaaagactaccgacaaaaaaaaagacagttcatttttttgttatattgatctttcgattatcttttgcacattcttgtcctgatcttcttcttctttcttcccagtttctctcttcgagcttccggaatctttggtgatcaccgaccggatctggacgaagaatctcgttaacaaactcaacaagcattctccaaagcttcctcctttttcttcaacgatcgtcattgcattgtaatttggagagtttagctacaaagtctgtcttcatcgaattaagatctatctgatttttctgggtggttctcatgtgtgagatttttgatgggtttagagttgtcggatatggaaggttcttcttatctttgatttgttttatatattaagcggcagaatttgaggttgacttgagcgagaatctggattctttcgaggagtatttaatgttcctgagaattccctgtttttgcgtcaagttttcatttttctgagtgttaataaatttagaatcattagtgcagcagatagagagagagtgtgtaaatctgaggaagactctctgtggatttgattcgtctttgtgagtcaggaatctgtttgatgaaattcccctgtggagagttttaggattttagaaa

SEQ ID NO: 9134 - DNA, 3000 bp, Unknown
  misc_feature (1)..( 3000): cDNA_ID_2180580_gDNA_ID_1972003_Annot_ID_177764 3000 nt of promoter + ATG
aatccttttgaagtttttcactttcctgggaaattgcacaattaatgagtttctatatttatattaaaagttgaaaatttaaagccttgtctctctttcgtcggttaatttgtttcatctgatcgaaaaggaatcagtttaggtctttgcctcctctctccggccagctcaattctcgatcaaaggtttactctttctttttaatttttcgattatttgaaaaattactagaaatatgttttcatcaataacgatcctgatcgttatttgatctcacaagtttgttttctgatcaaattttactgtttttttgtttgtcggttgatacactctgtttttctcagttctttggattaatgcaaatggggtttttcacttttcggtgtctcttatctcaattgagtttgtctgtttctctgttgaagcaaagtttttatctttttcttctttttgtgtggttatatatgtggttgtcggaaatttacctaatttagggttttttcctgtgtaagtgcttgcatttcactttaacaaaacctcaagttagagttgtgagtgttcagagttcagatcgattgaaactctcagttgctactcaacagaaattggacttttggtttgttgagatgtattgtttgaagttgctttgttccactagtgtaaaataacattctcttctctgcatctttagacttatcaaggaatcaaacccattttatcattgcaggtgacgtggatatatgaagcagatgttttggggaaccagagttctgtaaatagaaaccttcacgcgacgttgaaaggtttttgagacgaatataggaggagaagatgggatgtgtttcttcttgcttccgggtcgaggacattgatgagtacatgaatccaaacagctctgtctataggaactgtccctgcataagatgccttgctcataatttccttaacctggtaactgcttgcttcacattgctatttcagtttatgcttcttatggttagatatctcgaaagttttcatgtttctatagttacaatttctagttcttgtcacagttatttactttgatctgtaatctgattttttgagcccatattaatcgttgcagtatatttcggtcttcagaagaggggaaactcgctctctcccatcttcggttcaagctactgcatcgataacttcctcttcttcacacgataactttttgtctgaagcattccgttctactccaagacctctgccttatgatgctgatcctagatacttccgctcactcgtctcaagacgggagaagggttcaagtcattctcatgaggaagttgaacctttaagaagcgatagcgatgcagattctgaatctttcggggtaggagggtgcaaatgggctaataataagtccaccctctctgataaagattccaaagaagagtactctagtaaatccagtctcaggattttgagatcaaggtccaagtcaataatggccgactctgaaaacatgtatatattgtctgaagacgaagatgtctgcccaacttgtcttgaaggtaataataatcccattcaacagtctcctttttgttccttcagtattcatatcttgttggttttttgcagaatatacatcagagaacccaaagattgtgacaaaatgttcacaccatttccaccttagttgcatttatgagtggatggagagaagtgaaaactgtccagtctgcggaaaggtaaccactttttttttctgcattcttagaacgaagtgcgtataaaactcccgtcaaagcaaaaggccatatgcttttcgaaattgcacggtctagatgatgaaaagctctaatattttcctggaattcataacaatattgttgttctgattcattctgatttttaaaaagctccattttcaaatttcatcatgctctttccatggcttcttctggttttatctgcctgagactcagatggtagaacaagtgaaagcatatgtgcgtacaagtttcccgataaagaaataatcttttcttggaatcctaacagttgtgttgttctgattcattcggatttttaaaaagctcccatttttgatccattgttcatgtatgcaggtgatggaattcaacgaaacaccgtgatcatcgaccattgatccgtgtcctgtatctgaactgaaaccggggaagatgacaaggcaatgcaaggaatataatttgtaaatttggctttgttggtttgtgaatattttcatttacaatggtaaatatatgaagcagaaaaggagaaactgttactctgcaacagtttaagttcctgagaaaatttaacttccatgaaacaagaagcaatgtttcttctttaagtgactttttctcatgaaatgcctctgttgttgtattctctagtcagtcatcaaaactcttacatcattgtcgttatataaataaatttttctttttttatgtgttcaatctaaggaactgatgcagtgataaaagtcttatgaagtgggggaaaagagaaaagaaaacataatttagggactgttttgtaatattttataaagtaaaggtcttccgatgttaatatcagaaatgtctctccggagtcggtcccggagctctcggagcaaatgaatgaacgagactcattgcttctctctttccctccgtttcttacacattaactactccaaaaaccgaacaaagaccttcagaatttgcgattcatccaatttcaacattgatttgtgaggtacggtttcagattctttctccttttttttttggttaattgtgattctcgtgcatatgcgtgtggtgtcatctttagttatgtaattcgcgattagctctaagatgggtattgaaaaacttgcctgattcgtgatcgcttctgctcatttctgtaaaagtcagagttttgttcataaagtttgggtctttaagaagaataacaattttgtgcatgttttcttctttaaaaggggaatttctaaaaatg

SEQ ID NO: 9135 - DNA, 3000 bp, Unknown
  misc_feature (1)..( 3000): cDNA_ID_2180594_gDNA_ID_1972003_Annot_ID_177768 3000 nt of promoter + ATG
gagaagaacagactgctagggctttttcttatagttttcgttttttttttttttttttttccatctcttttagttttcgtttgggacatttaatgtctataattaataacaaacgattgggccttaaatttagctcaggcctggaataagcccatatagtcctcgtttttatgtcactctcaaaacctcgaaagtggtttctatctatcacttgggcttttattacttgttaaaacaaatttgatccaaatctcaaatggaaccgacaaaatagaaaatccggttctctcaaaaggccaaacacgtgacgtttaggaacaaaaaagacgttatcactgcaagaagttttgactttgagaaagtctttgaataatcaaaacagagtttttcaaatttcccaagtctgaaatggtactcgcaccctgcagacattttcgatcaaaattttcagagagtgagagagagagaagggagatcagataatggcttctcgtaagaaacgtgctgcgaagatttcagaggattcagaggaggaacagagtcgccgtcaacggttacaagccattcttctcgctgacagtttcgccacgaaactccttcccttaaccttagaacgccccaatgtcttgttaccgctagtgaatattcccatgattgattacaccttagcttggctcgaatctgctggcatagaagaagttttcgtcttttgctcgatgcaagtcatcgattatctgaacaactctgactggtactcgcacaaagactttacggtaaaaactatagagtcaccgcaaaactccaccagtgctggtgatgctttgcgttatatctacgagcagcagattgagacgtctcagattcaaggtgactttgttcttgttaatggatgtattgttagtaacatgcccctgacgcagctgattcaagaacacagagatagaaaaaagaaagatgagaaagctatcatgactatggttatcagacagtcactcatcaccgatcatcaactcttcatcgctgtaaatcctttaacaaaacagcttctttattacgatgaggacaacatctgcttcgataaatcattgctggatcgtaatccatctgttttgttatgtagtgatatgcaggattgttacattgacatatgttctcttgaggtgcttagtctatttgtggataacttcgattaccaacatatgcgttgtgattttgtggaaggtgttcttgctgatgacattatcggttacaagattttcactcatgagattagctcgtgttatgcttctaggattgaaaatttcaggagctatgacatggtgagcaaggatataatccagaggcggacattcccgtatgtaccggatatgaagttcagcggaaatcgcactcttaagctcgagagacaagggatctacaaggcttctgatgctactcagttaccatctgctcatgttggagcttcctatgtcattggacatgccacaaatattgggagtgggactaagatcttgaactctgttattgggaatggatgttctattggatcaaatgtggtgatccaaggctcatacatatggaacaatgttacggttgaagatggatgtgagataaggaatgctattgtatgtgatgaggtgaaagtgtgtgcaggagctattgtgaaacctggtgttgtgttgtcttttaaggttgtagtcgggagggactttgttgtacctgcatattcacaggtttcactactccgacaaccaatggaagaagacagtgatgaagaaaatcttttgtcaggtgtagatttgcaaatggagtctaagcttggtcttgatggagcaggttacatatggcgccaagcgtgtgaagacgagtggaagcattctgttccaccaatccccaaagataaacttgctgagatcattaaggccattgacgatgatgacacggatgatgaaagtgttgtcacaacttccggcgatgctaatactagtattaacaatgatctctttgactttgagagagaggttgatggcaccttcttaagggctgtcgaagagaatattgtagccgaccttgcggttttggagataaactcactccggttgtcatataacatggaatctgcacattgtgctggtgcaatattctactctatgatgaaactagcagttagtactccacatagctctattaatgacttgtatagaaacgcatcgagtatcattactcgatggaagggacttcttgggttctatgtaaagaaaagtgatgaacagatagaagtaatatcgagattggaagagatgtgtgaagaatctgctcatgagttgggaactttgtttgctcatattttacgttatatgtatgaggaagagaatgaccttttgcaagaagttgcaatcttgagatggtcggatgagaaagccggagctgatgaatctgacaaagtttatctgaaacaatgcgagccattcataacgtggctcaaggaaacatctgacgatgaagatggctaatgaattggtggtaaacatgtgttcgttggctcccaaaaggaacattctgattgattatttgcatcgaagagattactttgtctttttttccatgtgttattctaatgatgtgctattttatatctcatccattacatgtatgaggtatataaatacaacttttatgtttttgtaaatgtattataggaagcttattacagtatttcccaaaaaaaaacaattatagttatctaacgaattagagaaatttaactaagtgaaaaataataaaggaatgatctaaatattaatttttgggctgattttgaaagaaaagaataaggaaatgaaaacgaagaagaaggaacatcgtcttctccacagagtcctctttcaccgcctttgattctttacttataaacccttaccttcctcttccttttgtatatacctatttctctagaaacctttttcctcatcgaactcttcttctttcgcctcgccagaa

SEQ ID NO: 9136 - DNA, 3000 bp, Unknown
  misc_feature (1)..( 3000): cDNA_ID_3044676_gDNA_ID_1972003_Annot_ID_177766 3000 nt of promoter + ATG
tgctcgtagatataacgcaaagcatcaccagcactggtggagttttgcggtgactctatagtttttaccgtaaagtctttgtgcgagtaccagtcagagttgttcagataatcgatgacttgcatcgagcaaaagacgaaaacttcttctatgccagcagattcgagccaagctaaggtgtaatcaatcatgggaatattcactagcggtaacaagacattggggcgttctaaggttaagggaaggagtttcgtggcgaaactgtcagcgagaagaatggcttgtaaccgttgacggcgactctgttcctcctctgaatcctctgaaatcttcgcagcacgtttcttacgagaagccattatctgatctcccttctctctctctcactctctgaaaattttgatcgaaaatgtctgcagggtgcgagtaccatttcagacttgggaaatttgaaaaactctgttttgattattcaaagactttctcaaagtcaaaacttcttgcagtgataacgtcttttttgttcctaaacgtcacgtgtttggccttttgagagaaccggattttctattttgtcggttccatttgagatttggatcaaatttgttttaacaagtaataaaagcccaagtgatagatagaaaccactttcgaggttttgagagtgacataaaaacgaggactatatgggcttattccaggcctgagctaaatttaaggcccaatcgtttgttattaattatagacattaaatgtcccaaacgaaaactaaaagagatggaaaaaaaaaaaaaaaaaaaacgaaaactataagaaaaagccctagcagtctgttcttctcaactcaagtttgggcgaatccaccatgaaagtaatcttctacgcttttagtgttttttctaataagcttaacttttgttagagctcatctctaatttttatggtataaaccaattgttatgctattttttaaaaatattgtataatgttatagtatactcgataactatgtcataaaagtggcaaaaacttttctagtgaagaaaacatatcaactcactttgatttctttaggggctcagctaaatctagttttaatggttgcagaacaaaatgaaaataaaaattttagtatctcaaaatctagtttctattttttttttgtgacagtaatcaatgatttcaaaataaccaaaaacctcgtaataagattcaattgaatcttaaaactacacaactttcagaactaaagaatgacgaaaaacgaaataatagaggagaagtggaggagctactacacaactattttcatttttctaaccaatcagagcgcaccggactacgcccactcgcaccaacttcgcgtcacgcgctccggaccacgcccactcgcatcaacctcgcgttgagcgcgtgtcgtcgatttctgtaggggtaaacccacaaaatcatgcctattttacatctactcgctttgtttccaaaacagcctcgagtgactttttcttttgttttttttttctcaaaaccgtactattctaatacaaaccgaaccaaaattaattttcatttcacaaccatctaaaccaaacagaaatcacttgtaatttcaaaacctatgtacgccgaaccgaaatctattgtcatttcatcaaaaccatgtaaaaagcttcttcgattgttttaacatgcaactgaaaataacaatcctaatttatcaacagagaaatatagagataccaacgaaactatggggatgacaagttatcatcttatccacatctctgtccagtgtgagtttcacgatcgttgatttaataggtaacaaggaccagaagctgcggcagcaatgaaagctgatcttgtttcaaagccaccgccaagtcttttggttttgcataccgctttcacacattggaagaccaaggaacatgagacacatacttctgctgacctatataggaatcataagtaaccaccaatgttggcataagcagagagtatgaaaacttttgttactaatttaacataaaaacagtatgataacaaaatgaatacatgcgtaaactctgcttcttctaagacacatatatactaaaagttccccatttgaggctccatttaagaatgaaattgaacaattgaggttcaaattttcttacttgtcccacagatgtttccaccaatgcaaaccacttgagctgttcaataaaagccttgcaacacttgggatataatcggaaattagatgacaataaaacgaacctctgagatattcgacaaggtatttcttaacttgagtaaggtctgaaacgatttaactactctacctttgattttgagaagatgattacagttgtgattttggtggagacaaaaatgtccatctatgtatgttgctagccatcttttttcagatacttttgtcttattttcgagttacaagttacaaggcactatgctctgtaactaattttgcatgtcttccacttattgtgttgttgtgtcttttggtggattaagctaagagatcaacaagacaagaaaaaaccaacatttctgttctgatacgtggattgctggttaaatacggttatatagatgttggtttagtggtttaattcgtattgtatactttacaagtttgactttgtatttttcaaaaaaaaaaaaaaacctagcagtctgttcttctcaattaagtatgggcgaatccacagtgaaagtaatcttattctccttatggatttcttcttacgcacgactgtgaagtagaaagctcaccatctctcttagaagaagaagaacacactgtacattggttcaagatcaatttggcttggcagatgccctgttgttctggtacaaacatttggttctccactaagatttctcgatttaattcggttctgattttaacttgccaatttaaatcatcagaccgggatccggttgtgcagttattctttattcggacgggtggtggcagtggcggcgatg

SEQ ID NO: 9137 - DNA, 3000 bp, Unknown; identical to SEQ ID NO: 8994
  misc_feature (1)..( 3000): cDNA_ID_2993983_gDNA_ID_1972008_Annot_ID_177804 3000 nt of promoter + ATG

SEQ ID NO: 9138 - DNA, 3000 bp, Unknown
  misc_feature (1)..( 3000): cDNA_ID_2180561_gDNA_ID_1972008_Annot_ID_177815 3000 nt of promoter + ATG
ctgatgaagatgatgaggcggtgttagcattagagaaagagatgtggaataggttttacggagctggattttggcgaagtccgtcacagagagaatcagtttcgtctccgagagtttccaagtctctttcgtcatcgccgagacaatcgtttactgaagtataccggaatagggatacaacggttagaggaggaggaggaggagctacggtggtggcggcgacaccaagagccgttaggcattttgattagggtaaagaaagagagcttatgaaaaaaatgtctcaaaatgtcttttgttaatagtttcattcgtgtggcgagagttgttgtgtgtgtgagctcaaagtgtgtgtctgcgtttgtcaaatctttggtgtgtgactttatttgcctatggtatgggattttgtgatcatcaaatatgaaaattcgaaatggaattgtgttttgtcgaaatgtgacatgacatgagatctttgactatcaaagtctattgagggtttagtttggatgtttaatcactcataacacaaggtataattacattgttagattcgcaagaagaagaatagatcatgaggtaaataattagtgtgacatggtcatggatcagttaaaaagataaagataagattcaaagggtaaaaggagagtctagggtttaaaaaaacaagtggggagctgtccttttctttcaagggggtttggaacttgtagccttgtaggttgtgatgtaaactatgaggaccacaacaatcaatcagtacttggtcattagtgttaagcattaattcaggtgttgctaacaactactaccaccttcttcttctgcatctctctaatgactcttctttcctttttcatctctgtttttttttttgttaactttgacctgctttgttgtgtttcaattgtctttttactattactcactaattcagctttgatgtgaccctacttcatttatttcattatttggtgaatctcatgcaactgtttttttgtttcttttttcagatgtttgtaagaaaataaacgacttgtaattataatcgaatagtaaaatgtgtatttattttttcgacaaagagtgggcaaccaaatgttcctcaaccattgattgttgaaatataaatttttattattctaaatgaaatcgtgcgtcttgtatcgaaaggaaatgcttgaggattcaacttataacaagataacatttattaattaagaagattttggttgttattttgttcttaatataaaattcacgaggattgttttaaaatgtattatctttcggctctttcggcaacttttagttgattatacttggaccttacagtttcttgttattcaaagataacgaatatttaattcttgaatgagaggcaaaaggtcgtcaccagtatatacttctaactttaacaaaaatggcgtcaccgaaatgaatcttggatagcccatagatttttatatagcagtgcctagcatctctcgacacctcatttagcttccccttctcatgttcatttgatagttggcccatttcggcccaatattttacatgctgttcgtgagatgggtttatgcatgacttgtgtttcctaatttcagatcgttctagatgaccttctgggtatataaagtgtatgcgattttttgtttcttttcgaagaaaaaaacgagttaggcccgtagcaaaacaataagagaaatcgggcttaagataaaagacttcgaaaagatgggtttaaattcagttgggccttaaagcctgtcttcttatcaggcgggaacaatcagaatcgcataattgtgttacaattttccacaagtccacaaccattagccaaagacgctgtcctctggctcttttgatgtagttggacgtaagggcacgtgccaagttggagagcgtgagagtaacaggtaagtggaattgaggtgggacattacacgattcacgaacttagcgtagcaaccaaaaggtgtcccaataaataaataaatgatggttgtattaggtcatacaccgacagcttcaattcaagccacgtgttctcccttcttcttcggctgcttctctttgcttcacatgatgtctttcttttttatgtttggttacatatttcttcttaatttcactttcaatttaagtatcattaactatagaaaactgactaattaactactatcccatttttatcatctagtactcgccgattgccttagtccttcttatgttaagaattaaaagacttgaggaaaagttcaattaccatcactttcactactctaccgtattacaggcaaatatttaattatctagttccgaatattttcttttaactatgattcttatttatgattaattatgtccaaaatgtattcaagattcttttctgattatactatagtattcggaaattgatgtaacagttttgtatttgagtatcaaagaatattatgaccattggaattgttgcgcatgactatttaatatattacctaaatcacggatcaaaaatcaatagttattcactttgcataagtagaattccatctgaagagtttaatataagagcagagcttgtttgttctgaaatagtaatactttcatttattaaaaaaatagtttatcaataaaagacaaaaacaaactgctgtgtttattcaatgattataaataaaaaagattaagccgacgctgagccgagacttaaaaaagaaagccaaaaaagtcagagctaaaataattaaatgttattcagacaccgtgtagtccccaccaccagcctgtccgaaaacccaaacctgttttgatacacaaacaacacagaccacccccaaaactcacatctatctctatctctcttctctgtctctcactctccactttccgatcaccgacgattcaacaaaacatagtaaaaaacaaagcaaattctttttttctccttagttacttcttctacagattatctcaatcttacagagcacc

SEQ ID NO: 9139 - DNA, 2862 bp, Unknown
  misc_feature (1)..( 2862): cDNA_ID_3044701_gDNA_ID_1972008_Annot_ID_177816 3000 nt of promoter + ATG
cttcctttcttataaattgccttacgttttaaggtgttctcttctcacttcttccccatgattcatcttgactccacaaattcagggcaatctttgattctctttggtctttgatttgaggattaatttgttttctaaaggtgtctgctgattcaattgagtatggagaagaaacgagatgtttctgagtacagagagagacttaatgagaccttgtcgtctcctgagctcattaatgagcaaactcttaaaaccctagtcagaaaacaactcaatgaaggtttttcttgttgttgatttgctatatactctttaattttgcctttgctacaatgttttttttttatgttttcacagagtgtagtgttgatatattggatcaaagagtagctgctttatccagtacaattgagaagcttaggagtgtatcaacaaaggatcaagacttgtctaaatcaagcaccgaggcatcttatggtgattggaaagtatgtttctcttttggctctattggacagtttttgtgaaacagaattgtcataatgttagccaattagtgttttcttgtttataggtgaaacatgatgataaagattgtcgtgttatgtaccgtgaaggacttaaaggaagtccatttcatacattgctcgttgaaggttgcactgatgggactatcgaagactgtaagtttttctatagagtttgcaccgcaagaaaacagttttcgatttgtatctaactatgtttatacaggtttatgtgtatgctgggaatcatcattctatgagaaatggtgagagtttaatgttttgtttatggaattgtctattgtttgcgaaattttttggtctttttgtttgatgttttctatgtctttcaggtggccaaagttgacatttccgtcattcagggtcttagaagctaaatgcttgcaaaagtttaggattgatgaacagatatgtttactgaggtttgttttcacaaattgtaataatgtttgttcctacagttacattttcgtgaagctaatccaaagctgaaaactttgatcatattttttggggaggtagggtgaaagcaccgtggccactgacagacagagaagctgttctgcagtttttcgtattcgaatactttaaagatgatttagtcatcatcctacttaactcggtaaaaccatgttagctttgtttttttgcatcttaatccagttcttagtgatttgacagtatcctaaactcttatctattagtacatctttagatcgaagtggagagcggcagtgtagctgaagtgaatgcggtgaggattgacttcgtaggcggagttgcgatacaaaaagtgactccagagaagagttacataaggtgagtgttgagtgaatgagaacatgtttctataaccaaacatttcgaatgtctttggcgggttttttgaatcgctaaacttttgtagatttatagcggaagtggatataaagctggacttggttcctccatctcttattaattttatgtctaggcagcttcttggtaacggtttcaaacttttcaagaaggtcagttccagttttatttacttcacaaaaacttgatatgcctggttgctagcttgtgtgatgttgtggtgtttacttgaatgtttacagactattggttcggtggctgaatccgatgattacaagacagttttagctgatccattgtatactcatatacgtgaagctctgtattctagtgataaaactgatgaaatctgccaagtaaatgagcttcatagccaacaaggaagagattgtgaagagaaagaacccaagttggaagctgatgatgatatggaaaaagagaatgagactcgagactgcgagaatgaatctgtaccttgcaaaagagatgttcctgagatcgaggaagaagaatgtgttgatgatttaaaggaagaaaacaaaagttctccttcttcttcttcttcttcttcttcttcttctgaggatgaagacaagaatggcaaaacacgtttctgcataagtccggaggtgaagcaagctttagggacattagagagagtaatatcaatggttagaaaatccaaaacagataataataatacatcaacctcttcggaggaagaagaagaagaagcatcatcatctccaatgcagcattcagggagcactcagattgtttctagtagcaaagtttgtattcaagatcctaacactgaacttctcgatgaagcatcctttgcacattatcacaacagcaacaaaatagctcctgcatcacccgagatcgatcttacaacaaactctgaggtaacaaggataacagtctcgcaagcaacaaatcttttctgccaaacaacagagaatagtgacgacaattacaaaccgagcggtttaaacggaggtaagagctcaaatctgcagaggaaacgtaaaccgagctgctttggtttcaggttttggagaagaaggacttgaaattgtcattggtaaatccaaatattttgtctctttgaagttgcagatcattatatacaaggaaacatagtgttaagattttgagagcaagtgtttcaataaaaatgtaaccatagaaagaagatacaataaagttgtgtatgaataaaccgaaacttaatatggttaactcaaaacaaaccggttcggttcgtgagtaaaccgaataagccctaaatggctaatgggcttggacccgcgtaaaggggataataaaccctaagcaagtctcatcgtcgccgtctttctcatagacttaacatttcatatagagaaacttgaaacaacaatctgagcaaagagcgttttatcttgttgattttggaatctccattacgatg

SEQ ID NO: 9140 - DNA, 3000 bp, Unknown
  misc_feature (1)..( 3000): cDNA_ID_3044708_gDNA_ID_1972008_Annot_ID_177808 3000 nt of promoter + ATG
aaagccatagccaaatctattaaaacaatgaggaacgatagtgcttgtgtgaacgcacacattgacaactccaaaaaggccattaaaaacttaaagattgcactcaaatcttcttatccagagacatataaagatcttttggagatcattcccggagtcacaatggcatcaatcctgatcgaggtcgtgaattgcgtcgagaagatctacgaggctgtggaagaattctctggtcttgcacatttcaaagagactttggattcaaaactatcagcggagataggacaacatcaattactccacaggggatgtgtaaagccggttctagatggcgacaacgagaaagaagacaatagctcatgtcatgttcttatcactgtccatgatgaaggatatctaccgacggccaccgcgaagaacgttttgggagcagagaagactagagtagatattgtgtgaatatttttgttcattgcgaaacaattacacactctttcaagagaacattatttagtatataagagatatccgcattctacttagttattgccaattaatagaattataatcaaccattgataataatgtagttgatttcctacttataacattagatgtcatgtgttatgtgtagtgaatctagtgatatgataggataaatacatgcttaagttaagattgtccttagatataaaaaacaaattcaaagtttattaattggaggctttaatattcaacatctattatgtgttacaaggtccaaaatattacctttatcatatagtcttttgggcaaaacgagacaagatggaggtttggaattgtaaaatcgtagtctgtaagttggcactccaaaatgctcagacactctctcctaacaacaaacgtaagttagaataatgatcattctcttataaaaataatgtttttcaaaagaatcagctaaggtacctgaaatttaagatgttcttttctttttataatctatatcttttttaaaactaattacaagtagaaaatcaagtattaagtttagtaaacaatacaatctttttttgtactaaagatattagaaataaactctacaaaaaattaatacaaatttaccaaaaacaaataacactagagtcatatttcgatgtagtaaaaatatttaagttatatatatatatatattgataagtttatataattattaatttatgacatgagatcatatatttacataggattttgaaaaagttattatcttattatttgatcgatttatactatttttttatcgatttacactagtctcaactcgatatcagaagaatttattaatttattaaatttatgaaattatcgaggttttactgtacaaacataattgcgttggcgccttttttgaaggtgaaaggctagtggcaaaggtagttaaggagtataagggtcatatgacacccatagagagacataaagcgcttaagacttatataagctaaaatctacaaacacaaataatttatgtacctcttcatctcccccatattgttcatcgtaagctcttataacatcaacacttttgactactttgtcgtcgaatttgaacttgatagtgaaccttgaattagttagggctctttcttacttttttttctcttttgttaccaccgttaaaagtctctgttttttttttctttttaagattcgttaggattttgtttaattattaatgaattcttctagttcggctgaattgaaaataaattctgttatcagtgaggctgatttagagcgagcagatgagatttgaagtttaatatgagtagtatttgtgacctgagtgatgacttgctcatgaagatactgtcattggttagcacaaaagatgttgtagccacgagtcttttgtcaaaacggtggctttcggtgtggaaactggttccaaggcttgactatgtggtactccattgcatgagataggttcagcttttgtaaacgatttgctgctgctaagcaaggctccagttctagaaacaatgcatctcaggattggggataagtggatacaaacctgaagatcatgaaagatgaatattggctagacacgtgcgtgatcttgagcttattcattatctaatgaatttctctgtcagctcgaatatctagagccatgatttggattcaatttcatatacagggacgtttctcaagcttaccatttggattcaatttaatttgttaatttatcgtaagttgagcttgttaatttttatttttatttggtattctttgataaaaagctttaacgagagcgatcaaaggcaaatcactagaaactcttgagcaagagttcatgtcgaccgtgatattttgtatgatatatatatggtcaagatggtgaagacaaaggttctactattgtataatggtatcaaaatttgctaaatttctaacaatttcacaaggtctcgcgtggcgtccgttggttgttttggttaagtcggcctctattttgatccgttaatggaactcgttacggtctaattacgtccactgatatcactttccaatgtttttttttgttaaatgtcattgtcaataccatgccccgtaggaccagattcttcgattccagcatattcctaagttaaatccgacacaatcggataatctcgtcaaccactcacaacacgccacgtaatcaatgatgtggaacccatgccacgttggacacggtctcacgggacaaggcttcagtaaagagcgcctatcgtccgtccgacttgtttattttccacgtgttaatcttccagaataatcagaaagagaattaaaaaaataaaacaatccaaattaatctcagccgtcaatttctcttcttcttcttcccaaattctctcaacagatagagaaaaccttattagcagcactctcacgaaatcgtcgtgacgaaacgataaaccctaagtcatggtaaaggaaactctaattcctccgtcatctacgtcaatg

SEQ ID NO: 9141 - DNA, 3000 bp, Unknown
  misc_feature (1)..( 3000): cDNA_ID_2180545_gDNA_ID_1972008_Annot_ID_177811 3000 nt of promoter + ATG
aagaagaacatggcactgaatggagattggataaaatacgtaagacacagacgacaacaatcatacacgtgtccaagacagaaaaaatcatgttcaatcactgagccgattcattccccaggattccagacacgggtggatattatttggaatgcaaatttacagcctgatttattttggtatatctgttattattgtgttgatcataatagctaataaaaagaaattttcaattaattaaaaacatttgatagttaagatggttgattcggttgggtaaactagattcgatacatagttcgatatatacttgtgttaaataagtggcccataacgtgaatagaagtcacggactgggtcttaattcaggcctgtaacatgtttcggcccaatcattgcgctagacaaatattgctcaaccattttgctcggccatagtcgatttttttttctttttcttcttcacacatatttaattcattcacggttcttgagtttattataacagactatttattttggagtgtgtgtctcaagtttatgggtacaaaatgggtcggttctaggatttaaatgatctcaatgttaagtaatatacataagatattatttataaaaagacagacacgcaaattataacagttgcaaaagcatgtgtatgaaggtgggataagaactatattatcagaattaagaaaagtaaaaaaaaatagaaaaaaaaataataaaaaaacgaataaagttaagctaaattgtcatatagttgtgattttttattttatttttatatatagttgtgaattttgatgtcatattgctgaccagtcctacgttatgagaagatccaagttccggtcacattgatcttcttcgtttaggaattagtcacgcactacgttctattggaatttatcaccaacatattgtcttatatagtgaagaaagttaatcaacaagatttcagtgcaaaacttgtaaatcctaatgtgatcaatcgatatacaacttcaacaagaaatctccaatcactaacgttttaacatttggacaaaacaattaactcatattgatgtatcacctaaagacatcgaaatatttacttgttttggtaatagatttttaaattcaattctaattgttttggtttcttattactattacaattctaaagttttcagatttggtacataagaattagcgactcggtaacgataaggggtggtcgagactcgagaggttgcagcagctggtcataagcatgcagtgatgcagacatatcagagggaacactaataatcacaaatatttttttattcgagtagttattttgtgttctaacgaatcattgtcgatataatagaatatcttaagtagttatttgctatggattagcaagtaatgtacacaggttatacaagaatcaatctaaaactttttgaaaaacagagagtatatcattattaaatctagtgtgacacaaaattgttcctttgtagtgataagttatcttgtcatgtttaaagatgtgaaaatgaaaaaaaaacaagaatatgatatacgatgtacggattggtgcagaactcagaatgaaatctcgatcatacattcatgttatattcttggaattatgctttgggaataatgcttagatttggtgccaacaaaatgaaaaaaataagtggtgtgttttttttacaaattctaaagtagaaacataaaagaatggacgaaatgaccattgtttataaatagatcttgcacttaaattcatcttacaccttttaatattataaatcagtggttttctagagattgaatcatcatctaatcaatcttcgaattcttacacctctttccatggctaccatttctcaaatttacagatatcatgatcatagcatatataagttcagatcctttaagaaaaaaacccataagcatatataagcatatataactttagtctttttttgtcaaaaaaaaaaaaaaaaaaaaaaactttagtctttttttttttttttaaacgtacggtttagatacagaaatcatgtgtatcagtttcatgaaataaataaataaagaagtcaaaaatattttatttttgaatagttcactgtgaaccgtagaactaatcgtttttttgttcttaaagaaatttaatatgaaaatattttaaattaaatttacaagttttttttaaatgttaaatttatttttaaaaaatattaaaatttacaaaggtttgaagaaaaaatgggttaggtagagaagaaagctcaaaagtcaaaacaataatatacaagttcagaagttcttgctataacaattttattcacttatcagccacatgaataacattaacacattatctttatttatttatataattatcattatctaatcatcataatacacattgatttattttgttacataaagttgtctgaatattttctttttatcatacaaacattaactgctgtaaagttataggcaaacattctcaacctctgatttagatatatagcttctctgctgagttctagtgggttcgatcaacttggtccttttgttttatttttcttcaacttttcattttctacatatcactttcttcatttttcctgaatattaccgtgtgttgtaaataaaataaatatatataaaataattattagtcttatatttgtcgtacgttataacaacatgtacatctatattctacctagctagctagatgaaaagccatccatcaattaataagatctaactaagaaaaatcaccatcacttaaaaagcaaaatcaaatccataaaatattggttgagctgctagcttagtcagcaatgaaaaatctgtctcttcacaaactaagctttttctacctataaatatagcccaaaactatcccacataagcaccacacatcccaaaggttttacgaatataagccaatttcactagctttaacattttctttgagattctcatatggaaatg

SEQ ID NO: 9142 - DNA, 3000 bp, Unknown
  misc_feature (1)..( 3000): cDNA_ID_2730470_gDNA_ID_1972013_Annot_ID_177825 3000 nt of promoter + ATG
catcttatatttgtttataaaattgccaataattgagataaggtatcatgattcatcaatctagctagactgtgtgtaccatacataaactataacccatgtgtataaaatatacaaatatctgtgaacatcaaccacctaactataatgaatatgaaaatcatacgactaaactaatttacgtaaactatactactttgaaacaattattcatcaaattctcttatactattaattgtggtttactaaacttccaagttttatgttttactaatcctgtaaaattagactttagccgagtccgtttgaatctaggatttttgaaatttccaggtggctcaaagctaaagaaaatgtgaatgagaaatgatttcaacgaaaataagatttacataatagccaatgacatatatgcacttgtcaagttggagttaaacaataaccacacaccgaattgaggagcccattggaaaaaacagaagcaaatatatttttatgtaaaaatagaaacggaataatatagtaacaaaaagatactctcttcaaccttatccattcttcgccacttctcccactaatccgctaaatcattcttcttcatctctctctcattcacaattcccgaaattctctcaaatcacagatccttttagggtttttccactgtttctaggttttttttattgctcaaatctgatcaatggatagttgtctctctaatcaaacggcgcttcagtttctcccgtcgcgttccaggagacagagcggcgatggaggcggtggttttgttattccggcgaagaggaagatccagtatagttcgatggttgtggttgcggcggcgggacagagtcggtgtgagcctggaagcagtctaaacgcgccgcttgagccacgatcggcgcaggggaggtttctgagaagcgtgttgctaaacaaacggcagctatttcattacgccgccgctgatgagctaaagcaactggctgatgatagggaagctgctttagctcgtatgtctctcagctctggttccgatgaggcttctctccacaggtccgtgaaacctttccttatctaatctctcacaattcaaagatccgtaaacagctgtagaattataaacatacaaagaaatatgtgtaaatcattacttacatactcttatttaatcgaccacaaatcagtattttattagtatttatcacataagcttgtaaagtttgattataagttgtttgatggtgtttatcagtttatgatgatttgagaatcacactaatgatatggttgaattgaaacaagagaattctgtagttatgatcttcaggtgctttctcatactctgccttgtgaagcaagttttgttttagtgtttgataagggctggttttgcttttttacatttcattgttgcttagttcgttaaatagtttccgtatattttagtttcttgcctgtgttaaactctctgacttgctcaggccattttatgctctgtttgtgaacattttctcaactatcttctgctcttttacgaacactaacactctgattccatggttggcagaaggatagctgaactcaaggaacgctactgtaaaactgcagtccaagacataatgtacatgttaatcttttacaaatactccgagataagagtccctcttgttccaaagctatccagatgcatctataatggaagactcgagatctggccttcaaaagactgggagttagagtcaatttacagctgcgatacccttgagatcatcaaagaacacgttagcgcagtcatcggattacgggtcaactcatgtgtgactgacaattgggcaacaacgcagatacagaaactgcatctcaggaaagtatatgctgcctcgatcttgtacggttacttcttgaaatcagcttccctaaggcaccagcttgagtgttccttatcagatattcatggaagcggatatctgaaaagtcccatctttggatgctcattcacaacgggcactgcacagatctccaacaagcagcagctgagacattacatctcagactttgatcccgagacattgcagagatgcgcaaaaccaaggacagaggaggcaaggaatctgatagagaagcaaagtttggctctttttggcacggaagagagtgatgagaccatagtgacatcgttttcgagtctgaagcggttggttctcgaggctgtggcgtttgggacattcctgtgggacacggaattgtatgtagatggtgcatataagctgaaggagaatgggaatgcagaagaacaagaaggaaagaaaagcatatgatgaacaagtctggttagaagaaaagcttcatgatcttctggtagtgtatatatagagaaatgtttctgccgaatctctcaggcagttgttcagttcaatgtatagatcttgcttagaaatattttgatttctgaataagaatgtggtgtggttataaggaataagagatactgtagttgggttcaattttatgttatgtgttaagtttccttgttcaatttgatctttctccttttgtcaaaagactcaaaacctcaaaaacaaaactaaaatttgggtcccaaagaagctatgcaaagggaaggagatactttgataatgcttgtatttttgggcttattttaggcccaaatagcaccttatttcggcccaaaagttagacctaccaaaaaaccttcaattgtcactagagcgaatgaatgtaaaaatctggtctcctattatcaattccgtttctctctcgccggaagatttttgctacttcatctccttatcgccccaccaccgtcacatattcactggtaagcatatccattttgcttcctcatcttccacattaggcttctcccattttcttcttcctcccgccgcgaatcgcgcgtgattagggtttatgaaatctaacgcctcaggtttcgcattttctcaagtttctcgttaatttcggttaaagaagatg

SEQ ID NO: 9143 - DNA, 3000 bp, Unknown
  misc_feature (1)..( 3000): cDNA_ID_3044753_gDNA_ID_1972013_Annot_ID_177851 3000 nt of promoter + ATG
tcaatcttctcgatcatctgcaccaagtctttgtctggaatgtagattcctagattctccaatgaatcattcagctcttgcttcgtgattttgccatcaccgttcctgtcgaacatttggaagatcctggcaagctccgcttgatccattcttaattggagtttattatttatgagctttgaacagagaatgaatgagaacaaaactagaatatgggtttatagagaagaagagaattagggcaggagacaagaaggactgcttcttaaaggaaaaggagtggttaccattttagaaaactcattacaactgtgatcgtggtctgcaccagttttctgttgaactggtcttaaaataggtttatgtccttcaagaatacacaaaaactaaagtctatcaatagagatacacacggaatctacacattatctcgtattttgtcatcttcaaaacagttttccgttaggatagttatttcaggttaaatcttttgagactcaatttatggtatagacaaatataattcaattcaaatgcttatcgtctgtttgtatatgtttggttaattttctacaaaacttatttatttattttatctacataagatgtaacttattctaagtggatttgttctatacacttctttttttgtcgatttgaacatggcgatgtttcgaaaatagaagagacaacttgaacaataataaaattaaaataaaagagatagcctttaaaatagtcaaggtcttaatcacttcttaacagattgatagtctgttaacaggtttaaattatgttgtattgcacatccttataagactgagagtaatgattattgtgttaagtgcaccacaagcagaaattgattttgatatcgacgttttcaggtagatagagatgagcatccatttttcagtttgctttggtttcggattttgaaaaacgagtaagaattagaaaactattcgcaacatttaaagatgcctaagctgtgtttagaaactactggtaggaaaataatatctaaacagtatactcaatatgttttgttactgaatcaaaccctgaacaagaatcgatcctacaaacagagtttctgtttacaaggctcaaatcaaatctactaaaccattggtataagatgccagatccattctaccttattccctttccctaaaagcagaaactgtgattacaatgctcagagtatatttaatgttatctcagcctcaccaaagatgcagtggttatgagaatgaaagatcaaaactccactaattcttctaactcaacggaaacacctccttagacaattagacccgagaatataaaggatggcctattaatcctaagcataccgaaaccgggaagattactatatggtctgtaaaaagaatctcattccagtactaagaagtcacatcattctatatactctctttctctatgcttaaagctgttggcaaattgagctcgagaccaacagatatcaacaccaggtaaccacaattcaacacaatgtgttcaataacctcctagcattttccaattgcttttaccaatctctagatataacaccatagtctctaaccaatctaatggaagaagaagcaacgaaaatgaaatcaagaaaacaacattcacccatacttgaagcagggaatcgtttaaacaagcagagttctttaccacattacaaaatttaaatgtaagcaaacgaaaattacagattcaaatggagttatcttcagagtaccgaaatttccaaagcgaattttattagccaaattgagaacgaacccaacatttatgagatcctcaagaacaaaaacttacggaatatcccaaggcttagcttcagggacagcgacgaccataccttgaagctcctgcgttaacacaacttggcaaccaagacgcgagtgcttgttcaagatacgggatctagagctacgcttcagcacatactcctcatcgtaagtacgcggcgggagcttctcgagccattcctctgcgatctgaacctcgcactccgctgagcaagcctcgatgtcatccaatctatgcgatgctggatctatcagaccagtgtgagtgagcgcacgaaggagagtctggccagagagtccaatgatgtcctgcttgtatccatcgggatcgatcgcagaaagcttgacgattcggtcagagactttcttcgatcccagagacggagaaggagcagacgttgcggatgtgcgaacgattagagatctggtgaatggagagagtcggtggatttgagaggagagtttctgaagagtcgtcgccatcgtcgttccccaatttttggtcggagctcagattttttgtgctaatggttgaaaccggaaaagtgagtgagggtgaaacgctaatttggagatgggcttctttataagcccaaagataagttacatacttacaagcccaaatttctaactggaccgttcaatcgaaccggtcaatattaatccaaatattttgtttggtttagtttgggttgaagaaaacattgcttctatgtattttatgaggcatttaagacagaaaaaaatctataaacattcgaatagccgcaagtccggccagatccactctgttcccatgtgatacggtccacctactttttccaataacgcgtaagaaatttaggaagttagaaccaaaggcttaacgaaacaagccacatttaactaaatactgcttggtggacacacatccgacgtggctatcgttcattggtctgttccatctatggaatgagaagcacaagattactgctccattccaaattccgccttcaataatttgataaaattttgatccactctgtttcaagctgtcaccagaatgtcgtcttcttcttcttctccttcttcgtcttcccttaaacccattaattcaatttcctgataaacgagcagagagagatctgtcaaaatcacaaaccgtgaattcgggaagaataagccgatgatg

SEQ ID NO: 9144 - DNA, 3000 bp, Unknown
  misc_feature (1)..( 3000): cDNA_ID_3044745_gDNA_ID_1972013_Annot_ID_177855 3000 nt of promoter + ATG
gaacacgtataccttggcaaaaaatccagggttttgagtaaggaatggcaatccgagcaatcccatagggttagagatgagaacaatatcaatgaaagaagcctcccacaaatgcaaggctttcacagttttgtaccacggttcttcacacaccaaatcagcacaagttagctgtctctccagtttttgcttcttttgaattggattctgagcatccaacgactcatcagatagatattcagaagcttcagaaccaacaccagatggaacaggagagaagattttgattgccgaaaggtccaaagggcagtcaattaaaatcctgaaaccacatagattcagcatatgacaaggcggatagtgaaagccatctcctttgctcagacatgtctgcaaaaaaacacaaaactttcatacttacccaacccgaggttttcaataactcacacgaaaagtattagactttcattaaccaagagaaactcaccaattccatggagacaaacaacagtataatctgtttaaaaaactgaataagcgaggtttaaattcagagcttttccaaacaacgcaacctaaaaaaacagccagaaatatgcgtatcatagaagaggttcagtataactccataaaaatttccgtcttgttttttagagagagactaacagatgcggcaaggaaagtacggaggtttatgcaaggcggcgatggaggttgtcgaggacgaagcggcggatttaattcgaaactggtttagattcgaaaatcgaatttctccggttcggtttggttggattagttaattttttcaaaaactaaattcgggttggttgctttgatacgatgttgctgagataatagaccggagaaagacgacgaagagatcagcgattttgtttactcctccaatggattcagctcgagaggtcagcgatggtagactcaccgtcgaaggtttctctgtagcttctcgagcttttgccgataagtggaagatacataaccaatcgttccctccatggtcttgggttcctctgatcaatcgaactctacttgtttcaaagaaggttgatgaacaccaattctccataattcaaccttctttaagatactgttttttaaattccttggtcttgttgttttattagcaggaggaaggttacttgtcgctggagaagatcataattctcagttcacttgaggtagattcacagctcttaacagtgatgttcttcttttcttgtttctcacaattaagtttgtgtgtaggaggaaattccagaggatgaatctctaaatgtagctactgattgcttggaaaaagaagaaacagttgatcacacgattttggtacataaccttttgagaaattctcattttaactatctctgaagcaggtatctagaatccatgagattgttttccttgatgcccttttatttgtgttaggtcccaaccatggaaaatgaagcacactactatgatttccatatagtttacagtgcatcatacaaggttcctgtgctatattttcgcggatactgcagcggtatgtcacaatataacctgcttggacttttttggtttgttcttttgtttagtttgaaaatcatctttgttgtcacttaggtggagaacctcttgctttggatgtcataaaaaaagatgtaccctcatgctctgttagtcttttgctggaatctaagtggacttttataactcaagaggtatcctctcaaaatcaatactacattacaatgtccgtttaaagtatattatatggttatttggtattgaatccctatgcaaacaatcaatcgcaggagcatccatatttgaacaggccatggttcaagctacatccctgtgggactgaggactggatcaagctgctttcccaaagtagcagctcttctggatgtcagatgccaattgtgttgtacttggtttcatggttctctgttgtcgggcaggtggttggtcttaggatccctcttgagatgctgaattagtagccatcttctgttatcaaaatatataatgtatcagtggctccaaaccctcggcaacaacttttaaaggtacgcatttctgaataagaattttcagaagaaactagggactaaaaaacttgagtttcattaacatatgagtggcttcaattcatgagtctgcaaacatcgtaatcaaatctagctattatgttcttgaggtatttaagttgaattcgttttttccaacaaaccattttgcttacaccacttcgggtaattgtaacataacggctgattctaaaaaaaaggcttactatttcagtatttctacgtaaagtttgtaatgcctctcattgtatagaaccaaccagtttatagcttgattgaaattatgaaaataaaagtttgtatccgaaatatatggcagcagcagccatcgcagatacgccacagatatttgtgtcggaaaatagtgtcgtaatatttgtgacaatgtcgactggcaatgtcgctctttgcgacaacacgtttctatccagaaattgctaatttgctttggatgcgcgatgcctaaaatccggtttgcagccgcaaaatcctgttttcttatagtgcgggctttgttgataaccttgaggaaaaggttcttttggagtatagatggggtcaaagaagctaacgttttactaagcaaagcaagaaaaccaatgaagaaaatggtagactgagtaatgaagacttggtccaggaattttgttagtaagtggaagacttggaaaatgaaaaataacacagctgtttgattgattgacttgagtaaagtatgtgccgtattatatgggatataaaaactccataaaagacaaccttaatgaccttggaatcttaattagtacctgaagagtaaattagtttaaaattatttggaatcttgaactaaattagatgtcagatatatagcttataatacaaataggggctagagaacaaaagcttcaccaagatg

SEQ ID NO: 9145 - DNA, 3000 bp, Unknown
  misc_feature (1)..( 3000): cDNA_ID_3044749_gDNA_ID_1972013_Annot_ID_177853 3000 nt of promoter + ATG
aattctctgacacctttcgggaatatccccgaaggtaatccgtttgccaggaggatctcgtatatagtctcagtctctgatatcgccgtggagatcgagatcccggcgacgagaacgagacatagaaacgcgatttgaacaatacgaagcatcatcggcttattcttcccgaattcacggtttgtgattttgacagatctctctctgctcgtttatcaggaaattgaattaatgggtttaagggaagacgaagaaggagaagaagaagaagacgacattctggtgacagcttgaaacagagtggatcaaaattttatcaaattattgaaggcggaatttggaatggagcagtaatcttgtgcttctcattccatagatggaacagaccaatgaacgatagccacgtcggatgtgtgtccaccaagcagtatttagttaaatgtggcttgtttcgttaagcctttggttctaacttcctaaatttcttacgcgttattggaaaaagtaggtggaccgtatcacatgggaacagagtggatctggccggacttgcggctattcgaatgtttatagatttttttctgtcttaaatgcctcataaaatacatagaagcaatgttttcttcaacccaaactaaaccaaacaaaatatttggattaatattgaccggttcgattgaacggtccagttagaaatttgggcttgtaagtatgtaacttatctttgggcttataaagaagcccatctccaaattagcgtttcaccctcactcacttttccggtttcaaccattagcacaaaaaatctgagctccgaccaaaaattggggaacgacgatggcgacgactcttcagaaactctcctctcaaatccaccgactctctccattcaccagatctctaatcgttcgcacatccgcaacgtctgctccttctccgtctctgggatcgaagaaagtctctgaccgaatcgtcaagctttctgcgatcgatcccgatggatacaagcaggacatcattggactctctggccagactctccttcgtgcgctcactcacactggtctgatagatccagcatcgcatagattggatgacatcgaggcttgctcagcggagtgcgaggttcagatcgcagaggaatggctcgagaagctcccgccgcgtacttacgatgaggagtatgtgctgaagcgtagctctagatcccgtatcttgaacaagcactcgcgtcttggttgccaagttgtgttaacgcaggagcttcaaggtatggtcgtcgctgtccctgaagctaagccttgggatattccgtaagtttttgttcttgaggatctcataaatgttgggttcgttctcaatttggctaataaaattcgctttggaaatttcggtactctgaagataactccatttgaatctgtaattttcgtttgcttacatttaaattttgtaatgtggtaaagaactctgcttgtttaaacgattccctgcttcaagtatgggtgaatgttgttttcttgatttcattttcgttgcttcttcttccattagattggttagagactatggtgttatatctagagattggtaaaagcaattggaaaatgctaggaggttattgaacacattgtgttgaattgtggttacctggtgttgatatctgttggtctcgagctcaatttgccaacagctttaagcatagagaaagagagtatatagaatgatgtgacttcttagtactggaatgagattctttttacagaccatatagtaatcttcccggtttcggtatgcttaggattaataggccatcctttatattctcgggtctaattgtctaaggaggtgtttccgttgagttagaagaattagtggagttttgatctttcattctcataaccactgcatctttggtgaggctgagataacattaaatatactctgagcattgtaatcacagtttctgcttttagggaaagggaataaggtagaatggatctggcatcttataccaatggtttagtagatttgatttgagccttgtaaacagaaactctgtttgtaggatcgattcttgttcagggtttgattcagtaacaaaacatattgagtatactgtttagatattattttcctaccagtagtttctaaacacagcttaggcatctttaaatgttgcgaatagttttctaattcttactcgtttttcaaaatccgaaaccaaagcaaactgaaaaatggatgctcatctctatctacctgaaaacgtcgatatcaaaatcaatttctgcttgtggtgcacttaacacaataatcattactctcagtcttataaggatgtgcaatacaacataatttaaacctgttaacagactatcaatctgttaagaagtgattaagaccttgactattttaaaggctatctcttttattttaattttattattgttcaagttgtctcttctattttcgaaacatcgccatgttcaaatcgacaaaaaaagaagtgtatagaacaaatccacttagaataagttacatcttatgtagataaaataaataaataagttttgtagaaaattaaccaaacatatacaaacagacgataagcatttgaattgaattatatttgtctataccataaattgagtctcaaaagatttaacctgaaataactatcctaacggaaaactgttttgaagatgacaaaatacgagataatgtgtagattccgtgtgtatctctattgatagactttagtttttgtgtattcttgaaggacataaacctattttaagaccagttcaacagaaaactggtgcagaccacgatcacagttgtaatgagttttctaaaatggtaaccactccttttcctttaagaagcagtccttcttgtctcctgccctaattctcttcttctctataaacccatattctagttttgttctcattcattctctgttcaaagctcataaataataaactccaattaaga

SEQ ID NO: 9146 - DNA, 2052 bp, Unknown
  misc_feature (1)..( 2052): cDNA_ID_3044732_gDNA_ID_1972013_Annot_ID_177862 3000 nt of promoter + ATG
ttcacctggaaagctgagaaatttgttgaaagttgattgaacatttgagcattttgctcgagaagatctccactcacaccaccaatagctgcaataaagccgaaacacttatgctccttctaatccaatctagaagatttagcctttaaatggaaaaagcctagaatcttagacaaacctttatatgaaataccatcatcagtatcgataggcatcataggcggagcataagaaggaccattaggatgaacattcaaatgagatgaggacttggctgaagaatctgtagctttttcctgctaaacagatatgtgaaagacaatcaatcagtttttgtagacttataaatggatccacaagacaacacaagaactttcatccgtccaaactcacaagtaaatgactaaaggttcaagctagttacacattagaattcaatcaagctgatttatggtttgtacttcaaatatctttcttagccttgctagtatcgaaattgctaagtagcagcaaataggattgaaatccacatactttcttatctttgcttttcctcgaggaatgatcttctttcctacgctttccgttttcctttttctgcaatccatcagcaaccacatggaggtgaaaaaccgtcagttgattcttactaatcaataaagccaatacacgaagaaggttaatcaagaacaacgaaaaagtcgccggattaagcaaaatcaagaaacttacagtcatccatctacagcgcagggcaacatctcgaacagtcttatctttcattttcatagcaatcttcgcatatcgaaaaaccgacggttctgtcgcgtacctatataaagattaattactaaaagagtgataggatttaacaaggctcctacaaaaatttacaaccagtcattacagataagtagacaactcatcctctaattaaatcctaaaattttcacattgctctaacactaatgagcctatcataaatatgataccacactagctagctagtcatttttctagtattttatttattaccatacttgaaaccacatccaaaactcacaatcagctaatcaaataccactgtttctcttctcagatataattcaaaaaacccgaccaaagctaacaattctcaacacatattccgattcaagctacatgatgcttgaaaggccatggaaaataacatatcgcagaattcactacatctagtcacatctagtcagatagaaagaacattggataaaacagcaaatccaaatcttaaacatacagagagagagcgagaagattacttgacaagcaaatcttccaatagagattgttcctcaagagtccaatcggtagagatccctggattatgcctcaacgcgccaatcgtctgtgaattatccgccgccgcgcctgtatttccaccattatcgacggaattcacagcagcgccattcgccgccgccgctgaagaagacgataccttctgcgtcgccgacgaaccttcctgattgttccccgacgggttcgcgctcgccgccattaaatacccaatttttggagcttaagaagtcacttggtttcctaaaataattccaccggaaaagtttgaattttgggaaattcagatatgaattcgccgggataggaacagagagagggagagagagagatgatggggagattaatccggccgccgactgagcttcttcttctgcttccctcgaaatatggaatctttgcttataataatataaacatataatttcatctctatcctttttcggattttggttttctatttttgagagtcaaatacgtcaattttagtaattaagaggctttttgggtaaggattataactataggggctgatacataataacctaaaagaagaaagtaatctgttttgttttttcctctcttttcgaggtcccttctcctctgtcttcttcatcccacctctcttgtctctctatctctctctctccgcgcttgaggttggcgtcggagattaccaacaagagctctctccaatcgtcgtctctttgatatatg

SEQ ID NO: 9147 - DNA, 3000 bp, Unknown
  misc_feature (1)..( 3000): cDNA_ID_2038391_gDNA_ID_1972013_Annot_ID_177858 3000 nt of promoter + ATG
gcattttagagacaaggaagccctggccaacgtttctaacccaatgtcactgatattgcagcggtaaagactaaccacacttagattgggacaaaagctagcaatagtggagatcccatcatcagaaatcccaaagcaacaatctaagtaaagagtatgcagtcttgcaccgggatacctgagggagtcgagactcgaatcattcagcacagtgcagccagaaagcgaaagatgctccaaccactgaaaccgagtaagaagcctgtggagatgatgagagctcacatcaggatttgtctgagacagacttgaagggttcaggacagagaaagaacactggaactgtaaagagcgacggctaatgttttggatgttgagccagcgatgacaagtcaaaccaaatgaatcatggtcagcaacactatcaagtcgttgaaagataaaggaaaggcaatcatctggaaggtggataatggaggtctcaacattattatcagactcggacacatcttccatgcctcacttcaattcctgtataaaatggacagcaaaatctaatctttaaaactaaaactatctcctccacatatatctactctgatacagaacataaactcatcaagaacctaagtcagataaacctctatattgatctaaatgaagcaatccagagagccttcacttcagttccggatcaccaagaaagaccagggaaatggatacgttgcaagcttagaatccagccctacatgtctttggaaaacagactcaaaaaagcaaaactttgagactcagaatctctggattggattagattgatcggaaaaaaagaaattatgaaaacccacacaaaagatccagagtttatcgaagaaatcaatcaagtaaaaagagaacaatcgctcaatccatgattgaaaatccaaataccaaaacagaacgagagcgctgaagcagaaattttgcttgctatgatttttttttcttttcgcatttgtttatattattatttttattttattttctaatccttcaaattattcaatttttgagatttatgccgaagttgtgtcaccgtaccgtaactttagcaagtggtgtggattgtggattgtggattatacatgagggtaatgtcaatcctaaatcatataagcacattttcttgaatgagaatgatctcttgagatgaataaatgatctcaatttctgaagacaactcatttaagtgactaccttaagaagggtcttgagctagacaacatggaagagatgtacaagaaggtaaatgcagcaatccgagctgatcggctccaaacaattgataaccaatttttggatccaacaggaaattctgatgctgctgaaataaatcatcagtggtagcaacatcgagaaaaaacaagaaaaaaaaaagcgtatgatgaaaaatgttcattgataagacatattgggctgtcaagtgtgaagccagctgatattaggatgaggtttgttttgttcccgctgatttgacacatgctaccagatgagttgttttcctctggattcgacaggtaatttgtcttacgtcttaactatgtgtatttgtagttttggagatcttaattttttgttatctagatatatttataagtttgcattcatactgatatttaagtgtattttcaaaagtgttgtgactcaaccaaacgtgatcatatcttcttaacttgaatcgcatgttaaagaacactgtcgttccaaggcttaattataacctatatatgttgcccacccacgagataaaaacaattatttagtaattagtgtctccttggatgttgtgaagaagttggacttttgcatattaattctcccgccagtgtcgcaacaaagtcttcatgctcagagtatcagttcacattcgaaacctgatctttcttactagtctattgttatgagattggttttttggagtgaaaatgagcttcgtggaactctcatcaacctcgtgagaacataacttcgtgattgtgttctttgacaagaaaagttgagctgtagtttttttttaacaaggttttgggatgaccagtagtaaatcaattgttgtaataatttggttggtaaatataacatttgttttctactaaacatccaaaaatggaggtacgtgaatgaacacatggtgtgttgtaacaattaatctcaatatggccaaaccaagtcttctccatttctagtccttgtctctacaacgaagctattgcgctatttgttttgtttgtgcagtacgcttccttcttcttattgcctttcttcttaggcgtcatatgactctcttgcatcctcaaaaactatgctgattaatttatgccacaccaccatttctcattgaaagctaaatcgaaattcaaataaagtcccaaaaacatgcaaaagtttaattgaccaaaaagctgaaaagcttgatggcgtttcaaactaatgcactagttaattcaatttccataattacgtagtagtttttttggagattatatatttattattcacgaaaaatgtggataagacaaataaaagacaaagcatgctgcattgcttgttctactttttctttttctttttcagacattttagcccaactatatactactcttgattaatttgaataggattacatagtattccataacacgagacaaaataacaatatttggcaaatagaaatgttgtctagttgttttcctcgtagataaagatagtagtctcgactttaataattggtttgcatagaaaagagaagatagtgttttgtatagtactaggcaaaagtcaaaaagattcttttgaaagagaggacccaaatttacttgacgtaattattgcatttcatatacgttcttcttctctccctacttgatttttattcaaaaacactagcattaagtcactctttcgtcctcagatagtgcgcattgcagaacacaaaatctctacaagaaaaccccaaaaatg

SEQ ID NO: 9148 - DNA, 3000 bp, Unknown
  misc_feature (1)..( 3000): cDNA_ID_3044755_gDNA_ID_1972013_Annot_ID_177849 3000 nt of promoter + ATG
gcttggtggacacacatccgacgtggctatcgttcattggtctgttccatctatggaatgagaagcacaagattactgctccattccaaattccgccttcaataatttgataaaattttgatccactctgtttcaagctgtcaccagaatgtcgtcttcttcttcttctccttcttcgtcttcccttaaacccattaattcaatttcctgataaacgagcagagagagatctgtcaaaatcacaaaccgtgaattcgggaagaataagccgatgatgcttcgtattgttcaaatcgcgtttctatgtctcgttctcgtcgccgggatctcgatctccacggcgatatcagagactgagactatatacgagatcctcctggcaaacggattaccttcggggatattcccgaaaggtgtcagagaattcaccttcgacgtcgaaacgggacgattctcggtttatttgaatcaggcatgcgaggctaaatacgagactgagatacattacgacgccaatattacggggactataggttctgctcaaatctctgatttgtctggaatctcggcgcaagagctattcttgtggtttccggttaaaggaatccgagtcgacgtgccgagttctggtcttatatacttcgacgttggtgttgttcgaaagcaatattctttgtctttgttcgagactccgagagattgcgttccggttcgtgggattcacaaggtatgcagaatgagttttttcaattgaacctttaaagttcttgaaaattattgaaggatactaatgggctatagtgtgaatagagataattcaaatgttcttatcgctggattttgtggtttttcaatgtcgagcttttgaatattcacaagtttcaggcttgccactaagaattcaaatgagaatcctttttcaaagtttttttagcttatctcattcgtcatcatctgaaacttttgagattcctttcaatggtcattttttctccattcttgacttggttgcgatttttgattggtcaggaactgttagacatgtgacatgaagaattatctttagagctaggaaagattgttcctttttagggttatgttctccattcttgaattggttgagatttttttatcggtgaagaactgttagacttgtgaaattgggaatatctttcgaactaggaaagatggttttgaaagttttgcattgatcagattcaatcatgtaatggaaaataagctaatgtgtgctcaatgggtcttcttgcaggttgagttgccattgtaccgagtagatcaaaatcttgggagaaacatcatttagcaagagttttaaagaattgttgtataccataccagaaagaaaggaagatagatgttctcatcaatcaattcttgaagatacttcaactgttttggtctcaaatcttaggcatgattcaaaatcaaattgcttcattctttccctccccattccagttttgcttctgtaattcgttctcagattaggccggggactgaaccgaggagagaatctgtggttttgaaaagatgctaaagggatggcccagattttgttgaagtgatgataactgtgaggtgatgaatgttttgtgttgtattcttgtgtcatgtctaaaacagatataataaatcctatatttagccaaataagtgttatagaaaattggcaatttgcaatcatttctctttcaccgaatatctggctgctttgtttttggtaaatgaatctaaattttacagtcaaatcaactgtgacaattataggatttcgtcgtcattctaaagacctgccctgaccctgaagtggaagtctgtctccagttggcttcggaagttactgtcctaagaagattcagtggatcaatgaaacagtaatgccaaaatgagtccatttaggagacttggaaacttgtctagtgtctcattattttaagagggatctttagtttaagattgtgagatatttattttatattttggtatatagtttaagattgttacaaaatccactttcaaacacacattacatggtttcgaaccttgttactgaaaataacaaggaggagctaaagccaccaccaccaccagactatgtcatctttggtgaaacatgaagtttaaaatggtgtagacccatgacttcaatgggcatatgttaagatataaacgagactagactatatatgatcgatttttttttcgtcgaaagactatatatgatctataattaaaaaaaattgataaatatatctctgatatactgtatatggatcggatccagatattcaaactttcaaatctaactaattgcatagaaaatgtgaccctacaagccataagccccaagtttcacgttccatctaatcaaactcatgcaattatttatcgtttgttcgcctactataattaattataagcaaaattaaaaaaaaaaaaaaatttcaaaaaccagaaaaagatatttgtaatgaaaagaatctcaggttcttacacagtgatagtacttgcggtttttggtcgagtcagaagatgggacagccatgtggtcgtacatttttgtcggctttggttcaacttgtgccgtgtaggcactcatcttacttgcgcaaatcacgatccaactctaaaaacccaaacccaagtctctctatgatcccatgtggtccggtccacctacttttccaataactcgttaaatgttagaacatggcttatagtaacgaaaccatttaaataaatacaaatttattggtggatataatcagacgtggctttcattcattggttactctcaccatggcctgagaaacagaggatcactgctctcattccaaattccgccttcaataattttgttccactctgtttcaagctgtcataaaaatgtcgtcttcttcttcttcctcgcttaaacccattaattcaatttcttcatagccagcaataagatctggcaaattaaaccattccactatg

SEQ ID NO: 9149 - DNA, 3000 bp, Unknown
  misc_feature (1)..( 3000): cDNA_ID_2038459_gDNA_ID_1972013_Annot_ID_177829 3000 nt of promoter + ATG
cttaattttaatttcaaatatggtgcagttcttgtcgatgaagttatcgtcagtgaacaccaggctggactttaacatggacgctctcttgtctaaggatgtaagtcaccgtcacaacatttatagtaattttaattgacaattattgtaataataattacttttttgtctttgtgaaccaatcgtgtgtttgtttaaactaatttcttttgttttctgacagatatttccttcaagcaacaatctaatgcatcatcaacaagtacttcaattagattcttcagcagaaacgttattgggtgatcatcacaacaaaaatttgcaattgaaccctgatatttcttctaataacgtaataaaccctttggaaacttctgaaactagaagcttcatttctcacttaccaacacttgctcatttcactgactctatttctcaggtttccttttctaaaacattcttctatcacttttcttttctttttctcttcaatttgaagcggtcttaaccctttttggttttgtttttagtattcaacattttccgaagatgatttacatagcattattcatatgggttttgcgcaaaaccgtctccaagaattgaaccaaggtaagaatatttaaatcatattttttctttccatttcattatataggcaggaccgtttagatatgatatgtataaattgtactattatatatgcaggttcatcaaaccaagtaccatcgcacatgaaagctgaactttgatcaaccactatatgcatttttacaaaaatattggcgttttaaaggtctcgaggatagaaagtaagaaaaggattgatgggtgtacataacaagaaatttgaattggaccacaccatatgcgaattcatttctataatcatcttcatatacataacttcttctttttatccttccgattcatttgtggtgctcaattgtattgtcatgttgttatccgctattcttcttcttatcagattctttaaacttttcttgtttggatttaatatcattgtatgttttaaccccactataagtactatagctataattcttccgaacaacaagactgtttttatcaaacccattcagttcttgtaacaaaaaaacatcaaactcttgaaaacgaaaaaataattcggttttcttataaagagtttgtatgtgataagaagctaacaaggacagatcattcctagaaaatacacatttttggtgaaggaaaaacaacagtgtgttgcaaaaattgatagatactaagtaaattttcttatttcaattatcaaaactatatagcttctgcatgttaggtgagattttgtagtttatttatgtgtattatttccttatttatttttggaaaaggtatttaattatttgttaaagcgtatgaaatgttagtatgcagtttttggttggaatacgatttaacattgaaaccaaaaagttggtattgagtttttttcggcaggagttacatagcgtgacaactatctttgtgctaaattacatgtgtgtaatttgctcaaatgtactatttccaacaaatataataggtactacagcatattcacaaacatcaaatcttagctaagcttgactttttcaatatacactctcaagtcttaataactcgttaacgtcagtttcaatgttagatcatatttgatatatgatttgatcgttgctagtgttaaccagctgtgtaaggtgttctgtcattttctccattgtctttgtgggagttattcagaaaacaaagatacattagaaagtctaatatgagtggttatgagcaaaaaaccaaatttgattaattaggattatgatgtagggatcacgccgtgattgatggaaactatatagaacagagaagcgtctctttctatttacctactatagcaaagagaacccgcaacaagttatcaatcaagcaaaaattaatgtctaatcaaaaaccatctatctcaagttgttgataatatcttacatgatcataaacaattataccgcagaccggccggatactcgaaaaattgcaaatacattggtcctgacggggttgagtggatcacatacttgaaagaaaaaaaaatagccgtttcacacttatcttcttctgcgttggtcgtttaatcctgcttgaaaaaatattcgttagaatgggccacacaatcaatacgcactgtgaaagctaaatttacgaatcttaaatatgctatgggctagttctaaaactttttaatctgtagaattttagtgagctctttgtgtggtgctttatttgtcggcccaactaaacacacgctaacaattcctttttttttttctctcacattttatttttttaataataaaaaaaataaatgttacggcatggttatatcatatattttaatttcatggaggatattagattgttcccattttctattcatcatattagattaaataattagaaaatactatttttctgtctctattgtagtggtatgtatgattggagagttgatgaaaatgtaagcaagtaaaatcatcgtgcagatcgcgatgctatgtttattatcatatatgcttaaaggatcatttgagattaataccgcaatcagcgggtgagtaagaaacttaaaacacataactactctctttgtcaatggaagaccctcttaagcatctaacacatgattcgtctagacaaccatttaactctaattatatcccctaattgatattaattaaatcaagaggacaaaaaaaattaaatcacttataaatattaattttatagatgtatattttaaaaaagagaaaaaagaaaagaaatgggaggaagacactgggacgaaagacgacgtcatctattgttagtaagtttagcccaatcgtgttctctctgcgcttgtctcccaaattctcagatctaatcagatcgacgattcctgatttcatcagcttcgagagagatccttcttttgttcttcgttgaatg

SEQ ID NO: 9150 - DNA, 3000 bp, Unknown
  misc_feature (1)..( 3000): cDNA_ID_3044728_gDNA_ID_1972013_Annot_ID_177836 3000 nt of promoter + ATG
aaacaaaacatatcggttgtgtgtgacaaaagaaacatacgtgtcaaatgggcctctttcatatatgttccacataacatgataacattaatatgataattattttatttctttcaattattggtcttgtcttctatcttacaacactttaattggcttccaaatacgtccaaaccccattaatgatcttctgtactctatatatatgttttttttaatcgaaaaagtctttaatgtatgaactaaaactgaaagatacgaaccaagaatggttattgtttcatattcagaaatttttatcagaaatattttcgattctcatgtatatatggactgaaaaatcactatacaccaaaaaatagcttgtacccatgaatttcgacgtacattcaacattatttcaaattgaatcttccatcattttgaactgcatgttggaatatcaacattacgtttttttcaaaaaagaaaagaatatcaacattccgccgacaaaacaatagggcgagaggaagtggagaagtttgagaattcaaacacatacatatataacatcaaggatatttcgctataaaaaacactaaaaatatcccaagcataaatatataatatgtccagtttagtgtccacatatatgttttatgttaatatattttgacaatttgacatttctttttaatgttaacgtacaccacaccttacatgccaacaactcataatttcatgaattttctctgtgtaatttcatctgtagattaccaaactcactgcattgtgaagaaaataacaaagattcatcaattttctcttgaatttaaccttgtaccaaaaaaaaaaatattttctttcagaagattcagtttgtttttttcaaacttttggaaatgacatgttcaagataagagtgttattatcacacaatcaaaacttaaaggaaaaaaaaacagaaacaaagataataatttgagaaagcagagatgtctagcaagcagagaaaaaaaacgacagttcgaagataacgagggcattagaaagggacacgtgggttagagggtggtcctacgtaaactgattttttatcagcagtccagcttggcacttgtgagattctcttctgtgtttgcagatgagtggtgcccacttctcagaaataatagatattattcatacacgtgtctatttcaaaatgccactcaataatagttggtctactaacaacttcaaatttgagaattgagttgacactattctaacctcaacactttgtatcgttgtatatgaacatcgatcacccactcttatggatggtggttaaataaaccgaagtacaatagtatttttttttataaaaaaaatccatacaaatttaaacaaattcaataaatgtactaataattttagtttgaagttctaacaattaacaatgtagacaaagtgccaagacaaattccgtggccaatatatataacttggtttagttaaaacatttgttggaattaaaacatattttcaaaatttcatgttttggtggaagaagtcgttttcaccttttaaatttgtttcagacatggagtgatgtgtcatcttgtttaatattattgtctacagaatgttactaaaaggtgaaaaccaaatcttgataaagaagttaattataaaacaaaatcttccggttacatttttttggtttttttgaatgttatagatttggtcaactctcttaattcatccaatcacgcgtcgaaagctataataacacttggttgcttttttttttttaatacaattttgtttttaaaacgtttagaacaaaaataaaaagaagaaaaagaaagagtgaaaaacggcaggggtaaaaacgtcaaagaagaaatagagagagagagtgaagaggagtacaacagaatccacgcggaaagacagctgttcccatgttggaataactgtgcgggtcccactttcattacactcactcctctcgcacatcttctaattttcgccgccgttaccgtctttggaattttttttggtttaccacactaatgttacatttttcgttagagatgattttgttttttgattacaacctcctacgacgtttgagttattgagattacttttataaatttccttactctgtttctttgggtcaacaattcaaacaatgatggtaatggagtgatcaattgacaaaaaaaaaacacgaatcaaacaatgatcgattatataaagctgttatggtctaataactgaataataaaatcatcataagtaaggaaccaaattcgaatactcgcaataaaccaataatagtaatttagtggataaaataatagttatgggttcggtgtcttaaagatttgagtttgatcatcgtaattcgtaaacctttgaaacattttctgtttttttcacaaacttttgggaatatttgttttggcttgacaaactctccaaatagctctttcgtcgtttaaaatctcttagttacaaaacaatgtattgaggtttcgaactcccaaaaccaaacacaagggaaagatgaaaaccattaggccgatcaattactattaagttataactagctaaattaccaataacgtgtatggatttatacccaaaaaaataagtaaacgtgtatgagtctacgagacaaatcgtgtcggctgtattttgacaccttagtcgcgaggtaggtcatacgtgctgcattattaaattcttaattttggtcgaattaattagtaaatactcctaaataatgacgtggcaaattcggtgcaggccacaattctattatagtgaagcactagagtacaacaacaacacttgtgcctcttcttctctcttcctcatatttattactctctctttcacaaacacacagaaaataaataaataaaattaattaatgtgagaaaatcaattcaaaaatttggacatacgtatcatctgagagaagaagggtttggtgaataccggcgggtggaaccgacggcg

SEQ ID NO: 9151 - DNA, 3000 bp, Unknown
  misc_feature (1)..( 3000): cDNA_ID_2038422_gDNA_ID_1972013_Annot_ID_177844 3000 nt of promoter + ATG
agacaggtccggcggtactgagagagaatcgtaacccgtcggcgattacgggacttgaagtctggattgcgagagagagtttctgagctaggactctggttacagcgattgctaaagccgcgagagtagcgagagaccgagtggacccggtgagtgtcgatgaccgagctgttgacttctccgtctggaggattggtgttgttatcggcgaagcggatgcggaaattcggatggatttagggttttggattgatagagaagggaaggggttaagaggaaagaagagacgagctggtggtggttgattggtgaagccatggaatctagggcttgtggcagatgatgggagataaacaggagagcggagagtgagagctgtaatggcggccatctccgttattccgcctgttgaagataaatgacgataggtttttgagtctttcagatataaaacccaaatctgtccaaaattattattttcgtcctttaataagaattatatctttcatccttttaaatcattaatactatttgtaaataaacactaataagtaataacttttaaataactaatactatttttttttttaaactaatagtaacttttatatagatttttagcatttttgttgttatacataattgttaactaaattctatatatacacaaactaaaattcttatttttgagaaaaatgaaatatttggtcaatttcatgtttaatattgtcaaaatttaagaattcatgcatcatttttttctttttctttcactagcataatatttactttgttgttggtagtaaattagtaatccatgacacacaaaaaaaaaaactcaaaactagttgttttcattaacctcgactcttaaagaagaagctagcaagaataaagatttattatgaagccgattattttgattcacacaaaaaaaataagaacaagataaataaatattacagtctcacaagtagaaattggtattacaaaaatcaacacagtggaaacaagtgaggacgtaagattggtaaagaccaaaggtaagcatctaagaacttaacatttccaccatttgagagtatccccaaaatgatacttctcatcatcttcatcggctttcccatgttcatcctccatctctgcataaccatccgcggtggccccaccaaaaaccctcgtcgccggtttcctaaccgcacgacgactcgttttcctttccttcgttgttgcggccaccaggaccttgacggaagacttgacatggcatgaactgcgtttcttcttaccatatttccttcttcttcttttttattatgtctttcggatttgatttaaatatcaaagtttggttctctaatttgcaagttcttgaacgtggatttatataagtagaagaagaagtgagtgagtgatgatcgatgatgtgtaaagctcgggatcaaaagagctttaaatcattgaagaggcaatgattatgagcatcatgaaggcctatggtgagtaggataggaggttaacctttttgaataatattccatttcaatctctcaaatactatactaatcaagttaaagatagatcataaatctaagtcaaactgatccacaataatttcagccttacaaatacattttgagttttggggatcgtaaaactaatttttggtgacacatactctaacttcttcaatttctgaattagaaattccatagttagtggaattccttggacttgagattttattggttgagagataaatgaggaagtataagtcccctagcttaattctaatgttttagccgaaagttttcaagacttatacaaagtttccattagtttagtaagaacttggaagataatattggcattttgttggatcattggccactctacgatagtctataaagtctgttagggtaatacagtttcttttgtaacaacagggggattattaaaacatgttgctttcgtctgcaaattctagacctcaagcctacgtttagttgggagaaatactatttcttatcaaaaggttaattatcttaatagtgatttattcggccataggttttgtacctctcgtgctaaccatcattacaattcgtgtacatgtgaccccattccattctccttttctttttccaactgcttaatgcttaatgacaagattcgtacctaattacaatcgatacaatacaactggccgttttaactttctcaaaaatcaaaatggttttaggcaaataagatcacaattaaaaaataagaggcatttgaaataaaccgatttattaaaataactggggatttattcggtttatttttcattacctagctaaattcatttataaccaaccataaggtatagaccatttaaattggacattcagttatatactttaggatagtaactttagagaataagtggttaataaatactttggaaatacaaccaaaatcatgtattgttggatcattcattttaacatattttttttggaacaaaatcagttgttaatctaaatactagtagaatttcagaagaaacgaaaaatactagttgaatttcgacatatatgtgagcgccagggtgtgaattgcaaattaatcaaaaatctattgggccatttgggcctcaaaattacaattattcaggtttaaaaccctcaatatgaactgtttgagacacagttcccgcgaatatccaaaccttgaagaataccaaactttgcctttctctctctccttctctgctctctctggcttctctccgcaacactgaaacaatccttttccttgttccaacaatctaaacttcctctaatctctcaaattcaattatcttcaagtaatcatcatgtttatatataatctcttcttctcttttgatttatccaactcaaggaacctcactaaactcaaatcttcctctcagtttctcccactcttcttcctcaaccttccgatttatcggattactctaaaatacccaaaatg

SEQ ID NO: 9152 - DNA, 3000 bp, Unknown
  misc_feature (1)..( 3000): cDNA_ID_3044761_gDNA_ID_1972013_Annot_ID_177842 3000 nt of promoter + ATG
atatattcaaagttgcccaacaactaggaaattaaagaaagaagaaaataacagaaaagaaatgaattttggctcataaccaattctcatgaaatgacctcaaggaaaattccgatattacccgccattgttccacgttattgacgctgtgtcgtttggagaaaatcaaatatctcgtccctagacacacattattcctttccaaattcgaaattgaatgtaagctgtaactaacaaaacttgtattatttggaaaattatcgatcttttttttttgttaaaggaaaattatcgatcttaatttatcgatcttaatttattttctcacattgcccacctctataaatttcacacacttcaaaactagtataatttatcaattttactttaacactggaatattttcatcttatacagacttcgataacaaaagaatatatactaattttaaacgaaagacttttccaacgaagctacaatgaaaaaagtcatgcatgtaaacaaaaaaataaatttcaacccctttgactgatgacaatatatacacaagaaacaggttgacatatatgatgagtatatgacttctatctatatatatatatatatatatttaacacatgtaaatatatttctataattcttaataaattgaaaaaaatattttcttctaaataaaactattaataaaataaaaaaacatacgatttcttacctagcgatgcagtgaaaatatgagagacgccagttgcagtcaacttccaaaagaacacgcactctccacatgctctacccaaattcctccttacctattataatcacctccgacttttaattataacaaaccaattcacatcgtgaacgtgacttttctatagctagtggtcaactcgacacgtggcatcatctcaacggtctccttgattctctcgtcatagaaacgatgcactgaatcaatctccataacttcagggcattgcccttctatataaacatcacatgtccctgtgtcttaaaatacctcttatcaaacaccaaaccacaccagaacagaactcagccatggcttcttcttcttcttctcttctaatcctagccgttgcttgtttcgtctcgctaatctcaccggcgatttcacaacaggcttgcaaatcacagaacttgaactccgccggtccgttcgatagttgcgaagaccttccggtactcaattcctacctccattacacctacaattcctcaaattcatctctctccgtcgctttcgtcgccactccatctcaagccaacggtggctgggtcgcttgggctattaaccctacggggactaagatggctggttctcaagccttcctcgcttacagatccggcggtggtgcggctccggtcgtgaagacgtacaacattagcagctacagcagtctcgtcgaaggtaaacttgcttttgatttttggaatctacgcgccgagtcgttaagcggcggtaggatcgccattttcacgacggttaaggttccggcgggagctgatagtgtgaatcaggtatggcagatcggcggcaatgttaccaacggtcgtcccggtgtacatcctttcggtcctgataatttgggctcccaccgtgtgttgagtttcacagaagatgcagcaccgggctctgctccttcgccgggatctgctccggcgccgggcaccagtggctcgactaccccaggaacagcggcgggaggtccagggaacgcggggtcattgacgaggaacgtaaattttggggtcaatttgggaattttggttttgttgggttctatttttattttctgaatggggatctctctctagtctctcttctcttcttgagtctctctctatttttttttttttttggtttgttcgaacaataatggtgccccatacttttgtactgttttagtcttagggccatttactttgtttcaccacattacttagagttattggattgtatggaccattactatcatgagattgagatcatcttatcttcttaaaatatctatttgccatccactgtactattttcattaatctaattagtcgacatgtatttgaaaaaataaataattcaattgacaaaccaaacaacacaagaaatttttattactaccgtgttccttgttaaggagacaatcaaggagttgattatgtcaatttatttcaatcaaatattctgtaattatgtctgattagggcaacattagactctctagcttgtgaatcattcggtaataaaatcacccgattctatcctgtgtttcttttatttcatttggtgatatatatatattgaagctttagaacaaaaagttattgtttgttctatttgctgttgtccacaataaacatccataagtgataaagaaatattcgttttgttattgttggttcaaaagtgtgctgacaacgttctaatttcacaacgaagttttcatccttggttagaagaaaaaactagaaaagtttactagtgtttaattttaatttagctagctaaacttgccactgaatgtatcaatgaactaaacgttcaaattttcaactcttaaaatatttggtcactagtattccaaagttttcgtcgaattatgtttgctaaatcaaaacataaataaaatcctaaaacttgttcccgcgggaccatctatacaaaataatttgggcctaaagcccaatagtaagataagtaacaagacccaagaagtatagacagtttcgaacaaggagacgcatatgcgcgttttgatgctcaaaatctctctctctctctctctcatccctctgcttcacgttcgcgacattactctcttttaaggcgcttccttaattttatcatcttctcaaatctcaccctgagtattcccattttcaaatttcgacgcggtttcaatactcaaaactcaagcgctccaaactaattccggtctttactttcgatttagaggtgggtattgaccaaaggttgtagta

SEQ ID NO: 9153 - DNA, 3000 bp, Unknown
  misc_feature (1)..( 3000): cDNA_ID_3044781_gDNA_ID_1972013_Annot_ID_177826 3000 nt of promoter + ATG
tgctcacaggggaataatacctgtgacccgattcaacgcggaggcccatgtcagaaacctgatttgaccgttttgcacgccagttacgcctttagctcttattgggcccaatttcgtaagatcgggggaacttgctccttcaacggcttagctacacaaaccatcaaagatccaagtaagttaaattccaaaatccaaatcataattaaaccgattcgtaaattagttccggttcagtgatatcaggatgttaaaaccggtggtggattttgggtttgctaaatttttgtactctgttgtcgcttgaaaccaggttacggacgatgtgagtttccgagcgtgacattgtgaagacttacgagttacgaaaatgcatggtcgagaagagacgcacgagggaaaaccgcacgatgttacggctttcattaatggaaacagcacgtgactctctgtacgatgttacgtagcttgattatttagaaacggcacgtgattagtgtttaacttgctgtttatttattttatttttcttttcccgcgaataatgaaaactcatgaaataattaattcgttttcgggtaatgcaatcgccaatcggtctcttatgtgtgttaagctgaacaaaacaataaaattactaatgttctaatgggaaaaagtttgcaagtttcagactgtttccttgtttttattgctaaaattattagaggaacaaaaatatatgatcttcttttgttaacaaaaagaaacgtttgcaaaattgatcttacttttgaaaaagcacatgtaactattgagaatcggatgccatgattctcttctctgcatcgtgactcgtgagaataggatgtcgtcatagctttctttctcactttgcaaagaaaatgtttgaccttttgcagctaaaaagtacaaaccatgaagttgtctctactttactcttctgcatgtataaaggattcgtatgtggtcaatacattcacaactccatttcaacttcataagcggtaaaaacttgttacacaattctctcttggttgattgattgctcttctttcttgttaccaagtacaactttggatgtaattagtgatgagattgttatttatttgatcgttttgaccatgttttcaaatgtcgaaattttcattttaaccatgcgttcgtacaccttctactctctattgtatcatttcattcaatatctggtatatatatatggcgacatgtgttgtgctccatagtgccctcatatatatgttcgcttttgcttccctttttttcttctgctaattagctttaattacatctactaaaaaagtaaaaacacatttatgaaaaaaacatagtaataactagactatgacacgtaaattagtggtttaacttgtgtttgtaccattgttatatcaccatggagatttatcaaaatatatatatatttttaaaaaaagagtttagtttaacaactatatttaacaactatatcgaacatacacttagacttacatctatgccattgtctcatctattcacatttgaaatcttttagaacgatgggttaaaactctagattaggctgtggaccacccaagtgatagcaaacaatgtacacgccgctatgataggagcttccacttatcctaataattaaagtattcaataccacgattcagaagtcatccaaagtcaaaacctcgcacgagtcatgggctcatggcttacccgctccgcggttgtactttgtatatgtttcaaaagcaggaaaacattttttaaagcaattgtaaaataacaaaacaaacataaattatttgatagccggaaactatatatgtatttgttacggccagaagttgattataaccaaagtagttaaatcttgaatctgctttttcattctaacttttttttttaccacacatcaatccaaaatactgccgatgaaatttgtaattagtatcaacttctgtctaaaatacaaatttgaacttctaatttagatccaagcgatgacaactacatttcaagtatcattgtagtttgatagactagtgttacactaaacctaataaatataccaatcaacacacaatgaacccttgttcaggagtaataagggttcaaatttgcaactcttttgtcaagggaaggaaataaataatcaaattgttagccgatgcatgattgacgaaaagtaggggtgttttttacaaataagctaagatggctttagaggaccaccaatcggtccaatcctttaacactcagagcctgaggcagagaacacgatgggtcatcttatatttgtttataaaattgccaataattgagataaggtatcatgattcatcaatctagctagactgtgtgtaccatacataaactataacccatgtgtataaaatatacaaatatctgtgaacatcaaccacctaactataatgaatatgaaaatcatacgactaaactaatttacgtaaactatactactttgaaacaattattcatcaaattctcttatactattaattgtggtttactaaacttccaagttttatgttttactaatcctgtaaaattagactttagccgagtccgtttgaatctaggatttttgaaatttccaggtggctcaaagctaaagaaaatgtgaatgagaaatgatttcaacgaaaataagatttacataatagccaatgacatatatgcacttgtcaagttggagttaaacaataaccacacaccgaattgaggagcccattggaaaaaacagaagcaaatatatttttatgtaaaaatagaaacggaataatatagtaacaaaaagatactctcttcaaccttatccattcttcgccacttctcccactaatccgctaaatcattcttcttcatctctctctcattcacaattcccgaaattctctcaaatcacagatccttttagggtttttccactgtttctaggttttttttattgctcaaatctgatcaatg

SEQ ID NO: 9154 - DNA, 3000 bp, Unknown
  misc_feature (1)..( 3000): cDNA_ID_2180666_gDNA_ID_1972015_Annot_ID_177877 3000 nt of promoter + ATG
tattgactattatctatttatctttatgagtccaatactcgaaaatgtttatttatatttacaaaatgtacagaaatacttaaaagctattttcgttattttaatgagttagaagattgtcttttcccatggggaatcgacaagaaagtatatgtattctcataatgaatcgaacattagaatgtctctttctaacgaaccagtaaccacgactgagtaaagtagtatcattgtcgttttaaatagtcaaataatacgccctaaagtctaaaatttgtgatatgttattttttattgatcattttattatgatcaactagacaactaacgaatcatcagtttttagaaaaatgaaaagaatgccacgtctatcgtttgatatgattccgtgtcaaatgaacctgaacattgttttgaccggcgcagattcctcaccattgtttcgtagcacaccatttctcttttgccaattctcttttcccaactctaaattcccaggtttattacaatttctcgatcgctgattaatcttggtgaccacctgatcgaaactgaggatccttgggtttttcaatatcgtatcttgtttgcttgaaaccctaggcccctttctggttcggttaggttttggggtttatgatcatcgatgcttgcttggtaatataaagttttgaataatgagcgcggttagttttctttacagctcgaaaacccccaaatttcgaggggttttcaatgggatttgtgctctggttctgttttgcttcttctttgatcggagcgaattactcagaaaccctttgttaaggaacgcgtctttcgtcaatggtggtagtggctcaacctccggaggtatcacccagtttatggtaattcgtagaaatgcgaggcaaattgaaacgaatggttctggtaataatagcagcttgagtagcagtagtactgttttatgctcagggttacacaaacacatgggttatgctgatcaatgcgagttcttaaaagcaaacccaatttgttcccctgatggattctttgattacctcagcttcttttactgctcctgtagagatttcagtatcttgggttacatgatgttaggtgtttggcttgttgctttgttttatctgttgggtaatactgctgctgattacttttgttgttcactggagaagctttcaaagcttttgaggctgcctccaactgttgctggtgttactttacttcctcttgggaatggagcaccagatgtgtttgctagtatagctgcttttgttggtacagataaaggagaagttggtcttaacagcgtcttgggtggtgctgtgtttgttacttctgttgttgtagggattgtttcgctttgtgttgcggataaggaagtcaagatcgataagaattgcttcatcagagacttgagtttcttccttttctcgcttgtgtctttgctggtgattttgatggttggtagagtgacagtccggattgccatcgcgtttgtctcaatatatgtggtttatgctttccttgtggcagcgaatgtgattctgagaaaacatgctaagaggtttaaactagaggctcttactcctttgctacctatgcaaggaagtgtgttttccccgagtgttggagaggatatgccaatgaatacccccttgatagaaactgagactgaggatggtccacctcggctacagagtcttcctcagtggatgtgggcgtcaaatgtggccatctattcaaaccatttcgcaaaagttagtgtacatgatgaagacaggccaccttggggatggattgatgacactgcagaagtagagagctcctcatgtactaaattcacttccttgttggaaattccgctgaccattccaaggagattaacaattccatcggtcgaagaagatacatggtcaaagacatatgctgtggccagcgtctcattagcgcctgtccttttggcgtctctctggagtagccaagacgatgtgagtctccaagcttgtggtgtcgcatactttttcagcgttgttataggctccactcttggctttctggcttacaaaaacacagaacctgatcacccacctcgaagattcttgatcccttgggttcttggtgggtttataatgagcatcgtatggttctacatgatagcaaacgaactcgttgctcttctggtgacatttggtgagatttacggaatcaacccgtcgatacttgcgctaacagtacttgcttggggaaactcaatgggtgacttagtatcgaatatcgcattgacaatgaacggtggggatggtgtacaaatcgctctatcgggatgctacgccggtccaatgttcaacacactcgtcgggctaggtatgtcgatgctttttggcgcatggtccaagagtcctgacacatacatgctaccagaagacaaaagcctattctacacacttgggtttctagtactcggtttggtttgggctatggtgatactcccgcgcaacgacatgcaacctagcagaaccttaggtgttggactcattgcaatatatctgatattcgtcactttcaggctgagctgcgccatgggattcataccatgggctgcttaaagagctatgtataaccttgtttagtctctaaccaacaaactaatcagaggcttattgtataccaaagaattgatcatgacatgagagtcgtagttttgaatcttagtgtgtttgtttgttattggtttgtccttttgtcatacctgcccattttcataaccgcaaacatttcttattatcctcgtgtcaacattaaagcagtcatgtgacccacgtctcctccttgattattccattattcactgttatcttttcgaagaatcatttgggaccaattattgataaattgcagacgtggcatatagacgaaatacaagattcagagataataaatacgtcaccaaaagttatcacccacaacgaatcttcttcttccatcgccattgccatg

SEQ ID NO: 9155 - DNA, 3000 bp, Unknown
  misc_feature (1)..( 3000): cDNA_ID_3044850_gDNA_ID_1972015_Annot_ID_177881 3000 nt of promoter + ATG
gtctctatagtgcttggatttctcttctaagttgaaatgcaagaccacaatcaaccatatcaaatgcaaatccaacggagatttactatccaactccgtgaaatccatatccggtgtgtttggatcagaaccagtagagggattcgacatgatgagatcatccaacgtttgcttataatcagagatcataacaatgtagttcatcacataccttgtcaatggatgaatcgttcctccagggacaggaactatcgaaggttcgcgaagaaccgcattctcaaactccgaaagtatacctctcgctgcttccgctaacctcgattgaatctcaacagcctgagctctaatagcatctgatgaatctgagtcaaagattgcttcaatatccggcaacatatccgttaaagcatcatgtaaatcaagaatcttgaacagcttctcaggtgatcttctactgatacttatagcttcagggaaagtgaaaagtctcagagcagaagccttcactgtctccatgaaacaagtctcatccatggcagtgcaaataccatcaaagagctgctcacatagtctcttctcactagagaaaacaactctaatgcaaactttagcagcacgaatccatttcctgatctttccttcaacaacttcccactcaagcctttgaacatcaccaatgcttatcttcacaatcccaagctgcttaaatattgcttccatggctgatttgcgaacagttccatagacttggatacattcacgagagtaaccggcggcgaccattcgttgaacaatcgatcttagatcagaaactgcttccggcgaaatcagatccatttctcgtatactgctagtggatctgtaactgcttcttctacgagttaaccggcttgaaccggaaccacctggagaatttaattcttcttcttcgggagttacggtggtatcttctccaacttcgacggttaaagacggagagactgatggttcctcgaggaaaagtgaatcaggctcgaaagtagttgtgtgggagagaagaatgttacggaactcgtcttcgagtctagccatagcgatttgaatagctgagttggctttgacctcgtgttcatcgactacggtggcggcggaggtggcggcggaggaggaagaagaagagaaagagacagaagataaggaccgttggatttcatcaacggctcgaagaaaccgatccacctcatcacgatcgctttggaaaatcatcttccctcttgctccatcagtcgctgctgagtcccaccggagtattatcctctccgctgtctctaagttcgaaccatcggaatctaaactattctccggcggttccatctaataaatcaatcagacaacaacaaaaaatcaaaaacagtataaagaaaacttcaaaattcgaaagccaatgaatgattctcacctccaccgattcaaattcttctcagatggaaattcgtgaaggagattggttgattttttggtaagaaaccacttcggtttttttttttttgcttatcggaagaagtcttagcaaaggcaaagctgtctgtttgtattgtttttagttttaatttttggaagtttctgcgagaggtgggaaatcggaaaaaataagtctttggacttttcaactcctctttgtgtgtacgttgccgataaattttaaacttttttattccgaattactcgccggcggcgtaaaatgcccggtaaaaacttttttggtttgtcgaattattgggtgagatctagtcataaatgctattatgcctaaaacaaagtcccactttctcgatataaaaaaaaagacacacatcatgtcttattatgatctttcatttccatagtgggatcacttaagccagtaattttggaaacttttttttttcagttatctaaaaatatatatatatatatatatatgacatatacattttcaaatatacaatactttcaataaactaaaataatgtagttgtttctgtgctactaattcggattttttctttacataatttttgttataaatagtttacctaaaatgttatgacgtggttggcccatgttggcatggcaaggacatcaatttgtatatgtaatcaaattacctgcggataagagagtaccaatttggacatgttttttttttttgtatatttttgaatagtcgagaaaataaatgtagattgtcaaacctcataatgagatgtggttggtggaccatacttgattttaatcgagccgattaagtaaaggagataatacaagttgtagtcatgaatatttaaggttattgaattgtttgaacaattaggttaacttaacaataaattgaaaatttgatatatctcacatacaagatcataataatacaattttctttttcagttctcaatttgtttctctttcacacaaaaaaataatcctcattttatttgagtccttaaataaattcatctaatcagtcacaaagaccggactaatccaatatacacgcttgggtccacagaacaagttagtcagaaatactggtcctcctttgatatctgcaggataaacgacgtcgtctttagatatgggcttgggcctaagactgggctgtcagtaagataaggaacggacaaggagtattattggcagtcactaaaaatggttgtcacagtgccgtgacgttagtttcacctgacttgttctctgaaaattagcaataaaataaatcgtgctataaatagttcacttgtgccgcacggtccctctcatcttctacggacagcttctttctctttcctctctgattttttttttctctttctacctttttctttttttattttctttcttttttttttgttagtttttttttttttctttcttcatctcgtgaacgatatagtacctgaaccctagcggaggaaaatcaaaaattgtctaggagaaacaaacagagatatctttctttctttttatcagtggggaaaaaaa

SEQ ID NO: 9156 - DNA, 3000 bp, Unknown
  misc_feature (1)..( 3000): cDNA_ID_1662981_gDNA_ID_1972015_Annot_ID_177882 3000 nt of promoter + ATG
caacaataacgacaacgaaagatgaccttcaaagtatagatataggcatccacatggaaactagaacagacaaaagaaacagtcacgattgctatgatatagccttagaccaagagaaatagctaaacatctgagaatcaaatattaattatgaaaagaaattggcggctattctgacaaaatttctttaaccctgttcatctacattgctttgctttctgcacagtccaccagcattgtttcatataccatgtatttcatattgaatgaacaaatatattgaaacgtaaaatctgctcatcaacactaacaatctaaacgaacctaacttcaaccatagctgaacagacttacatagtcatcaggaagaagacgagcatgttcacgtgttggagcatcaaaatccagatggtgtaaagtgtcagcgttagagccatttttcttgagatatctttgtgtgtgatgccacactccagcattaggaagataagtacccacatgagatccctgcacctgagatcattaacattccctggtaagtaaattctaatcgagtgttaatcacctctatcaatttgagggttcatcacacaatactttacgtacgttgaacaaagtctaggaaacagtaccaacaccctcaatacaagaaaagtaggaacataaacacctgactctgatttcagaagcaatagtgttttggaggtgttttccatacagttcctaagatttccattcatatacaacgagatctagtatctctctaggtggagagtgaacactactagaaaagaaaatgcaacaaccgttttgctcaacttctgtttgtgaaaattaaaggaactgcactgcaattagcgagtttataacgatcctatacatgatctctacctaggaatacaaaaatgaccagaccagatacaccaatcaagtagcataccaaaatgacaatgggaaagtaatatattgaaaacgaatatactggaatcatcaccttcctttccaagtcaagtgattttgaagcaagttcttcaagccacatgactatccgaaggcatagctgagctgtatggtcgtttaaaacaaactgacaagcctccaaatgagatgttgatgggatctgccgacattaacatagtcaaataagtccatgcgtaagatgtatcaataagaatgattcatttgaaaaacgactacgaaagaatgcattaccaggatcaaattctcaggaacttcatcagtacctgcaagaacaaatacacatcgtcaataatagcatctctaacacaaaccacccagtactttaactgaaaattttccaggtagacatgaaaatattacacgacaccgagctttatcagacatcagtgatcaaaacgaagacaacacctaccctgttccaaaagtaatagaaagatggagctgagtttcctaaccttttccatataggttccataaaagtgaccaggaggcagcctcaccaagcaaaagctgagccttctgtctcataagtttatcctccacagcacgatgtctaatatctgatccatatctgtagataacaggaaaagatgaaccaagcacaaagttgaagaagttttgacggtttaactctcagagccagaagacatacctaattgattgtgaaacattcctgcatgattcttcaagcctcaacattagatttggaatggacattagtcctgcaaaaccaagacgtcataattacaataagagaaaaccagataatactgggactctagcaactaactaacgggaatcccacaaacacacaaagcagaaacactgcttagttgagattttgaaaaaaaaggagaaccacacacatgcatgcagaaacaaacccaaatatctgcatattcatgtatgtacacatattatattcgaagactgatatatcatacaaaccttgaagcgcagaatcaaacagggaagcaaacaaagcaaaggttgtatctccactctccgctaactcatcattctcaatcttgcaagccttgagtgattgactttctactcgacgaaacaaagcctcatcgtcatcattaagaattccaacactctccctcctggaagcagatatcgggtttgtaggtgttccttcgtaatgatcagtgtgaaagttgtcaacctcttccttaatgttttcaaggagcaatgcagtatttgttggactatgaatgttatgcccgtcatacagtaatctgttctcgctgacatttgaactcaacatttcctcatgtggcgatgtagagtgtctctttctgcaagcaatgttatttgacatagccgggcatcaaaacactatacccagattccatgaactaaaaccataacccctaataagattcagttcttagagaaaatccaacaattcaaatcgcattcaagtctcgctagaatcagctaatttagaccgtactaacaaacaaacgacaacccaggaaaaattcactttaaagtaagaagacccagaaaatcggaaaagggtagtcgaaaattttaccgatagcgacggaattgatccctaacactgagggcctcggggtcgaagtagctaggggaagtgtccatatccatatccatttcttcaccaacgaaagctaaccccaagtggtatgcagaaatatcaaatcttagaatagcagaagagcgcggcaatgctcaagttgagctcgattagggttttgtagtcgtcaaaaatctaaaacccttttaaaatcctccgctccagtagaagactccgctgagacaaagacagcgacgacgacacagaacagtcgccaccagagtttaagcaaaagctccttaaacgctgcgtttcatctttgaagcttagtaaaaaagggtttaactgtaattaaatagaaaaacaggggcagtcttgtacaagtttcataaaaaacagaccagcggaaacgagttttaagcttcccaaagcgtttgttttatcctctcagagagctttctttagtgatg

SEQ ID NO: 9157 - DNA, 3000 bp, Unknown
  misc_feature (1)..( 3000): cDNA_ID_2992324_gDNA_ID_1972015_Annot_ID_177889 3000 nt of promoter + ATG
gtcagatcgtccttagcatccatctgaaaccaaaaacacataggatagagtcataaaaagtgtcactttaagttccaaaactagattaaagatgcagtctcaccaaaatctccatcaaagacagagagatagacattgttttttaagtacagtaccttttcaatgtcccaattgagatgcttctccttgatgctggaacctgcaagtacaaaagatcaagtttagcacaagcttactcgcaaagattggttaaacatcatagcttagaagatctaaatacaataccatgatgaagtagcatgagatcagcagagtagtgatcatcccaaagattttgctgttctttgatgcatttgctgtgatcatgtaaaaacctttccccagctatatcaatctctttcacagcagcagaagcaatttgcttgttctttgaagaagcagcagctttcgcatgaatcccagacttgtttgtaatatcattcagagccttacgagctcctccaggtttcttctgaccaagtacagtccctttggatttcacagaagcagcagtgacagactctgtaaataatagccaagaaagaaaatgttaaatctttgtttcaaagcaatatgatttaaagagagtagagaaagattaactacttttgcgatgaattggagcgttctcgtctgggaagatcatttgttgaagagcgttcatgttcgccatatggttttaactgtgaatcatcaaagaaccaattgcagaaacgaagatttgattccagaactgacgattttaagcaattagaaaccctaaaaaaggtaacagaaacccaactcgaaatcgaaacaaagatcgtttttttcacaaaacccaattcgatcctcaagcaaatttaacaccacagaccccagaaacccagaacgaatcaagtagcgacatacgaaaagaagaacaaacaatcgcaagaagaacagtctataatgtgaacctaaatcagaaggaagaaagagattacctttgtaaaagtgaagaagtttcttggtgagattcttgttggaagagaagtgtataagaagatgaagaagagcgcttagagtgtttaacggtaacttttcaatgttgttctgacgaaataatgaagaacctccgggattaggccaaaaaaagtaaatttatagaagaagagaaaaagtttctagccgttggcagaatattttaatgcaggcctaatcaagaattggcccaggtacaggcccatcacataaatcaaattgacggcatcaaactatcatgtaagatagaagcaaaacatgtcacacttctctaagttatcttcttatcggctagatttatcatcatccttgattaaatctccttaattttggaaggttaaattataggtaaagtgtatataattagtctaaccaaggatattcaacgcttctcgttcctgttccttatataaaaccattatcctcacataaagaagacttaacaaaaaaaaaactcttttcaaaacacattagagacaattaacaagaaaaacccttctaataatttgatcagagatatgggtttttcgcacaagttgtgggatgaaactttggccggtccaacgccggaaaatggtctcgggaagttgagaaaccacatatccggtgaaagtgccaaccggaagttgatggtggatctgaaacgtgtcccgaattctcctgaccgttcaagcaaccccgtttcccctttgactcttatgttaccttttttaaaaatcctttctgatccactttttttttatcttctatgcttgtgttatgagcagttaaaaccctatatattcatgtaaattaaagactttgcaaggtgatacatatgttcatagtcattataagcttttttttattattttttttttttattttgacatccataatcattattagcttgagagtattatggatttgtaaattaatgattaccaaaatcatttgtatgcagctggaacaccaagtgaaacacatgctacaagtctcaatgcttgcgattggtttgatctccctctcttttctttcctctcaaactatacttcattttatccaacgcattatcgctttcattagtaccaccatatctaattaacgtccggtaatactgcaggattgtgctaaacgcattggaccgttgaaaaatattacaaggtatttctacgagaagaagaagtatcccaaactacttttctttgtatatatatatttgctgtgtacataacataatggtcgcttttggtgttttgagatttgagaaatattaaatttctgtttgtttcacaattcacgaagattatataaggtctttttgaaacatagtatttctggaatgtttaaagttgtatctttgacaatggtgaaaagaaaaaatgatactaagtgataacatgctaacgtagcgtatggaaagcccaataaaaacccatgcccaaagtaaataacatccacgtcaccgttcttattgttaaaagagagactaattcgaatcgatttaacgaatgaagcaagacaacgaaggaagacaactggaaactatcgacggactaaaaaaagtctacgaccgatattgaaactgacggttaggctaagggtaatttcggtacatcaccggaaaaatggttcacggggatagttccggtaattatagtaaaactagatgggcttttccgtcaatacacttcctcatcggattacgaagaaatggggaaattacgatacaaacccatcttttacccctaaaccgagccggcaactttaccggtgacggaatcttacctctgacctaccaatcacgtcattccacgtcatctccccgtatcttctcacgtccttccacgtgtcccctctactcaccgacgccgtctccttcccgtttacccctcccgaacagaatattaacccaaaccctaaccctatctccctctttcacgagcttctgactcagatccggcgatatcgaattccatg

SEQ ID NO: 9158 - DNA, 3000 bp, Unknown
  misc_feature (1)..( 3000): cDNA_ID_3044819_gDNA_ID_1972015_Annot_ID_177893 3000 nt of promoter + ATG
atatcaagctgacatggaatataaagcatattagtatattcttctttttgtttatactgatattccattcgctagttgctttttaatgattctattctctaatttacaacttttagagaagccaatggcctgacggcatgtcgaatctaacttacattacatatgatacttctgacttctatatgatgttcatttttcccacatgttatatgtaaaatttacctatcatatatatatatgactacaagtctgtaatatatgagggcaagtctatatatataaatgactacaagtctgtaatcatttacgaacctaatttttttaaatactcagtgattaactttcttaccgcaaattataagcagattattataatatttatttattaactttttaaaaattatataatatcacgcgaaaactgcttagtatttcacatttcacctttgtaattaaatttgtgtgtttttaacggtcatatcttatatatcatatagatagaaacataaatcatttagtaagttaatagagctggttaatttaatcatgccaaaaaatatcttgaagaaagagaaggattcatacaagggacgttgtactcccgtacacgttttgcttaatcttctaagttctaagaaaagtacgaataagtctttaattaatttgaattaatattttattaatgtaaagtgaaaacgagttttgacattatttgtaaattagaaaatcgacattcccgaaaaggctgactgcgtttgtcattgactcaattatagctggttagaaaaacgcttgtgaaaactttgtctttgggtggttgagattaataattttgaaatcacgaatggttgtttcctaacacgggtttctcattttgttttgtcatattttgagtttgcatagtcccaatgcaaacaaagtaaccgtaggtttgttgtctttccatactttgaaaattgaaacagtataacaagttaataatatttgtactattattttattacaaattttttttttatcagacagtaaaagtgttctcaaaaacttgttcttactgtatttcccccccaaaaaaattagtggtttaaaaatatttagtggttccatcagcctatcaatcacacctaattaactactaaaattcgatgcatttgttttgtttgttcaaatatattctctactttttatttttacttgataaaaaataatttagtagttcttgcattacatcatcatatgcaaaattgtgttatgatttggcttacttttgaacttttactgttttacatgatcaataatcagatttttattttattttttttgggttggagattattataagtatttatatttgtttctttcataaatgtgtcatgtagttatactttaacgactttaattgtttttacaacagttacgatcgtggattcgtttgagaaaaatacactaaacgtcaacgcaaacacaaacaatcgaggtggttataatttaaagattcaaaagtttgtaaactaccgttatagatttcgcacacgatcatggtagttatacttacaacgacttttagattctagattcgtttgtgataatataaactaaacgtcaattcaaacacaaataatcgaagtagttacaatcttaaacacttcaatcgatttgtttaaactcaacgatcatatttagctattaaaatatgatataatgcaaaatacatgagtagaaaatcaatacattatttatatcactacatgaaattcaataaagtcacattctttccttataaatgtaaatatgtaatgtactaaaaaaaacgggtttatacatctcaatttttgtatttgttttcatcttatattttcttttattttagtatcatcaaaatttaacctctggctatttttaatttttacattaatcttttacttattagaaatatattttattttatttgtatttatttgggaataatttctaattaatttcttttcctaaccattttgtatatttgtaattttttattaagcttggattaatttctatattgattggaatctatataagaatataagaatctaaatttaataaatatagattcttatatttatttctgttttgattcccatatatgatagtattgttaattattaaaattgaattgatggtttatacacactataatgtttaaagtaaaatttctttatttgtgccattgtgtgtaaatgatttaagctcatatgggagttaattttatcagccagctcatatgaagctaattttagaataagaactatctatactagtttttttttttttaatatagaactatatatgtacacagttggacaatttctatataatttttcaaacataaaaaaagtatttaaatattttaactaatggaacaagttacaagtcaccccaaagattacagtcaaacttaccttttcgaaattgaatatttcttttataagaaccgttttttttgttttttaataatcattttgacaaacaataaatataaaattagagatttaggtgatatttaaacgagcgcctaaagttaaaaacttttaaacccagaaatcaccaaaaaaaaaaaaagtacatttcctttttttttgttcttaaatttttctgtggttccggtcaccgcagctctgtcatcatcttcttcttcttcatttaccaatctgaaatctactcagattctttgtgattttctccttaaaatctcgatctgtatcgtacagtgacttgtgaaattaggatcgttgtgtctgtgttttctggttacagtttgtaaaatttgaatatttgtgtgtgaagtcagattcagtttcgtgagctgttcggatttggtttgggggtatatatatagcgttgtgtgatctatttggggggttttggtttccctttttttctctcttgtgaattcgtttattgttgtatcgtcggcccgagtttatcggaactccgggtctgacgtgagttttccaaatg

SEQ ID NO: 9159 - DNA, 3000 bp, Unknown
  misc_feature (1)..( 3000): cDNA_ID_2180724_gDNA_ID_1972015_Annot_ID_177896 3000 nt of promoter + ATG
gcgtttggtacttagtgatcaattttgtcatttttaaccatgtgaagagtttttgttttttttcaacaatcaattgtatatatattttttgccatctttatcacttttaataatagtaaatgaaatatcggtattcattttctgtgacctttatagtctatcattgaaaatagtgttggtgagaagtttagtctttagggatatggtgttattggaggaatcccaaggcctgaagcaatctttgtgtgaagcaaagcaaatgtaagaagaatatatcatctaaatttgtttaagaacacatcactttatatttaattagtctcatataatagcaaaatttcggatctaaaatacatgctacgcgagcctaatatttcatatgcgattgagatatcttttaccttgtagactgtacttgtaatttttttcaaagaagttacatttactttactatcttactataaattactaacttttgctgtataaatatgaccactgaacgtctgtgaagttcacgaccaaaccagtcttactctctcttaatattaaatcattggaatatttattaattgaatttaaatcattggaatatttattaatttatatttaaaaatattaaattactttttcttattgatactagaaatgtataagttacaagttttattttcaaaaaattagtttttaaaaaacagttgccaatagaaccgattccaaaacaaacaacaaagtgtctttgtagctggttgtggtcgctagcaaatacgaaacaattacatggccatatatatatatatatatatatatatgcgtttggtacttagtgatcaattttgtcatttttaaccatgtgaagagtttttgttttttttcaacaatcaattgtatatatattttttgccatctttatcacttttaataatagtaaatgaaatatcggtattcattttctgtgacctttatagtctatcattgaaaatagtgttggtgagaagtttagtctttagggatatggtgttattggaggaatcccaaggtctgaagcaatctttgtgtgaagcaaagcaaatgtaagaagaatatatcatctaaatttgtttaagaacacatcactttatatttaattagtctcatataatagcaaaatttcggatctaaaatacatgctacgcgagcctaatatttcatatgcgattgagatatcttttaccttgtagactgtacttgtaatttttttcaaagaagttacatttactttactatcttactataaattactaacttttgctgtataaatatgaccactgaacgtctgtgaagttcacgaccaaaccagtcttactctctcttaatattaaatcattggaatatttattaattgaatttaaatcattggaatatttattaatttatatttaaaaatattaaattactttttcttattgatactagaaatgtataagttacaagttttattttcaaaaaattagtttttaaaaaacagttgccaatagaaccgattccaaaacaaacaacaaagtgtctttgtagctggttgtggtcgctagcaaatacgaaacaattacatggccatatatatatatatatatatatatatatatatatatatatatatatatgcgtttggtacttagtgatcaattttgtcatttttaaccatgtgaagagtttttgttttttttcaacaatcaattgtatatatattttttgccatctttatcacttttaataatagtaaatgaaatatcggtattcattttctgtgacctttatagtctatcattgaaaatagtgttggtgagaagtttagtctttagggatatggtgttattggaggaatcccaaggcctgaagcaatctttgtgtgaagcaaagcaaatgtaagaagaatatatcatctaaatttgtttaagaacacatcactttatatttaattagtctcatataatagcaaaatttcggatctaaaatacatgctacgcgagcctaatatttcatatgcgattgagatatcttttaccttgtagactgtacttgtaatttttttcaaagaagttacatttactttactatcttactataaattactaacttttgctgtataaatatgaccactgaacgtctgtgaagttcacgaccaaaccagtcttactctctcttaatattaaatcattggaatatttattaattgaatttaaatcattggaatatttattaatttatatttaaaaatattaaattactttttcttattgatactagaaatgtataagttacaagttttattttcaaaaaattagtttttaaaaaacagttgccaatagaaccgattccaaaacaaacaacaaagtgtctttgtagctggttgtggtcgctagcaaatacgaaacaattacatggccatatatatatatatatatatgcgtttggtacttagtgatcaattttgtcatttttaaccatgtgaagagtttttgttttttttcaacaatcaattgtatatatattttttgccatctttatcacttttaataatagtaaatgaaatatcggtattcattttctgtgacctttatagtctatcattgaaaatagtgttggtgagaagtttagtctttagggatatggtgttattggaggaatcccaaggcctgaagcaatctttgtgtgaagcaaagcaaatgtaagaagaatatatcatctaaatttgtttaagaacacatcactttatatttaattagtctcatataatagcaaaatttcggatctaaaatacatgctacgcgagcctaatatttcatatgcgattgagatatcttttaccttgtagactgtacttgtaatttttttcaaagaagttacatttactttactatcttactataaattactaacttttgctgtataaatatgaccactgaacgtctgtgaagttcacgaccaaaccagtcttactctctcttaactaataatattgag

SEQ ID NO: 9160 - DNA, 3000 bp, Unknown
  misc_feature (1)..( 3000): cDNA_ID_2105344_gDNA_ID_1972015_Annot_ID_177892 3000 nt of promoter + ATG
atgggagatacacttgcacttcagtatggaggatccgcggcacacaacaaggtctcttttacttctctggccataagtttttgtctcgctagataaaaatcttaggacataattgttaaccaatgatcttacttatgtggccagatattttgtgaaaggcgtggtcaatggagagcagcgactcaatcacaggaattcttcagaactttacaacgttactacagtaacgcctatatggatgccgaaaagcaagatgcaattaacgtgtatgctgggttaaattttctctgttttctttttctatggtatgaaaaattatatgactttgatttgtatctttctacaggttcttgggatactttcagccacaatcagataagccagcgctatgggaattgggttctgatcagcattacaacgcagcaagatttcttgccaattctgtaccagagacttcaaggtatattttctttcctgtttaatgagacacttgtagagaagtttgatacattctatgtttcattagagatgcttacattccattttattgcctttagatcgacgatgaaacgatctctatcagaaagtagcatcattagcgagagcagtccagccgcattgggaccagtaggtagacatggtttagctgaaaaagatgaagaagttaaaggtctttcagattcagcaccggagatctcaacgtctgaaactgccaagattgctgctagtttgaggtaaaaaagcttatgatctatgtcaaagaaagcttctaaatatataggggttgctgtcagctaaacctgaggaatggctattgttttgcagtgctccaccaccgatattagaggaattaggtttagatgatattcttgaaaacgattgcttctgctgtgatgggaatggtgagcaatgtacatgtgcagcttttgatatggattgggtatcttcttcaggaaactcttgtgaagatgagagttgcggaaggtaaccaacaaaagtcttttcgaatctatctaatgtggctaatgttaatatcaaaccagaaatgttctatagaaagtctttgacatgttttcatttgtgcagagccacagtggttagatcctttgaaaccatccctgaaagtagaaaaatagagtcagaaatttgtgttgttgaaacagttggttccaacagtagaaaggtaaatacaaagcagccattgatgatgcataaaaccgcaatgctaataataacaaactctgctttcctttataaactacagggaaataaagaagaagaagaagccatttccgggattcctgaaggttatgtgaggtgggtgatggatgaagacggtcatttctggtgatgagagaacaaagcttttcaacaacacctacaagccatatgaaacaaaaccaaaaaaagcaaaacaaaaacaagaaagagcatactctttagtctttagtgggtgacaaagaaagaagaaaaactgaaaaagaattactaatcgccgctaatttatggttaatagaattggaagaaaaagggtgaaaaggtgagaaagaaagagaggatcacaacaaatttgtaaataatttataaaaaaagacatggagattgaacatgacttacatcttgttccatttttctttttgacatattactttaattttctggagaactatgatcgattgcaataaaacagagtgagtaccttcatacaagttcattactcttcattatatcttcaacgactccaataaagtggacactagatatgcacacacactatataatatacatgttatgtgtgtgtttctaatgttatcgaatcatcacttgagcattgcaaatgcaaaaaacgcatcttagttagtactttataacgaggccaagttactggtttgtttattagctttagtaatcagtgtattaacattacattacaagctcaagctatatgaatgaggtcaacttcaaaataggggagaggagggggcggcaaaaatgaaatgaacaaaagcactcgtaatcgtgattagtgatttgatttttatagtataagggtcccgtacgtggtggatattgattgacgcgtttaaagttaaaaagcacacgtttccaaaaaattgacggtgacgcaaagacctcatagtttattgtagtttacgaaaacgccacattcattagaaccttctggcgagtgtgaggcataaaaatatcatcgacacatctgaaaaatctcagccgcactctcatgactgtactattattcgtccaatgttccaaaaaattaaacaaaaaattcaacttcttgaccaacgaaaattataaaaaagagacaaacaaacatttaaatgaacgttttaattaccaaatttactgatacgtaagttataagtttgggtgatgtggtggaagcccaaaaagaaaaggtttataagttgggggtaaaagaaacagttattatttatatttttactttgaaaaatttattagtcttttttatgaaaataaaaatgaagtgattagtactatttgaatagatattttttgttctaagaagtattattattagtttgacgaaaatggaagaatacgataaattattagtagtaaaaaaagaaagtagtaggaccaattaaaaagatctaaacaagtggtaagagaggttctggagagttccattccatctttgtacgagagagaaaggcagagttagaaaaaacatataaaaaaacctgtttgttctttcctttcttctctccaaatttctacttcttcttctttgatcgacacctatctaaccctaatctctccgggtttttttttctgcccttaagaagacgtcgtttcgaacctctttagtatcgatactcaaacctatacacacaccaaacatcccaagtttgttggctctgtttttgagcggtgaaaactcgtcggaaaaacgagtttttttttaattgggtttctctttttttttgttgatctggaaggagaaaattagcgatg

SEQ ID NO: 9161 - DNA, 3000 bp, Unknown
  misc_feature (1)..( 3000): cDNA_ID_3044846_gDNA_ID_1972015_Annot_ID_177883 3000 nt of promoter + ATG
gttgtggaacttacaactggctcatcaggttgtctttctattactgtgcaaattcttatgtttttttctccttctcctcaaatggaatttacgaacctacattgattttccctgagtaatatgaaaaactttaagttaacaaagccatattggtcgtttgattgtgcagaggatggtaaagagacattaaatgaggaaacacctgaaaataattctcagtttaccactgtttatgtgggaaaccttgctccagaggtacattatccactaggaagtgctccttgtaatactatcacaacaaaaacagtttatttgaggttctttgatgaagttttacattagtagatttcgggtacatcgttacagctatctatcttgcaggtaactcagcttgatctacaccgttacttccatgctcttggcgctggagttattgaggaggtccgtgtccaacgagacaaaggctttggtttcgtgagatataacactcatcccgaagctgctcttgctattcagatgggtaacactcagccttacctctttaacagacagataaaggtacttttaagtttggcttaccactctaaaccctctctatttgatcttactgctcccaaaagttacttcatctgaaacttagcatgcaatctgacatttgttatcatgttaattgtagtgctcatggggaaacaagccaactccaccaggtacagcctcaaacccacttcccccacctgccccagctccagttcctggtctatctgcagctgatctcctaaactatgagaggcaattggcacttagcaagatggcaagtgtgaatgcgttaatgcatcaacagggtcaacaccctctaaggcaggctcatggaataaatgccgctggagcaactgcagccatgtatgatggtggctttcagaatgtagccgccgcacagcaactcatgtactatcagtaataaacctcagttcgtggcgccgatctcaagtttcaatctctttgctttttctcttttttttttgtttgtctagaacttgtttgtgtgtgtctgtttgtctctcacttaagttatctatataaagttttatctgcagttgtatgattagttatgtattcccatggattgtaagacaagcgaattacattcaataaaagggatttggatatccattctatgtgattttacatgaacataaacagacaacaaagaaaaaaacattgcggaaggatcagtcagtctctaaccgagcaatgtacgtatcatagaactttccagctttctcgagatctcccagctcggtataacagtctgcaatagctccatatgcttcagtgattccagaatcttcactttccctctttgagatggctagaaccatggagtgatactgtatggcttccctatacttcccttggcgctgcagcgaggcgcctaggcctcttgcagccttcttttcttcggtggggtctttgagactctgggcaagttccaaagctatcttgaactctgtataagctttctctggttcttggttcctaagaaaggtttttcctgttttcaacttggaaatcaactcttgtttctttggttccacaatgatttcactatctgggattcttgctcccactggagcataactcaagcttggtgcataagactcgattttggcttgtctcctaagagctgcgttaatctgtcgtagttgttcattcaacctctgtaactcccctttcctctgccgagcaagcaaccctgatttggtacaccacaaaaaaagtgttgtcaaaaccccaatgagtacagttcatagaagcatagattgaagaaaagactagtcactacctccaacggtggctccaataagagcaacaagcaacaaaataggcatgctgaacatggagctctcaggctcacatatctcagcagccaaagcttcaagaggtgtagccatctgaagggagtttgtcaacaacactgccatcaccggtaatttgagcctcccaattccctgccacatccatatctaaaagcttactatcactaagaaaaaacttgacaacaaaaaataaaccgagtcaaacaatataatgtgttttagctggatatagctagacatcccggaattcatcaccaaactacctcaaaagctgaaaacttgtcaagagatcccacactggcaaatggcgtttgtaagattccctttccttgtcgctccttaggctgtgaagacgaatgtataattttggagaaaggaggatgatccccaggttttctgactactgagtagccaatagatgtagcaaattttccaatctctgagaaaacgttatggagaaagatgacttcagaagcgacaaagaattggctaatgttattgaaatgaaccaacaaactattgatgcctcaaacaatttcgatctagaagttctgatgcctcattaccaaaagaggatcactcatatagcaacagtgactctgaattggaaatctgattcagcgaatgagctatgagctatgagctaacctggagctcgagacttgtcacgcggcggtggttggccaccggaagtatgagagaaggaggagcaacaccggataagcgccgccatcactaaagaaagctctctgagaggataaaacaaacgctttgggaagcttaaaactcgtttccgctggtctgttttttatgaaacttgtacaagactgcccctgtttttctatttaattacagttaaacccttttttactaagcttcaaagatgaaacgcagcgtttaaggagcttttgcttaaactctggtggcgactgttctgtgtcgtcgtcgctgtctttgtctcagcggagtcttctactggagcggaggattttaaaagggttttagatttttgacgactacaaaaccctaatcgagctcaacttgagcattgccgcgctcttctgctattctaagatttgatatttctgcataccacttggggttagctttcgttggtgaagaa

SEQ ID NO: 9162 - DNA, 3000 bp, Unknown
  misc_feature (1)..( 3000): cDNA_ID_1033146_gDNA_ID_1972015_Annot_ID_177879 3000 nt of promoter + ATG
ttttgctttggcagtggccatcgatggaagtcgtgatcctaaagccgtcgctgagcgataaacagtgctgaggattcgggtgtgttcgatttgatttctcagatcatttagccaagcagatgctgttacctgatgaaaaggtggaagggaagaataaatagtttatctcaagaaaacacaacagacgttttcccaagtatataaatgaagcatagaatttgggtctaggaagctaacctcagcacgtaagtcatctacagctgcagcagaaaatgtaggcaccagatcagctccgtttatgacagatacgatgaagtcattcccagagtcggctaattcccaagtcatacaagcagctgaagaaaataggtaggaacaagcactaagtcttgtatcttaagaagatataaacatatataattgaaaactagattgtatgaaaaacctggcgcaaatgtaacacatgtagctgtagagagcattttctgctcccgcataatatatgttaaaagtgcagccgttccaccacccaaagagtgccctacgatctgccaacaaaatgcaggagaattacaatgtatagggctagagacaatctttggtttctcacacaatgggttttaggaaaagttgaaataaagattagagaacgggctacaaaagtaccttgattttgtaatctggatattgctcaagacccttgagaagacaaggggtggcaagtttagctatacaccgggcagcagcaaccataccacaatgagcataacctaagaccaaattgctgacccctctttcatttacaacagtatgatggaacggtacgattgctccagttgcagcagtcaaggtatctttgatgctatgcgttccacgaatcaataacagaaaatattttgtattgtgatcgacaagaaccgtaaaagctggcttcaatatctacatggtgcaaaattcaaaactaaacttctcaatttctatgttgaaaaagtgcctaagagttgagagttgttaaagtttaccccagctttgggttcatgaataaggacattttcctttgtaaagccggtctcttctaagaaaaacggaaacgacttcttggaaaaatgccaacacaatgtcaacaagtgcaaaagatatttgagttcagtggctacttctgatcctctaagttctacactatctttaccaccaaagacacgatcaacatgtagaagtccctacggttttaggtacacaattacaaaaagttcaattttgaccacaagataattagaaaaaaatccagaacttaagaccgttaaaacgatgaagagatgttatacctgcctcttgatgagaaaattgatcccaaacgcaagatcaccaataggccacttcccaagagtctcagagtaagtaaaacgaagagtctcagaaagagtagaaatagtctccaaccaagttgccggagcttgaataagcctatgcgaaacacggtcaatcctcaaagaaggacgagaagcagaagcttcagaattctcatcgtcaacgtcagatggaccagctattaatttccgattcaacgtgtaatataaaagagcagctgctccagctgctgttgccatagttgcagttgccatgatcaatctatccctaaaatcatcaatgaaacaaattcgctcaatccaagacgaaactcaatctaataagaatacaaaatttaaagacaaaatcgattgaaactacattggatgccacaatttcaatctccagatgcgttcttaagtatctcagacttattccagaaatctccaaaaacatgtaaagctggaaaattggatataatttcgtacaaagaacattcttttcaccaattaaccccaaagaattcgggatacaaaaaaaagaagccattaatagaaaactctcactttcctgaaacttctcgaataccacaacaaaccctactcctgataactatcgcgtcttttaaccgatgcaaatcataaaattgaatgtgatttagcttaaaattgaacaggatcggtgaactatagaaacaaaaccctaaatcctaccccaagaatagcatcgttaaaacacgaagttctttgtgaatcaaacctggaaaaataagacgaaatcgtgaccttaatttgagggttttacagtggagaaggaaggttaaggttgctttagcttatgtacgatatctccgggaaggggaagctgctttctctccgatgatgttgttagctacaagatgctgcaatgcaaaagtgtgaaaacagaattttttgttttgctttaaataaactgcgctacgtttttgtgctaagcgaacgccgcgtagtttcgcgccgccgagatctgatgcttacgtgggaatatattattggatgacttacccataaaagcgttttaacataaatcaagcagtaaataataatagtgttaaatcgacttttttggtccataaattaaaatttattcgaaacagatattttattagcttggaagattagtctcatttatttaagaaacattcagtcacaataattattaggaaatttaacattaaattggaaagtgcttaaagtattaaagtacaacgtcttatctatcgagttaagaaatcgtggacattgcttgaaaataataaaaaagggacagtggacggatttgctcgctagttttctcttcgaattttccacaaacaaattttctcagccaaagttcgatcggatctgggttttatatttttttgaagaacccgtgtccgtcttcgatcaggtgtcgaaagtctcaatcttttttaatcactttatcaatttaaaccctttggtcaaaaccctaatttagatttctctttccgtcttcactttttttttttcctgtcaaagttcgcgttcaatagccaaatcttatctcttcagctggaatctgacgaacattattatcatcggtagtgttctatagaaagaccgaaagttttcttcaatttcaaagtcagtggcg

SEQ ID NO: 9163 - DNA, 3000 bp, Unknown
  misc_feature (1)..( 3000): cDNA_ID_2180674_gDNA_ID_1972015_Annot_ID_177880 3000 nt of promoter + ATG
atgtctctttaccatcctctgcacaatcaaacgaccaatatggctttgttaacttaaagtttttcatattactcagggaaaatcaatgtaggttcgtaaattccatttgaggagaaggagaaaaaaacataagaatttgcacagtaatagaaagacaacctgatgagccagttgtaagttccacaacactttttccatcagaactgagcttatcatcaccagaagtagcgcccttcgtggcccagttgcatctgatttgtctgctacttaaccacttacctgagaagatgtgatagaaacaaagattaattgctaagaataaagagaaaacctcaattttagatgacactgaaacagaagttatgcaactttcagcagctcttgactaacaaatcaagaaaactttcagcaggtctttctaggcacagtatcattcagttgcatgcaaattctaagcacttcagaacaagaaagcatgagaacgaagtactgagatctcagctactatataatccttaccattcatctcattaatggcagtttgagcatcctgcaaatgaaatcaacatttaacattaatgtaaaccacgaacaatccttgagctaaaacaaaaactcactgcatgatttaaagaatgtacattacctgttgattgcggaaggaaacaaacccaaagcctctcgagcgcccagttttttggtcccacataactctcgcatcccttcaaaatattagacacagtcagagattatgatatttgttttacaaccaagtagaataagttagttaaaaggagctgatcaagcaacagaacttacgaacaactggaaaagacagaaaagctttgatataatgttgcatcagtgacctctggactgagatctccaacaaaaatgttgaaatgacctgcaactcatggaaactaaaacattgagtatcctcaaaaacatacaaacaaaatgcaacacttaaaaaaagtcaaaacttacttgatgtatcttccctctgaccagtggcatacgcccaattgactttgataggctgtccaaacctgtaaactcgacgattataacctaaacaaaagcattcgaacgataagaagaggagaggaaggaaactatgaaaattgttccttacagatgccttccgttcagagacagtatagccagagcagcggatcttcgatcaaagtagtgaacaaatccatatgatgactgcaaataaataaaaagatgcatgctttatgagtccatttttagtaagcagcaagtagagtagtttccttaaagtattaaaaatgtgcaattgttgaggtatgctcgtccaaaacaagaaagctactatataagagggtcactttcacaataaagtagaaatcaggtggattttagaatctaactaccttatcctttctgatgagtttactgctttcaacagggccagtgcttgtaaaaatctcttgaagcaaaggctctgtgacctgtgtatggatgtttccaacatacctgccaatattagaataattggagaagttaaaacataaactcggaactgcacctttcagacaaagcgatgctaaaaaaattcactcacacgctacggcaagtactgggatcaaaaccaggaggaaggtttccacttggaacaggctctaactgcaattgccaaaagtaagaaagaaagaaaatgaaaaggattgcaatttcttttctatccccattagaaaagcacgagaaggtaaatatcagctcaatttggtaatgacgcaacaaaactaaaacacaaagacatcacaacagataaaaggaacgaattgctagcctacaggatctggaaaccctagccatccattcaatcaaatgagaaaaagaaacacagaatatgaacaaaaattatcttcaaatgaagaacacaaactaaacccgacccggaataaaaggactcacgaaagagacgacagtacaaaaaaaaaaaaatccaatttcgaccaaaattagacacatcgaagatgtaataaaggtaaaataaaaacctgaggaggagccaaaacaccaggatggtaaagagagtgttgctgcatcagagcttgttgctgcatcatagcttgttgttgttgttgctgctgatgttgcttcagtctcggattctgcattttttttccccactgataaaaagaaagaaagatatctctgtttgtttctcctagacaatttttgattttcctccgctagggttcaggtactatatcgttcacgagatgaagaaagaaaaaaaaaaaaactaacaaaaaaaaaagaaagaaaataaaaaaagaaaaaggtagaaagagaaaaaaaaaatcagagaggaaagagaaagaagctgtccgtagaagatgagagggaccgtgcggcacaagtgaactatttatagcacgatttattttattgctaattttcagagaacaagtcaggtgaaactaacgtcacggcactgtgacaaccatttttagtgactgccaataatactccttgtccgttccttatcttactgacagcccagtcttaggcccaagcccatatctaaagacgacgtcgtttatcctgcagatatcaaaggaggaccagtatttctgactaacttgttctgtggacccaagcgtgtatattggattagtccggtctttgtgactgattagatgaatttatttaaggactcaaataaaatgaggattatttttttgtgtgaaagagaaacaaattgagaactgaaaaagaaaattgtattattatgatcttgtatgtgagatatatcaaattttcaatttattgttaagttaacctaattgttcaaacaattcaataaccttaaatattcatgactacaacttgtattatctcctttacttaatcggctcgattaaaatcaagtatggtccaccaaccacatctcattatgaggtttgacaatctacatttattttctcgactattcaaaaatatacaaaaaaaaaaaacatg

SEQ ID NO: 9164 - DNA, 3000 bp, Unknown
  misc_feature (1)..( 3000): cDNA_ID_2180847_gDNA_ID_1972016_Annot_ID_177911 3000 nt of promoter + ATG
ggagaacgtgggagccttccatctcaacaagcttcatcttgtgtccttggatcctgaagttaagagtggatttgaatccaacattgcagatcctgtacttgtaagtctttccgggcttcatggtgaagagaggagcgttgtttccgcctagtttaccagatttcccattgatgagaacaccgtcgggggatcctagagtacgtccgctgtcaaggaagttcttgagggcggtgtggctcttggcgtaccagtcgttgatgaggatggtgcggtcgtcttcggggtcagcgtatgggactgggatgaggagacggctgttgacacggaggccaccgaaaccaccggcgaagcggtggagagcggtggatgggtagtagaagtagctaccgatctggtccttaggctggaaatggtaagtgaagttggtgcctgctgggattgggcatgaggtcccagtcacaccatcttgccatgagttcttcctgtgctggagtccactcctgccatgtcacccaaaaccattgtcaggactaagtattcaaagatacaatgaagactagttatatataggtgtggccatataaccgaatctaatgcaaagcaaatctttaaaaatcttttaaaaaatgtgattgcaaaagtctaactccaaatgcaaatggttgatacaaaaaaaaagatttgttttcaaaaacaacaattttaatgtaaaacaaaaatcacgaaaacaattgaatgacaagttctgacgaaaggaataagtttacagattagttacaaaccaggtcaagaggaaaggctcgtcgaggttgttgaagacattgatgacgacattgttgttggaggttgagtttaggttaggaccagggaactgtccgttgatgagaatcacctgttgaggaattccgagaggcgcggcggttccgtaggttacgttccacgtgtagtagaagtaagggtcaccggcgctcaccaacgccaccgtggaggcgaggcacaccaacaccgtcaaaagcctaccaccctgcattatctcttttctgcttctttttatttttttttattaataaattaaccctttcctatataaaaatatataattattttttctcaaaagcaagaagaaactatgttctcttgctcttgacgaatcttttggtgatgttgtgaatacctatttatgcaggtgaaggaccttggtatgcacggaattgttgcctcttttcacgctgcacctctaattctctttacgtgaaatttctatttttgaatctctctcgctcgctggtccttaggactcccgatttctctaacgagcacacaactcggatcttattctattattggacatgtctctaaagaagccaaattaactacccacaagtgtcatcatcaagtaattttgtttgtcttaacatatttcagctacggttgattattacacggacaaaaaataatattatggtacaacttagtaagtaactacagaattaattaccaacttaatatgctttgtaattttaattttaagaacttccatgtttttgataataaaatttcaaaaatgaacttgcatgttattcaatcttcttttgatcctttaaaaaaaaagttatgcagattattgaaataagataatagtctgcccaaaaaaataaaaaaataaaaataaaaaaaaaagataatagtctgcacaataaatggtaattgagatgtacatgtgtgtatatggtgttctatatataaaaataaaataaaataattttatatattagtatagatatattgtgaggtgggatgttgataaaggcctaataaatggtaattgacatcgtgggtcttatgcgacatgtttattttcttctccaaatgcttagagtttcttatatatacactacaaaaaaaaacagtttatcacttataactttaacaaaaagttacacattcaaaatatttgtatttacggcatcatgaactcttgttcatctttgtatcacaaactcttggtcaaaaggagtgtgtcacaaactcttttcgtctgaccaaagggagtgtatcacaaacttttgttcatctttgttttctaattagaaagatgaaagaacgttttggcatcaatgacataacgctagctgagaacgtatttggagaccatatgtctcttaccaaattctacacagtgcaagattttttaggtaagtaatttctaagattattgaagtagtttctcatacttaaaggttccggtgctctccgtgaatttatcgtcaacggttgactagctcgtatgattgaagaaaagggaaaagatactactcctattcctaactttaacaatattgttgtgaacaaatgctatgcatcattacctgattttcaatgtcatctaatttttcctatggttacaattagaagtcaaaagatatatagatagaaaaaatacgacatatcgaattattttctggtatatattatataaaaagacataatcatccaaattccaaaagcataatgtacaaaacaaagtgttatgattaaaataagcgattttcaaaatattttctataataatgtaaaatgtttattggtcgacctatacctttgtcacatatatatataaaattatatcctttagattattttttaatcccaaatagcaaaattctcgaagacatgaaaaccaaaaccaaaaaagacatagggaaaaaagaaaataaactaagaggaattaaagagaaacaccaaaaatagggagaggttaaacttcaatattcccaaatatggcgaaaggaatagcgaaatggtaggagaccccaaagaagacgagaaaaacctggaaaaacattcgtcaaaaataaccctataaaaatgcctcgaaacatttccacaactcgaaattcaaaccccaaagcataattatatataacaataaacaattagtaccaaaacacataaaaaatctataactgttatctcaaccaaaaattgtttattgttatg

SEQ ID NO: 9165 - DNA, 3000 bp, Unknown
  misc_feature (1)..( 3000): cDNA_ID_3044889_gDNA_ID_1972016_Annot_ID_177924 3000 nt of promoter + ATG
gtatccttactcgccagcaactagccctgctccacagcttggcggggaagggcagttgtacggtgctcagcagtatcagtatcctaactattttccaaacagtggaccgtatgcttcatctgtggctacacctacccagccggatctctctgcaaacaaacctgctggtgtgaagacactacctgcggatagcaataatgttgcttctgctgctggtatcacaaaaggaagtaatggatcagctccagtgaaaccaactaaccaggctacccttaacacctcaagtaatttgtatggtatgggtgctccaggaggaggtttggctgctggttatcaggaccccaggtatgcctatgaagggtattatgctcctgtgccgtggcacgatggctctaagtactctgatgtgcagagacctgtttctggtagtggagttgcatcctcctattctaagtctagcacagtaccttcatcgaggaatcaaaactaccgctcaaattctcactacacggtatgatgtctttccaaacttctttttgctaatgaacaccattgtctgctttactggcatatatatatagccgctcaagtcttccaaatttgttaactgaccttcaatcaacttttttctttgcagagcgtgcaccagccttcatcagtgactggctatggtacagctcaggggtactacaacaggatgtatcagaacaagttatatggtcagtatggtagcacagggagatctgctttgggttatggttcatctgggtatgattcaagaacaaatggaagaggatgggcggccacagacaacaaatacagaagctggggcaggggtaacagttactattacggaaatgagaacaatgtagatggtttgaatgaacttaacaggggacctagagctaagggcacaaagaaccagaagggaaatctagatgatagcttagaggttaaggagcagactggagaatcaaatgtaactgaggttggggaggcggataacacatgtgttgttcctgacagagaacagtacaataaagaagatttcccagtggattatgcaaatgccatgttctttatcatcaagtcatacagtgaagatgatgtgcacaagagcattaaatataatgtttgggctagcacaccaaatggaaacaagaagcttgctgcagcataccaggaagctcaacagaaagctggcggctgtcccatctttctgtttttctcggtgtgtatataatcctgaaattaaaaactgtgctctttttactttgttttatgatattgttctttatactccagtttttgtctttcaggtcaatgcaagtggacaatttgttggtcttgctgaaatgacaggaccagttgatttcaacacaaatgtggagtactggcagcaagataagtggaccggctctttccccctcaagtggcatattgtgaaggatgtgccaaacagtttactgaagcatattactttagagaacaatgagaacaaacctgttaccaacagcagagacacacaagaggtaaatatttgtgacatcttttggcttgttttactgattactccacgagcgtttttgttttcttgtgcctaactttctttgtttggatcatattaggttaagttggagcaaggtttgaagattgtgaaaattttcaaggagcatagcagcaagacttgcattttggatgatttctcattctacgaggttcgacagaagactatcttggagaagaaagccaagcaaacccagaaacaggtaagaactagaaaacaatttcagaaatctttttcattcagtatatatataacttgagtgtttctaatgtattaaagcttaacaggtaagcgaggagaaggtaaccgatgaaaagaaggaatctgcaactgcagagtcagcgagcaaggaatctcctgcagctgttcaaacgtccagtgatgttaaggttgctgagaatgggtctgttgctaaaccagtcacaggcgatgtggtggcaaatggttgctaactaagaggatggtgtcgctcacggcatgggcataaaactgactagagatgaagatatgaacaatcccgtttaacgtttctcttgagaagaagattgccgtgagccttgaagcatggaaggagctttagtacctgagacggatccgtttctttgcccttagaagtttaaatcccagttatttttttttcaatcttttcttgttttcatttttccttttcttcaaaatcgcagtctcgttacaagtttatgttgggtttctttttcattttctgttgttcctaccctgtaaaaatgcgcataggacctactaaatcgtgggaagaattagagaaaaggagataaaagcagggtgggattttgttttttcatgtctgttggatttttaggcagagttttcttttcttttggtttcttgctttggtttcagacttgactctcttgagtcgtttagaatttgagatggtcttttgcctctctcgtcttgtttctgtcattctccaaagttatctgaatcaatccatgttttaagattttcaaagcaaggagataagtattgttgatttttttcgtgtaacaaaacaaaacgaccttgatctcataattttgttgctgtcaccaataattgtcaaagaagccgagagaacctaactttagtcagctctccatttcaccattccaatgtatgatgtgtcgttttgatctatcttgccgaaattgctgatgtggttaaaatcccaataataaatgaagctgatcaaataagtacttgttgtctgatctgacgtggctagatagcttctccaacgctttatctcggaaactccgtgacaaaagatagtactttcatgtctgttttggtttcatccaaaagtatcaaatttgtgtgatcttctccagaagaaacttgaggaactttaagctaaacctctgtagttttcagattgattcgttggtggaaagcgtctaaattttgcgtaaatg

SEQ ID NO: 9166 - DNA, 3000 bp, Unknown
  misc_feature (1)..( 3000): cDNA_ID_3044885_gDNA_ID_1972016_Annot_ID_177926 3000 nt of promoter + ATG
gttaacaaatttggaagacttgagcggctatatatatatgccagtaaagcagacaatggtgttcattagcaaaaagaagtttggaaagacatcataccgtgtagtgagaatttgagcggtagttttgattcctcgatgaaggtactgtgctagacttagaataggaggatgcaactccactaccagaaacaggtctctgcacatcagagtacttagagccatcgtgccacggcacaggagcataatacccttcataggcatacctggggtcctgataaccagcagccaaacctcctcctggagcacccataccatacaaattacttgaggtgttaagggtagcctggttagttggtttcactggagctgatccattacttccttttgtgataccagcagcagaagcaacattattgctatccgcaggtagtgtcttcacaccagcaggtttgtttgcagagagatccggctgggtaggtgtagccacagatgaagcatacggtccactgtttggaaaatagttaggatactgatactgctgagcaccgtacaactgcccttccccgccaagctgtggagcagggctagttgctggcgagtaaggatacgctgcatacccataaccctgaggatacacaacagtcccattctctccataaattccctggtaaaatattgaacctgttaagcaaagaaaatataaagacgatgaaaggcactattataactagtcagcacacacttacagaattcatgtcaacaccctcaggatttgtgtaagctgggtagtcagtccactcttgaccactcccatatactgaaaagttacaaaacgaaaaacttgttaaaccagtggtgacaatttagtgaaataatgtttctagattgtaaatgatttgaggatgaagctaccattgtaatactggtagggattgtaaggattaggaacatagcaaactgaagggtcagcagcatcactgggaagcattggtgtcaaagatcgatcataagaaggaacttgaccatgaacatcaacgcctccatactggtagacggcagtctacacaagacacaaaacaaaagcgttaaaaaaaactggaagaagcaaaagttgtgacaacagaaaaccaaaattcaatctgcaaatcaccttcttgttaggctcagggatctctgaagcttttgctggcgagtccaaggatagtttctgcaacagatctgtagcttctacaaacaaggtgagtcaaggaagcaaagaattacacaattaaccattagaatagtggaaagcaaacattctcaaatcaatcaaactcgccacaaatgaatcgatttgaatcaatatagaaacctaacaatcgagaaatatattgagaaacccgaaactgaatctaggcaatatcaaatatatctgaacaagactcaaaatcagctcactggattcaagatccaacagattcaagatcgagaaatcaaaacacagatcgagaaacataaagaaaggatacgatcagcaggaggagcaacggtagccatgagaggagattcgacaaacaaagatttggatagatccttctcggataaaaggggatgcgaccaaagagaaagaagaagaagaagaaaaaaaagaagatagagaaaccctaaatggaatcaggaaaaacccagatcaaatctagggtttaagagatagaatagaagagagaaagaagaaaaaaatggccgcagccgccaagaaggagaagggttttgcttcggggaagaggaaaaaaagggttttgtctctctacctctccctctgattcaaatagatccactaatcaaccacctcaccttctctcttttttttttctttctttttttttttttttcttccaccttaagatatttcctcttttgttttaaaagaagactatagaccgtgtggttttggttatttttcctgcaaaatctggataatatacttttccattttcttaaaattggtaatcttgtaataaaatagatataaatctcaattctgttaccaaaatataattcaaaagtaaatttggtcaaatttaaaagcaaaagagggcatgctttctattataggtgtgtttcttctataaatttaccccaatatacattgaaatatctttaaaaatatatattaaacttttttgttttgagcaactatttaaaaactaaaagcaaatcattaagataaaaccaaagaaagtaaaatctatttttcagagaaacttaccaaaactagctattcaagaaaatatactttacctttaggataaaaggaagtaaattaccttagcttaaaaaagctattattaaataaaaacattttaagatcgagagtatgtaatgggcctatttgattaaagattcataaacaggcccaaatcaccaaacaaggccaccggaaataaacccatgatccgattacccatccgacgttctagagagttctaatgagaaaacaatgaagagtacatccaacggctaagattagctcgaagtttcaagagctaaaggctcatatcgcctttatattcaaagaaaaaattatcagtagcaagtgcattcttcatttcgtcattggagaaacctacttcttcctccttatccggaataaacctcttcggcgccatctctctcctcacctccgtcgttccaccgtccggtgagtgtcacttttcccatcaattgagctcacaatgttggcgcctatgtaattgtgtgtgtcgattgattgttttgttagaattggaattaacaagtattactagtagctgagaaaaagtatgttaccttgttttcgtgttcccggagatttgtggctattggtgtagttgtggttttgagtatttggggattgagctctgattttgaaattcatctgttttttgttttttgttgccagttttaattggttagtacttttggtgaatctttcgttttatgtgaactgttggattgattttcagtgtttgagaagtgaaa

SEQ ID NO: 9167 - DNA, 3000 bp, Unknown
  misc_feature (1)..( 3000): cDNA_ID_2180910_gDNA_ID_1972016_Annot_ID_177932 3000 nt of promoter + ATG
taagtaacgaattctagagggagaacgcacggacgagagactgtgatgaagtaagcatatatatacataaaactgtgttaaacaataaatctgcatgcataggtaaaaaactatatcttcgaccaacattggtcttactataagatacgtaaatgtgaactacgcaacaaactttgattttcgaacttatagtatatcctcatcgataaaaagaacctataagtttcaacttatatatacaactcatgaattgtgtctgaaatacttaaaacaaacatttttgagttttaatttagtattacatgaaaatagagttttataacctcaactcgtgtggtgacgcaaacacataataaacctataggcaacatatatgttttttttttcaaacaacatatatgttattatcgtactttagtatgtaaactgtccggaatatgtttaatagcttataaagtttagtgtatttttgttttcaaggatatgaagtttaacgttagcacttagctagcctgtattgtttacattaaataaacttcttgaagaaattaaacttagaaacatatctagtaccataatttaagattgtgaacatgcttattagttatctgtatttgacaaaagcttaccacgagtcttatttaacgatagtgatgattcatttattcgcaatagatatatccatatatataaatagaggtttgtgtactcagttacactcacaatttatggttttataataatcacacaaatcaccacaaaacaacttagtacacatatatgccaaccttctagatcgcatctgtgaccccttcttgaagcatggtagatatagaagacatcaagattcgatcaactatatatcttcctgtatctagtcatgtcctaagctagaagacgacgctccaacaatcccatccttacaatcatccatctgcaaaggttgagatattgggataatattaccaaaaggatcaccaacatcgttgatgagcgaattaagaaacgatgagaacttgtcgtcgtagcagaaaccaaagtcttcgtagccgtgttcaccaccaaagacattgatactgttcttgctatctccatccccgccattaacagtggtatcatcagtatgagaactagaaataggctctagagggtacttttgtccaccggaaacttcttcttctggtttatggatgttgtttgcatcaagaggcttgtgggtttgaggatcaattccttgccttaaaagtttcttacgaagatgagtgttccaatagttcttaatttcattatcagtccttcccggtatccttcccgcgatcaatgaccacctgcatcacacattagaatttccatgaagaacaagagcggttaattactaatatggttacaaaacaagcttgcatttttatcctagtaatcataaacaatttgaaaaaagaatgaatgatctctagaactattaatttgctctagaaccagaatcaacttaattaaaattatactctaaagaaactagagaagggattaaccttttgttctatataaatatcgaatcaagaatcaaagtataattgttttatatagctataagaaaaaatgggatcaagctaaaatcagaaccttcatgtttatgtggaagaaataaaaccctagctagcttaaacaaaaaaataactctagtgtatgggtagagagagacacacacatacgtatgcatataaactaaacgatcttgtatagttgaatacttgacgagatttttttttaatatctatatatatacctgttgccgaggaggcggtgaagacggaggatgagatcttcctcgtccgacgtaattcctccacgtttaaccgagggtcggagatagttcatccaccgtagacgacagctctttccacatctgagtaaaccagctctcttaggaagcgatcgccaccgtccttcaccttctttcttaatgaagctcacaagaatctcgtcttcctccaccgtccatggtcctctcttcatccccatcttcgtgcaacacggcgttgttttcttagacactggcttcttcccaccacatgacatcatctccgccgtcttcaacaaagctttctctctttccactagggtttcgtgatctctatgagttcttcgattggttgtttttttcttttctcaaagtttctctctctccattagtctgctgatgttaccaatgaacctaccgaccttttctctcacgcgctagcttcggcgtttggtaataatcttcatttggtttttatttcacctgcgtggtttttttttcctttcattttaaagattttgcagtaacaatcatattgaaatccaaatggctaatgttattacaatgcataggttagttgcttctagttatttatattaaagatttgatactactatgaattataatttgattggctataaacatccgattataccagctcctacaattgagaaagttataacaaaatggttgataatacattaatgaatactaaccaccttaattaaaattgacaccagtgaaaaagcattaaatatttggaccaccttttaaatagatgattaatcagtaattggacaaaatgctagtatttttacaaatcgggaaataaaggggtgaaatcgtaaataaataaaaagtatgggccacataataaagaagaatacaggcgcatgagaaattaacataattacctctcctttattacagttagtcaatttctaacccaaaacttttgttttgttctttcctttttcttaattttgattttattaaaatttggtcatgtattttcactactgtaatagagctggcatctctgatctttcaactccaccaatctcgaaatcttttctttcaattttctcaaaaaattaaaaccctaattcttattggattctgtttccttgaggagcaattgtgttctgttcgctgcattttttttgttctgctgacggaggaagaagaaacgagaagagatg

SEQ ID NO: 9168 - DNA, 2073 bp, Unknown
  misc_feature (1)..( 2073): cDNA_ID_2180918_gDNA_ID_1972016_Annot_ID_177935 3000 nt of promoter + ATG
ctcatctaacattgttatggtgaaaaagatggtcctattatgggagctttttgacgtaaggctccttttgttttgaatcggcatttgaacactttccagctattttcttctgctttctttttccaaaaagcatctaagaaaaaaaaaactttgtttctttctttcaaacaaaatgccaagattaacggtttcttactttttagttttttctcttaacattggaagttttattccaaaatccaaaccctgagacaagtcaagttattaattacaagtggtcatatggtatatgagtgttactaacgattctgttcttttagccagaaattttttcttctgttgacttgtctgagtctctcgatccgacaaaagtcttggtcgtcgcaggtttttgaattttcagttttcccgtagagcacttaagcttggatcgaaatgcacggcgataatgtcgataatcaattctttcttcgttttggagaaatttggaaacaattgtttgctattttaatgatcccataaaataaatatatacgaaaacttaattaggcaattctaaaagactatcaatttccgaataatggtgaatatatatatttctgaatcatttttaacggtgatgaaagaaactgccaaatcaagaacaatttgagcatgcaagaaacatttccaagaaaacatttgggagtcatgcacatgaaattagcaaactcacgaatctttcttttgattcaagattatatttaaataaaaattggtataaaacgaaagaaaatgagaagagcgtggtaatcgagcctcttacaatcttgttttcttgtttatttgttaatttagtattcttttattatgaaggtggaatattgccgtattattagttgttaacggactttaaaatatttgttaatatttttgaactgttttatttgattttcttaaaaagtataatgcaaaacttagttgtatttgatgttttgtgagctatagtatatgccatgtcttttactattggccaaattatatgtagttaaatgatgttttcatttcctttttgtttttgggtttggatgacaagttgagctaattaataattagtgtgacacattgaggtaattaataatttatttagagcttctttgaactttgaagcctcccctcaccttctattccacaaacacacctctctggtttcccacgcattatatataaggaaagatgaaaccaaagtttactgagagcaaatcaatctcttaatttgtttttgttttttcttttccatttcctttcaatttcgacaaataatattcgccgaaagacaagaaaaaaaagtgtttactttttgggttcctcttcggtgggttcactacactagtaacatctctgaacctgttctctgtctctcagcagcaaaacctcgaggcttctttttctttcattctctcaatttcttctctctgatctgaattctcgccgagtgaatctagaaccaggcaagctccaattaggtacttttgtatataatttcttgattttgcatctgggtgtttcattgtctcacattgctgtcttcgctagcttttcattgtatcttccacattcttccttgctctgcaaatccagtttctagagcacatgtctgaaagaacgaaaacgacaaaagagttaaagattaaaaattgtgtcttttcgaatgctcgatgagtttgtttactgtttctccccttctgttctcagaacgttgcttagtttccagaccccattagtttacttctgtcggaaatcctctgttttcttaatagccatgagatagttatctaaaattgctttcttgaattcaccaaaaaaaaaagttgcttacttatttttagggttcttaccatatttgaccaattataactctcctgaaaagattaaaaaaaaacaacagttttttctgacttcagagtgagaaatctacaatccattgttatattaggtttcaaatttctgttaaaatcattagcatatggctcaattttgaaccttttcagagtttttgtaggtttaaggttttcaagcactctgtttccaatg

SEQ ID NO: 9169 - DNA, 3000 bp, Unknown
  misc_feature (1)..( 3000): cDNA_ID_30436_gDNA_ID_1972016_Annot_ID_177933 3000 nt of promoter
ttaagatgggatatataatacattttgtaatattcttccaaaaaataaagttaaatacataggttctcacttgatggtgccactatgccgaagtgatgactgcaaagctcgtctagagtttcgtatccaagggtgagagagcagtgtctttgcatcaggcctctgcctggaatcctgtaaaacacaagatacaaatcagatgtacatactggatattaaataaatcattgtctaggttctggtacagaggtaggtgaataaaccctatagcagaaaattataccttcttgaagcactgtcgtagaaagtccgtaatatctggagaaagactatcaggaataggagggttgtcatcctgaaacgaaaccataagaaatagtttgtcacttctggctaacagcttttgcatttttcaggagagaagtgtttacgacatggagaaggggacggaagagacacctaaatttgattgacttaaatgcaaactcataaaatgttgtcaaatacctgaacaatacgaaagagggctggcatgggttgcagatcatagtaaggaggtacacatgtcagaagttcgataacagtgcatccaacgctccaaatgtcagaagcagcacaaactcctgacatttcaataacctgaaacagaagttgggcttctgtcaatacgtacataatcaggtaaaagttctctaaaggagcaaacaaaagcatctttcaaacaacaacaaatattgtttcaaaactgcgtacgaaagctatacagaatatggagatggaaaatatataatcaaaggtgtacctcaggagccatccagtaaggagttccaaccaccgagtgagtattaacatcagcctcgttaagtttagtggcaactccaaagtcagcaagcttcacaagaccctgaagtgtgatgtagtcaagtatctttctaaggaaaaagcctagaagaatcttatccagcagatctcaaaacaaaaacacactgaagacatgtctgagaatagataatatagaaaacacacctcctttgtcgtcaaaatatttgcacccttaatatcacggtgtataacaccctgctcatgcagatataccaaaccttccaagacctgtattcactagttagtacacaatgcataacgaaacttaactcaacttgaaagatgtatacagacctgagcaatgtaaacagccaccaaagattctgggaaaggtccaaatttatttggtttaataatgtttgcaagagagccattctcaacgtacctgcaaacacataattgaacttgagtttcccgtccatagtccagagtggaccaaaataaacaaaaaaagctacttactccaaaataatgtgaaggtgagtctttgtcttcgacgacccaagatacttcacaatgtttttatggttcaagttctgcaatgaaatattatctcagaatacatagagaagaactgcatcttaaccagcatcataaccattcatgagaagaagccaaaattcagaaggtgattgatttgacataaacttagtatcaggatcccaactctgtaaacagtacaaaattcagaaaactaccttcaaaagatcaatttcttgctggagaaattcatcccaacagcacaagaatcatccacatgtaaaaaccaggattagtcagcatagcagtggtaaggaacaaataaggaagatagatataaggaaaataacaaaccataatggtgttaagatcctcttgaacaatattttccaaagagacttgtttaatggccacaaagtcaccattctccaagtctaatcctttataaactcgaccataagctcctttaccaatttcatctcccagcatctaccctcaacatatcaaggatcaaccattgaaattaatcaaaattgaagagaaaacagcaaaaagcaccagacttaagcttaaaatcaataaaattactaaagctaaaatcttaaggagacccattagaaaacccaaatcccagaaattacggagaagaagaaagctcacatatttgttgtcgagagtctttgatttgtgaaactgagatgacgtcatttgccgcgccatctcttctcgtttcttcttcctccgtcagcagaacaaaaaaaatgcagcgaacagaacacaattgctcctcaaggaaacagaatccaataagaattagggttttaattttttgagaaaattgaaagaaaagatttcgagattggtggagttgaaagatcagagatgccagctctattacagtagtgaaaatacatgaccaaattttaataaaatcaaaattaagaaaaaggaaagaacaaaacaaaagttttgggttagaaattgactaactgtaataaaggagaggtaattatgttaatttctcatgcgcctgtattcttctttattatgtggcccatactttttatttatttacgatttcacccctttatttcccgatttgtaaaaatactagcattttgtccaattactgattaatcatctatttaaaaggtggtccaaatatttaatgctttttcactggtgtcaattttaattaaggtggttagtattcattaatgtattatcaaccattttgttataactttctcaattgtaggagctggtataatcggatgtttatagccaatcaaattataattcatagtagtatcaaatctttaatataaataactagaagcaactaacctatgcattgtaataacattagccatttggatttcaatatgattgttactgcaaaatctttaaaatgaaaggaaaaaaaaaccacgcaggtgaaataaaaaccaaatgaagattattaccaaacgccgaagctagcgcgtgagagaaaaggtcggtaggttcattggtaacatcagcagactaatggagagagagaaactttgagaaaagaaaaaaacaaccaatcgaagaactcatagagatcacgaaaccctagtggaaagagagaaagctttgttgaagacggcggag

SEQ ID NO: 9170 - DNA, 3000 bp, Unknown
  misc_feature (1)..( 3000): cDNA_ID_3044875_gDNA_ID_1972016_Annot_ID_177930 3000 nt of promoter + ATG
acactgggtttggtctctctatttaaaaactaaaacagccagcataagtcatgttgattttctttatagataaattctctcatatgtttttttttgtttcattggtttggatgtgtagtgaatctactgatgtcgctatagttacgttgtccatgacatatgaagaagtcagaaattggatgaaaggcctctatctatgtaatgattcaactaagaacgaataaaatgaaaaagtcacatgtgatatgtatcaccccgaagacaatatgcatacatctattcacacgatcaggtcaaggatacattagtaccgtgtctatatatataattatttatacagccattgacgaacgaatcattttgtactctccaacaatccacccaattaactcttggattagaaacgttcaaaatcacataaccaccgcgatttttatgtgacttccacatattttgaaatacttaagaattttggtatgcacaccaagagattatgaagaagatattcctccattattcaaatttaacatttattttattcaaaacaaatttaacatttatttggtatgaatcatatcatatgtgatgtgttatcatcgtatattcataagtttgtacatgaagagggattttcaaaaagattctcattatgttaccaataatggagtaacattaaacaaaaaataatatagatgatacgataagaaaagcttgtggctccacctcctttcgtatggtcataaccatcatatcactattatcatacttacttttctccatgcctaaatttatatcgctccataaaatcaaatcttttacttgcttttctccctcctttaatcataccctatcacaacgtggctttttattgcaattatataagttttggatagcctttcactttaccgaaattccggactagtcttagcccatgtgtagtagtcgaatttagataagtcatgtagacacatattcggggatagtttcattgttctaactatatgagaaaagaaaagaaatagtgttttgcctaataaatttgattacaaagttcggttctctaacttacatcccaaaatcacaaataaagacgaatccattagaaccaaaagatagctacaccattgcaaatgcataacttctccccaaacttcctgatttaccgatttgtttctacttacatgaatgttttggagtaaaactaaagtagctctgagctaaaccgacttgaatttaaacttcaactctacaattcccgacttcggccgtaactaccggcacatacatttttacttagatttcggtgatacaccacacacacacattttgtcggcgtatccaaaaaactccaagtattatattatgttttctctctcttaatttcaaacatcttccttgtcatttgtcaatacgatgctacacgttaataattcttctcaaagacatgcccaacatgttttcataaatcatgcatgtacttccacgtaattatattagatgttaatgcgacaccgtgtgatgtaataattgcatacataatgtatgtttgcggtgttttaacatgtatatgaatctaactacgtagccttccaatgctgctaatcaccaatcatattgctatctaatttaattggttcattatttatttataagtctcttatactaataaaacgttttgatggaagttaaacttttattattgagcaactgatggaagttaaactaagaatgtcaatttatgaaaacaaagcatcactgcaaaaattgtatgaacaaaaggaccaataaatctccacaatcatttatgattttgccctaaagagatactataataattaggtagagagagagagagagaaactcggctttctttaagacaactatatgggttccaactaatttcacattggattctacgattttatgaccgttcgctagacttccatttcccattgttcttgttcatgttcagtggccataacctgacacgtgtacggtggaagatgcaacttcacgcacgtgtgtgagctttgcctaaacacagacagattacgtgcgatctctcgtgtgcgatgctactagagtagtagttactagctgtcacatatacaaaaaagcgtggctcatccatggttggctgacgtggatttaacgacggtactcaagattttaacgcctcaccgtttaagttccccattcaaagaagacaaaaacatccttgttcccaagggggaaaataacatttttgctttcatcgagaggggtaaaacagggaaatttgggagattaatgtggaagagatccccaaggttgtcttcaaaccataaacaccacgtgacagagagaccaattatactcaaaaaggtaaagaccaatttgaaaaacattacaattttaataatgctcatagactcatagttaaagattacaagaaccaactaactaattgacattatcattatcaaaataaaaaccacctaattgcgaatttatagttttacagtgggattggtaagacgtttctaatatgctttcttttcaactttagaccttcttctctcatttctcacaaagcaaatcaaaagtaaactataaattgctaatcatgcatattagtatataattaactaactaaaaaagggaatggggtggggccattggagcgagaaagtgagcaaaaaaaagagagagcctccactatctctcaaagcagaggaagagagagagagagacagagacagagacagattgagagaaagtttggattttgatatgtgtggttggatttttgttacaaggcaaaaccagacccaccttcaaacttgtccccacgaactacattatcattgttttgttcgaacttcttcttcttctcgttagggttttctttcattggctctgagctactctttattgcttaggccttagtgtgtgtgtgtgaatcttctcagcgaaagccaagttcttttctttgttggtgtttctgggtttattgcgaca

SEQ ID NO: 9171 - DNA, 3000 bp, Unknown
  misc_feature (1)..( 3000): cDNA_ID_2180882_gDNA_ID_1972016_Annot_ID_177925 3000 nt of promoter + ATG
acagccaaatgattccaaatcaggagggcacattgattgatacccacatataggttttttgttataaaaacatgacctacctccagttagaatggcaatatcgtcaaggtattggctcttgcgctctccaaatccaggagctttgagagctgcaatcttcagtgtgcctctaagcttgttaacaacaagagtagctaaggcttcttgttcaatatcttctgcaattatgaggattgggtatccgcctctaatcgcatcctctagaaccccaacaagatcccttgcattggttactttcttgtcaacaagaagcaactgcacagtagaaacttgttaggctatttgcatcacaatatcattttggtagctcagaataaagaaaaattaccttgcaattgtcatactcaacagacattttctcactgtctgtcacaaagtatggggagatataaccacggtcaaattgcattccttccacaacataaaggttgttctcagcgctttttccctcctccagggtcaccacacccttcctgcccactttgctcattgcttcagcaatcatacttccaacttcgtggttattacccgcactaacagctgccacatcagcaagttcactgtcttcaacctatatttccaatgacataacctttagaccatcttgctatagactctcgaaaaattaagaagaaggaagttttagcataatagttacttacctccttagacataagtttcagctcgttaaccaaagcctttgcagtcttctcaatccccctagtgatcaatacagggttcgcacctgcagccaccacctgaaaaatacaaaatttcagattaatatactgttcttctgagtataaaatcagagaaagctgaaagaagaatgtaacaaccttgacaccctcagcaataaaaccttgtgcaagaacaacagatgttgttgtaccgtcaccagccaagtcattggtctttgcagctgcttgccttacaagctttgcaccaatgttctcaaccgggtcctccaactcgacctaagcagaagaaaaccttaagcttagagaagtaattaaaaacgaaaggaacataattggttaaacagacaataaatttcatacctccctcgcaacagtgacaccatcattaacaattcttggggatccatacttgctctcaagaacaacatttctcccttttggtccaagtgtgacaccaacaaggtccgcgagcttgttaacaccagtctaataacaaacgagtaatcagaaaccaaaaataaaacgaatcctaatcattactccagaaaatcaattcattaattctcacctgaagtttccttatggtagtcccatccttattgaaatgcaactccttggctgcacatactatggcaggacgggatcttctgacgcacacgttatgtctccttccaaacgagcttgaagagatgctagtcgcagaagacaacttgatagcattgggagcaagcaacgaaccaagggaagacgtggcagtgaatgtcgatgccattttcacttctcaaacactgaaaatcaatccaacagttcacataaaacgaaagattcaccaaaagtactaaccaattaaaactggcaacaaaaaacaaaaaacagatgaatttcaaaatcagagctcaatccccaaatactcaaaaccacaactacaccaatagccacaaatctccgggaacacgaaaacaaggtaacatactttttctcagctactagtaatacttgttaattccaattctaacaaaacaatcaatcgacacacacaattacataggcgccaacattgtgagctcaattgatgggaaaagtgacactcaccggacggtggaacgacggaggtgaggagagagatggcgccgaagaggtttattccggataaggaggaagaagtaggtttctccaatgacgaaatgaagaatgcacttgctactgataattttttctttgaatataaaggcgatatgagcctttagctcttgaaacttcgagctaatcttagccgttggatgtactcttcattgttttctcattagaactctctagaacgtcggatgggtaatcggatcatgggtttatttccggtggccttgtttggtgatttgggcctgtttatgaatctttaatcaaataggcccattacatactctcgatcttaaaatgtttttatttaataatagcttttttaagctaaggtaatttacttccttttatcctaaaggtaaagtatattttcttgaatagctagttttggtaagtttctctgaaaaatagattttactttctttggttttatcttaatgatttgcttttagtttttaaatagttgctcaaaacaaaaaagtttaatatatatttttaaagatatttcaatgtatattggggtaaatttatagaagaaacacacctataatagaaagcatgccctcttttgcttttaaatttgaccaaatttacttttgaattatattttggtaacagaattgagatttatatctattttattacaagattaccaattttaagaaaatggaaaagtatattatccagattttgcaggaaaaataaccaaaaccacacggtctatagtcttcttttaaaacaaaagaggaaatatcttaaggtggaagaaaaaaaaaaaaaaagaaagaaaaaaaaaagagagaaggtgaggtggttgattagtggatctatttgaatcagagggagaggtagagagacaaaaccctttttttcctcttccccgaagcaaaacccttctccttcttggcggctgcggccatttttttcttctttctctcttctattctatctcttaaaccctagatttgatctgggtttttcctgattccatttagggtttctctatcttcttttttttcttcttcttcttctttctctttggtcgcatccccttttatccgagaaggatctatccaaatctttgtttgtcgaatctcctctcatg

SEQ ID NO: 9172 - DNA, 3000 bp, Unknown
  misc_feature (1)..( 3000): cDNA_ID_2180874_gDNA_ID_1972016_Annot_ID_177922 3000 nt of promoter + ATG
gcatcatttgttgtaaatatgtaataaacaactccaccgcatcaagtttttctctttatatgaccacccattaagtctttgcatagtcctaaagcttaaaaagatgaattggaagttggttttgctaattggttggattctcctctcgtctattgcatcaaacccagctttggctaaagttacttatccaactcgcacaacaagtaagtatccattacctatctcttttattttatagttgttatttgatagatattcagatcaaattcgtggatctattatctatacatatgccacgtaaaactctttgatgtatggaaaaagttgatcttgtagaattaataattgctttcgatcaataaatgataactacaaactagcaacacttttgttgtttaatttgtatagaaatatacaattgttaatttacatatacataaattcttgaaaaaaataggaaatttattttatggttaatcgaattttaaataggaaaatggcttggaaatatacacatcagcaaaggaatgaagattggctttacaggcagtttttctagacctgctcctcacggaggcggtccaccgaagatcatttctaagttatgacatgtaacgatcttaattagcgatccaatctatatataatctattaacttgtgatttctgattatttgtaaagttgtttcattgtgtgtgatactcttcgaataaattaaatgaaacttcgatatgtaaattattatttagttcactatacgatttaaaatcgagtattgagtgacaacaaggtctttttcattttctcaccaaaatgatgatatgattaacattggacttttcaacaaatgcaaaaataaggaaaaaaagacaagacttagaaagtcaatatgttttcattgcatgcattgacgtatacatatcagtatcacaccaactgtaatgagaacgaccctgatatatataatctctgcctaacagtctaacactagctaatttatagtttataagatgttatatacatatatacccgggaagaaagaggaagaaagaaaaatgagtctcaagttcattcttatagctttgcttctacttttatgcatcacattttccaattcgaccgtcgttcctttttccaaaaaccggaaaattagtaagtcttcataactgcataagtgcaaatattgttattatatggtgttaaaatgaggtttgtaatatagttttaacgtgtaacaagccaatgaagaagaagaagaagaaggtagagagattgacattcacaaaggaaagaagatcaccgtaaaagtcagccgttcgcctcctgcaaaaggctggatttgttgcaatgattaactaaaaggagctatgtgaacattttcataagatcccatccttcaatttctatgaagataatatcgaccaagatcaaacttcaaagcttgaaattagaaacgtgtatttgctatatctcaaccactaatttaaggggctttcggcccattacacgcatgggaagattcaattatgttgattttgtaagttttggggctaaagtgtaaattattgaaacttgtaggcttgatttcattattccaagtttccactttttctcctccgccgtagccggtgcttcttcttcgtgaaaatctttcgtctgagattttttctttactagttgaataaaattgaagatttcgaagactacccaaaaccgcgttttacaaaaagccagattctttttttttttttttttttttataatttcattaaaactacccaatgggcttgggccgaaacttacaaacaattcggtccagttacaaaattagggttttctgacacatcgccaggaaaaagaaaaaagctcgccgcctgttgaccgtcgctagcagagcgaccaaaacctagatccggcggactcaagtcccacagctttgtggccgcctccgagaatcgtccaccaccgacgaaagattccggttttcgtctgtagagactcaactccaacgcaccaacccaccacaagactcccggaaagctagccgctccgacgtagcggttccacggaaccggatcccgacctagcaacccgaaacactcagcgataacacttctctcccatcaccggaaaatagcaaagacccagagccaaacacacgtcgatccggaccggtggagaccaaaaacggcagacctaaagactggtggctcagtcagactctctagatccaaaacccgctgcagccatctaagatccaaacagatctactgttaaccaccgcatcagacaacgaacccccccttacccctctccaacttccgccgtggacgcagcgactagaatcacgggtgagcctgagaacctcgcagcaaccctcagcgtccataaccaagagacccccgccgcaaccttctcgaccgacaaaaccagagccaaatccacatcagagagagagctccacaccacacgttgacggagacaagcatcggctcactcctggacttccttgaagaggcttcaaaccgacgatgaagagcagatcggaacaaaaagaaaaaggaaactaaatctacttaccggaaattgtcttcaagagagagagaagggcacgactttcaaggctacgattgagcctccatctcataaagccagattctttatcttccataatcgtattaaagctacgaaaacctcgatttcgtgttcaaaacttggatttgctcgctatcgaaaggtctgacctttaatccttttcatgggtttaatcgttcagatatgatttctcgtatcggtattatagcttagaggaaaagtgtcgtagttttggcagatgaaattaaaattggctctgtattcccaaatagttgaaacccatttgatgaagctatcttatcagacttttacgcataagttttcttgtggtcttggatcgtgtctagtggcaattatcttctctgagttcttttgcttagtttgattgtctgttgttttagacga

SEQ ID NO: 9173 - DNA, 3000 bp, Unknown
  misc_feature (1)..( 3000): cDNA_ID_2180851_gDNA_ID_1972016_Annot_ID_177912 3000 nt of promoter + ATG
gactggaccagggggtagctgcgaagaagcgggacctttgcctccctcatagcggagaagaccagtggtggttataaccgacttcaagaacctagaggatgcaaccatgtagtaatctttagcttcctgattagcggtaaggatggttccgtaacactgaccaacgtgaacgtcgagagagtcataatcgttctggagaacgtgcgatccttccatctcaacaagcttcaacttgtgattctgaatcctaaagttaagagatgtcttgagacccacgttacagatcctaaccctgtaggtctttccaggtttcaaggtaaagagaggtgcatcggatccatcgcctttcccggactttccgttgatgagaataccatctggacggccaagagtacgaccgctgtcaaggaatttcttcaactgggtgtggctcttggtgtaccagtcaccgatcaagacggtgtagtcatcttctgggtcagcataagggaccgggatgaggagacggctgttcacacggagaccaccgaatccaccagcggaacggtgcatcgcggtgctggggtagtagaaatagcttccgatctgatccttaggctggaaatggtaagtgtagttggtgccgggcatgatcggacacatagttcctggagtcccatcttgccaacagttcttcctgtgttggatcccattcctaaaacgcaaaaacaaaacatatattataagcatgcatattgaaaatgatatattttggtgaaccgtgaaacaaatgttataattaccatgtgaggaggaaaggttcgtcgaggttgttgaagacattaatgatgacgttgttgttggaggttgagttgacgttgggaccagggaattgtccgttgatgagaatgacttgttgtggaacaccgagaggagacacggttccgtaggtcacgttccatacgtgatggaagtaaggatcttcggctcggactaccaccgttgcggcagcggccaggtagaggcacgcggccaagagtttaacccctcgcataacaataaacaatttttggttgagataacagttatagattttttatgtgttttggtactaattgtttattgttatatataattatgctttggggtttgaatttcgagttgtggaaatgtttcgaggcatttttatagggttatttttgacgaatgtttttccaggtttttctcgtcttctttggggtctcctaccatttcgctattcctttcgccatatttgggaatattgaagtttaacctctccctatttttggtgtttctctttaattcctcttagtttattttcttttttccctatgtcttttttggttttggttttcatgtcttcgagaattttgctatttgggattaaaaaataatctaaaggatataattttatatatatatgtgacaaaggtataggtcgaccaataaacattttacattattatagaaaatattttgaaaatcgcttattttaatcataacactttgttttgtacattatgcttttggaatttggatgattatgtctttttatataatatataccagaaaataattcgatatgtcgtattttttctatctatatatcttttgacttctaattgtaaccataggaaaaattagatgacattgaaaatcaggtaatgatgcatagcatttgttcacaacaatattgttaaagttaggaataggagtagtatcttttcccttttcttcaatcatacgagctagtcaaccgttgacgataaattcacggagagcaccggaacctttaagtatgagaaactacttcaataatcttagaaattacttacctaaaaaatcttgcactgtgtagaatttggtaagagacatatggtctccaaatacgttctcagctagcgttatgtcattgatgccaaaacgttctttcatctttctaattagaaaacaaagatgaacaaaagtttgtgatacactccctttggtcagacgaaaagagtttgtgacacactccttttgaccaagagtttgtgatacaaagatgaacaagagttcatgatgccgtaaatacaaatattttgaatgtgtaactttttgttaaagttataagtgataaactgtttttttttgtagtgtatatataagaaactctaagcatttggagaagaaaataaacatgtcgcataagacccacgatgtcaattaccatttattaggcctttatcaacatcccacctcacaatatatctatactaatatataaaattattttattttatttttatatatagaacaccatatacacacatgtacatctcaattaccatttattgtgcagactattatcttttttttttatttttatttttttatttttttgggcagactattatcttatttcaataatctgcataactttttttttaaaggatcaaaagaagattgaataacatgcaagttcatttttgaaattttattatcaaaaacatggaagttcttaaaattaaaattacaaagcatattaagttggtaattaattctgtagttacttactaagttgtaccataatattattttttgtccgtgtaataatcaaccgtagctgaaatatgttaagacaaacaaaattacttgatgatgacacttgtgggtagttaatttggcttctttagagacatgtccaataatagaataagatccgagttgtgtgctcgttagagaaatcgggagtcctaaggaccagcgagcgagagagattcaaaaatagaaatttcacgtaaagagaattagaggtgcagcgtgaaaagaggcaacaattccgtgcataccaaggtccttcacctgcataaataggtattcacaacatcaccaaaagattcgtcaagagcaagagaacatagtttcttcttgcttttgagaaaaaataattatatatttttatataggaaagggttaatttattaataaaaaaaaataaaaagaagcagaaaagagata

SEQ ID NO: 9174 - DNA, 3000 bp, Unknown
  misc_feature (1)..( 3000): cDNA_ID_2180860_gDNA_ID_1972016_Annot_ID_177914 3000 nt of promoter + ATG
attcatcattcatttaatcatatgagttggagaactcgagtcaaatagagagactaaaatggctggaatctggcaccaagttagtctcctcaagttgtcattagatcttataaaatgataacattatgtttatatctgtttcttctattctcttacggatattacaaagaatatttccccataggcaaatcatgttgctactttaaaaatctgcaataaaaacttcactgtttaccaaacattttggatgaaaaaactatctttgaagtttatactaaccctccgattcacctatttttcatgtacagaaaagaatgctaatgtacattcgtagtccaaataaccccaattctatacagttccgagtaaaatgaatgatgataaaggcattgttcttgcttgttatccactatgtaaatctcggatctggattcttcaaattgaaaacaaagaatggccttagaattgttgaatgaagttgctcgtgacaaaagctatcttcctgcaaaagtgagttggaaactgccaggcaaaaatgataaaagctgagagcagtgctgcaagtagtaatgtagattgacaaacacatgcaatttactgagtccaaggatataccaaagcaacaagtgttctttctatgtctataaaaaggtcaagtgtgaaagttaacctaaccaaaagcaaggtatagtatagtaccgtccacaatcattagatgttctatcaacagagactagaatgaagtgcttctaaggatctggatagaggagacttctttcgagaggcttctgcagcagatgattgggatcctttgtaaatgtctccagctgaatggtgcttaatcacctacaaaaggttgaaaacccacttgctatgtctgtgtaagttttagaggagtactgagacaagaaaagcagcatactatgatgtaatatcaatactatgtggcctttgtttgttagtgagaaacaagtttcacctaacctagagtggcaaagagctaaaaagcatggttgggtgatctagatagttcaatccaattctcactatattgcatacagtttcaaaagaaaggtccgaaaagaagcatctggaaacccaattggtaaaaccatagacaaaccaagtataaaaacctcaactacaatgagtacacaaacaacttaagagaagaataggtagaaataaaaagacctgtgttgcattgggcaaagtgatattgcttaggccgccatctaacagaggagtgtaggaggcaggttcgtcaatagaatcttccaagatttcgtcagaacgtgaacgttgcttagctatagcaggagcctgtaagaagctatttcgtaattctggatcacgtgaacgttgcctagctaaaagaggaggttctaagaagctattccgtaaatctgaatctgattgacggggaaatggagagtctataatagaagctcccagcctatagatctgaaaccataacagagaggacgatagcctcacaacgaacccagcaatttccatagccagggtgagtttcacagagaagatgtaaaagacttgatacatatcagatgaaatgttcctgcattaacaattaaatcttttgtcagttataggcagcagatgaatactggctcaacagaatctaaacacgacatagcaaagatttgcaaaaaaaaaggtttaaagatcaatcagttcaaaaagatgatgagccaatcaagagaaattcaggacagtttacaatatgtgatgcaatgaaaattaaacaagacagagcaaactcttaaaccaaatatttgatcatgatcacaagcacggctgttccaaggatagtgacataccaaatctctttggagaagagaatgaaccatgagacatcaagaagaatggcgcagaaaagaagaaccgcataggttctgccaagactttggctattactctcgattgctactaacccaaataacgcaatcgccaaatttatcagcacgactccattgtacaatgcccctagtgaaccgatcaacgcgcaccctatctgaaacaaatgattcatcaatatgagtttcttgcacttctaaccacaattaaaagaataacaaacaaatatcgacagagaaatcgtagaaccctaatcccaaacagatacgaacaattcacgagaaaaaacgtgaaatcggaggaaatgaaacaactacaaagcgattacggatttacctgagcatagataagaatcaaaacgacagattggagcctaacgtagtcgcgaagccaattatgtattcgatttcgtaacgaaacacaaagcatcgtaaaatctcaacctcgcagctctcgttacttgttacttcaatggactttcataatacaaaatggctcgacgattctgatgctaaattgcaattttccggcgaacgaaatcggtgaatcaagagagaacgacgatttgagaattttcgtgagggagaaagtaaagagtgtctttggcgggatcgcgttgcagaagaggcaacaaaataaaaaaatgaggaaacgaaatattccgttcaatcgtgacgaagttattataagatttaaggaggtttccgtttcttgtccagagtgacggacgcttaacggagtcacgaaattttgggccgtattggaaaatctttaaaagcctaatcaagcccaaaacttcagaccggttaatatctgaacataaccgaaaccggttatctcggttagcgattttcgtttcaaaaacgacgccgttaattccttacatgtcgactactcatatgtgtcgcccagatttgaagatcggagatatgaatctcttctttctctggatttgaaagttcgataaaaatctactgatacatcgacttctggaagcgatctcgatctctctaggtttgtgattatctttgaatttgctgattgtttcgttaggcgtgaggaattgttcgattgattttttttccttttgtctccggtagaattgtttcgacgacgaagatg

SEQ ID NO: 9175 - DNA, 47 bp, Unknown
  misc_feature (1)..( 47): cDNA_ID_2180752_gDNA_ID_1972017_Annot_ID_177946 3000 nt of promoter + ATG
gatcgcggaaagctaggattagattcacaaatggatctactaccatg

SEQ ID NO: 9176 - DNA, 3000 bp, Unknown
  misc_feature (1)..( 3000): cDNA_ID_2990851_gDNA_ID_1972017_Annot_ID_177968 3000 nt of promoter + ATG
atggatgaattggcatgctttgctcctggaatgttggctttaggagcatctgggtatagtgatcctgctgaaggaaagaagtttctcacactcgctgaagaggtaaacttatgacttgaatgatctttgatcatagcgtcgtaagtgcttcagatctttcgaatttttcgctctctgcttttctgatttaggctgctgagatatagcctttattgctattttccacatattttgcagcttgcgtggacatgttataacttttaccaatcaactccaacaaaactggctggggagaattatttcttcaactctgggagtgtatgtcatttgcctgtctttttcaaacacattgtttattttatgcgttatttattgtttagtatacatgatgattcaggacatgagtgttggaacgtcgtggaacatcttgagaccagaaactgtcgaatcactgttttacctctggcggttaactggaaacaagacatatcaagagtggggatggaatatatttgaagcatttgagaagaactcgcgcatagagtctggatatgttggtttgaaggatgtaagttttccgtaggcgcttaattagatcctgcattgttaaaaccttggtgaattgaattatatcattccaccatctatattagtaattgagtgtaactgatggtagattcttatttctttcaatcatttccaggttaatacaggcgttaaggacaacaagatgcaaagtttcttccttgcagagacactcaagtatctctatctactcttctcgccgacaacagtcattcctttagacgagtgggtattcaacaccgaagctcatccacttaagattaagtctcgaaacgatcaggtaaatctcaaacaatccaacaaagtactgctacgaaaaccggcatttagaatacgccagaggcattatggtcggataacaaagaagtaaaactccctggagaggtcacagtgtgattcgtaggaggggctctatggatatatcttaacagagcaattggatttagcttggctattcaaagacccttttatttaagaaaccatttttggaaagatttcaagatatagactattgttgtactagttgggatcagaacccaaacaggttcaccacagtttacaccttgtgttttgtatccttactccttagattataaattaagagtattatcttctgttttgtattcgacaaaagatcaatgtataaaagtttatataaaagactgcaacaatgcagaagaaatgtaatggaagcaaccaagaaaagaagaagaagcaatttgcaatgagaccaagtctctgaaaagacattagtgttgactaaatctccacgtcacaccaaaaggaagacgaatgacttggcggctagtgtaatagttttaaaaatgaccacataatctcaccagcctcaaaacctcacgacacgtcattctctccaattctacaaacaccattcatttcatttccctaaaaaattatggctcatgtaagtttctttgatgtgtgaactgtggaagagactactctcatcaaccatgaaccataaaaactccaccgctctttctctccctcaatcatttacatctcttccttaaatctctcttcccaccatcatcattccaaaccaattctctctcacttctttctggtgatcagagagatcgactcaatggtgagcttttgcgagctttgtggtgccgaagctgatctccattgtgccgcggactctgccttcctctgccgttcttgtgacgctaagttccatgcctcaaattttctcttcgctcgtcatttccggcgtgtcatctgcccaaattgcaaatctcttactcaaaatttcgtttctggtcctcttcttccttggcctccacgaacaacatgttgttcagaatcgtcgtcttcttcttgctgctcgtctcttgactgtgtctcaagctccgagctatcgtcaacgacgcgtgacgtaaacagagcgcgagggagggaaaacagagtgaatgccaaggccgttgcggttacggtggcggatggcatttttgtaaattggtgtggtaagttaggactaaacagggatttaacaaacgctgtcgtttcatatgcgtctttggctttggctgtggagacgaggccaagagcgacgaagagagtgttcttagcggcggcgttttggttcggcgttaagaacacgacgacgtggcagaatttaaagaaagtagaagatgtgactggagtttcagctgggatgattcgagcggttgaaagcaaattggcgcgtgcaatgacgcagcagcttagacggtggcgcgtggattcggaggaaggatgggctgaaaacgacaacgtttgagaaatattattgacatgggtcccgcattatgcaaattaggacatttagtgtttagtgccttaattatagtttgtgtcattgatctgtttgatctttcttttcaacgtaaactaaaaatggtctgaaccaattgagatgatagatatttctttagaggagatttaatttttttaatcaacagtaagaagattttagaaacggaataatggtaatccaatagtcattatcaggttcttttgagatgaaattgaaatcttttctttcccaatttttttaaacaaagataatttcttagaatattatgttattatcaataaaaattgtaaattgaaaagaaactgattttcttatttcaaggaaaattcgttattatcaacatcaaaacaaaacaaaagagaatagaaaatacatcaaaagtaattcctaaggacaaaagtaatcgtaatccaactataaaaaaaaagccaaaagaaaaagaaaaacccttatatgtatgtgtgtgttatacaaaccctactctggaaaagtcctaattcctaaagctactttcaacaaagacgcctgaagcatctgcctatagtgaaagatcagaagactcttcaaccaaaatcttattctcatccaccatg

SEQ ID NO: 9177 - DNA, 3000 bp, Unknown
  misc_feature (1)..( 3000): cDNA_ID_3044913_gDNA_ID_1972017_Annot_ID_177965 3000 nt of promoter + ATG
aaactgtgtttctcttcttcatcatctttacagcagttctgttttaaggttacttgggatggaagtttttagacctaaaacctatactcacgcaccaaaacgagtgtcgtttctacagattttgtaacaacaattcatcgtcgtgacctaaatcaaggagacaatgggtcaaaaccggttcttgggttgaaggcttgggccgaggatatttctagctggaccaagcttgaccaaagtcaatttttggtttaatacaagtaaataaaaaacgtagaatgagttgtgccagagttagattcattcagaaacagagtgttgttctcaagggtcttcttttttgtccaatatcagagtcagtcttcgttcttggttctctcggcgagcttgtagccactgttcactccttaaattttgaactccttaaattcgataaaacttgtaagaataagagagatagagtgtaagagactaataagactggactagtggttgcgggtcgacattatgttgctttaacgccaagtcttaggtttaagggagagcttttcatggtggagcttgttcttggcctatagcgacctagacctaatttgatgttcttggtttataggaaagaaaacagattaatttgatggaaaacagaataatttgactctgacgacaatatatgccctggtttaataagagataaccaacattatattaatccagtcgctgaagaaaaaagaaactggaatcgatataataaaacagcaaagcctgttatatatcaagacaaggatagagaatgcataaattagtgtgacaagtataaatcactagctagcctcttccaagagcactagataccttgctggatttgaaccaaacttggaacataagtaaggagaattgggcatccgatatctccatctttattcacttgtcttatgtatatatcctctcccacaatgtgtaagatgttgtagtagggtaggagtatatggtgaggcactaaaactttcttctcatggtcggccgagacatttatacaaatcttagagtgaaaacgacggaacttggtccatgtcagttctcccgtagtctcctctgtcttagttgctacgaatacatctaatttgtatacattaccagcgccaagagtagcaaacatacatagttgttgctcttctctagtcaccgataaaaccacagtaagatgtagatttttaacatccgccggaagaggcagacattgaaatctctctcttgaaaaatcaaaacttagtaagaaacgacgatcgtcagatgaccaccagtctttactaagagcaaaccagtaagtagttcccttgacattcatgccataactctcattcgtttgtatgtggaagtcggtagtcacaccaacacttctccacgaatgagaagcaaagtcatagacttcggactcaatgtgaaatgggttaccaacgggatgcatcctcaagattttgtaggaggaggatctgttatcgtaacctagggcatataagtctgattccttgtaggaatttctgggttggatccacttggtttcccctgaacatggattccaaacaaccaatctcctgtctttggtacagcatagcaataagccgtcgcagtgaaaggcgttacgtatatcaacttcttctgaagaattagaaagagggtcttttaggctgaattgacctgttagcttcgcagatggggcaccgttgttattgttaattccatggagatctatactcactaaataaaccctaaactcgatcaacataataactataggatactgccttggaccgtacgcatagtgcttcttagcaaagcttccatcgacgaccagagcgttccatcttctgcaagtcgatcgaaatcgtgccagagatacagccggaaccttagagagtatctccaggaccaaatcctccggaagatgcattgtgcttgaagccttgaaagcgaatgtcacttgggaattgaggttagggttaagttagaatacttagaaattagggttaagttagatatatgcttcttttatgggcttcgtcttagattcagctaaatttgggcttttgggacacttcttattctcaacaatctctcttcacaaagccgagctctgtcaattttaatcacttctgatttatttttattttgccaataattcaagagaacatctcaaattttggattacatcctcccattggaggtgctcttcaccaatggtaggatcctaaaaattaggatccaaataatttttgtaattttaaaaatagaaaatcaaaaatttagacactttgagtatttttttaattttgagagagtccaatggtgagatccaaaaagtgaagatctaaagttttcaaattttgaaaaaatgtctattagttgtttgttttacaagtgtttagccattatattgaactaactaaacatggtgctcacaaaaaacaaaaagtaattgtatatcttacacacacaattgggcttcagcccaagttactacaccagaaaacgtaggaaaataaatttggcccatttattaaacctgatttcgtatttacgaaattgcccctgtcttcaacctctccgcgaaacacagccgcaaatggtttttcaaaaataaaaaaacagagatttgttgttgtagagtcgagaaacgaaagataaacacgtgaaaaacaaaaatttcgtctctacacttccccccaccaacgacacgtatgcgtttctaagagagtttaaaaatctaaaattagacccgagtctaaagatttattttgtttttgattttattttttggacactttggcatttagactcctctttgcatcccccgttggaggtggtcttaggttccgtttagaatccttcctatcttcttgttttgcctctgtggctgctactgaattcgggttcaagattgttttaacaatttaaggttttggtttacttgtggtgtaggtgttagtgtctcttgtttctggaatg

SEQ ID NO: 9178 - DNA, 3000 bp, Unknown
  misc_feature (1)..( 3000): cDNA_ID_3044920_gDNA_ID_1972017_Annot_ID_177958 3000 nt of promoter + ATG
taacaaaaataacttaagcgattcaaaaactccgtatgatcaaccaaattcacaaacgtatttgaaatatgtatgaatttaacattcatttggaagtgatgcgattcattggtttatagtttatacatatttctccaattgtgttaaaccgaaccaagaaataaaagcgaaaccgagccactactcaactaggtgattttgcaattgaactttagggtttatgattaagcgcactatataaataaaatgttctggagactggagagggattagtttagtcactttgcttgatccaagagaatatacagagaaaaaagcttgacgacagttgaggctatggcggcgaatctccaagacggtgtttctgatgactttgactacgagcattggtctccaatcgcgaaaaagagactcgtggaaaatggagtttgggatgttgttcaaaatggagtctcgccaaatccaacgaagattccacagttagcggcgactatccaagccgtagatctagcacaatggagaaatcgtgtgattaaagacaacaaagcgcttaagataatgcaatcttctctcccagattcggttttcaggaagactatctcgattgcttcagccaaggaactttgggatttgctcaaaaaaggtaacgataccaaagaagctaagctacgtagattagagaaacaatttgagaagcttatgatgtacgaaggagaaccaatggatttgtacttgaagagagttgaggaaatcactgaacggttcgaagttttgggaaatccgatatcggatgataaggttatcaccaagctgttaacttcgttgtcatggccatatgatgattctattcctgtgttgaaggaattcatgactttgcctgatctgactcttcgcgatcttcttaaggcttttgaattgtttggatcacatcctgaaactatgcctcaggagttgatgaagttcattaacattcttagaaaagctcactctgagcggatgccgtgtggtatctgcgtgaagaacaatcacaaccaagaagaagacttgtattacaaccataggcctagggtagtgaatttaagtggagccaatcaatttagaggacaagggcattatgcaagagattgcagcaacactagaaatctgcaacaagctgagaagaggatccaaaaacctgagcatctgatgttaggggtaactgttggtggtatcacatttgatgagggcatgtggatggtacacaccactacaacggatcacatgactccatatgagaagtttttcacgactttagaccgatcatacagagctagggttggactggcggacgggaaagttgtcatggcagaagggaaaggagatgtcatgattatgacgagggaagggaagaagaggatcaagaatgtgctttttgttcccgggatcaacaaaaacgctttgagtgttgctcagatgacagaccaaggctgttcagtaacatttggaggaggcaaatgcattatgaagaatcacactgggaaagtatttggagaagccatgttggaagagacaggttatgttattcgtttgcaggtgattaaagaagttatctggcactaggcttaactcgtatggtggacgtattagtttggtattcttctgttttaagtttctttgcctaagaataagaaagctactgctgctgcagtatggattagtgtggtctttttttaacctaggacggtttggaatcaatctagtttttgggaaactgttttgtatccacaatgcaatgcttttgtcaagttttgctaatggtgaaagaagacgattcttgtagaaagataaaagggcttttggtaaattgatgatcaaatatacgattacagaccaaacttaattgagaaaatttaccgaaattgaaagagagagatagacatgcagaaggtgggttgttgaatcagtagcggcagatcttggccgtaggcattgtgacacaaacttgtgcgtatttcttcttggccgcctctgtccctcgcttgggctcttcttcttcagccatggctaccttagccaaagaacaaaccgctgcagctgcagccgtgaacatgaggtccctcctcattgtggtgctgctctgttccttgacttctaagctgggtgtgttgtcgctcgtggaggctctgactacggagagccttcgtccgccggtggctgagggaaccttggcgacggccgggaagaaggtagcggtcatggtcatcgatgccattgcttgatagttgattctactcgctagttggctctcggttaatggtttgtgaggtgatgggaatgtgtttaagaagttgggtaatttgagtttgtggaattgtggagaaatgatatccatttccttatccaaatatgattttcgtgcaaatgggttgtggccacgtgtcatgttctatcttttgttaagaaaaaaaaccatgagaggttctcgcaccaaaataaaaaagtgtacagtgtagatacttttgttgtggagtcccacatgtaggtcccatcttggatttaatttaatgaaacagaataatgattcgaaattacaacactggttaaaccccaacccttggtctaagtctaacgccgttagtcgttcttctctgttctctccatcaaattcgtcagaaaccaaagaagattcatcaattctcctctaacaccaatcctgcttgctttcactttccttctccgatttcgttctcacgccttcgcattcctttttttaatttcgtttcgaaacgcgtttcaaggttacgtcgatctcaaagtaacatcgccttcagagagaaattgataaaccttgctccaattccattgttattcatggctcttagaaactttacctagattactcggattcaatcgtcaagtttatattggatcgttgtgtcgtaggaaccctaatttcgagggcctgtgcactcactcactcactcaatttgcacaacaccctcagagaccaacaagagcaac

SEQ ID NO: 9179 - DNA, 3000 bp, Unknown
  misc_feature (1)..( 3000): cDNA_ID_2180801_gDNA_ID_1972017_Annot_ID_177962 3000 nt of promoter + ATG
ccataactggcttttttcgcaggaagggctcgagatggaaataagaaaaggaagtgaagcaacctggtggaaacaacttaggacattaacagcaagatcattcataaacatgtgtcgtgatgtcggttactattggacacgaataataagctacattgttgtttctataagcgtaggaaccatcttctacgacgttggctatagctacacatcaatcttagcccgtgtttcttgcggcggattcatcactggtttcatgactttcatgtccattggaggcttcccttctttcctcgaagaaatgaaggtaaataataaaaccctacttataatctcacaaatcttgaattgctctatcgatgaaaatgcgggtttgctttgtttcaggtgttctataaggagaggctaagtggatactacggcgtttcggtttatatcctctcgaattacatctcttctttccctttcttggttgcgatttcggttatcacaggaactattacttacaacttggtgaagtttcgtcccgggttctcgcattacgctttcttctgtctcaacatcttcttctcagtttccgtgatagagagtctcatgatggttgtggcttctgttgttccaaacttcttgatgggtcttatcactggagctggcctcattgtaagaacagagcaacctctgttttcatttctactaataatgctttgaacgatcttgaatctgatttctgtttttgtgtttggaaaagggaatcatcatgatgacttctggattcttccgtcttcttcctgatcttcccaaaatcttttggcgttacccggtttcttacataagctacggttcttgggctatccaggtaagtcaagaaactaactttatgagcttattacgattcaagaacataaaaataatacatttgggagtgttgcagggagggtacaagaatgactttctagggctagagttcgagccattgttcccgggtgagccgaaaatgacaggagaggaagtgatagagaaggtctttggagtgaaggtgacatattcaaaatggtgggacttagctgcggtagtagcaatccttgtgtgttacaggcttctcttcttcgtggttctaaagctgagggagagagcaggacctgctttgaaggcgattcaggcgaaaagaacgatgaggaatcttgataggagaccttcttttaagagaatgccttctctgtctctttcactgtcgtcaatgtcttcaaggagacaccaacctctccgctcactttcttctcaagaaggccttaactctcctatccactactaaaagacttaatataatgtatgcatgtgttctgaagctttcatcaagatctcatcttaatcagctttgtcattgttgaagaaaaagaacaaactgataacaaagtttcgtttgataaaccctacccaaatgttccactattgaaactttacttcaaggtttatgtaacacaagtaagacagtgttgcgcacagtgagagtatggccaaataaaaacgaaaaccttgttacaccaacatgtttggtccaaataagtatggcgcagagatacccggatcccatagtcaactttaaatgaccaaaagtagtttatttaggtgtaaagggtcaaagaaaaagaaagaacattttcttgagatcccatgaggaaaaaaatacattttgggctcggtcagtcagtaactcagtatatactaaattggagatattgataccaaaattttatcatgagtaaaactaaaatttacaagtacaatattatcgtgatcattcaagatttccgacatgaaataaggaaactcaaatttaactaaattttagatggactaaagaaagactaggtaatttaaatggggaaatgaaaaacttatataagttgataatagttaagaaaacaacatacgaagaaatttcgattattaatttgccatctttgtgtgaaattaagcaaaaattgacacgttgtcctttagtcaacgaaaatgaagctctctggaagacccacatgcatatatttagttatcaaaattctccttataaatttagttggagtgttctaataaaatgcataatttttttagccaaaataaaaaaaatgcataatgtttttagagcaattattaggactgtaaaactatccatttaacaaaaggaaagtaaaacacaaacaaatatgaaacatgtccatatactcataagatagtatctaaaagttaagtttttttttatataagatctttgttcgtccaatacattggaggacttgatatggatcgacacagagagaacaggaccgtttaaccaaagacaaaattggcaaaatagtcttcaaaaggtatgttttggttgactctgactctcttcccattaatttcccaaatacattttcttgtgcccgaattaaagtcgatagttattaaattagtctctacgtaaaagacaatagtagtagagtcagtttctacgaaagaggaattcacaatcacatccaatcaaaaagtactagtgttaatcataaattcgatactgatcaccatttaaacattctaacatgattgcaagaagactttagtcgttcgaaagaaaaaaaaaagcatactaaaagcataactataaacctcaataaagtaaagtaaatacgtaggcaaaagaaaatacaaaaataaaggcaacttggttgaattattgccatgaaagaggacgaagacgtgctagtcaagtgtcaaggcctcttgttcattaagggccaagggtttcgaccccaattttcttagataaactatgcctatggagaattgctgaagtcctcaaaagctgctacgcgttgttggggacccaacttatatctgtaaatgcccaagtaattaacggtgtaattacacgactatctttggctttgagtatatatatctttgttttaatgaactttaatctctctctcgatatatcatcttcggtcatagaactcaatg

SEQ ID NO: 9180 - DNA, 3000 bp, Unknown
  misc_feature (1)..( 3000): cDNA_ID_2180809_gDNA_ID_1972017_Annot_ID_177964 3000 nt of promoter + ATG
agaacccatacaacataaatgacgttacaataaaatgtgatattataagtagtatggaataaatttaaaccgagagggtaaataatatacatagaagaaaaaaaaacagagattgaataacgatataacgtatatatatggtcacagtctcatagaccacgaaagccacctaacttacaaaaatgaaacctatcattgattggaatgatgtatttgtcaacacctattaagctatatatgatgtaataatgctctatacatataacatttttatgttgttgtaagaaaatataatttgattcaatgtaccaattacttggttttaaatgctgatatctattcttagcttagaatgattgaaagtcttaacgtttctaaagcaaagattatgtatagatttggtcgtaccaacacatcaaaagtccaatggctagaactcatcatattcaaaaacccgcttgtgggcagaagctgttctttgaactctagttataaagccatttaatatttcttttctttttcgatatgagatattttagcgatgagttagtgatcatttagtcactttccttccaaatgtgtgagatctgaaaaatcttaaaaaccattgcaggaaaagttttatgacaatcacttcttctaggttaaaatgcaaccaacaacgtaaagaatcaccaaacacatggcaagcaaataaacgtggaagtaaattacatagttgggccgccggtgggcatttttacttattctccgggttctcttcttcggaaatgtgatatatgctttacttgggcctaaatgggcttcttttattgacatgcagatttctatctttaatctcggaagaaacaattcgttttagattacacggattggaaaacagcttacagattagagtgaccagacttgcccaaaagaacaaaagtgtgcaacatgatttgttttcttctttttttctggcattcatgatgtgacacctactcatacacctaggatactaaaacttattgccccatttttaattttaaaatgttagatactagtccttgatagtcatcattgttttatccatttccggaaaagttttaatacagtttttaaaatcttatttagtcaaattaaaaaaccacataaaaaataacgaaaatttgtttattttttggcaaattgataattctcgttttccatgaagagcatttactttttgtttcattattgtctgatgcatggttctgccaaaaaataatacgaactctggtcaaattgactatgaccattgagaacctcacgtgtccccgtaaagcaatcttcgcagttgacataactgctgctacagtttttgacggttgagatcagacgagagtattcaagattcggtgcactcgtcgtagtggaatttgccaactgatgaaaaatttatgtcacgcgcgggttttagtgagtcagggcaaagtaagcgctcgtatcgaggcacggtttcagttttttttgcggtaaaaacggaaaaaagttaaagaggttaaaatttgtttggttttgttttccaaacaagaatactaatttatagtaatttcttctagttacatggttgttacaccgaatatatcacagtcaattctatgttctttaaaattcaaaacacaagatttttgcttagttttatatagtggtcgtgatcaataataatatctttggcaatctctttcatgtacttttttcacaccttctcaaccaaatatgcatcttggacttggacacatgggaataaacaaaattgaggagtatttcttttgtataccatgcatggattggattatagctatgaaatacattaaatctaagacctttgaatgacatatctttttattaaactaattttttaaaacaaaagtagaagtttgattgaactttataaagtagtgatctcataacacaaaatttaatcaattttaatcgattcataataaataacttgtaatccctaaattagtaattttaaattatgttatagacgacaaaagtacgattgctagggtaattttctcgttgtcatatttcgacaataaaagggagacacgtgaaatcaacgtagaatcaacttttgactactccgaaaactaatgcgcattcggcatctatacataggttacacatataaaaccaaatccgaataactcgcaagcgcataaatatcaaatattcttggaaagttgtgtttcagaatttatttttgttttaatacttttagatcgctagctaattaatattttaaattacaaaattaattaaatctaagttatttgtagaagatatcttcttattaaactaaattgttcaaataacacatagattgaattttaattaaactttatatatcagtaattttgtaacgtgtatatttaattaaattaagaaagatttatatatatataaaaaaaagtcaataacacataatttttagtaaaaataattaaggtatatgaatgaataataacatacttcccatagaatcaaatccaactagttgactaagaaattaagagttaaagttttctaaaccaaaaatgttgcatccaatgggatgtgtatataaacaccctaggttggtcaagggagaagaaaaatatactattgttaaacaaaatcttaaagactaatttatctttttagcaaaaaaaattcgatttttaactataatcccgctcctagtcttggacaaacttcaaaaaaaaaaccctaaacccaatatcacaacaacagaacccgaaaaaaaagaccacattacgaaagtagttttttttttgctttaataaaatggttcattagaagacaaaatcatagtctcaaatctcctaaaaaaaaacatcacatttaacgctacaaaaaaacccaagttagtacccactactctctcacaaaacaaaagagcctcttcttcttcttctcaatctctctgatagagaaaccaaagcaaaaaaagaaaagaaatttactgtgacc

SEQ ID NO: 9181 - DNA, 3000 bp, Unknown
  misc_feature (1)..( 3000): cDNA_ID_2180805_gDNA_ID_1972017_Annot_ID_177963 3000 nt of promoter + ATG
tttattcccatgtgtccaagtccaagatgcatatttggttgagaaggtgtgaaaaaagtacatgaaagagattgccaaagatattattattgatcacgaccactatataaaactaagcaaaaatcttgtgttttgaattttaaagaacatagaattgactgtgatatattcggtgtaacaaccatgtaactagaagaaattactataaattagtattcttgtttggaaaacaaaaccaaacaaattttaacctctttaacttttttccgtttttaccgcaaaaaaaactgaaaccgtgcctcgatacgagcgcttactttgccctgactcactaaaacccgcgcgtgacataaatttttcatcagttggcaaattccactacgacgagtgcaccgaatcttgaatactctcgtctgatctcaaccgtcaaaaactgtagcagcagttatgtcaactgcgaagattgctttacggggacacgtgaggttctcaatggtcatagtcaatttgaccagagttcgtattattttttggcagaaccatgcatcagacaataatgaaacaaaaagtaaatgctcttcatggaaaacgagaattatcaatttgccaaaaaataaacaaattttcgttattttttatgtggttttttaatttgactaaataagattttaaaaactgtattaaaacttttccggaaatggataaaacaatgatgactatcaaggactagtatctaacattttaaaattaaaaatggggcaataagttttagtatcctaggtgtatgagtaggtgtcacatcatgaatgccagaaaaaaagaagaaaacaaatcatgttgcacacttttgttcttttgggcaagtctggtcactctaatctgtaagctgttttccaatccgtgtaatctaaaacgaattgtttcttccgagattaaagatagaaatctgcatgtcaataaaagaagcccatttaggcccaagtaaagcatatatcacatttccgaagaagagaacccggagaataagtaaaaatgcccaccggcggcccaactatgtaatttacttccacgtttatttgcttgccatgtgtttggtgattctttacgttgttggttgcattttaacctagaagaagtgattgtcataaaacttttcctgcaatggtttttaagatttttcagatctcacacatttggaaggaaagtgactaaatgatcactaactcatcgctaaaatatctcatatcgaaaaagaaaagaaatattaaatggctttataactagagttcaaagaacagcttctgcccacaagcgggtttttgaatatgatgagttctagccattggacttttgatgtgttggtacgaccaaatctatacataatctttgctttagaaacgttaagactttcaatcattctaagctaagaatagatatcagcatttaaaaccaagtaattggtacattgaatcaaattatattttcttacaacaacataaaaatgttatatgtatagagcattattacatcatatatagcttaataggtgttgacaaatacatcattccaatcaatgataggtttcatttttgtaagttaggtggctttcgtggtctatgagactgtgaccatatatatacgttatatcgttattcaatctctgtttttttttcttctatgtatattatttaccctctcggtttaaatttattccatactacttataatatcacattttattgtaacgtcatttatgttgtatgggttcttattacttcttaattcttatctttgttggaaggttttcacttcattcattcttttatcaacgttacgttatcacttcatattttaaaattccctgtcatatatcatatgataaataaagttatgccataacaaagttagagcataataaatggagaagcatactattataaagcaagaatgaatgtgtaaccgtagataagcatatgggcttcaactacgatctcgcatttaatttaagacccgtgactctctgtttgattttttttcgtttgtcatctgaaattttccttaacaatcttgaaaaatacgtttttgaaataaaaagccggtgaaaacaaagacatcaccgggtctaaaaccctaaaccaaaaaaacatcaaaacagcaaaaacacctactacaaacaagccaaagcagcttacccgaaacaaattctataaggcacaagcaatgattccaaagcagctcatgtctgttgcagaatccaagctgctcattttcttaattaaatgaaaaatgaaacatttctttactttttttgtataaagctgcatcattttcgcgtttaaaaacatgtcagatttcgtagacttgcttcaattttagtggctaatcaactcacttaactgatttttatttttattttgaaaaagaggtttaactcagttaactgatttaatatttgaggatgcagactgcagaggttctcttattttgctatgagagtttagagtttttgtccgacgattacaaaatttaatgtcacaattagttgcaaaactaatttcaaaatgtaatctcaatctacacgactatatgaataggatctacatatacgactattacatacccatcataagccaataaaagcgcattgtacgtatattaatacgcgtgccatcgatctatctccatctctatacgcatttactattgagaaaaatactaatattatatcgtagataactagcattgacattttactcctcaaaattgtagatatacatgcgcacttgtaaatgttgccgtattaaagacagtccattaatgaatttagttgtttggtgattgcaaaagcttataaatccttttttattgttttgtttcttctgttccttcttactattcactctccgaccaacgaaaaagaaacaaacaaaacattaaaatctctctttctctctatagcattgttatagctagttagagagacaaaactaaaaacaaatg

SEQ ID NO: 9182 - DNA, 1521 bp, Unknown
  misc_feature (1)..( 1521): cDNA_ID_3044937_gDNA_ID_1972017_Annot_ID_177947 3000 nt of promoter + ATG
gatcgcggaaagctaggattagattcacaaatggatctactaccatggcagaaggaactggagatgtgactatcatgactcaagaaggtaagaagacgatcaagaatgttctttacgctccagggctcgtgggaaatgcattgagtgtttctcagatgctgaggagcggcttggaagctagaatggatagagaacgatgcactatatgggatcggacggctgggaagtcttttgctgaaaccaagatgggagagagaggctttcacctgcgtttggatgtgattgatgaaggtcattttcaaagcaagaagagaaaatttgctccagtttaattttagagggtggacaataatagactgttttacatcatcatgtagttcaaagcaagagagagacttttgcctgcgttaggatgccatgttgatttagtatgatttcatctgtctagtttagttagcttctatcatagtctcttatcattttatcctttgtctcatagtttagtacttatttggctttttgactacggggaaatcttgtcttcggctgtcttatgtttgtaatcaccacaagaagcggattcgtaaagggtaatgagatataggtatgaaaggggagagtgtattctcaatgtggaggtaaatggcatgtctttaaagactgtagcagcagaaagaagaatgacgcaattacctgagtatcaaatgttagcaatcaatgttggtcctgtgacatttgacaaggatatgtggatgatatacaccagtacctccaaccatatatatgactccttatgagaagtatttcaccactatagacagaacacacagagctcggatcaaattcatcaccggacattctatcatgtctgaaggaatgggatggtagtttcgtgtgatgtcaaatcttagggggtgttattagattgtgactttgaaagagttttaatgactttaaaaaaatatagaaagtagataaaatgaaagattttaaatgatttttagagagttttgtataatctctatgattacttttccaatatcttgtaaaatcctcttataatcttgtaaaatattcctagttacaaagtcattcacaatctctttttttttacgatactttacatgattttagtttgtaaagaaaagtgtataaaatcataaaccaataacacaataatttaaatcattaacaatcatagattcatttgttttagttgaataacacaaaaattttaatgactttattaaagtatgaatctaataactcaagatttatgaagactttaaattactttttacaaatcaaaatctaataacaccaaactttaaaagagtcttataaaatcttaattgaataacacaagatttttcacaatatttcaaatcattaaaaatccatataaatcacaaaccaataacacccacttattatataaacaggggatgattttattcagtttctcgagggaaaatatacagaataaaacgttttaagaaaccctaacagttgctggctatg

SEQ ID NO: 9183 - DNA, 3000 bp, Unknown
  misc_feature (1)..( 3000): cDNA_ID_3044968_gDNA_ID_1972018_Annot_ID_177976 3000 nt of promoter + ATG
tatttggttgaatttacatcaaactagcgaatgatgacatcttaggaccaatccatctctccgttcaaactcataaaaacgcaaatattgcaacatgtataaatgcagataaatagaccaaaataattaaattgaataaattcaatgaaaggaagacaaagcatgtgaaagatacgtatgaaaattgacaacaacaaaaagaaaaataatttacgaaagaagagaatctgcagagaaagaaacacgcaagaaatcagacaagagatcagatggtggacctcacagagatttaactctttttaaccccaaactttattgtttcggtctatcgacgtcattcctgtgggtgtttgacacgttgacattgtttcacaacagataagcaaaacaatcaaccaaattagaaagtgtagaggaaaaaaacgattttttattcagataaagaaaatgagtgtttataatgggtattgaactaatcaattatgatatcatttgaattgtaatctttttgttacgtgtaatttaatatttgcgtcttagtatttaaacaagttataccagttttatattactaataaattagtttttagttttactacattaaatttgtgtcacattaatatttgatttgtttcactttatttccttcttgttgggctgtttatggtttcttttaatttcattaagttgggctgtacccactaaagttaaccaatctggtaaatgaatacaaatttgaatcaaaagagaaactcaaaaggagtaaaggacccctttgctatgacatgtgctggtacattgattcacttaacatgaatcaatcaatgtgtttaaactttgacgcccaaaacatgatatcgttgtgtaagctgtttaagtcttttaacattaaaaccaataagaaagttttttatgtccacttgtgacccgttaggtatatgttaacaaaaatttggcagttccccttgaaaatcactaattagtatgacaagaatttgatactttgtatagaagtttcgatatgcaatattttgttccaatctaacaattacatcttttatacgtaaggtatcattatctcggcgatcaatccaatctgtagagaaaattaagaataataatatcttgtaacagaaacaaacacaaaaatttgataactgagttcacggctaaccgctacgtctcggggaaggactcttgcttccaagcttaactatatcaaagaggttacacacactactaacttgtgatgtccttggttctttttcagattttaaacacaagaagaacaagattcaagaacaacaaagaggaagaagaaagcttgctttggaagctttttatctctcttctctagaactctctttagcttgtcttgtcacacaactaccacaacttctctttgtaagttgtaataaagatattatatatgtgatatgtaatgtaccacttttgttcttctttctcttcatgccattttcgtcaggcccacaaaggcccaaatgatgtgtttagtcaaacccaaataacaatctccaccttttgaccaaactcaattctgacacttgagtacttctcacaaaaataactcagcttgattgtcctattttatgagactattgaagttaccagggccgctgctctgctctacttcagtggatgttgggaagctcacaacaatgctggaacttcataccaggtactacatccctcttaagaattttcggtcatttacttgtgtgagccttagatacactgatataattcatctgctctaactcactgtccagttgtgaaaagcccttagctagcaccctagacttatacctttgcttttcaacaacttctaaacaagttttatgataacccatatcaagtgtacacaagaagatccaagccgcacgtgtgaagagaagaaaacaagaagaagacacgtgcgaataaacatttgtatataaactttgtagctttcagaagaagttttcatgttttgttttgttgtgcatttgaattatgtgtcatttgtgagagatagagtgatgatctagagatgttctagagctcttctctgaaacaatttatatcgattatttgtttgttaataaagattacatcttgtttctatcaattggtgcgttcgtgatcgagatcgaagtatcgctggaaaaagttagggtttgagtgatgtggggtttttgagagatcgaagaaatttttcaatcaaagatggtgacgacaccagaattaccgtcgattacggagatattagaggcagagcaaacgacggcgtcgttaactgaagttcacgaacaattgacggacatgagtaacaagattcgaagatctgattcaagaccagattcaaagttggagtctgtacgagtcaaattgagtgctcaaattgcacgtcatgaccaacaattgttggatatcgggaagaagattaacaatgtgcttcgcgctttgcctagagtagcgtcggcgccagagactggagggtctagtcatggtggagttacaagatcgcaagatcgacataatcatctctgtcccggaaccatacaatagtgacattaggccaggaattagagaaaacctactcaagaacgtggagatggctgtgtttgaaggagttgggatttactcttggatcgctagggtggagcgattctttcgtactgatggctataatgatgcagagaaattggcactggtattcaatgtaaatcactctctagtggatttacattgaataccaaaagaattgaagtggagctgtgtaatcagcaattgttacaactgggagaacaactgttacctagagaactgcgggaagttttgcgagaatatgagcaggtgtttgagattccttcaggattaccaccactgagaggaagaaaatactcaattattatctcaccagggaataatgcaattagtgtcaggccttataaatatcctcatgcacaaaaagagataatggagacagtggtacaagag

SEQ ID NO: 9184 - DNA, 3000 bp, Unknown
  misc_feature (1)..( 3000): cDNA_ID_2181066_gDNA_ID_1972018_Annot_ID_177983 3000 nt of promoter + ATG
ctttgcctcttttgttgcagtcttgtaagaattctcacagtttttccgcgacgagcgcatcctggccgaaaccatagagcggagttccgctgttatcagatcagctgctttttagatcgatttcccgtcgatctggtagaatatcagaatcaaccttcacatcatcatgaagccccaaggcttatctttctatagagaccaatctcgtctctattgttgaactccttctaggttggggaacctgctacatcatctttgctaccattcttcgatcgcgtcattgttattctcacttgagatcagcaactcaaagttcaacactatcaaccaaagatttcaccgcacctgacgggtcgtcaaatgcacttaagatcaagaagttattcatcttgcttcctgtccaggaaacaactgaaaaagtcctcgatccatgccaagtctgaaacaggatttggtgtatagctagagcttttgcgagacatttttcggacgcaccagaaagagttaaggttcgagtaagtactctttgcgaagatataattacagggaatcctattctttaaacggattatcgattggtgttaatctctatctgcaaatctccttcaaagtttgcccaaaatcatccatactgcagaaatcaggaaacaatgactctgccgcagcaacttcagaggatcatggaagatacatacgacgtctgatctagctagaaactgctcggatgtttttcccgagcaggttatgaattctatcttctgaaacccggttatacttaacaccgatgccccagataagtttctaaacgctcgtaaatgacttaatcagatcgggtcgtaaccgtgggtattcaagtctactaaaatccagttactctaaacacactggtaccgagctaaccacctcgggcatgaaagacaaagcttcaccggaaaacgctccaatatattcactcctacaaaaactcagtcctaactggtaccgagccgatcaactcggaaactaaaacccagttaccataaatactggtgccaagcttttgcctcggccgtttaagtccttccgacttagtctagtaaaatcttgttgtcataaacactggtgtcaggaaaatacagttttttatctgctttggtcttagtgcttagaaatccagttatcccaaataacctggtaccgagtcaatcacctgggtaacaaaatatactaaacccaactttgacacaggtaatttgtacccctgtcaacctcctcgggtatgaaagacaaagtttcttatcgaaatattccaaaatattcattcagaatgtggataaagccatccacgcatgtctttacattaaaaaaaaaatcaaaaaaaaaaaaaaaaaaaatcagaataaaatccaaaacaaagacattgttcgggaacaaacaaataagccttactctaaaaagacatgaatcagtcagtttagatgcgaaagcagctggttcggtcacaccattcatgaagctcgtcgcattaactcttaaaccaacgagctgggggactaactgttggggtcggattcccccacaagcaagaccgagccaaacattcataagaataacaatcaccttatggttaaatatatgataggccccgaggctagaacaaagcatctcgggaccttatttggtcaactatatcggagagttcatagaatggctcgggtggtaatcctatgagcacagcccgagctaaccgcgagaacgctaccgaaaatatctatatcgccttgggggacaatcaactgagctcaatggataagtgtcaagcgtgccccgagccggtacatactgtttgtgtaacgcccacgatcctcaataggatcgttggctaggacttggtccgagagaagaaggtggagtctcggacaagtgagaaggagctgaccataagctcggacaaaggggaaatcatgcatgctaagctaggatcgtaaagaaatcagctgggtcagctcgcccaaagctcaactcagctggaaggagtgacggttactcaggtcgagtgacagtccagctcgggcagctggacgtgtgacggttgagctcgaggtagctggactagtgacggttgagctcgaggtagctggacaaatgacggactagctgggcggttatgggcgaagagatacaacgcttcggaaaggtgcaactcttcggaagggcgcaactcttcggaaaggtgcaactcttcggaaaggtgcaaggaacggatgtgttgattcgggaagcatccattcgccccctatataaggaagggcgcccaggaccattccattcaccacaacacaccgaaaacacaagaaactcaccattaaaactctttccctcttgggagaataaatagtcttaggattcggtagccgggctgtggccgacaataaagaaggagggtcggatcgacctaacctcgagaaggaaggtaagggatcctagactttgtgtctaagggttctaggatgtgagttagtagtcggatcctttaaaggatcgactagagggctgggtagtatccgggtcatatgcatcctacataagactgggtccgcgtagggatcggctgaggcggggacgcggctcgacggagaaccggcgggtcttaactgacctgccgagaatcggccggactgatgcgcgatcttcccctctctgaatcctctccacggatccgagtagtgtatggcatatagagctttgcatggacttgcataagactaagtaaatgagattacttatggctctatcactttcaggaacgaatggtgatcgtgggaaggacttggcttaggcgcgagagactcaaggccgggatgatgggtggtgatagttcggataatctagggatcgattatatgacttgtaatagcttatatgcaaactcataggttgtatcgaatcctttgcttaatcaataaagtatccgattgtttgtttactctattcgtctcatatattgaatcacggaatcat

SEQ ID NO: 9185 - DNA, 3000 bp, Unknown
  misc_feature (1)..( 3000): cDNA_ID_2181048_gDNA_ID_1972018_Annot_ID_177979 3000 nt of promoter + ATG
ctaacatttttattatccttgattatggtaagaacattgttatcacaattaattttttagatcatcacgaaatcctccagagtagagtaaaaggaaaagaatgtaagatatatgattatacggatagatgacatttatagttaacggtaaaagtagtgataatatgttttaccatgataacaatagtcttagttggataatataataagacaatttatgtgatctgtcagcataaacatttataatgagaatatttgctaacatttgcattatcgattacaatggtgacaaaactgttattacgataattggtgtcttatgttttcatgaaaccctcaacagtaaagtgaaacgagaagagtttaagtatatattaatgtggatgggtaacggtaagggtaaacggtaaaagtggggataatatgtttatcaagataactgtgtgcttacctagataatatagttacacttacaatatgtagaaatattaatcgtccaaacacatcgtgaaaatgagggaagctaacgttttgattatcgataataatggtgagaacattgttatcaggttaatgtggatttagttcttcacaaaaccatgtagaaaataggtaaaacatttattatgaatgataaaaagtggtgataatatgattaccatgataaatgtggtcttagttggataaacaattagacgattggttttctagaaagagaaaaaggtatttgaatctccaagaaaaaaaaaatcaaaactaagattttgttatatggctgacataatatctatctaaaactacaaataatacagatatagggatatatacgtcttttccacatgaacaaaattgctgtaacagtgcagtatcttgtcaattaatttctcattcttctgagtatagatcttcataatacccaattaaaaaaagatttggacgtgtgtatacgaagaattatagatgtataatctttgccactacatccactgccgcaacagctgcttttttaatagttatgatagcagctgcagtctccacatacatagagtttgcgttcactttttttttctgtcacaacaacaaatttagtctgtttgctttctttttttatatttttggttgtgacattgaagccatcaaaaccgcctttcttcaaaacaatatggagtataaaggcagatatgattccaaactctagcaaacacaaaccttgcattacctggtaaacatataacattgacatttatttggcaatgttattggacaagtaacgtttgtgcaaagaacaaaccttgctatggaatttcaagagaacatgataagtaaatgttgttaaattataagcacatctaaaacaaactaataaaaaaccttctaaaatcctataattatgcctttacagttaggtgtgttattgtccacttagaactattgggcgaaactggatcaactttccactctcaaataatctcagaataggccaataaaaatgtcatgttagtaacaacgattaatccaaaaatttatagaggtaagtcattttttttttttggcaaactcttagaggtaagtcatttatcataagaaaataaaatataaactcaaccaaatatttcccatcatcctcacgtatagacaaataaaagttcacatgaaattaaaaagataacctatacttgaactctaaggctgccaaaaggttatattttgactcaaaaattgacgccattcaaaattttacgaaaaagtaagctttaataattaatccaaaagtaacacatttggttctgtaatcaattccctaagccaaactatatagagcgatattttctttcttaatgatccatatatgatggggaaagaagaaggagaatcatatatccatgtagaaaccatggtaggaatttaaataaaagaactggtttccatcgttgaacttcacatgacttcatatccaaagctaacaaacatgtatataaaataatacactaattaaatttatcatcacataaagacgaaagaatcatctaaaaatgatacatttatattggggtcggattccctcacaagtaagaccgaaccaaacagtcataagaataacaatcacctcatgattaaatatatgatagactccgaggctagaacaaagcatctcgggaccttattcggtcaaccgtctcaaagagttcataaattggctcgggtggtaaccctttgaacacagccggagccgaccgcgagaacactacggaaaatatctatatcgctttgggggacaatcaactgagctcaatagacatctgtcaagcgtgccccgagccggtacatactgtttgccccgaaactagctctcaaacgaccaccgagccttgaagaacacctgaggcaaagacttgtaaaaaccattcattctcaaaggatcattttccggaaaaaataggatcatttctcggactttcggaaatgataaaggagaatctctgaagataatgtcgaatcaggaaatctttccgaagcctccaaaaattaaggaaaatatacttaggaagattatcctcctgaaccgacttaaggataaatgaaaatcttccgagaatatcgctagagaggcggtttaacgaccctatataaagtgcctcagggacttcacaaaagggatatctttggatattcacaagaaagacacaattttatacccaaagagaactacgaatggcttgatcccttcatagggtacataggcaatccatcacggatgcagctataccttctaaaaaccctaattccttctctgtacttgagcaaaaccctaatgtatttcataagagattagaacctcttttgtaatcgagtcttggatggaatacctatttaagagaaattactagatttgttttccctctctaaacaaatttattgtgtgaatccttggttcaacaattggcgccgcctgtggggacaaaaaagaactctcttcgcatatcattcatccaagttttcg

SEQ ID NO: 9186 - DNA, 3000 bp, Unknown
  misc_feature (1)..( 3000): cDNA_ID_2038561_gDNA_ID_1972020_Annot_ID_178015 3000 nt of promoter + ATG
ttcgtcttaaccaggcggaagaagaaagaaggtgctgctgaatcaccggcggtgaagtcagggaagaagcgagctggtgaaggaagcacctcaagggacatgcatgtcaaaagagttaagaaagaggacgataacaaaaaggcgaatcctcagagagtatggagtgaagaagatgagatctctcttctacaggcagtgattgatttcaaagctgagacaggtacaagtccttgggatcataagaatgcgttttttgatatcgccaagaaatctataagctttgatgttagtcatgtccagttctttgacaagattagaagattaaagaataagtattttgttaaccggaagaacaaaagtggtgaatcgaatcatgataagaaatgtttgggtttggctgttttgatttggggatctgatggtatgaacgttgaatctcctgtgaagaaagatgaatctattcttgttaagggtaaggctaatagcaaggagaagaaggtggagaaacctttggttatagaagatgagcaagtgattcttggagcagattcggagtggtttgaggagtcttttcttgttccggttatcgcgaatctcggtttggatgagtattctgtgaagaagaagtggagcaaggtgtctctggagactaagaagaagattcaagagaagatgaaggttgtggacgctaagaaatgtgagttgttgttggcggagatggatgttttgaaggatgtgacttcggtgcttgctcaaaccaactaagaagaagaagaagaagaagctatcttagggattgtatagggttaatctaaggatgtaatgccctcttttgttatctatcttagggtttatctttctatctacgtttatggatttttagtcttttggattctcgtgtgagaattagctataacaagattaagataagttgtctaacaaaccttttggtcgatggttgtaatgaacttttaggattttgtaaatgtgcttctttttttaatgtctctctactcaaaactcatgaccagagttattacaaaacaaagaaacacacaatagaatggattcacaaacatattcaacaagagttctaaatagcttatatggtgataggttcaacctcattaaacaaaatggattctgaaatgatgtttgtaaattgtatatttattgtttatgataattacgtgcagtttgagttattctggtgacactagttcctctttctcaagtaccaaatgcaaccaaaataaaacatatacatttagttacaatctttcacagaagttattatgtctataataaaaaaattaagagattctgcatcttgaaactgcaaagtaggtgaggaaataaaaagaaacataaattgtgtttatgagcatgcttgttgttagagtcccaatatgtagtagagtagcttgcaagaaatcagagttaattatgcgtttaagagcatgcttgtgtgtgtaagtgtttcaagtaaaactataataagtatgtgtgtttgtatcttgtaagagaatcacccaagttttattatcaagacatcatgctcttaaacgtgttcttgtttctctctaaagaaaacaaaagcaaaacagagtgacaagagagtgagagtgctgacctcaaaagaatgttggaagaggtagtttgagagtgaaagtgtgattttcaacagatatcttcctcacgtagaagaagttgaatggttaatatcaatattgttatgtataaccaagaaagctatagaattgcactatgatattgtgaagctgcagaaaaataaacaacagtaaagtacatacttgaacaagaaaatgaactttgttagtccgcgtacttgtcttaactcttatgcaggggtagccaagcaatatgaaacatttagtgtggcccattttttttttttcaaattctttaacaaaaattatttacaaaatggccccaattttattgattttaacgataattggccctaaattttaaaacctttcaaaataatcttggattttttgtttttttgtatgttgcccataaaaccgtcaggtcttaggtaaaacatctataaattaatattcaataaattaataaactttataaattaataaattcattcaatcccgagttgaaaccagtgtaagaattgatacaaatcgataaattaataaaataataactttttgtgaaaatcatatgtaaatatttggtcccatcaatattataaattcactaatttatatatatatatatatagatatatactaaaatatgaatatagtattcaatttgtattaattctttgtagaatttaattctaatatttttactaaatcgaaaaatttagttttggtttttaaacttgataattgtttaataattgtaattggtttcaaaaatattattgattataagaaaagaaaaaaaataccttttttgattgaatattataagaaattacataatttgtaaaatttctttataaattaatatctcttcaaattaataaattttatcaatcttaaaattattaatttatagagattttacctaatatgcatttttaactaaaagtcataatgttatatattttatttatatttagagaataatatatatattaaaaaaaaaaaaaaaaaaggttgacaagtggaaatatgtgaccggcaatagtaagttaagttgaccaaaaccaaaaccaataaaatcaaaatcgagagactctttcttcccccaagcgaagaagcgatgatcaaaattttacaacggttcctccattttcagcgaaggtaagtctcacctaattccttggaactaagctccgctgtgatccgaatgtacttatatatctctctcttctgatcaattcgcaaaccgccattgttgcttttttgaaatttcgcttctgatgaagaaatgttgatcggagaaaacgttgaagacgtttgaatttctttatgaattagtcagttgtggtgttagttagttacgatg

SEQ ID NO: 9187 - DNA, 3000 bp, Unknown
  misc_feature (1)..( 3000): cDNA_ID_2038545_gDNA_ID_1972020_Annot_ID_178022 3000 nt of promoter + ATG
caaaaagcaagtcctctttgtgaagttaacaagaagcaaactatttatcagaataagcaacaatttcgtcatttgcacaagctgccacattgatcaccattgtccccttggtcgttgttggcactaatttacaacaatctctccgtggagcctacaaaaacatttgacaatttctcgtgaacaataatagaagactaaagagttctgaatagtaaattaacagcaaaaattatgtaccttgctccacctatccggagtaggctttttgtagacaaatatctgattgatctcggaaggatccgcgattccccattcacatttaggataccattcgtcgtgcctcaagtattggctaatcgtcgttgtatcagaagaagaagagttactaaacgcatgagagaaataaaacacacgaggacgctgacaatccgtccatgttaccggacgtgtgttgaatgcaagattagtgaaatcgctacgtaagtgccaatcattaaaagtgcgagtaggcacttccatcatccttgctggcatatacgtacgcgtgatttgaactgtgtatccccacgagattgacattgtccactgatgactcttatcatagcataccgattgttggacaagactcgctgaatcgagtttcgctgggatcattagcttctttaatgcgttgactcggtttgtttttgggaatataggatccactacgtctaggtgatggattgatactattggtgcttgtggatggacagataatagccctaagagattcccgtatacatcaaactgttataaaccataccataaaattaataatcagtaagtgaagtaacaagagtcaatgacaaatgaatctaatcacggattttaagttttactatttcacatttactttgtgtttttccggctgatttttctcggtaataacaaaactaacctgatggaatccaacttctttagtgagaggaacaccaagctcagccatacaagcatgaatccgatcatcggatccgtacaaatcggagtatctctcgatacaccgatcttgcatcttctccaaaaccttggctaatggataacttatagcaaaccctcctccaccgtacgccattccataagaaaactgatgaagattctgcaaatgactctcggacggagctccgatgtaataaaactgtttatgatcgtactttctcaaaaccctaacaagattttccgtgaaaaacacggtatcgtcgtcacccatcacaacccacctcacgtttctctccgcttccgttccgtttaacatcctcaccgtctcggacacgattctcgtgatcctgatcgctgatctgtgaccgttacggtaacggtacttgaaactcgacgtgtcggaagagattctgatctgaggcaaagctgatgaagaagaaacggtgtcgttgatgggtttgtcgagccaaacggcgccgttcatgactccgttaggtttccaccatgttttcacgtattctctacgatgcttccatagatctgaagacgcggcgattccgaagactatgtgtttgagctccgtttgttcctcaggtgtttgacccgacccgagacggataacgggtacgaggagagaattgggggatttagaaggtgaatatgggtttagaaaagagatgaaactgaatgagtataagagatatgagacgaagatcaagaagacgacgatggctgtgaaggaacatggagatgaagaagaagaataaaagggtttattagatttgtcgtaagaaagtgttttttgatctcccatggctctgattgacatagaagaagactagttttttttttgctttgtgagttgtgacagtggtggtgttggtgagattgaaggctttttattaagaaatgaaaccaagtttatttttttttaattacaattataatctgtattatctaatgccaaaaaggcaaggtttgtctcgatgctgtcaattgttaatttacatatgaaaattattacactactccgagaaatttaattaagacaacttaactcaaatttaagacaagatatattttgatgatgtctaaaataatcttatttagttaaaaaaaattttggatttagaaagaaatctcctttttatatttcccaatttattagagtcaaagctgtttttggaacattaattctccacaagaataaaaccataagatggaaaacgacatttcaacattaatgattacagtaattaataactgaaaatagcgtttttcacacaaatctatcagttttttttattgtagccaagtatttgcaaaatactccatcttaggatgatactttgtctaaagtcaataccttttttattggagtacaattcatgataaatatctcttctatttttagtggttgtatatattttgtcatttataagcagatttaggcacatattattttgtccaaaacatattgaatttgtaaccatatatatttgacaaacaccgtgattaattaatgattatatatatgtacgtagttaagtaaattcacaaattcacaactttgtgtgtgtgtgtttcttaataaggttttgcaccaaattaatcaaacttgcattaagcccaacaaatttgaatcattaggcccaaaaggcccagaagttgaaggtgactaaaacgacgtcgatgttaccgaataagaagcagagttgacgaaataaacctgtctcttcttcttcttcatcttctttccctctttgccaagcaaaatttagaattctttctttatctctcagcgagaattttggctaagaatctagctaccttcaagtctctccaggtaatatacaagttctatgatctcttcacattccattgacttcaatttttgatctggtccgccattatcgaaactctagcaagctcttaattagtgaacactgtgttcttcttcaattggttaagaatgtgattaagacttctaaatcctgatttttgattttgatttgtagatcaatg

SEQ ID NO: 9188 - DNA, 3000 bp, Unknown
  misc_feature (1)..( 3000): cDNA_ID_1808340_gDNA_ID_1972020_Annot_ID_178027 3000 nt of promoter + ATG
catttcatgcaagaaaaagccttggtttcatattcataaatcataatacaatataattaattaattggaccttttatttttatactttattcaaagttagtctaatacttttacgccacatatattctaaatcttgagtaattaaaatgaatgaatatagcaatgatctacatgtgatttagctatctctatattaaattgaatataatgtgaattttttttttgtctattggtagcctaatctggaatataagatttccaaataaaatctcagaaaataaagctctataaatttacaagtcaattagctatctctattttaataattgaatatcatatgcttttgcttcaaaggcatgtttttcaacaatgtgaacatctcttttcaccttttctttatttcattgtccttgtccgtcaccaaccaatcatacacttttttcccattgacatgttcttctatgattggtttctttccatcacagtcagtatctttatctctttgacgtacgtttcaatcttcttctctaaatcccgccctcgcgttccacgctaacacctaattctaatatatacaaatcatataaatagccatttttatatcctctcgtaacttttccttctttctttctccaaatttgatcgtaaaaaagattcctatcttcttcaccattcttttcttgaaaaagaatcatgggcttatcttatagcggcgccggagttattatcgccggagttatcttgaatgattttatcaaatcagttcgttcttttcttgatattcgtcgtttgtttggttcggcatcttcagggagcactatcatcgacaagattccgatggacgatatgcttccggcaacaaagttcgaggatatatcatcaagggttaatccgccggagagctgccggatatgccaagatgagttcgacggcggtgacgaagtccggtgtttgaggaattgcgtacatgtttatcacaagacgtgtattgaccgttggatccaagacgataagatgacgtgtcctttgtgtaggaccccgatcgttcctgatttctatttttttcgtttgtaaattagaaaagctaaatgtttcattaatcagattttttttcagcaaatagatatcaatcgttcactaataaaaactaattttttgtctagtttatttatttagttacttcccataattcatttccgtttaaaaattatggttatcatagtcctggacgttcggttatccattcgatttcggttatattcattcagttatcggtttgttgttctaaaggtattcattcagtttggtttcgattctttcggttttcagatatttttttgattattttcaagtatttttattattttatatatattctcaagtatttttaattatttactttagaaataactaatacttttaaaattttgattgatgtttcggatattttcggtttgtatcaattcggtttcggttatttcagttatagaatttagtatgcattcgattagtttccaattttcggttcggtacggttcattatttttgcttcgatttcagtttgatatattcggttcagaatatttgttcagacttagttgataattgagaactctttctcgaaacgtttaaatattaaaagatcacaaaatgggataaacaactacaagaaaattttgccttaatcgacgtcacatgtaaacaaaagaactaaatcggattcaatgttgggcctttcttgaagcccacatgctatttgggtcaaaagcgccaagacccaagacatatctcttaaaatctttgaactttttgagttttgatcacataagaatttacgataagatttactcaccacgagaacacacacgtggcagtttcactgattaaataacacatttggtgtattcactaatatcaaataaatgacgtcatttcacgcttctaatttatttcctaatgtacatttagtgataaaaccctacatacgtgttagagatacggccccgtgcacctactcaaaatagtaaagtcaaagaacgaccgtcagattctatgtctccctcctcagcttataatcaaatcgtggccgttgattctcttttgactcagaacgagcattaacggtgacctttttatccgacttcaccaccatcgttgccgccgcattcgatcgatcactaatcacaattctccagctcaagtgggacattcgtgttcgccactctctcgcctgtcacgcgtgtctctcacgctccacattttttttaatccccttaatcacacgatcttaaggtgtctgatttcactaaaaacatcggaggcaaaaaatgaaaaatcccatgtgcatgctcagtcaaactcacccctcacgtgacacattgcctctatcacgtgatagacgagtaccatttctagatacaactaagattcatatagatcctttaggatttatttttttacagtgttgtatgtttaaattgaacacatttatgccgttgacaaaatttaaaagtaaatatgaggttgacttttgatttataacagattcgtagtatagaatatttacaattgattgaccaacaaaaatgagcaaagatgttaccgtgggtcgattctttacctgggaacttaaatttggtaaaaattagcggcagcttttcttttttaattatgcctactactacatcagaggggtattatagggaactagagtaaaacctaaggacatttccgaccaatgaaaaaaacatggaaaatataagaagggctgagaaaagcaaacaaaaaaaaagttttaataaaccagagaaaaaaaagaaccctcctatcgagttctgtgagatctgcttcaaaagaaaaaaaaactggtggagaagaagaggtgaatcgagttataagcttacgtggtgatgtaaaatatttatatattgagcattttatacatcttcttcttacttgtgtttggtttcttttgggccaaagtattgttttgggtaaaaa

SEQ ID NO: 9189 - DNA, 3000 bp, Unknown
  misc_feature (1)..( 3000): cDNA_ID_3087818_gDNA_ID_1972020_Annot_ID_178032 3000 nt of promoter + ATG
cacgtcgctagcgtttcaaaactgcttccactcatccttcctttgatggactcagaatctgtgcattgtggtcgccccaaaagcaaatcatatggaagaggagcaggagcacaaaaggtgtcaggtatagatgtctccaaacctatatcaaccaagaggcctgtggtgaatgctgatcccacaccagcacgggttcctgaagggacaagctcttcaaaagattctggacactgcgtaacaaacttttaataaatagaaactttgtagagtgtcacaatcaaataactgtagataattcagaagacatttttcaaacacagctcactcacgacctctagtagtctactatcgaccactcaagcgagattgttacaagaaattgttgagattctaaaatcatgctcttgtcccgatttgttttaactaaaatcataatctatagatagtcagtagtgcaaagcaacacaaatgcaagatggtgaaaaggattactgacataatagtaaacaggtgttccaacaagatgtgacttcctcgaagaactacagcaacctcccattttcaccagctatagtaataattaagcaagagtagcgaacaacagtccttgaagcattttacagatgcactgccactgcaggaaaagagtgaactgaacaacgattacttgaatgcaacaagattaatcaaaagtactcttaagaaaccccaataaaaaaaaagtgattattacagtgttagtaagcaaaatgacaaaagaaaagttggtctgatggcaaagtcatccataagaaacacaaaggtatgggaagagtgaatagtgagaagaacattacgaaacaagattaatcaaagcagacttgagaaatcccaataacaagtgattattacagtgttaataagcaaaatgacaaaagaaaaagttgatctgatgccaaagttatccataagaaacacaaaggtatgggaatgttccttatgctctgttgtaatgtcccatcaatagctgaaacttgaatctatattctaaaacaacctctaggattcagtcaagttgcaatgaaaacagtgacgcgagcaaaagcatttcacacttgagccaattttaatcaaacacaacacaataaccttcaaaattggtaacatcattgatatgtaactctaccataagatcttctcataagaatagacgacaacatgaacacagtaagcacatctaaatcagaaactaaacaacactaaacagtacgcgaaccctaaaattgaagaagccgaaaagaccaaaaacaaaaagtacacgaaagccgactccgggaaacaaaaaaagagatggaataattaaccgatgagagcagtaaacgaagataacctgagatgtcgccggagaatttgatgttgtcgtgattctccggtgaagaaaagtgagaagaataaatgctggcgacggagggtttcgacacacagagctccttttctctagtcgaataacctcatcatagtaagtaattatactgtaatcctactttactttatttagtttgcctaattattctcaaatctcattaaataccttttaaatagtacgacgtcggttaaggatacgggctaatcattgggcttttgttttctgaaacatgggctataaacattttagaccatggtccattctacagaaggtcaaaccctctgtcgctatcagaggctattgaatattttgctggtaaggtctcaattctcatcatccttcacctgcctatgaatcttccttgttaaccgtaacctaatattgattgacttctaatcaaagtaatttaatctaccattttattatttcctctaatctaagcctttttcatataaaatgtatctaatagtaactttataagaaaaatattatacctttttcttggtatctttgttgtaaaaaaaaatacaaattaaatgcgagttcgattattgcattaatagagatagacccatctggcatttaatatggtggcggcggaataatcgctaacaagatattagttgaaaattttcaaatcattcggatagattacgtctggcattgaactaattatcctctataaattcaataatgacagaatttagtagatgttctaaatactaaaattatttaataatcttacatatgcaattttccatgtacgtgctgttttggagcgtttaaaccgaattaaagtactactgtaaataaattgaatcgaatttaccgaaccaaaattgaagaaaaaaaaaattaaatcgaaccgaaccaaaaattggaaactagtcgaataaatattaaattctataaccgaaatatctgaaataaaaccgaataaatacaaaccaaaatattttgggtaaaatatctaaagtataaatatatttttaaaagtgttaattatttctagactaaataactaaaaatacttgaaaatataaataaaatagtaaaaatatttggaaatatctaaaaatatttaaaaatattcaaaataaccgaaatattttaaatgaaataaccgaatggatactaaattttaaaatcgaaaccgaacagaactttcaaataaccgaatggatactaaactttaaaaccgaaaaaatcgataacggaatggataactgaacgccgagaactactattatatacaaagtatttagttattcaataaaatttgaaaccaatcgttttttttcaaaattaataattatcgaatttaaatctaaggaataaaaaagcttattacaaatcattagacaaaatgtaataaaaaaaaaggaaattatacacattaattatcttagcttgtcgagtttaaattttgttaatcagagaacgtcaagttgtacagctggcgtcaataaatacccaaaacagtcgtctttttcaacggagaagaaaaagttgaaaaaattgtaaagtcagtctctccgactcttccttccttccgtgttcaccattgctacacgttctccacgaactttccgatg

SEQ ID NO: 9190 - DNA, 3000 bp, Unknown
  misc_feature (1)..( 3000): cDNA_ID_1818591_gDNA_ID_1972020_Annot_ID_178039 3000 nt of promoter + ATG
ataaagaaaaagaatcaaattcctccatatcgttctgtatcgcctccatgtacgtaaagaaagttggtcactcttacggaaagacaccatttttaccaggtctgagcaatttataaggaaagctatttttcacttgccttgtactctattaaatactagggatgattcagcatccgcaaacagtaaatgagaaaccgcatgacttgcatttaccacctttatactaattattaacttatctatttatgctttctgaatattagcaatcagcacttttgtgcatagtacatataaatatgaggagagaggatcttcttgtcgtaggccgcattggggagtaattaagcctcttgattgaccgttaagtagcgccatatgttagactgatgtgatacaccacatcatccattgtatttatgtctcccaacaatccatttttcataataaactctcgataaaatttgattcaatctgatcataagcctttcatgttagtttttataaccataaactttcttttgtatgacgaatttgttcagagaccataaaacatctcttgcgttataagaatattatctaaaatcaatggtctttcgataaagactaattgtgtttctaaaacaaaatttatttttctattttctatttatttaattttccttctcatttttagttgtttttataatatactaagcgaggtagtataaatctagaatcctgaaccagcagtcaaatatcactatttaaagctaactatttaggtttaataataccttaggatattattaccatttacgtaaaaaagtttgaacctggaaaacatatatatctacgtagagtaccgaatattctaaaccatttaaaatattttataatgatcaaccatgattgaaatcaagtagaaaaacttgaacaatgatcttctagttcattttagttgtttcacttaaaaaggatttaaaaagagagtcaacattgcgttttaaatgcattttgaggtttggcaaaccatctacaagctatctgacatctacagactacgtacagttgtgttccatttgttacaattacaacaatcagcttgtttgtttttggcaaattaagagtcatgagtgtgtatacgaaattactttttggtggtctgaatttatgaatgcagttacactaacccttcttcaaaaataaaaatgaatgcggttatactaaactatcaaatatatctactagcaaatatgaaactacattcagtaacagtgatctctctttttggatacaagatgaaacattgttctcttctcatgctctaaatagaaaatactctacgaaatgaaaatgtatgtcatcttataagaactatacatttttactccgatggttaattctttgaaggattctcgacagtttagaagtctgcaaaaaatataatctcataagaaaaaaattctaagtctcttgatacaatgcatatagaaactgacaaataatcgaagaaattgtacttgagcccattacgactattgaaaattctgattttggatgaattcagcggaaactacaaatttaagagtactttatgtgtataatatgaagcctatatatatagaattactaatgtaataaaataagaaccggtgaaaagggggacaagatcacaaggttttcgcattcagtgcctttacagagttatatatttgatgatgttattgcttacttgcctaatagtactatactactatatatatctaaggtaacacatgtatatatatgtcacatagacattactagtatatattatgtacttctatcatatatttatgatattgcagttgcagcgtacacaagtcagctccttttgacttttacatctcatgaatgcattgccatgacatctaatcttactcgagatttgtgcatgcacattattcacttttgtcttttgcaatttttgttattgtaaaaaaaggaaaaacaaatgtaaaagagagagagaccagaaaggtctaactaaacctaaagagtcaatgaaatgtgtttctttcttgtgggattaatcaattcactctttaacacttctttataccattgaagaaattagatgaaagagtcacgagttgcttaccaaatccctcacaagaattgagaactgataaaccaaattgagaagattaaatatcacgtctccttttgatctctattataattaatcgaaaataaaaataagagttttcaacaaaacgtgatcattggtttacgatcacttgcaaagtcaaacctaaaacgtagcattagtacactaaccttaaatactaattatatcatgcaaaccctaatgtcattacctaactatacatgtgtaatgtgttcaacagatcttcttaacccacattagatcaatattaaacaataaaaagattcttatatattctactacttacttcttcttattcccatccatatttttctgtgcctttaggttctcaactaatctcatttaatttagctagcacacagagaaacacacacgtatataaataatatgataacacacaaaaagactcatatatataaataattagagtcattaaatgtggattcatcattaaatgaaacaactcttcttctctgtacaatttctcttcacaccttcaccaaattctttgacttcaaaaatcttataaaatttatatatctccaaaaccataaaaccaaaacgagttttcacaaataaattacttagttgaaatttcaaatctcattcaattagggtacactctctcaacaatccacattaatgagggttgctgcttctgatggctagcagtaacagttttatcgcctccacttcttaatgccatctttttcctcttccctctccttctctatatatattttctgactctgcaaaaccttaattcatccatctctcaaacaccatttttggaaacaccatttcatattccttaaacttttccattttagtatcatttcatattcattgat

SEQ ID NO: 9191 - DNA, 3000 bp, Unknown
  misc_feature (1)..( 3000): cDNA_ID_2038493_gDNA_ID_1972020_Annot_ID_178041 3000 nt of promoter + ATG
acagaagaggccaacctcgccaatgcccatgaacgcccgcactacaagcaaaaaaggaagaccaagtctagcagcaataggtgtcataatagtggcaaaggaccaccagacaacaccaaaacctaaaacaaccttcccgccaaacttatctgcccatatacctcccagaatctatgtccaagagaagatgagctaaagttagaataaatataccctctctttcgagttctataaaagatcagattctacagagagtgatagtattagacctgacctgagtaagtaaatagccccagaagaaagaggactgaattaagccaacagttgcactactccagttatattcttgtgacatgggaagaattgcaatgctcatgttcacctgccacaagcatctctcattaagtaatatatatcttacttcttcagataagtagagaaaataagcaagatatacaacttacacggtccatattgcaaagaagaaaagacgaaaagcataacaagacgatcacccagcgtctaggaaactgctgccaccatggagatgcgttctgtagatttccttcaactaaaatagcttcagctgagccatcagccgatggcacaactccttccgtgatatctgactcctctgatttgtagtaagcacgagatctgttgatcttgatactgttcctaaacctaattacactgtccattcttggttgaaggaaacatccaaaacttcttctcatgtgtcccgattcatgatgtaaactagcttgcagaggttgatgattacggcacaacaatgctacaaagattaagaaaatgcttaagcacaaattgcataatatagctaggtagagaggtataaaagataccgatatataccatttggaaaaagcttggaaacctctgcaccactttttccaagtctctgacaaccattgcctacaaagtaaagcaatcttagcaaatttggaagcaatgcacacattagtgatatcgttcgctacacagaagcaagctacgctcaagcctaatcactaacataatccgataaacaactaaaaagccctaacagattcaaaaagaggagggggatagatatacctgagccgatgaaggaaccgaagttccgatttgaaatcaagccaccgagggccatgttgcttctcagaacaaaaatgtcaagggaagaaggagaagaagaagagagaaggattcaagcttcttccatagaagcggagtaaacgaaggaacctttggataaagccgagagagagactgagagacgctgaagcgggaaaatccctctctattggggaaggaaggaagaggaaaggggggtcgatatagtgacacgtggcacatcatcttctactcgttggaacctccgttctgttctcatttcatgaatctacccccacgttgcaaagaggaaacatgggtactattggttaatggcaggggtattattggaagttattgtggaaaatatctgagccgttaccgccgaagatgacgtcacctttagagaaatagagagagctgacaaaagaaaaaggtaggttggttaatatattgggcttacaatctcatttgtatttttgatgggcttaaaaataaaattgtcttctacatttttttgtttccatttgttcaaagttccaactgctgaaaagtgaaaacaaagagacatttattgctaaagtgcagcccataaaataactaaaatactaaaattaagcactaaaattgtacaacaatgtcattagtttttactaaaatcttgaggatttgtcattttgaacacttaaaactgtatgtatatataaaatgtttttgcaaaatatgtactttaaaccaaatactaaattttaaaaacaaatctaaccgactatatccacgtattaactggtatctattattaactaaaaatggcaaattcacaaactatatggaaaattgcaaaatcaacaaatgtcactttcaaaagtggctttctcataattgattctttttataaaaaaaaaaaatgagacatatattaatatatataacaactttggtgactataagctcttagagtaaaacaaagtcactatattaaattttgagaagaaaaataatcctggaaaccttaatgttttatgatacaattttacacatagatatataattacatactttgaccagacacatattttttaaaaaaaaatctccagtcagtggctatttgataaagccactaaaaattcttgaccaattttgtggccactatattgcttatagtataaatcattcacaatttggatcataggttttattcatcaattttgtccaaaaaaaaacttaaaattttgtcaaaaaactatagtataaaataggttttgtcaaaaaaacttaaaattatgctatttgtgaaaatttctcttttatctatttttaaattactttgttaattaatagtgctatattcttaattcttgtataaaaatgtgttattcttgcaaatcaccctctaatttttctgatatattttccaaaataaaataactcttcatcttcctcactcactctctctctactccactcttcatcaagcgttgagtcatcgccgtgttgttccttttccttccctctctagcgtaagctccagatttcttctattctctgttttcacagtgaaatctctcgtttaatgaattttttcgattcccctatgcatttcgtgatttaacgcctttactcacttgttacttaaaaatatatttttgatttcgctaggttccttatcatgcatgcgtcactctcttagctcaattttgtaaatgctgtatcactttcgtctcttttgctttatccagtgtcaattttgttttgtttgttaagttgttgcctagggtttctcttgctcgtgggattgcctagaaattgagtctcttttgggccttattttgttcttcttctctgtttttgtaacattctttttctccaggtaaagcaggtacg

SEQ ID NO: 9192 - DNA, 3000 bp, Unknown
  misc_feature (1)..( 3000): cDNA_ID_3609923_gDNA_ID_1972020_Annot_ID_178048 3000 nt of promoter + ATG
gtgtgggtttaaaataaaaaatggcctataattaatctagtgtctgactttgttctatgtataactttttttacattcatagacccttgtttctattcttaaaaaactttatatgataaaacatgcaatgatcatatcatacgtcttatccaaccagaatacaagagtcttgacatcattctcaatggtttttctaagcgaacctgaagtacacacatcaatacacgcctcatatcacaaaaaaggatgttattttgacaattatatcgtaacacatgttaccatctatgcatgccttcaaacatcaaagtcaattgaaggaaacacacctctcagttgtcggtgacttcccggatcatgtaaagatgactttttgaaaaccaagaacatcattgcccactccaaagctgttacctctcattccaaactcgatcgtaatcgccatattcaagaaatacgtacttggagatcatgcacaaggctttttaaaaatagaccgaactttactagttactatctaccaatcaggttatgaaagtaggcaaaaggggaagggtcaaggcccatgagacatattttccaaatagacactaaaaatgagccagatttttcaacaacacatttggtttaagggctcaaaaaatatttgtcaacacccagttttaaaacaaaagaaaatagtaaattacaggcccaaatgtttttgttgccctatagatattagtatttcttaaccagtcgctgataattattgatgaatagttgagagacgataaagattgagctgtcaggaatacaaatcaaacatgatattgttcgtttacattattactcaacgaacattcacgtttccaaattctgatatcttttctaatatttctccacatgtagcatatcattagttactgtttaaaaatgagtaccaaaaacgtgaaattattacaataacgtataaatgttaaatatttcgagcaatcaatacttgtcaagactcattgttagtaatgcatcactataattcattctttttttgtcttggtcaaacatgtatgaagcgagcagagtctatgaatgtcatattatagacatacgtatgcggctttggtcgggaccggcccaataaaacaatacacatgttcaacgggttcttccacgtgtcaaacttatgttggctggacggtatgtgactgtgcattgtggttacgtttccaaaatgaatacgtaagaacttttcctaaattatgtcttttgcacaatactgtaagtctgtaactatggtactaaacattataatatcgaattggaaacatttacatttgagaattttagtgtttgttggcaacgaagcatgtgagatcacagagaagcaatactcatctctgagctgttcaaacagttttacatgtcagcacccaaatatagtcactatattcaaaaacaaaattatttacttgcattcaatgctagccttttttattcggtccacaacaaattataaatatttgtatataagaaaaatcagagacctgattttgtaatgcgtggcttgtcaatttcaagcaacacagaaaaaagctaactaagcaaaaaacaaaaaaaaataacaagtggctggttgatagaatgtatctttcatcagtacataacactgtttttttgtcaacgtaaaacagatttttataacttttgtttgccctcaacttttttcattacattttctggaatatcgcatggttgaataattaaaagttaaaaatgatttttatgaagcacggcattatactatatagtcagtcccaacgaaaatgactttacataaagctgtcaattttttctccaacggtcagataattgtttcgttgaatagtcagttttttttttactattttactattgggctttattgggctcttacaattttatcgatttttgtttaccgtccagaaagtggaccctgtgggaagaggaaaagaaaaaaaaagggtcaggttttttgtctttatacgagagcacatcggtacgttccagaacaaccctctctagtctcctccatcattatctttatttaatagtaaccctagtacaaattaccaaactattcaacattaacataattattcaacattcaccatcatgaataataactagttgagaaaaacgtaactagactagtttgatctgtcaacataaaaagagaaaaaagaatttcgtgactagtaaagtttaagaccattcacaaatgatcattgaaattattagttctaaactcttagtttggttatctatttggttttgattcgtatctatttggttattcggttttttggttttaaagtttagtattcattcgactattttgaaattttggttcgtttttttttttttttttgaaatttaatatccattcgattattttgcttttaatatttttaaatatttcaattattttttgatattttttgaatattgttactatttaatatatatttttaaatatttttaattactaagtatagaaataactaatatttttgaaaataaaattatattttggatattttagatcatctaaaatattttagttaggtactaattcatttttggttattttgattataaaatttaatatctattcaacaatttttaaattgttgattcaattcggttctgtttttttttttcatttaggtttagtacatttggttcagtttatttgactctcagtttatttgcctaagccttgaaattaggtgttaactattggttattctagttgaaatttgaaataaagaaaaaactatacgttatactattttattttcttagcaataactaaaaataaatgtttggaaacgttaggcaattttattatattctatcgttgttctctataaatgaagtctcgaccacacacttggtagctacacacgagaaagaaaaagctcacaactttaacctttctggagagagaagaacaaaagagggagagggagagaaatg

SEQ ID NO: 9193 - DNA, 3000 bp, Unknown
  misc_feature (1)..( 3000): cDNA_ID_3045000_gDNA_ID_1972020_Annot_ID_178051 3000 nt of promoter + ATG
tacttgtctcctctaaacagcccaggaagaagatgggaaaagagctcaactgctcacaagaagtctgcttcagcggatttcataaatcttgtgaacatcaagaaagaaactcatgcgagccaaccagaggaaaatactgatattcaggtctgcaatctaagcaaagaacctgatgattctatccaaccaatcgcaagtgaacctaatgagaaaagtgttgacattgaggatgaaactgctaacgaagataacatgttttctgcaggtaataatatttctgtctcatagtaaggctctctgttttgagtaacaataatttattttataacctttcttccaggttctgcagatgatgtgatgattcccaatgagctagatgaagttccagaggaagcaagctctacattgattggtgacttatcaaaagttgaagctcaggatgaacagagagatagtataaactcgaaacaggcaagtcattttgattgacccctagaacattaccttttttgtatggactttaaaatgaggaaatggtggaagacttaaattggttttgctgcttctttttttctacagacctctcttgaagagagccaaccaccactgtcttcctctgtggcctcaccatcccactgtttagctcaaactgaggagtgcaaatcagctattactgattttccggagtggtcaagcccaatatcagttcttgagccactcttcgtcgaagatgatataagcccagcaaaaatgcgatctcagtctggtatgtagaaaaagatcccaacatctactactagacttggattctagtacttagttcttcaatattgactcatttttacaactcaggtgaagcagaggtgcaaccgtggtgtatccacttcgatgaaaaagatcctgcacctacataccgagaaaattctgtgacaagtgacaaagaattggtgtttaagtatgtaaaagctgtcttggacgcagtagactcagacatcgaagagctctatctaaaggcgcaattctctgaccagcttcttgaaccagcacttatcagcaatataccattctgtccaaaccagctttgtcctgaccatgagctcctctttgactgcatcaatgaagctctcatggagttatgctgttgcccaccttgggcttcgtttgttacaccaagaaccagagtcttctctaccgtcaaaagcatcatccatgaggttcaagaagcggtttactggcatctcttgccattgccactccctcacgccttggatcagatagttagaaaagatatggctagagctggaaactggttagacatcagatgtgacattgactgcattggcttcgaaactagtgaactgattctcaacgagttactcgaagagctcatcctcaacaatactgagcactctctggtttcacctgagttgaagacggatgggagcatccttattctagaaaggtcttgaaagctgaaaactcttttcttaaagacaaagccattgttgatacactctgaacatagtctcactgtcaccattgctaattttttttagcacagaaccatgtagatagtttgtattactcagtcagacaaaaacctcacggagctcctgtctgatcagaaactactgagagggagaaggaggaaatcagatcctttcaaagaccagaccagaaactgttagtggtggggtcatcagagaatcactttcaaagacagtcttcttcctataggctattatatagtatatgatttattattttattttagagtgtttgtgtgaagatggagggatgtgatagtgtttgtttgaaatcggtttgtgtaacattttcagagtttgacataacaatgtattatggattaggagtatgacaaattcaaagtttttgttgttcatgaaaacaaaaagatataaattgggtatgttgattactagacatgaaactagaaagttttgttaataaaacctaggaagagtgttgtaaattgtagtctaacaatggtgggttgataacaggacaggataaatatcaatggagttttttttaagtaataggaaagaagcagtcataacacaaatctgtagagatttttactcaatggagaaatgaattttatggatcatgatatatgtatataaagttttggataatgtttttgtagttgttgcactttatgccctacttagtgaataacattttctttgatgggatatggttatgtggacacaatggacagtacacctgataaagatggattttaagaaattaacaaaactgaatgaattatatacaaactgataaataataaagggtttattctttttaatataaatatatttattttaatagttagtaaaattatttcattttgtttttgtaaaaattatgtataacacttatatataaaagatgtataatgcaaacaatcaacatgtcacttatatgttcttgttttagtattgatcctttggttacattattatgtgatatacaagcttattctatatgccattataaatgcttcttggggggatgcttgtaccatttagtgagtcaatctccgatctaatataacgaactgaacgataaaaataattattatcctttaaattatagtcgttgctatttaatatttcttaccttcattttcttattatctcacgttctttgatttgaataataaaaagcgaatgaaagtaatagataatattaaataataacggtaatttaaatacaaaaccaattttttattttatttttattttaacatgattctaaatactgatgaaaaaaacatgaatctaaaatactttcaactataaaatcaagagaatcaactctctctcaagtgctcacaagatcaacacaattaccaacctgcaaacaacacaaacacagtagcattctcaagctctggaacattaggcaaaggtctctctgctacacgagggtgtcgaccgaccctttagcaaaagagataagggctttgaa

SEQ ID NO: 9194 - DNA, 3000 bp, Unknown
  misc_feature (1)..( 3000): cDNA_ID_2038467_gDNA_ID_1972020_Annot_ID_178050 3000 nt of promoter + ATG
ggaccttgtgctcaaatttttgttttcagaaaatttaaagtgttagttacaaacttttaaaattttggacccttattgcaaaaatatcaaaaaatttagatcttaaaaccttgttaaaattagaaaaaaatggtggatccagtgctttagcactgcctctaagccgagcctgcttatacatatatgcagagaattttgcactatttgaaacgcaccgcattgtacagttcggtcaccattaaattgtaaatgatataaattgtgataataatacggtttagatgcttagaaactccacgttaagggaaaaattgcttacagtgtcactaacttcgtcagtggtttgtacccaaaaaaaaaaacaattcctcagtgggagagagtttatgtcgtcaatatctatttgtcggtcgataagtgccaacctcaaaaaacaatgacacgtttgtatcaatttctgaatcttaatttatactataaaatagtgtatacgtttgtacgcgtgctattgatagataagtggtaactatgtgtgttttgtgtatgtaaatgtataactatggtcccgtccctgactgaattaagttgcttaaagaaaactcaactcaagtaactgagcatggtcaagatctattcgattaaattttgatatatataccaaatggtttcgacttttgctaattgctatgccacatgaatcagacaatgctagctaattatttctgttgtaccataaagtgcttggctttatcagtaaaccccacataacaacattttgcttaacggaaactttaagtacgagttctaacattcaattatgctctgtttgattagattcaaacaaataaatagtttcttgatattgtaaagttctatttgtgtatttaatatcatatataagttttttttgcgattcaaactcgagttaagatagagacgattgacgtgacgttacaatatatgcacacgagtcacaacaaaatattatatctataatcgacggttgaaacaagaactctagctaatgttttggttacactcggttttcggacatggtttagaaaagcacaactcttccttaagagaatgacaaaacgtcgtcgttaactttagattaatgacttggtcaatgaaaacaatcgcatttggtgtaataatctcaaatactacgtgttctccatattccataaccagccaagcaaaagcaccaatgaccaattacgtctctcctctttggccgcgcccactcaattcttataatttatctatttgcaccctctttctctaaaaagttacaatttgacccctatagtttcactttcacttattcttataatttatctatttgcacctttttcctctaaacgttacaatttgacccctatattttcacttttattcatacaagcccattttgtttttctctctgctttcatgctcgcagacaacaatcctcgtcactgccatgtctcaaattcagagctttgagagatcaattatttaccggtgaggctaatgatgaaggctgttgaaaaaatctctgcaaaatacttttcttccatgtaaagcttctaactttttctctctctctctctctctctcctctgttgtttctgtagagaggaatagaagatgatgggcccattttccaactgtgattgttctctttatatttctttctcctgtggaggctagcaaaggccacgacgttgtggttgtcaaattggcataaagttttccacttttttactctgattttttctcccatttctctctcactttttctttgcctttgcccaattcagagaactaatggctttgtcggtcatcgatagataaacaaaatttaatctttatctctctctttctcttgtttgtcaaaagatgcccaccaacacagaaatgaggaaaaaaagatctcttttttatttgaatgttgaacagtaagaagaaggtttattctattctattgggttgggttgttcatcaactttggaaatttaaagatgcattttttatgatccttttttctccgcctttgttgttgatttgatcgtgtatgattacggaagcttgggggggtttttatcagacagaacctggaaaagttgtcagatgaaacaatgtggcttggagattggatcatcaacttttcctctgttttcaactttataagctatcattttgcttaatcttcttcattctcttctctcggccttggctttgaagaaatctcaattttcttcttcttcttcttctaccgttttgtccggcgatcagagctggttcaggagaaaccttaagtcttggtatcaaaagaaagaaagttttggaatttacctctgctgctgcaacttgcaacactttttttatatatattggatttttctatggctttgctcaaacgtaagcaaagcagatgaaatctagctacaatcgctgttgcccttgtatgaagtttggaatttaaggaattcaggagaatctaagaggtactttcttgtactttcctcttctgtctttttccaatagggaaaggtatcttatttgctccattagtctgtatctctcaggctttgtgttctcttagttctccttaatctttgccttattagttgaacaagtaagcaaattataaaaggagtttgctttagggaactggtagaggatcctttacttcttacttgttatcttaatttatttctcaagaattccattgcagtgtttaggaaggctaattctttcttctctttttaagtactcctaagcgtggaaattttttggtcttgttctcttgttgtttgttactcaaggatctgagattgttgtccataagtagaatttaccggagttgtaatttctatatctgaaactcattattgtaccgttgtgtgtggtgtgtcttatagtttgctgcttaatagttttcttgttcttcttcagcatttctaaaggggcaacgttatagaaggttaggaaggagcatttgtatagaaagtc

SEQ ID NO: 9195 - DNA, 3000 bp, Unknown
  misc_feature (1)..( 3000): cDNA_ID_2038484_gDNA_ID_1972020_Annot_ID_178045 3000 nt of promoter + ATG
aaatcaaaaatttcattatttttataagattcacgcgtagacataatgacactaaaccagtcaacaagttaaattagattatctagcttaatcaacaagcaaatcaaacgtttgcttagattctcaagttacctccaaaacacatcttacactaaaccaatcaacactcaataattcaacttaactttaccctataatcgaccaagattggataaaaagattggaacagtaccttgcagagagacatgaaatcatgatcagaggttcgatcaccgaggccgagatcaggtgattcgttaccaaactcttttaaaatggctaacctcttaagatcaccaacaagaacaccaggcttcttcacaaatccagtggctctattggttttagggttaacttcaatctctgttcccaaaactttatcacctccaagataatccttcacaaacgcctccaccatcacaatcggattcgccgtcactaccacttttctcttacacttatcaaacacctcaaaactgtctttcctcacatccgccgcgtaaaacctaaacaaagttcatcagaaaaaaactaaagtgatctactaacaagaaaacactctatgttagatctcgtaccgtggaagaactgcgcgagagacaagttcgatatcgcggattttgagaccagcgaatgagatgaagatgaggatctggataccaagagattcggatacgaataggtaagagataatgacgaatggtaacgagagaaggaggattagtccacgtaaaaggcttccagcttcaacagcgacgagcatgaagtaagggaaggagcttcttgagagaagcagagtcccgtcaagatcggcggctatcgaatcgtactctccgtctctgcattccgttattggagggaagttttgactcttcttctccggagacattttcactcgctgtgtgtgtgtctctctctctcactctcgttaatggcagttctaaagaacagagagcaaaaataagaagacaagagagggaacgttatgttttaaatgcacctatattgaagaccgtaatattaattcagtgggttatatctataatctatatctatgtgaatgaatatgatatatatatatatatatgtatatgtcattaactatgaaatatccactaagagcgtaaagtgtagggccacatgtcgaattcattatatgaaaatgattatatgcatctatacatgtggtgatattgttgacacagtcgaattgtctataatctttttagagactttgtcttagatttgggtttaattatttagttgaagtgaagttgttagaaaagttttagatttaatgtagcttagatatcaactatatattggtttagttactaaaccaatatatagttgatattagattttaattgcattactgttgggaataatttaaatcttggagatgatattgaataaactctgttaaatttcttaacccatcaaaatagggaaaataataaaggatattctagaaagctttatgaaagatcagtgttagccaaaaccgacaagaaccggaccaatacgggccgtaacctcattctagaaacgatcttatcatttcaatagaggcggtggctcgagtcaaaatcccacgtggattagggtcaagaagacctctctataaaatgtaggactaattcgacacaaaggaaggaacaaaatcgaggacaaaaccgcaaaacacacgacttaattttaaaacacgactataatttatagattaacttgttatgccttgatttttgtattttgcaatcgatattttgaccaataaaaaaattatattcgattatttttatatttttttttgtagaatgtcacaaattgattacttttgtcaaaataattagttagtgtaaaaatatatatgaccacaacaacaacaaaaattcttcgttgtgcaagttaggttgatcttgttctcactacttgagcagttgagcttaatttgtttatttgaccgttgggagttgcaccgctttgagccgcacatttatgctcattaaacatatttataaaaaaaacgcatgaaagtgtttgaccagagacaaagtgtattagaaattcactaggcttacacaaaaaggcatgttgagctgtattagaagacccttaacaggcctccatactagtcttgaagatgggccgaaattcactaggcttaaagatgcgccgatattcactagtcttaaagatggcaccacagatggctccgagacattgcataatcatgtagaacactgctctggtcagagacaatttccgagccaagaacagaccaaatgttacgaagaatggattatataatacagtacagtatatggttttgccttcttatatatgtccacatcatttaaaatcttaaaccaaaattgaataatttaaataactcataaaacttttatatgtatgcttgtcttacattcaaaatgcgcattatcactagtttaatatttctataactgatcagtttttaattggttgacaccaaatgaagtggtcactgacgctataggattctattgggctgcatattaaagtttttttaagaattggaacttttaatattatctagggttgaaggaactaaaacgcctgtcctactgatgtaaggctagccctaacctacatgtatctcaagcgtccaaatttacgttaatacaattttcaaagcattgtttttcctctccttggagaaagtacatgcaaaatcaaaattaatggctccgacttttcgaatcaccgcaagctactatctcttcgagttctggttataatagtacttgattagatacttcttataaggcttaaaagccaacttaaatgctattgcagtaaagatttcattccttcttcacttcactttacgaatctaaaggatatatttagttcttcttcacttcaactaaaaggctaaactcccaaaaaaatatttttatctctctcaaaacttgaaat

SEQ ID NO: 9196 - DNA, 3000 bp, Unknown
  misc_feature (1)..( 3000): cDNA_ID_3045007_gDNA_ID_1972020_Annot_ID_178040 3000 nt of promoter + ATG
agcttttgcctctccagttcagttagtgcttcatgtttttccaattgtttggcccgagactccaagtcccgcatcttacgatccagttcatttcttagcttctctttatcatataggattctctggatatggcgaagtgacatctgctgcatcttctttgtttctgagaggagataaagtacaaaaaatagtcagataccctaaatgctatatgagtcggaaacatatcagtgtgtgagtaaataccttcagcaaaagcttggtgcaagttttttttctcatctaggaccctttgcagtgacattgccgtcctgttgtaactgtgttgggccttgttcagatcttcgtttgtcatatcaatcatatttgaaagtacgtccagaagagtgtttctatcctgcacattgttttgcaaaatatctgaaactgttcttagcgttccctccttggagaggtactcacctattggaccttgagattgaaagtcgtctgcacgtgcacaccaaccataagcctttgactctgaatctccactcctctcagtccactcttttttgcaggacccttgggtctcaaattccttttcaagctctgtggcagcagcaaacccactccagtcactgtcaaacttagcaataaccccaacaatcgaatcttgttcgacccaaaaggcattcacttcaacaggcttgaatttggaaagggtctgcagccaatatactgaatcaagtagaagctccttgtcatccgtttctttcaaagggttaacaacaatccccatccatggccagacatagacgttatgaggatttggttcagtctcgtctaacagaggaggaacaaccggagggcgtggaagaggttctgcataaccagcaagatcattctctaaaaacttagctaaagcaagatgattagacttctgtaaagcacttctggtggcagaacctttggaaacaccagtagcatgtgcatgcaactccttgtacttgtaatcttgcttcttcttgcctacacaaaaggggcatctgagccgtccattcaccttcaccttgtagtaagtctcactgcgtaaaaggtggtagggtgttttagaatactcctcaatctctgactcgctgatctcagactcttcatcagaaatgtccatcgtacctgctttacctggagaaaaagaatgttacaaaaacagagaagaagaacaaaataaggcccaaaagagactcaatttctaggcaatcccacgagcaagagaaaccctaggcaacaacttaacaaacaaaacaaaattgacactggataaagcaaaagagacgaaagtgatacagcatttacaaaattgagctaagagagtgacgcatgcatgataaggaacctagcgaaatcaaaaatatatttttaagtaacaagtgagtaaaggcgttaaatcacgaaatgcataggggaatcgaaaaaattcattaaacgagagatttcactgtgaaaacagagaatagaagaaatctggagcttacgctagagagggaaggaaaaggaacaacacggcgatgactcaacgcttgatgaagagtggagtagagagagagtgagtgaggaagatgaagagttattttattttggaaaatatatcagaaaaattagagggtgatttgcaagaataacacatttttatacaagaattaagaatatagcactattaattaacaaagtaatttaaaaatagataaaagagaaattttcacaaatagcataattttaagtttttttgacaaaacctattttatactatagttttttgacaaaattttaagtttttttttggacaaaattgatgaataaaacctatgatccaaattgtgaatgatttatactataagcaatatagtggccacaaaattggtcaagaatttttagtggctttatcaaatagccactgactggagatttttttttaaaaaatatgtgtctggtcaaagtatgtaattatatatctatgtgtaaaattgtatcataaaacattaaggtttccaggattatttttcttctcaaaatttaatatagtgactttgttttactctaagagcttatagtcaccaaagttgttatatatattaatatatgtctcattttttttttttataaaaagaatcaattatgagaaagccacttttgaaagtgacatttgttgattttgcaattttccatatagtttgtgaatttgccatttttagttaataatagataccagttaatacgtggatatagtcggttagatttgtttttaaaatttagtatttggtttaaagtacatattttgcaaaaacattttatatatacatacagttttaagtgttcaaaatgacaaatcctcaagattttagtaaaaactaatgacattgttgtacaattttagtgcttaattttagtattttagttattttatgggctgcactttagcaataaatgtctctttgttttcacttttcagcagttggaactttgaacaaatggaaacaaaaaaatgtagaagacaattttatttttaagcccatcaaaaatacaaatgagattgtaagcccaatatattaaccaacctacctttttcttttgtcagctctctctatttctctaaaggtgacgtcatcttcggcggtaacggctcagatattttccacaataacttccaataatacccctgccattaaccaatagtacccatgtttcctctttgcaacgtgggggtagattcatgaaatgagaacagaacggaggttccaacgagtagaagatgatgtgccacgtgtcactatatcgacccccctttcctcttccttccttccccaatagagagggattttcccgcttcagcgtctctcagtctctctctcggctttatccaaaggttccttcgtttactccgcttctatggaagaagcttgaatccttctctcttcttcttctccttcttcccttgacatttttgttctgagaagcaacatg

SEQ ID NO: 9197 - DNA, 3000 bp, Unknown
  misc_feature (1)..( 3000): cDNA_ID_3087810_gDNA_ID_1972020_Annot_ID_178036 3000 nt of promoter + ATG
tcctcttcttcttctcctcttccttcttccaccaccatctgtacaaagcaaagttatcatcaaaggaaaccaaaccattctgagtttcaaagctattttccggcttggtttcttcagcaccaccaatggttcctccaattggtacttgggtatctcttacgcttctatgccaactcccacccacgtttgggtcgccaatcgaatccgacccgtttcggatcctgactcttccactctcgagctcacctccaccggatacctaatcgtcagtaacctccgtgacggcgtcgtttggcagacggataacaaacaacccggaaccgatttccggttctctgaaaccgggaatctgattttgatcaacgacgacggttctccggtttggcagagctttgacaatccgactgacacgtggcttccggggatgaatgtcaccggtctaacagctatgacttcgtggcggagtctcttcgatccttcgccggggttttactctctgagactgagtccaagcttcaacgagttccagcttgtttacaaaggaaccacaccgtattggtccaccggaaattggaccggagaagccttcgtcggcgttccggaaatgaccattccttacatctacaggttccatttcgttaacccttacactcccacggcgtcgttttggtacatcgtcccaccgttggactccgtttccgagccacggctgacgcggttcatggtcggcgccaacggccagctgaagcagtacacttgggatccacagacgcagagctggaacatgttctggttgcagccggaggatccttgccgcgtttacaatctctgtggtcaattagggttttgtagcagcgaattgctcaagccctgtgcttgcatccgcggtttccggcctaggaacgacgccgcgtggagatctgatgattacagcgacggatgccgccgtgaaaacggtgattccggcgaaaagagtgatacttttgaagccgttggtgatctacgctacgatggtgatgtgaagatgtcacggttgcaggtaagcaagagctcttgcgccaaaacttgcttaggaaactcttcttgtgttggtttttatcataaggagaagtctaatctctgcaaaattttactcgagtcgccgaataatctgaagaattcgagctcgtggactggagttagtgaagatgtattgtatatcagagaaccaaagaaagggaattcaaagggaaacatctctaagtctataattatattgtgcagcgttgttgggtcaatctcagttcttgggtttacattgttagtgccattgattctgttgaagaggagtcgaaagaggaagaagactaggaaacaagacgaagatgggtttgctgtgttgaatcttaaggtattttctttcaaggagcttcaatcagctaccaatgggttctcggataaggtcggacacggcggttttggggcggtgtttaagggaacattaccgggttcttctacattcgtggctgtgaaacgcttagaaagacctggaagcggggagagtgagttccgggcagaggtatgcaccattgggaacattcaacatgtcaatctcgttaggcttagaggtttctgttcagagaatcttcataggcttcttgtctatgattacatgccacaaggatccttgagttcctatctgtctagaacaagccccaaattgctaagctgggagacccgtttcaggatcgcgttaggtactgccaaagggatcgcgtacttgcatgaaggatgcagggactgtattatacactgtgatatcaaaccggagaacattcttttggacagtgattacaacgccaaagtgtctgattttggcttggctaagctccttggacgtgacttcagcagagttctagccacgatgagagggacatggggctacgtggctcccgaatggatatctggtttgcccatcacgacaaaagctgatgtgtatagctttggaatgacattgctcgagctgatcggtggtagaagaaatgtcattgttaatagcgatacactgggagagaaagagacagaaccagagaaatggtatttagagaatgtcttttacttggaatcaattgtaagagagaaaaaaacatatacattgaatcaatgaatcccttttcaggttctttccgccatgggcagcgcgtgagatcatacaaggcaatgtggactctgtggttgactctagactcaacggagaatataacactgaagaggtgacgaggatggcaacggtggcgatatggtgcatacaagacaatgaagagataaggccagcaatgggaacggtagtgaagatgcttgaaggagttgtggaggtgacggttcctccaccgcctaaattaatacaagctcttgtctccggcgattcataccgaggagtgagcggcacaagctgtagtgaaggccatggctgttcggatctcaatacaggtttgtctagccctggctcacggtcgtcttttggtagaccttctccttgatcaattttgtaaggtgatttggtcaaaaccagccttaaatgttttaagtgttgctctctaagagggtttaattagtttaaactgtatttgttggttgtatgatatttgacttaatcgacattaacagttaaaaccatggattatgtctttcttcttagtttgaaagttcttgtcactttgataatcttctaatggcatatatgtaaattcttacagaatgtattgtatgagaatcattacgtgattgaatcaataaacccatgtcgatactttaaactatatgaacggtcacaataaacccatgttctctcttcttctactccacggctaaccttaatcttaggcaaaccagaaacacaaattacaagaacaaacataaaaaagaatctcttgtcttgtctgctttcaatcctcatgtctctaatcctccccaagtagagaaatataaaaacttagacaaatattgccacaaccggtgaaa

SEQ ID NO: 9198 - DNA, 3000 bp, Unknown
  misc_feature (1)..( 3000): cDNA_ID_3051180_gDNA_ID_1972020_Annot_ID_178030 3000 nt of promoter + ATG
tcattcattaactcgctcttggttgcttattcaagatttatttgaatggatggtacgaatgtaacatgtgcagtaaatattagatttaatgtcttagtgagcattttgcaataaaaatctgtggatttcatgtttattacaaacagtttcttataaaacatttccttcattattcattaagaaaattaattaagagcacaaacatttccttgttcgtttgccctagacaaggcaataaatcatatcctagagaagcgtaatcgatcattcgattttctttacctaagcgtacaattgaatgttttcttatattatttcttccgttcctttgtcttattattccttaagtctatgttcttacttacgttcactctttttttcttggttactcggacagattccaagtttcttattctacaagataaatgaatcttggttaaaatcaaacgtggaggttgtgaagaaatggacaagacaagtcagttgcctgatgaattgctggtgaaggtattatcatttcttccaacaaaagatgctgtaagaacgagtcttttatcgatgcgatggaagtctctttggatgtggctgccgaaactggagtacgattttaggcattattcagtttcggaaggccaagggttagctagatttattactttgagtctactaggacataaagctccggccattgaaagcttgagtctcaagcttaggtatggagcaattggatcaattaaacctgaagatatctatctctgggtttcacttgcagttcatgatagcaacgtccgtgagttaagtctcaagctttgtacttttgcggagcgtccaactaaattgcccaaaagcttatataaatgcaaatcgattgtgatcttgaaactgaaagacgagattctcgttgatgttcctcgtaaggtatgtctcccctccttgaaaacattgttccttggacgtgtgacttactcggatgaagattctcttcaccgacttctctccaactgccctgttcttgaggatctagttgtggaacgagatagaattgacaatttggggaaattgagtgtggttgtcaagtccttgcagagactaaccctaaagatgtcttgtccttgtcatcttgatgggattatgatgaatactccttctttgaagtatttgaaagtcactgatgaaaggcaagagagtgatagtgataatgagagtgatagtgatagtcctcgatacttctacgattttgaagatatgcctaagttggaggaggcagattttgtattgacattccaaaatatcaaaaagttctttaaatttgtcacatctattaagcgtctttcgttatgcttgggagtctacaccgaagaggtaatctgtttccatcaatctatcaaacttatttttgaacaatattcttgaagttgaatcttttgtcatcttatgcagtctttatatcatgagggtcttgtcttcaaccagcttgaacaattgaagatatgttcatgtgattcagattggtcaattttactttctcggttactcgaaagttctcccaatttacgagagctcgaggcttacgtgatagaagtaagtttcttcgttagagacatattccattggttcaatttactatattgtttaagccaaacttctcatgtttgatcacaggatcatccagataggcgtgtggatctaccaaatcagtggggcaatcagctgaattgtgttcctaaatgtttgttgtcgagtctcgaaacgttcaagtggagtgagatgtatggattgctgcagaaccagatggatgtggctaaatatatcttgagaaatgctcgatgcttaaagtctgcgacaatcttttttccgacaacctatgctaaagaaacaagagatgagatgatcgaggagttgtcactttcttttcaaggtccagagacatgccaagtcttcttccattgaggatgtgaatcataaggattcaaacttgcatttccatagacactaccctccatattacaatggttttttatttgcagcaacttgatctaaacttaaggtgttttttttgtctttgttttttttgtatactttatctttgagcatactatttttcttgagacattggctttatctttttctgagatcttaacaaataaccgaactttgaagagacaagacatgacatgaacttttatttgcagcaacttgatcataacacaagactcaaacacaagactcaaacacaagactcttcagcttatagatcataaagtagatcaatagcacaaaaagatatcaattagaagatcagtcaacaatatagatgttgtagaaatttgcatcctaataaagttcattacaaagaaatgacccaagtttcccacacatatccgcatcaaaaaaacaagtgccataacattgcattaagattcatattcatattaccaaacagagcacttgcacacatacatcaacacaaaaccggcaagaacatcataggaacactcatttgaaaaaacccaaggaatagattcgactatgtaaacacaaacaagtatctaggaaaatcaaaaacataagtaatagaagaatatgttaccttcaaagaagaacgagattttctcagcgctctcaaacccgggttctcaaacccgaaccggaccggaaccggaccattacccatttaacccgacggtttacccataagccgagccctaattttttcaaagaaaagggccctaaacttttcgtcttctcgcttcccttcctctatctcgtcttctcgcttcccttactctatcccatagaaaaaccctgaatttggtttggccaatgatgtcaaaactcttcattgatacttaagaaagttttctccattgttcttcttatggtctcattcacatttggtaagtctcttcaacgattttggttttgtgagcacttacttcttcttacaagaattacatgtctttgttcaggttgtaactgttgatctgtttctgtcacaaa

SEQ ID NO: 9199 - DNA, 3000 bp, Unknown
  misc_feature (1)..( 3000): cDNA_ID_2038555_gDNA_ID_1972020_Annot_ID_178018 3000 nt of promoter + ATG
ggttatacataacaatattgatattaaccattcaacttcttctacgtgaggaagatatctgttgaaaatcacactttcactctcaaactacctcttccaacattcttttgaggtcagcactctcactctcttgtcactctgttttgcttttgttttctttagagagaaacaagaacacgtttaagagcatgatgtcttgataataaaacttgggtgattctcttacaagatacaaacacacatacttattatagttttacttgaaacacttacacacacaagcatgctcttaaacgcataattaactctgatttcttgcaagctactctactacatattgggactctaacaacaagcatgctcataaacacaatttatgtttctttttatttcctcacctactttgcagtttcaagatgcagaatctcttaatttttttattatagacataataacttctgtgaaagattgtaactaaatgtatatgttttattttggttgcatttggtacttgagaaagaggaactagtgtcaccagaataactcaaactgcacgtaattatcataaacaataaatatacaatttacaaacatcatttcagaatccattttgtttaatgaggttgaacctatcaccatataagctatttagaactcttgttgaatatgtttgtgaatccattctattgtgtgtttctttgttttgtaataactctggtcatgagttttgagtagagagacattaaaaaaagaagcacatttacaaaatcctaaaagttcattacaaccatcgaccaaaaggtttgttagacaacttatcttaatcttgttatagctaattctcacacgagaatccaaaagactaaaaatccataaacgtagatagaaagataaaccctaagatagataacaaaagagggcattacatccttagattaaccctatacaatccctaagatagcttcttcttcttcttcttcttagttggtttgagcaagcaccgaagtcacatccttcaaaacatccatctccgccaacaacaactcacatttcttagcgtccacaaccttcatcttctcttgaatcttcttcttagtctccagagacaccttgctccacttcttcttcacagaatactcatccaaaccgagattcgcgataaccggaacaagaaaagactcctcaaaccactccgaatctgctccaagaatcacttgctcatcttctataaccaaaggtttctccaccttcttctccttgctattagccttacccttaacaagaatagattcatctttcttcacaggagattcaacgttcataccatcagatccccaaatcaaaacagccaaacccaaacatttcttatcatgattcgattcaccacttttgttcttccggttaacaaaatacttattctttaatcttctaatcttgtcaaagaactggacatgactaacatcaaagcttatagatttcttggcgatatcaaaaaacgcattcttatgatcccaaggacttgtacctgtctcagctttgaaatcaatcactgcctgtagaagagagatctcatcttcttcactccatactctctgaggattcgcctttttgttatcgtcctctttcttaactcttttgacatgcatgtcccttgaggtgcttccttcaccagctcgcttcttccctgacttcaccgccggtgattcagcagcaccttctttcttcttccgcctggttaagacgaatgactgcttctctgagtcatcagaagaatctgtcttagaattcacagcggcggaaggagattttagggttttagaggaaggaactgtgacaggatctttgggtttgctttcttcagaagaagacttaaagatctcttcagaagaactctcaacttcgcttgaagaagcggttgctggactttccaaaggagccattggattttcttctttcagattctcgggtatgagtaccaagtgggaactgaagggacaattttagggtttgtgagttgcgagactttttatttttttacactgtaacatctcttatatttaagaaacaattaaagtaaataaagctcaacaacaaaaactaattaagcccaacaaaataaataaaccatcatccttatatgtaacactgtaacatgggaaaaaaaaacaattttttgcccaaatgtataagaaatttgtataacaaaattcatactagattttcttgttgtaattcttggtatacaaaatgaaaggtttctttgttgtaaaacaaaaatatatgtactaaaagtaattttacaaagtcgctttatatttttacatttagaaagatcatttgatcaagtgggaaacctttattgaaattaacaaagtggaaaagattgtaagtagtgaaatttagtgtcatctatagacaaaaaaaatgtaaattagaatttaggaatatgaattcggttaggattagtcgattaggtttattgagtaaactcaataaaaattactgtagtaatacttcagtactcggttcggtttatagttaccgaactgaaaccaaacgattattctaatttaattgaagttaccaatttttatcttaagtttaattaaaattattgaaaaatatgaactctctcttacagtaaaccgacctgaaattggtttttggttccaatttgacaccaatattttatcttgaaccaaatcgaaatttatgctattaaaattgaaccgagccgaactttactttcggtctacttcggttcaagaaatttcaatccaatacatatgaattctgaaagtcctgaaccgaaccagagtgtttaaccacaataaaagtctcttcaatggtctcttcttgagtatatcaatggtctctcatagtttcaacaacaccaataaactgtcatcttcaagttggagtttattacactcgttccttcaagaaactgtaccgtcgactttcagatttagccatttaggacttctcaagattttgaaa

SEQ ID NO: 9200 - DNA, 3000 bp, Unknown
  misc_feature (1)..( 3000): cDNA_ID_1818559_gDNA_ID_1972020_Annot_ID_178019 3000 nt of promoter + ATG
ctgattttaaataacaaaaatcttaaatataaatcttaaaacaaaaaaaaaatacaaaaatgatattttgataacatgagcattatatgcacatatatcaactgattttaaataaccaaaattttaaatatagatattaaataaaaaataaaaataaatgaatgatgttttggtaataggaggattacatgcatgagtcaactgttgtttaattaacataaatcttaactatagatattaaatgaaaaatgaaaatacataaatgatgttttggtaataggaggactacatgcacgagtcaactgttgtttaaataacataaatcttaaatatagatattaaatgaaaatacatgaatgttgttttggtaataagaggactacatgcacgagtcaactattgtttaaataacataaatcttaattataaatattaaaataaaaaataaatacatgaatggtgtcttggtatcaggagcactacataggcaagtcaactgattttaaataacaaaaattttaaatataaatcttaaaacaaaaaaatacaaaaatgatattttggtaaatggaccactatatgcacatatatcaactgattttaaataacaaaaattttaaatatagatattaaataaaaaataaaaatacatgaatgatgttttggtaataagaggactacatgcatgagtcaactattgtttaactaacataaatcttaattatatattaaatgaaaatacatgaatgttgttttggtaataagaggactacatgcacgagtcaactattgttttaaaaacataaatcttaattataaatattaaaataaaaaataaaatacatgaatggtgacttggtatcaagagcactacataggcaagtcaactgattttaaataacaaaaatctttaatctcttaaaacaaaaaaaaatacaaaaattatattttggtaacaggagcactatatgcacatatatcaactaattttaaaataacaaaatttttaaatatagatattaaataaaaaatgaaaatacatgaataatattttggtaataggagtacttcatgcacaagtcaactgttgtttaaataacataaatcttagttataaatattaaataaaaaataaaatacataaatggtgtcttggtaacaggaacactacataaacatgtcaactgattttaaataacaaaatcttaaaataaatattaaaataaaaatgataatacatgaatagtgtcttggtaataggaggaatacatagaaagatacactgattttaaataataaaatatgaaataaaaatacataaatgatgtattggtaacataagcactacatgcacatgtcaactgattttaaataacaaaaatgttatgttaaaacaaaaataaaaatacatgaatgatgtcttggtaagagaaggactgcatgcatagatcaactgtttttaaataacagaaatcttaactctaaatattaaaacaaaaaggaaaatacagaaataatgtcttgataataggagcactatatgcaaaggtaaacatgtattttttctgcttccctcccattcaaagccttaatcaatgaagttttggctaaaagaatgatctttgaccgatggagtattgtgtcgcttgatgtgatctttttacattagaattgtggtcatttgtctcagggaaaagaggagctatacaatataacaagaggtccttcttgaggtggtgaagatcataaagaagcacggttacgttccttttgtaatattccttggatctcgaaatcgagtacaagttcctatcatgctaatggcggagatggatgaaggcattttacattgtaatctgttcatttaatttggattgctttcattgtttcatttgtttgacatacatagacactaatagttgaggattatgtatttacaacaataaagtgttccactacacaaggtacaatcgatatatatatagtgttaactctcatttgtgtatatatgcatatcagtttgtaggtgttactatgatagtagtacatttattaatttataaaaatttatacgtaaaatacaatattaattttttaaaaagaaaaattttaatttagtttttctttatgttttattgtttgtatattctgttagatttttttttattactttttttattttttctctgtaagatattgtgcatgtatacgacgttaacgtgagacttaatccaattttttattacacaaatcttaacaatgatttttcatataaaaaaagttacaaaaccaaatatgacggatcaaatacgcaaagagttatgtgaatacaaaagagatcacaccaactatactctagaaagagttgcaattatgacttgaacaaaagtttcatataaaattagtctttgaatgtatgctaaagatttatgattattaattttatgatattactggtaccatatttttacatagggatttcaaaaaaaatattatcttattatcttatcgattttggttaatttttacattaccccgatttgagaccgacaaaatttattaatttatcgtgtaatatgttttgttcaaataccttttaatatctatttaataataaaaaaatattcaatcagaaatggataatatataatataattatttacttaaaatatatcagcaatgaatcttaaaatgtagaaaaaactaaattttaatttattatataaaaaaggtagataaaatattttatactattaagtgactaaaatgatagatttttgcaagagcaaaattgtactattgatgaatattaaacagtagaaaaaaagatgaaagtgtttgttttgttatgaatgttgagaaaagtatggccaagtgttactcatcctattttgcttttctttttctctcgggtttcactttttaaaggtcgtgaagattgggaatcactgctctgcatgcgccctagaatcagcaagtctaaagcaagcaataagcatg

SEQ ID NO: 9201 - DNA, 3000 bp, Unknown
  misc_feature (1)..( 3000): cDNA_ID_3040588_gDNA_ID_1972021_Annot_ID_178071 3000 nt of promoter + ATG
ccatacgtgtgctggtctagacagagaatccgacagaagcagcatggcaaaaaaaatcctcagataatctccaaaacaacactaacttgcttccaccagaccatcaataaatacctgatcattatcaagaataccacgtgcaaaaacatgcttctttgtaacatttgcagacaacaccattataggttttgatttcatcataactcagtggcctttcacaatgtttagcagaactctaagaaaatactcatcttccattttccttggaacatagtgaatgcgacttaaagaaaaaacccttggatctctttttaaacgccttattttctccatcccatgtgaaataggccggaatttcagcatataaacaatctctagcacacttaccattctttccaataacattttttctattcaaagtgagccaagccataaactgagagtcttcatttgctactcgttctagaacatctttaatgttagactttggatcaaaataagctggttgttttccttctacatgaaaagataatttctagacaggagttgatttatgttgaattggatatttaaatatcctccaaatagcttcagatgcggaaacgtatctgcaaacaattcatcatgattgacatgaattattgattaactatcacaccaaaccaaattattaagtaaaaaacagagtaataagctaacctgcaatcaaaccaatctttgatctcattcttcttcttcccagctgaaccttattcttgcccaggagtttcagattcaccacctgtagtttgcttaacaagctcaacaatgaagacaactttgtctggtccgttgttgatctatttgaataagtatttaactaggggagtcacacgcggcttgcgcggccaagcaattttgtttgaaatcaaaataaaaaaagattaagcataccacattttatgaaattcgaagaaactttttttaaacaaatgttcttaataacacctcctcaaaaggatatgtcatataatatttagatctaggtttactttatttgttaacaaaatcaaacatataaagcaaaatactacttataagataatacgaacattagttatagataattttaggacattagttttacataacaaaccaaaaccaagaggtcgaatgatacgaacattattttgattactaattgattaagtcaaacaacacatgaatttagtacacgacagcataatgcacactttcaatcttttgaatcggtagaaaccgtctcattagcttcttcaacggccaatctaaattgcaatgtaaacaaaaaacacattaaacacttttaaattacattatttgaagttatataaagcagtaaactatgcaaaataatacatacatctctcaaaattctccaacctcaggtatatccggattgatatccaccggctgcatttactagcggtttgaacaatatttcgtcctgccgttatataattatctatgttatcgtgaagatgtcagtacaaagatcatatatttttttgtgaataagagaattacctgaaaatctatgaattctccaccactgtaacacgcatacaattcgttaacccctcgctgttctccattcttcattaaattgttcaccaaaacccctgattgcaacacattccataacattgttactgaaataatttaacatataagtcggcatgacaaatattattataaaatataaacatgcttaaggctttctaactaaaaacttactcatgatcttgaatcttgaatataagtacaacaaaatcatcccctctgtctacttgggtcaagataacggagttcactagtagcaacaacaaaaccaatcaagccttgcaaaaaaaaggttatttgataagatggtgacaaaatttcaacatatttccaaatgaacaaccagataatcttactaattaagtagttcttgtctagactatcattcaagacctcaggaaatgctacatcagaaagagtgtgttcaagagtatcttttggtggaatcgtgtccagaatagtcaattcttcaaaaacgatctagtaatcgtgcttggtggttcttctatcgtctatcacatgtttcagccgaaagtgatgaatagctacccaatcaccatatttgaatttggagtcaaatcgaatgatatctttatatttgatcttgacctctattctatgatcttatacataagatttcataaatagttgattaaaaaagcagtaaacaaaaccacttttacaatatccgtaagaaatttagtaaaccatgcatacccgcacatcagccaaaaccatacaaaccgaacgatgatctctatctaaccactctcgccatgtgtttaagatcttaactaggatagaccaacaaagtttaatagggctcagatcgccgacgtcctcatccatatctcaccgggacttgctaaacaaaaaccgaagaggtgtaaacgtttcctttataaaattatgagtctaagcaaaaggcattctcttacttataatagtcataatatataataaacgaaaaacatttttaccgtacgattataatttccaagactacaatctattcaacctttttactatgcatggtctctttttcctatgcatcgtctctattatcaattcgaaaattgataaaactattatcgatacgttcacgagtctatatacaggaataaaacatcaatcatacgaatggtgggaggtgctattccctttcgattgcaagatttttctctcaaataaaaattatttcaataataaaacatagttataagatttggaaattctccataatattacaaaagatcaagcatactgtctttaaaacaaagtatttaaacattcattgaacatcttgtacttgtatcttccgaaccggagcatattgaattcgtagcagcccaaacataagcggaggagagtgtactacatataaaaatttaagaagagaaggccgccataatcgagaga

SEQ ID NO: 9202 - DNA, 3000 bp, Unknown
  misc_feature (1)..( 3000): cDNA_ID_2181154_gDNA_ID_1972021_Annot_ID_178084 3000 nt of promoter + ATG
cgctagaagcatctcttcctttcagaaagtcttttctgttcctacgggatggatgaccatgaggaagaaatctacggtgacaatcaaaccagcatgtcttccgtccattgggtagataaaaagactttgtactttccatgcaaacaggacaagacaatttaccatgagtagtccatcctaataacatgttatacgccggaaagtcgctaatcgtccacagtagtactgcttttagattaaaattctgactcaatgaaacatcgtacgcatcgactccagtagaccagaactcttttaactcctcaataagaggttggaggaagacatcaagactagctcgaggatgatttggaccagaattcagaatggtaagaaataagtactcggtattcatgcacataccagggggtaaattataaggagttaggatcacaggccacaacgaatgattacgagacatgccaaatggattgaacccatcagtacacaacccgagataaacgttacgaggttcttcggcaaactcgggatgtaacccttggaaatatctccactctgctgcatctgaaagatgattcatttctccctcctttgattggtgctcagcatgccatcgcattgccgcagctgtcttatggctctgatacattctcttcaaccggtccccaataggtagataccacatacgactatatggtactttggttcttcgacggtcgtccttaggcttccatcttttcgcgccacaaaatcgacattgatcttctttttcgtcttctttccaagatagcatacaattgttctgacaaacatcaatcgtatgatatggaagtcctaaattgcgcattaacttctcggtttggtaatgtgaagtggttgcctggtttccttctggtaaaaaatctgtaaacatttcgcaaacggagtccaccaacttttcactcatattatactccgccttgttgtgcatgagtcgagatgctaaggataattacgactgcccttcacgacaaccatcgtacaaaggattatttgcatcttctaacaagtcgtagaacttatttgaatggttacggaccggttcttccacattctgataactatcatcatgacgatagttatcatcataccccacgttaaaattaaatgcatcgttcaccatatccacatatggatcttctacaatattacccacttcttcatgattctcactaaaatacgtcctattcgtgtaactcgttcctatatccatattcatttcttctccatgcttataccaaacataataatcaggcataaatccatgactaaacaaatgactactaactcttttacccgagatgatgtgtttttcattcttgcatacactacaaggacaatgaaatttacctcgactactctgtactattggctgactattagcgaatgtcatgaattgctcaactcctgcaacgtattcggctgacaaattccccgtcacttcatcaaatctcttgtacatccaatctcgatagaaaccgccagtaccgccataattgtagtttcccgccattatacaataaaataactagtattttttttttctctttgatgttgttgttgttttgatttgttggtgaaagaagagttgcgtgaacgtttattatataggccaatttttgtgactaatttacgactacaactaaataattaggtgtacctacttaccaatgcgaaacatgttttccatctactttatacgactacggtgcgacgtttctacgactacaggacgactagacgacttagtcggcctgtagtcgccatattagcgactaaataaaatagacggtagaatagtcgttaattagcgactaagcaacgacaactatatcccttcaataatataatcgtcaaatagtcgtcacttgccgacactttgccgactgcatacggtagtcgtaaaacaacgactatgtgactacaatttttcgtgttgtcgcaggcgagtcgtaaatccgtcgccaactagtcgtataatgttacgactacgtttattgtcgctgattgtagtcgtcgtttacctgttttcttgtagtgtatgtcaatcacgtataaaacattcttattcttagttagtaacgtacgtgaaaatataatttgttttgttgtaacaaacaaacgaaactaacatcatagattttaagtaaacaaaggttcagactttttttttttttttaatcatcccattacattaattgaaaagaagagttgcagaacataaaacataaaacaaaagaaaacataaaaacagagcataagaagaaaattgtctcattgcattgcattcatcttgactttttttgttaagtttttgtttttgtgtactagatttatttaattatacatgtgtcataattaaaaatttatatatgtattaactatataatattttatttttgtaggtgtgagcttatttttctaggatatttgtgttaaaagatagtgttgcaacgttagaacacaatatttctattgttctttgtaatttggagaagatatttccaccatcctcttttgatgtcatggaacatttgcttatacatttgccacacgaacctcgacttggggaacctgtacaatttagatggatgtatccttttgaacgatacatggaccatttaaagaaaaaagtgaagaataaggcaaaagtagaaggctcgattgtggaacaatacatcaataaagaaatttctacttttgctacttattatagtgaaactttttttttgtatatattggctttttgatgatagcatggctgttgcttggaataaccggagatgatctaacctcccttaaagaagaaaattttgcaaactggttggaaaaaaatgtaaaaacttacttttaatttagcggattttaatatttgaattttcttattgtaatagaggttattttatgcgttgataaatatgtggtggagaatactttaagtgagaattcatatccaaaatg

SEQ ID NO: 9203 - DNA, 580 bp, Unknown
  misc_feature (1)..( 580): cDNA_ID_2181175_gDNA_ID_1972021_Annot_ID_178092 3000 nt of promoter + ATG
ttcttcattttgaagataaaaatgaagcaccattggagaagatttctctatcttttacttcaaaatgaagaaaaatgtgaaatttaaagcaccattggagatggtctaaaaaagaaatttctttatgatttttttatcggtaaaagaagtaaatgactcaaaaagctttaaacatatcgaataattatgacccaaccaacctaaacggatcgcaaaattacacaagcccattttattcgggtcatatctaataaaacctaaataaaacactttctcactttttctctatggtaaaacagatcgacgacttttttttttccctttcttccttcttcttttagagaaaacctaggtaaaacatatcgtcaatcttcgtcaatgccatttgacaaaaacagatctatattcatttctcttatatttcttcaaagtcgatcttggtaatatttgtcgaaaactaagatattgggtaagttaaaattcgagttatttcattttgggttttgtgattgaaattaattaaagtagagtaactcgaagtgctaatccaaatgattttgtttgtaggtctggagtaatg

SEQ ID NO: 9204 - DNA, 3000 bp, Unknown
  misc_feature (1)..( 3000): cDNA_ID_2181156_gDNA_ID_1972021_Annot_ID_178085 3000 nt of promoter + ATG
aaacaaaatgcgacaaatagaaagcaaattacaagacgatcaacccattagcaagacaaatcctcacaaatttgatgtaaacataaccctattatagcgaagaagtggttcattttaacaagtattggaactaaaacatattagagcagaaaatttccaatctactgagaagacaatctctagtaccacacgtaattttgatcagaaaaatccgtatttcgaaaaagaagaatctcatcttaacaaaggatggaatgaagttaaactggaaatgctgaagcttttgctgcctcctcgaaatttgaaggatcgatttggctattggttaagaggaaatatttatcttatactctatttattaagataaaaatagtatgtcgtttacataactttcttcattttttactgctttcaaaatctctgctatgtagcctcaatgtcaaaattgttgttgaagtattatttgttaaaatatatgattgggtttgtttttaatatttgctttgattatcgctttgttaattaaaaaacttgtgaagatatgtaattatgattttgacacaagttgttaatcaaacacatgctctgttacgtaattataaaagaatgcagagagaagcattcttcttctctctttgtatagagattataaaagagaatgtgatttttaatggccgtcaaaatatctggtggtctccgccgcatctctttcaagcgtgaggcttgttaaaagtagcataaagtatgaacctcttagtaaagaaaaaaaatccttagaataaaaaaatccttaaaactgtagatgtatcaagaagtctttaaacaaaagaattaaaaatctctaaccaaacgttaaataaaaacaaacctttaaaatttttaatagaaaattagtcagatttttcatctgttgattcgatatttgagccataatctttttcgtctgatccgacttcttcttcgtcttcattatcatcaagatcttctacttgatcacgaagatcagtgagtgtctttacttgtaacgaatcgacgatgacatttggaccagcttttcatgttgcattgctatgaaatctaaattttgattaagcaatatttttcctcttggttgtatcacaactgttgcgttccattgttgatcatttttctttgttttccgtggatacggtacatagcatacatgatctgcctgagagactaaaatgaaagggtcatatttcccataagactttgcaacgttaacatcgattatcccagaacgatttattcgtacaccttctccaatggttgtatcataccgatcacatttgaacactacaatgtgtagatgaaccggtccatgataatgaatttccagaatctctctcaatactccgtaaaaatcatgttctccacttgatttagaagataatgtgtttttcacacacaaaccaaatttagcattctttttgtctttctcatggtcatatatgtgaaatatgtaaccacgaaaaagtacataggccaagaagtaactttggtcattgaaccataggagagagtctgcaaccattttggatatgaattctcacttaaagtattctccaccacatatttatcaacgcataaaataacctctattacaataagaaaattcaaatattaaaatccgctaaattaaaagtaagtttttacatttttttccaaccagtttgcaaaattttcttctttaagggaggttagatcatctccggttattccaagcaacagccatgctatcatcaaaaagccaatatatacaaaaaaaaagtttcactataataagtagcaaaagtagaaatttctttattgatgtattgttccacaatcgagccttctacttttgccttattcttcacttttttctttaaatggtccatgtatcgttcaaaaggatacatccatctaaattgtacaggttccccaagtcgaggttcgtgtggcaaatgtataagcaaatgttccatgacatcaaaagaggatggtggaaatatcttctccaaattacaaagaacaatagaaatattgtgttctaacgttgcaacactatcttttaacacaaatatcctagaaaaataagctcacacctacaaaaataaaatattatatagttaatacatatataaatttttaattatgacacatgtataattaaataaatctagtacacaaaaacaaaaacttaacaaaaaaagtcaagatgaatgcaatgcaatgagacaattttcttcttatgctctgtttttatgttttcttttgttttatgttttatgttctgcaactcttcttttcaattaatgtaatgggatgattaaaaaaaaaaaaaaagtctgaacctttgtttacttaaaatctatgatgttagtttcgtttgtttgttacaacaaaacaaattatattttcacgtacgttactaactaagaataagaatgttttatacgtgattgacatacactacaagaaaacaggtaaacgacgactacaatcagcgacaataaacgtagtcgtaacattatacgactagttggcgacggatttacgactcgcctgcgacaacacgaaaaattgtagtcacatagtcgttgttttacgactaccgtatgcagtcggcaaagtgtcggcaagtgacgactatttgacgattatattattgaagggatatagttgtcgttgcttagtcgctaattaacgactattctaccgtctattttatttagtcgctaatatggcgactacaggccgactaagtcgtctagtcgtcctgtagtcgtagaaacgtcgcaccgtagtcgtataaagtagatggaaaacatgtttcgcattggtaagtaggtacacctaattatttagttgtagtcgtaaattagtcacaaaaattggcctatataataaacgttcacgcaactcttctttcaccaacaaatcaaaacaacaacaacatcaaagagaaaaaaaaaatactagttattttattgtata

SEQ ID NO: 9205 - DNA, 3000 bp, Unknown
  misc_feature (1)..( 3000): cDNA_ID_3040547_gDNA_ID_1972021_Annot_ID_178082 3000 nt of promoter + ATG
aatagattaagggttttgctgaatatacacaccaacaagatgatcttcttagaaaatatttttgattaaaagaaagataggttctcataagagattacatgagcttttgtatggttctatgataagtaattgatgtaacttgatgaacaatagcttagcagcttctataatagttggtatttgtaaactactaaaaaaacacattttgtttatgtgttttcttctttcaacatgtctaattcgtttttttgtttgttttttttcggaatttgataaaaatctgataaccaacacgtttaaactaaaattgaccgactcgaaccgaaattaatttcgatttaaatcgactaatttttttgtaaaccgaataattcgacctgtttaacccgatcattggcgtaatatattatatacaaaaataaagttggatatctaatattttaatataggtggagaaaatgcagaggttatgcggcggagagtgggagttaattaatatgatcaacatatattcacgaaataatgaaaacagccaagtgttgttttgggaaatgaagctaaagacaaaaatgaaagccatgggaacaaagtctatatattatacgtatttttttggtggtatgtaaaagtagagacaactggagaaagtggaggatttatgtggcgaagggcaggaactggtttataaaagtagtgcaagaaaaaaactcgtacatgattaagaaaaatatccatgaattaatagggaaaaaacaaatacgtgattagatcaaaaaatttattataagatttgatctgtagattacagttaatagggtctcattcttttgatatgataaaaagaaattacagcctgtaattgttttagggaaacaagtaaaacatgaaaaaaaacatgtagttatgaatgagacctactttatatatttaatccggattggtaaataatagaagttttaaaaattgagctacccaacgaatcaggcaatcactccttaaagtattttgccattatttagtttctttatcatttggactgttcggcttttaaacaaactataaattttggacagtacagtacccaaatatttataattaggttgagtttataattacccaaacatgtaatttatagaaatagagtgataatgatatacacatggattaatattcatacaaatatttatatttaatttactacacataaatattctttcataggtgttgatttcttgtgagaatgatcaacctttacagtttacataataatatagaattcttcgaattttgatttgtgattatatacgataactagattttaacccgcatggtatatttttttataataagtgaaagtgtaatttgcttagttacttaacattattatataacctattgttttgtattttgtgaatgtacaaaccttttacatatatatatatttattgtataagtactctattttaggatttaatctttcatacgatgggcaaaattttattagtatacattataatgttagatttatgatttttttatttagtattaaaatttgtaattttatattagtgctgtaaaaaaaactgatgctgataacatattaaaataagatttaaactgtgtcattattttgggttgatgatattataaatttgtattaatatcgatccaaacccgttccaccatataactcttttgaaatattatttttttataagtttaaatattaataatgttttacaaagtttaaatatttcaaaaattaatacttttttgccttttatgtaatgacattttgtgtaattcttagtaaaacaaaataactctacaaaatttagttcaactttttttaatatagataatgttataaataaatattttgtttaatcaaaatttgtgattgatattacttgggtttttggacttcatttaatagcataaattgggtagttttgttcacattatttgaaacaataacatcaatttaatctatatatacatttttagtaaagattttgagttgaaaaatcatttatcaatttcctaattaaatgtttagttcctacaaattcaatcaaacaagatattttctttaggacaatgaccaaattgtttatgaacaattaagatattgcactaattacttgcttaaaaatggatattgctaagtactacttaaatatattgcatattgactcccttaaaactctacgaaattcgttaatcattatttattacttaccaaaatttgatacacaatcttaactaaccatatctataattacttgattccaaaatcattatagctttaatgaaatcttaccaaactttaatctactcttatcaattttctagaaaacatatcagttattaaagttgctttaattccgtttacctcaaacaaacacttaatatatcatatgatcttacatttggtatagtaaatatattttgaaatatacttcattcatactcaaaattcttcctaatatcggtattgtgttatcaatctttaccaagtactatattctccatctaatttaaaatgtaaagtaatcttgcattccaaagatattttccgatttgaatcgcatcatcaattccctccattcctcatttatagcaatgcagtttcctgtttcacatatatcacaattaaattcttaaaagggttatggcatgccattaaaatgtcgccaaaataagatcacattagctagaatatctttcaaattttgcatgagaatcaaagcaaaatctaaatacagcaacttattaatttattatcacttatgatcctcaagcatattcctctttctgaaccattccaaatcattctgtttctaaagaagttacgcttagaatctttgaaaatctaggtttactagcttgagtcgcctattataaataaggttgtaatatcattccatttcatcatcacctacacagcaaactatctacacatttcactacttctacatctctgttttttaagaaatg

SEQ ID NO: 9206 - DNA, 97 bp, Unknown
  misc_feature (1)..( 97): cDNA_ID_3040614_gDNA_ID_1972022_Annot_ID_178094 3000 nt of promoter + ATG
atatttatatatatatatatagaaatagagagttgaccgagtcagtctttaacaaagtctcatcttggttgtgtcatattctttgaatatttccatg

SEQ ID NO: 9207 - DNA, 3000 bp, Unknown
  misc_feature (1)..( 3000): cDNA_ID_3040645_gDNA_ID_1972022_Annot_ID_178102 3000 nt of promoter + ATG
ttgttgataaatactatcggctgatccggtaagtttcggtagaaacagaccgaagtatttcagagtggacttctccccgaaggaccaccacactgtctgtcctgagtttggaatgctttccgactaatgccaagggtaataatttattaactagaaatatacttttaagaaaacgtataatccaacttattttaaaaaatgtttagaagaattgaaaactacacatttttgtaagacagaaaaacatcaaataacaaaaggataaccagtgaatccattttgcaaagtagatatgatatcacagaggcccttgtatttcttatattgttaattcgatataatgaaagtgaatgcaccatgctagcttgttttggataatctacatcccatgatttggtgaaaacatttatttgtgagcttccttttagcttataattgacattattaataaaaaaaagttataagacagaatacaaacatcaaataacaaaagaagaaacagctaatcctttgcaaagtacatatataaatcacagggacccttgctcttttggaatcccatctttggactatctttgatgatttggtgaactaaattaaactgcagattgaaagaaagatatctccaattggtagtttctaaaaaaaggccttagataacgctgatggaacctttacatagccaaaacttggtcggcaatgatcctcaactttttaaacatgaaaaccgaaaaaaagaaagccaatggacgtatatctagcaacgtcaataagaaatcgattatccttttccaatgttatttaaatgacaaactaaaggcagtggtagctactttttttttcaaacattagatactcatacgatgcggtcattgactgttttgcgtaggttaacaagactagtttatctggtacaaaaatgaccacctaatttctatcattataatacattagaagatctcttttgtgaccacgaaattcttgagtttgcggcacatgtgttctttgagtcagggatgataaaatattcatactttttgcaactaacctcctccgactgtcagaactaaagctcgggatttggtacaacatcccctaaaccatttatgtaaattaaagaaaaaaagctctggctaaaaacatctctacgcataagtcataagactcataactcatacttataaataaaaacgaaaacaaaagaaaaacttatgcaaacactttattgtatatgatgacccgttacataatatagattctgcacaggttttagattttttccgataatacgctattttacacggtatcacactattttattaagtaattatgatatatatgtcacatctaattattgatttcactaacgttatcttcttccaaaaccaaactattattaagttagaaatacaatcatgcaagaatttgtcgacaataaaaaccatgcatgatgcattgaataaaaaataatatcaagattatttccatccttgaaacatctcatatcaagagtttgctttttgacactagctgaaatcatgattacgtcaaaatttttttcacttttattcgaatttttcggcccgcacgaaatcacaaagttacaactttactttttagctaaaatctaacatatgcaatatacgttagagtttgtatgtgtttgctttgtttcttacaaaagaggttgacaatgttgggtttgtgtcctactcttgtcttgatgccagttgtctaaatggaaaaataacaaaagtaaaaaataaagaaatatgaaaaggacaaaaaatagagaagcaaccagtaagaaactaataattgcgaaaaagaaagaaaaataaaaaagagaaactaataattgaagaagaaaaagagtaataattatggaaaaaattgaaagtaacccatgtggttttatgcacacgtgcaaccttcttactctcttgtgtttgtcttaatgagataaaattagttttaagtatgtacagtatataactaaatgactcactatttaaatacttatacatcaccaaacacagaattttaaagacttgaattcagatatatagatacacatcgacagtcattaatgcaaatcactataacacaacatatatggttcaacatttatttaatatattttcttataaaatgttttcttatacaatgtaagatactttttaaatatgcagtccaaaattatactgacaagaaatttgactttcttaaataaaaatacactcaaagccgacaaaaaaaattgtctaaattttggaaacaaaattaggtacttaattacatagtttaatatcactttagcatatttaattaaacatgatattttaaaatatagaatagttagtacatgttgtgggaaaataaaaacatagcatagtaaacaaaaatgatgtgattataaatctttttaagtttgaaagcttaatcagttttaaagtataataatcttaaaataatattcaaatcacaaaaaaatcattacacttttacaaaaaaatatgtatgactctattgaaacaagagtaacttattttttttttccgttacaataaattaaacttttcttgaaaaagaatagatttgatacttttatttgacattactctcacaatttttttgaactggtgaattaattgtgtttaaacttaatcgatttattaagctatcaaaaattttaaattttgaaccaaaaaaacagcgaacaaaataaatttagcaaactcggtggcataaacgttgggagcgagaatcttgatttttttttggttatttaaagaaataaaagtattaaattgtacgtttatactattacactgttttagctacttagcttaaaaaaatcatgtttttttataagaacataaatacgagctgagagagagagagagtacacaaatttgtttcacattcctctaaattccaaacaaattgtttatagagacaccaatcttcttcttcttcttcttctctgacaaagttatg

SEQ ID NO: 9208 - DNA, 3000 bp, Unknown
  misc_feature (1)..( 3000): cDNA_ID_2181227_gDNA_ID_1972022_Annot_ID_178106 3000 nt of promoter + ATG
aaataaaatcgtctaacaataaacacgtacaaacatgtatcgggtattcacgatttgcaaagtagtgacttttcatagtttgattcgtacacttaaatttgtacaacacttttagtgtacagatgtaagtgtacgctgtgtacatttatttatttgtacactaaaaatgttgtacaaaactaagtgtacgaatcaaatagtaaaaaatatacaaatatatgtattatataaaaaaattgagatatgttgttaaataataaattgaattgtataaatttgttataaatatgaatatttattatgctgtacaaataaaagtgtgtacatataattaattgactattgataaaaatgtctatgtaatatatttaaaattattagcaaaatgcatatcaaattatagagaaaaatatatagatttttatgtatctgaatcaatttaaaaaataaattcatattgataagcatttcaattattagatttgagaggttataaaaaataaagaaaaaatatatatgtatattataaaaaaaaaaaagagggtgcgtgtagaaagtagagagtagagtgaaaaaaaaatcaaaggcccctatggtaatttccatttctctttctatgtcccactttttttctattacacagatttctattagagtaatagtgtaatgtacctaattctccaattatgaatagtaaactccctatatttacaattaagttctgaaaagtgactattttgccaacataccctttattttaatgcatggttttcttttgtcaaacattaatttcatacaacgtttaccacgcattcacggtgtccatagttcacttttcaacttaaatatatagataaactcaatcaaatggtaccacatagtgagaaaaagttgagtggaccaatcaaaaccaaaatttgtttgtggtgaactggtgatgtggggaataaaagagaggttgccgacagaagtgtagtttttgtccttcggctaatcaattattctgctttaccatcttttcctcacatactttgattctcaaagatttagatgttttctactttaatcatactacttgattgattcatttttgataaatataaaaccggatgaatataccgactggtttaacgataaccgaatttggtattcaaagttcaaatcaagtgggccactagtattgatgaaaattttaacattagtcaataccaattatttatgatcaagagaacaacttacaaaacgagcaagtccacttgttactgaaagcatggatatgtcggccaataatagctagaaacgtatgggtcatattttctcaaaaaaaaaactatagtactaaatataattataatttgtctccttttatattcttttggagaaataaatgtgggactaatactaaacaatgaatatgattatatgagtttatcaaacatcatttttcaacttccaaatccctcgctaactttgaatgcaaattctataccttttcgttatacattagaatgactcctatattctaatgaaaccattaagcaatagtaaccatttcaaaccaaattagatctagcaccattgaccattagttaattatactatggatatagtacttaggaaatataaagatcgagagatggagagacctggagctcagttgtgacagggtactcatccatatcaacgtagttcttattgatagagtccatgatgagtttgtcacactctggttccatccatgtagtcacaaaagaagctaggttaagccttgggttaccatcaagcatcagctcatcttttatgatctgatacgcagcgtctttcggtatcgaattctcaccaatctcataccttttttcaatcaattaaataaaatacatcaacattaagaagcaaagtattcaaaatgttttcaatagtcatttggttaatttacttacttgggaagtgtagtgcgaacatagcgagatccgaacatggtgcagacagattcatcattcgttgcggtttttgtcaaaaccatctttgtttctgtttagtgaaagagaatctgaggaggaagaagaacacaaagagacgaatatatgaagagacgacgaggctgcgtttatattgaccctacatatttgctgtctttttcctttatatggagtatcattattattttattttttgtgagttttatattatgtcgacgatattcgctcgtaaaatatcacaagatcgtaaagatatgtagaacgatttgatttcttacctattgaaaaaaaaaattgatacccatgagatatacactttattagattagagtagattgtggaagctccttagtccaatggttaaataaaaatttattaatatttctacattaagaggtttgaggttccatatatgttagtaattttttgtaaaaaatgttgtatataacgtaaagttgaaatttaatgaataattttgccgtataaaaatacattatttgagtccagcaagcctagcgaaaacaggtggtagtgggtaaaaaagaaggttgtattcgttgcagagagatacagtatgtacacttaaattacatatatgcactaatttacctaggctttaaaattcacaaagtggaaaaaaaactttaatttatcaaaatgagattctctgaagtttgtgtgatgtcaaatcgattaaaagagattctgtaaaacactgcgttttactgtgtctatccaatttttacagtattgatactgaagggggatttacgtcagttaattttaaattgagagatttttttgactaaattaaccttttatatttggctatttgccaagcccagcttacttagcccattaaaatcacatcgattagtctaaccggatcctggcccattagattgtccatcaatccgatccgacccgacttgcaagtaagttagaaaatgtgtagcttctccgtcctcttcttcgttactacgaaaaaaataatacgaaacccaaagaatccacaaaaatg

SEQ ID NO: 9209 - DNA, 3000 bp, Unknown
  misc_feature (1)..( 3000): cDNA_ID_4257552_gDNA_ID_1972022_Annot_ID_178108 3000 nt of promoter + ATG
gcgatggataaacgaccatctaaaaatgcataagttttgttttaatgtattctttttgttaatttctaactaaattttagcacatagttataagccttttatatattttttaataaaactaaataaatgttttgtccaaattttgcttaaattaataattccattttctactagacatttttatataatttgtatgtaatatcatatatttgtaatattatgtaacacagaccttacctaccacctaacaccaaattgttgtatttttagaaagccaatatacatctaatagatcattatcttagaaatatccttttatctcattctggaaacttcttaccataacagaaaataaacaaatctcattccggaaaacgctcataaattgtccgaaagccctaaaaatctgagtctcgcattaagtccaaacactttcatttgtctcctttcgtcaactccacagagatctcctcatggctccaattgctgtcggcgatgtcgtaccagacggaactatctccttcttcgatgagaatgatcaacttcagaccgcctccgttcactctctcgccgccggtaaaaaagtcattctctttggtgttcctggtgctttcactcccacttgcaggtacaaagtttcaacctttttcatcatctctcacttaatttgctttcaaagttttgatctttctttttcttgttctcaatacagattaggttttgtttcttcagatttatcattctaattagttgtataagatgtgggatttgatggtaagatgatggatctttagatttgatttgagaatggtgtttttgtttttttgtgaggttagcatgaagcatgttcctgggttcattgagaaagcagaggagctgaagtcaaagggtgttgatgagatcatttgctttagcggtgagtatgaatgatatgcttttgatctctataatgagtttgagtatacttctgaaacctctatgatatgatatgttcttacctattattagattcgtttggtagttggtgtccctatttgtaaattgtagagtatacaattagatcagttagtgtatttggctgagtctgcttcttgtgcaaatgttttggcagacgtttatatatgctgcttggttttatagtatttacgccgtcatttggatcgattgttgcagtgaactgttcatcatatgtatatggtttgatatcaggtctgttcttaggtataacctgtactatttctgacctttgtgtttgtgtctacttctgaaatctgatctcttgctagtcaaacatgtgaaagctaggctaatggtagttggtattcataatagtaaattgtagaagagattcagagtattggttaatgtatttggttgagtttgcttgatggtagactgattcaaatggtttatggcattgacgttatcacttggattgatatgttgcagtgaacgatccgtttgtgatgaaagcatggggaaaaacatacccagagaacaaacatgtgaagtttgtagctgatgggtctggagaatacacacaccttctcggacttgagcttgaccttaaagacaagggtcttggtgttaggtcaaggagatttgctctgttacttgatgatctcaaagtgactgtagccaatgtcgaatctggtggcgaattcacagtttccagcgccgatgatatcctcaaggctctctaagaaatgtaccacttgtgttgtctatgtaaaccgctgtatgtgtagtagaggattctatagcttgttctcagacattaaccaaggttgtaataaagcggtttcattgtgacttgtttggcataacaaagtatttggttttgttgtttttctgtgcgttgattaatgaaagatgtgactcattgacgtgaacatttatgccaaattttgccattgttgttcttgactatggtagacacataccaaaaagttaggttacctgagtttctggtaagtatagttgctatattgcatttataatgtacataggcttctcacacattatcaaactttggtaagtttgtctctattttttttaccgctctatcttttagccttgctcatcggatatatatgtccgatgacgcttatcttgattgtgtaagcgtatgaccctttttttgttttgtgcggtatctaatgcttatcttgattgtgtaagcgtatgaccttctatttgttttgtgcggtattcaattcaacatgttgaatttgaaaataatagtaagagaagtacaaattgcaaattatactaaattgttataagattgcaattcaattttagcatttagagtgcttattgaaattagaaaagtataggatccgcgtgtttatcatatgggcgggctaggatcaaataggtcgaatcacgaaatcaaataataactaatcaggtcttaacaatgtttttacgatagatttagtcttaaccattcattttgtttggtatgtaattaaaagctaatcaagggcatattctctctctattcgattgtattctctagagaaacgattttcatatatttcctaatcaaaatagcatatttgaattattaatttgtttccctcaataaggttacgaatatgatgcattaattttggatttaaaaaatcttgcttgctcacgaagaaatcagactcaatttttatcgtcatacaatgttttccaaaatatgtgtacatgttcttgcagatgagtctattagtgagggttacttaaacaaaatgttgtatttttggaaaaaaaagtttatttttagatattggttctagattttacatccaatttttgttttaatcataattttagaaattctattatattttttatggtcaaactaaaattagaaatctattaatgatttacatcattccgtaaagcactataaattgtcctaaggcctaaatacattttcgcactcaagtcaaacaaaactcttctattttcctctgtcttcaaaaccacagagatctcttcatg

SEQ ID NO: 9210 - DNA, 2658 bp, Unknown
  misc_feature (1)..( 2658): cDNA_ID_2181242_gDNA_ID_1972022_Annot_ID_178112 3000 nt of promoter + ATG
ttccctaataattttcctaaacttttttctgtttaattctatttaatttaattatgcattgaaattagagacatttcttcttctcttgcacttttacttcggtaatctaggatacgcttgctataggattgtttaaccgggggtatacaagcgattgatctcagctcatcaatacagtctcagcctcgcgaagcgatcatgttgagaggttctccatgaaatatttatttcaagccacagtttatactgtttggagggaaagaaacggaatgcgtcataagcagtgaattgataagcaaatacgaaatcaggatcgacgatacgacgctagctatcatggttggctccaaaatcaagtttaatcacaagaaatctcaaaaaatttatgtttttcaatttgtttgtatcaaacacataacactatttgtaaaaacgttagtttttctttaaatctaatttaacattatttaaaaaaaataatttaattatgcaaattaaaacgagttcatataactatttcttttgttctactcattataattctataaagtttattgtgtgtttgattaatctttgtagattctaactctaaatgttactgcctaaaaccgaaaagttaaaagatgtaaaagcctagaggagtgaaacactgaatgacgtacggtacatcacatcgacgacttacgatgaagggtttgtgttttcgtccgcccttaagaatttgtttacttgtgcaggaagcatccagaatgtaaacacccaaactacacaaatcaaaatcaaaaccaaaaccaaaacattcccgctgacaatcttcgtcaccattatcaatctcttaagcatattcaagcatcttcttcttcacaactatcttaatcctctgcaacacattctttgttgtctcctcagtgacaatcgcctcaaccctttgaatcaaacccaaaacgaatctgaactctgtagtacaataccaccataattgttccactacagcgatttcaacatccctaagagctttcccaagaaaccctaattccattcctctcttcaccgatttcaacatctcattcgcaagattctccaccaaatcaacacgtgtcgtctccaacaagtgaacagccgcacagaaaccacccacaaacgctaaaccccactggcccgaactatcttcctcgttgtcacctaaacgtttcaagatcgctggaagaagattctccatgagaggaatcaaaaactcctctccatccaaaggcatcgacaagctcttgaacacggaaaccactttcacaaactctgattccgctttagacgagataaactcacgcaggtcataccacgtttcttcctgaatggtgaatatctcgaaagcgacacggttcacgagcattgaaagaatctttaaactggtgtccgagacaacttgttcttcaaggcatgatatgagtataggcgagagtatgtgaaccactgctaaattcaaggaggcttcttctatgatgaagataacgtggagacatctcatcgcaccctctctgatctcgtatgggacgcgtggctctttcgaggagtagacacgcatgagcttgagggagaagcatcccgggtaattggcgacgcagaaacaaaagaacttgatgtctttatcttctggattctccggtggctttgtgagggcggcgatgaattccaccgtcggttcaatgtgaggatttgcaagaagcttgaaggcggatttggtgaagtcttgggaggttggttgcttcggcgacttctgattatccatgggaaggtaacagaaagttccgggagatcaatagagtctataaaacggttgaagaaagaaaagtatataactgctttatatatagatagataatgattcttatatagatagataatgattcttctgattatccaaacgcacgatttgttaaactctttttttaattcttatatagatagataatgattcgtaagttttaatttttctgttagaattttttttagagtttaatcttctactaattagttgccaaaaaaaaaaaaaaaggtattaaaatattcttagttttaaaaaaacataaatcataaatcataaatcctagatacatttaaatgacaactaaaattaaaagaaactttcaattacaaatatatactaccattaattgaaaatttcttttctttaaatttataaaaaaagaagcttatctgttctttgtttaattagttgtcatctgttgcaagccaacaataagatgaagtgtattatcaaatttgatgaatatataaaatatatttcaaaaacagcatatttcttttttacaatttattaaatatatttcaaaaacagcatatttaaattctccacccctcccaaaaataattaaattaccatcaaatattttagaaaatttcattaaaattactacaaaattaataaggttttctaaagaagactaaaatcaaattgattttatttcttgaaagattttatcttttatatatatatatatatatatatatatatatatacagagattttatatttttacataataatatattcatagaaaatactctcaagccctaattggctaatttcattttccctcaaagtccaaaactcttcaaatctctttgcttctcagcctcatg

SEQ ID NO: 9211 - DNA, 3000 bp, Unknown
  misc_feature (1)..( 3000): cDNA_ID_3040626_gDNA_ID_1972022_Annot_ID_178109 3000 nt of promoter + ATG
aatttcagtttcttaaaaaaattataaatatattcaacaaaatattatgaaaaagatgcaacattttctattttgttatgttaaagagagataatcctcggatgaaaaagaatcataattaacctaaactaactgttatttaggaaattcaagataatgatatagatagcaaagtatatacatgaatactacagagctaaagaatgcagacagatattttgagtttacaaaactaatactacaaataatatatatttgaataaatgatcaatatagttatatatatactatgtaatatgaccaaaaaaagaatatactaaataaaaaagatgcgatcaaatattttggatgtatgaaacgtagagctaattttgttatttgatttatgttatgtaactaggaacatatgtatttatacttatcctccatatgttggcaatgaaacagatttttacacttttacataaataagagaaactgggccaaaagacaaaacatatataaatgattaaactttttgcatccctattttcatagtcacatgtatatatataagatggaaacgtatttgttgtgcctcctcctacagagagagggttgaaggtgtttcattgcatgtggagttaaagaaaggttgcttatcgatgccgagtttctgggctaatgataggacagatatgattctaagaaatgtaattgcatttgagcagtgccagcatggcataataccctttacctcgcactacatacaattcttaaatgccctgatagtttccgacagagacgtcgagctactcagcgaaaaaggtacaaacatcactaaatcaatacatttaactattaattaacatatatgaatgaaaaatatgcatgtgttgctggaacataggggtggtaatgaacaatatgggtcggccaagcttggtggtggacatggtgaacaagttaaaggttggtgtgtacgaaggatacacctcccaatactatgacatagccatagatctcaaagctcactataaatctcgaagaaagaggtgttgggccaccctcagaaaagtttacttcagcgacttgtggaccggcacagctactttagccgccgtgcttctcttgcttttgactctggttgggacggtggcttctgtcatccaagcttacgaaagcttcaagtaactatatatgcttttataattcatacaaaaacaaaaaaaaaaaactatatatgcttttatatcgtccaaaaacttatttccaagttttcctcatggattatttatgtactttggtgattgattcttgatttctctaaagattgtcttttaacacggaacaagtctacgaaatttctacattaacttttcctcttggccaaacgtctatggattattcccatgcgacgaaccaaagacttgatacccaaaaccagaaagatattactgtatgtatatataaatgttcgcaccaacttagaagggcaaaaactaagtacgcattccaatagacacaacattaatggttacgtagtggatgctaattaagagtgttcagtactgtctgtcgattgacaatcacaaacgttcggagggcaatcattgacgttctgaaccgtcaatttgcgtttggacagaacctatggtacaaaacaggccacagtgcgagtttgtttccacaataaaatgatgctgggattatggagaacaaatcccagatttattattgtgaaataagagattttgttgtctcccgtgtaagaattaaacaagataatattttgtgcatcttgccccatatactatatatttatcgaaaaggaggtaccatcataattttactagctgaaccattttggatagtctttagctggagagacagattttgcaattacttccatagttataaacataaaaaagcaacccataaaaaaaatttataaaaaaaaatcatataaatttttttgagtgtatgtcaagtaacattttgtgcttgtaatatattttttcaaatttgaaaattttggatcctcacttttggatctcaccattggatagctcaaaataaaaaaaaagttcaaaatgtctaaatttttgcttttctattatacaaattgtaaatcttggttggatcccaatttttgaatccaaccattgaagttgctctaacaatataactttcaaaagagtccaaagaaggtccaagaataaaaaaacaataggaataagctaaggacacgtgtttgcttccacaacctttaacacataccagagattctaaatctggttaatcggaaacttcgccaaatccagcaatgaatcctttttttttccaccaataatgacaattatgaattttgttttagtgattccaaaagaaaatcacgagaagattgagatatgaattacgactaagatttttatataatttgaaaaccatagtaaatcaacgataaaaagaatgactattaaaacaatagttttaaagtggtatacgcggttgtcgagaccccgactaagttctagatactcaagcgatggataaacgaccatctaaaaatgcataagttttgttttaatgtattctttttgttaatttctaactaaattttagcacatagttataagccttttatatattttttaataaaactaaataaatgttttgtccaaattttgcttaaattaataattccattttctactagacatttttatataatttgtatgtaatatcatatatttgtaatattatgtaacacagaccttacctaccacctaacaccaaattgttgtatttttagaaagccaatatacatctaatagatcattatcttagaaatatccttttatctcattctggaaacttcttaccataacagaaaataaacaaatctcattccggaaaacgctcataaattgtccgaaagccctaaaaatctgagtctcgcattaagtccaaacactttcatttgtctcctttcgtcaactccacagagatctcctcatg

SEQ ID NO: 9212 - DNA, 3000 bp, Unknown
  misc_feature (1)..( 3000): cDNA_ID_2990855_gDNA_ID_1972022_Annot_ID_178107 3000 nt of promoter + ATG
tcctgtagaaaatctgtggacaagaaaattaaagaagaaatgaaatcatcagattcactatacataactctagagaaagaatgtaatgaatatactacaacatgtattgtgtacatatagggttcactggtcttgacgttttcagcattttaaagaataaaacataaacacatgcatacaatgcagtgcttggttctgaagttttaggttactgaccaagttcctgggaaattgactttacgaattcataaactagccaatcaaatctgtattctggaaatatctgcgaagtggaagagaaaaaagaactctaagaaacaatagacggctgcatataatatgcagcctataactatatgaatcagagatgcacaaacagttcatgtaattgcatcattgatctcaactaacactccacagcaacacaggcttaggtcacaatcaccggcaaaactaatgaaattagaaagaagtaaaacaatgaagtcctcataatctaacaatgcatttcgcaaggcagcataaactactgcagcacactggaaatattatccgcaccagcagttccctgccagtacttttaataaaagacgaaactccaaatttaaagcctcaaatatttaatcaaaaaatcatatttccatcaaattcctagatcagttagatatatgatgtcacacgtctgtttcttcgtttcatattttatgaacagcttgtaagaaaacatattttgtttcaatctaacttcatgttctggtacagatataaagcaacaagaaaatgcaggcacctttgcgactgattttgaaaggaatgacattatcattgtatctaacatcatgttctgcttcaatccagggtattgcacctattttaacaccaaaaatgaaaacttggtgattcttgaagttgttgcagaaagaacataggaaattaaaacagttattgttatgaggagttaacctttactgctacttcctggtggttcttcaatacagcatgatgtacttgagcaatagatgctgccgcaattggttcctcatcaaaagataaatatctgacattttaactaatagcaatgtcaaaacctcttccaaaaacagacgtcaaaaaacaaatctgacatttaactctaaaagacttacatctctgtgagattttgacccaagttacttgtcagaacttgctttatttcttgaaagttacaaggaactgcctacaagataaacaaattaggaatagaacaaacaatccgaaaatgtttacagactcaactataacagtattcttaccttgtcctgcaacgaggaaagagccaacgagtactctttcggaacgagcttcaacgtagccacaaactgaccagctttcacatagaaacctttattactttcacacagtttaagaattcgtttagcagaccgtgaatgaacctacacaatcaaaacgaccaaatgttaccatatcacatagtactagtgaagtatactgcaaactttaaacaagcaatcgtatcactactctaataacttgccttcaccaatgacgaataagccgattagaatgtaattcaaactacaagaaaatcggcctaatgccattgataactacaattccatgaaaccaaaacttaaacacgaatgtaagatatgtaattgtacacctctgttaatctctgaagatactcatcggaatctgctggtaatctacgcaaagtatacttgtaatcagcgacagtgagagtgatctacaagtagagaataagagattcaatgaatgaattggaatgaggaaatggtgaaatcaatagagagataaggaagatacgaacggagtagatagcgcgagaagaacggacgacgccttctacagccgtcgctattttattggaaggtgagtctcggaagatggacacggcggtggcgctgccagtgacggcggttagagctaggccggcggtgactgtgaaagcaaagatcggagacttggatctcccgagaattttgaatttgcggagaatctccatttttgtggattctttgggtttcgtattatttttttcgtagtaacgaagaagaggacggagaagctacacattttctaacttacttgcaagtcgggtcggatcggattgatggacaatctaatgggccaggatccggttagactaatcgatgtgattttaatgggctaagtaagctgggcttggcaaatagccaaatataaaaggttaatttagtcaaaaaaatctctcaatttaaaattaactgacgtaaatcccccttcagtatcaatactgtaaaaattggatagacacagtaaaacgcagtgttttacagaatctcttttaatcgatttgacatcacacaaacttcagagaatctcattttgataaattaaagttttttttccactttgtgaattttaaagcctaggtaaattagtgcatatatgtaatttaagtgtacatactgtatctctctgcaacgaatacaaccttcttttttacccactaccacctgttttcgctaggcttgctggactcaaataatgtatttttatacggcaaaattattcattaaatttcaactttacgttatatacaacattttttacaaaaaattactaacatatatggaacctcaaacctcttaatgtagaaatattaataaatttttatttaaccattggactaaggagcttccacaatctactctaatctaataaagtgtatatctcatgggtatcaattttttttttcaataggtaagaaatcaaatcgttctacatatctttacgatcttgtgatattttacgagcgaatatcgtcgacataatataaaactcacaaaaaataaaataataatgatactccatataaaggaaaaagacagcaaatatgtagggtcaatataaacgcagcctcgtcgtctcttcatatattcgtctctttgtgttcttcttcctcctcagattctctttcactaaacagaaacaaag

SEQ ID NO: 9213 - DNA, 3000 bp, Unknown
  misc_feature (1)..( 3000): cDNA_ID_3040641_gDNA_ID_1972022_Annot_ID_178103 3000 nt of promoter + ATG
caacaatatttcaatgtagacgtaactgtcaaccactttgaaatgtaagtaacaggtgtcagtgagaatattgtgtcgcaaatgtcaaataaatgaatacgtaatagttaaagattcatttgatcggggcttactagtttagtaggacccttacaataaattagataaaatcatttatgtgaccgctaaaaattatacgtgggagaggattttttttgtataaagatgggcaaaagtagggtatgcattgttcatatagtgttccctttagactaagaaacatacacacaagtcacaaggccatgttctttgttaggtgttatattatccgaggatgtgaaaatacgagatgtcgggatttataattcccctaatgaatccaaaactttatgtatagtttactgttcggagtttattgaatgtcgtatttatctaattttctgaaccaattcttaacgaatccaaacgtataccttataaccaatacggtccacatgtcgtttaggttactacattattagaacgtaacttacacaaagaaaatcgaaaacaaaaaagaaacttgcatgattacgaagttggcagtgaattcttgtggttagcgtaatagcgtgatccaccatgccccctactttgagcatgatggatcacattaaaccgacgctgaaagaaatttaacggctaagccgacgtcgaaggaaattatggaccatgcgtcaaaatttgtttgggagcataatcacaaaaagaaaaggagaatcgtaagaattctgaccgaaaaatattttaagggggtcactccatgaaattcaaagattttgaattctttctccaagaacaaaccgggaaaaactcgaatctatctaccaattaaaccaaaacactatcgacaattgcaatatatgcccatatttgggattttattttacatatcagcaaccaaaaataggggttctgcacaaaatgcaacttagttttttgttaatggacacccattccccaaatcctcttttttggaagactttttatggacccattgcccaaatgttctcggatgcaaacagatctttaccataacttagaaggctttcctactaatatccaacatatcctttttgcttacgagatatatggagtgggccacttgtttgggctcaaaatatatatagagtaaaaccaataaggctatgtgtgagatgattgaagaaatagcttactagtggcccactccatatatggggttttaagctttgtagttagtacaacataaacaaattgtacaaaatcatgtatgcagtatgaaaagataataaaacgttcgtcatatctcttagaagctctctttcaagatatctcggaacatataaagcttgaacatattctctataaatatgttagggcctatctacaacctaactttgtttatcacttgccatttacccggaagcaatgtcaacaatttctacctcataagttttcggagagtatccagagtctgttagtatttgtttgttgttctattgtttcaaactggtggtgtagacgtgtagtgagtgataataaacacaagaagtttgttatcaaaattcaggaaccatatatttttctatttgtttttcaaaggcaaagaattgtattcaaaggccaagaattgaattgaaactcgaaacgtccacatcgaaatggtttggataaactgctaaatgttttaaatgactgtttccctcttgaagagtcttttctttgctagccgtagaaaataatccatctgattcggggccaaggacgacacccccggactcctaaattcattttttttttttaaattttttttttttttggaagttaagaatgaaaaacatatccccacgtcaaagctcatctatattctgaaactattagagatatcatacgtgttaaattaagagcgattttaaagaaaacattagttctgaatgaagacgtgtgttcaatggatgaaatgcgattcagttcaaaataataacaatatatatatatatatatatttatttatttatagatattcatatatatatataagaaaatatatagatatggtcatatggatatggttgtggacttgtgatgcgacaaaaaaaaattgaacaaagtggatctggttaggtggccagcatcttttacggaagggaaaagttggatatattacaatatttttggtggaccatgagcaaccccaccacaaagtgcatgtgaagtgaccacttttctgcgagctgatccaactaatcaataatggtaacaaatacaaaaaataaacgctctaattttatttcagtcaaatgtttttaataattttccatgtccgaaaactttaaaatcttttattattactaagttaagaaaattgcaaatgtaagaattatttgtttctaaatagataatattaataccaaattgatattccaaaacatattattttcttgtttgatttgattgataatctattaactgataaacaacaatgatagaaatatgttctctaattcttcttctctagcattcaaaaattcacatccaacaaaaccataaattttgtaattttagatacaattttacactaaaaattaataattgtaaagcttgtaattatattcccaaactttattctataaattaaaacttagcattcatattgttgaatatgacttttgaattttgttagtgggacccttttatacaataagtggcggctacaacgaaaaatcaaagtagggaccaaaatgatacaaatcgtaataacggggtcaaaataacataatccaaacttttaaatagcataaatacaacaactctcaagacctgtacaagctatttcacctacttcatcactcatcaccagcttcgcatcttcttctccggcttgatcttctctcgtttctagatctccgacgatcggaatatcaaatccgatcgattaattctgtcaatcacacaaaaaccgaaaaccaaaaaaaaacc

SEQ ID NO: 9214 - DNA, 3000 bp, Unknown
  misc_feature (1)..( 3000): cDNA_ID_3040602_gDNA_ID_1972022_Annot_ID_178100 3000 nt of promoter + ATG
acatcaaaagaggaggttcatgtccgtaaaaagataaatccgcgaatcaacggagtaagctcaacagttcttggacaatggagaaaattcgcgcatgttattggcttcattcctatgcttctattgatgcgttgtgttcatcgaggtaactctaacaaaaacagaggcagtgaaggttactcgaggcagcctacgagaggagattgtaacaatcggggaacaatactcatgatggaaaatgctgtcgtgagaagaaaaatttggaagaagaagaaagagaaaaatatggttgacgaacaaggttttcggtttcaagatagtttcgtattgaagaagttggggctttctcttgctatcatcttagctgtttctaccataagtcttatttgaatactgaggttcaatatatcatatatggcttttcacttttctattgtactcccatttgcctaggtcgtatttactctcatttgctttttccatttctctaaagtcgtctaaacaaaactagatttggttattttctgtttatgtattaagtgatatgatctctccgcgggttgaacgatcagtcttctgtctggtttttattattattattatgtttgcatgcacgtaagacggtaagagcagattatacgaacattaacaatttagccatcttgtatttcagtattttagtcactatagatatgtgagtaagtttatagtcattttcataataacttgtttattataacgattgctgttccatgttttgcaatgtatagatcatcaaaaattactatcgagctattttgttcttgaatcttgacagataatatttaagaataacctatacggttcaaactgtcggtttcaatattaaaacaaatgtgaatggaagatagagagaggaaaaaaacctctcttacaaaagaatctaggtgcgtcagagaagctcgccaatctcatggagccaagatttgctttcctggctcttaatagtttgtatggatcggcgattgaaacttcattattctctcccaaacaaaacatagaataaacgaatgtgtctaacgctgagtgaagaggactagacggacttgccccgtcataatatgcatattacgatacgttgcaacattaacaatgtcgtgagtatgcatatctcataacataccaaatatcgatacgtttcaacattgaatttttaatatcttagtcattagcaattaataattaaatcttcttttatatgaacaaatttatgatttacaaaaaaaatagatgttatgtttccatggatcatgttttcaagcttgaccgaaaacaagctgctaaaaagtgtcataaaagtttggtactagtacaactaggattttgtaactctagcacaagaaccagttcaaaagatgattatgcatactggatttttatagatattgttgattcttgcatggcaatcaaagagtttggcagctaggtatacctttaggggtgatgtcgacacctctcatctagccttacttgctgaagtataactacaattgaatctcactccccctaccagaaactgtttccttcctcatcttcattaggatcagatcggatcacaacaacaaacttcgtcgaactcaaccacgatggacagtggtggctgaggttcgttgcctgttttagggttgaagattgagatgcgttaagtgacttgtgagactttaagtaacacacaacgacataatttagggtacttgggccttaatgggctggattggagtgttacaatatacaaagttcatcggaagtttaggtttattttaaaagatgttcaatgtggatcctaatttcatgcgttttaaaatactttaaacataaatcccaaccaaaaacaaaaaactcccaatatcctttgaaatttacaaagttctttgaaagtttaggttatttaaaacattgttccgttgaaatatggatccattaattttcatgcgtcttggtaagatgtatcatattatggatatggctttgagcctttgactttattcctactttaaagttacaacttaaatcccatttaaccaaaaaaaaagaaaacaagaactcccatatcctttgaaattcaagaaaaattaatgatacagttggtatatatcattaacaataattacaacaccctaaaatgattataatttgcgttatcttttacgatctcaaatcttggagtcgagattgtggtaatggggattgggatgcacgtggtgatacgtaatgggtgtagacagaaaatcacaagaaagcgaaagtggtaactattgaaacacaaagtgacaaatcaaataatagtcgcgtgctttcttcacgggtcacctcctctattgttctcacaatcaatcaaaacctcactttccaaatattttttatatttttctaattttttttttggttgtggtaagaaattatttcattgtgttataaacagcattgagatcgatttttaaatttcttaaacggaattaaccagaaatttatacatttatttgtttttcacatgcttttgcaaccttgacacaagtttcaatctgtttgaacttccatctataggaattggagagacatagggataatgaatcaattgtccgtataaacactatactaaaatgaatacaaaagggtattcacatgtatgaagaatgtgaaatagtggttgcatatacatttacacttgagtgaggatgtccagtgaggcaaatattccatctgaattccacaattattcttaaatcaaactaaaaacaaaaagtacattccaacagaattctagcatatagaaaaagtttatttatttttgccaacaacaataataaaatatttctccctatcactctccactctatctctctccctctatggaaaacccacagatatttgtcttgtgaattcaagaagagccaatctaaattcaaaaagggttaattgtgattttgtcttctttcttcatcaccattaacagtgataatg

SEQ ID NO: 9215 - DNA, 3000 bp, Unknown
  misc_feature (1)..( 3000): cDNA_ID_3040610_gDNA_ID_1972022_Annot_ID_178097 3000 nt of promoter + ATG
tttcctaaaagggcttcattcgaggagttagactacgagtgtctcatccagaggggagagcctacgccctcgatggtggcacgcatgttccgtattcaagacgagcatgatccaatctccttaaactacacatcgggtaccactgccgacccaaaaggtgttgtgattagccaccgaggagcatatttgtgcacattaagcgcgattattggttgggaaatggggacctgccctgtctacctttggactctgcctatgtttcattgcaatggatggacgtttacatggggaaccgcggcgcgtgggggtaccagtgtgtgtatgaggcacgtgactgccccggagatctataaaaacatagaaatgcataacgtgacacatatgtgttgtgttcctacggttttcaacattcttctgaaaggaaattcacttgacctgtcacctagatctggaccggtccatgtgcttaccggaggttcaccgcctcccgctgctcttgtcaagaaagttcaacggttggggtttcaagtgatgcatgcctatgggcagaccgaggccactggtccaattttgttttgtgagtggcaagatgagtggaataggtaataatcatttgtactatttattctcatgtatacggtataagtttccctttgcgttatcgtttaccaaaatttaaaaggtcttattactcaattgaaacagattaccagagaatcaacagatggaattaaaagccaggcaagggataagcatcttaggcctagctgacgttgacgtgaaaaacaaggaaacgcaaaagagtgctccgcgcgatggaaagacaatgggagaaatcctcattaaaggaagtagcataatgaaagggtatctaaaaaatcccaaagctacatttgaggcatttaaacacggatggctcaacacaggagatgtaggtgtgattcaccctgatgggcacgtcgagatcaaagatcggtcaaaagacataatcatatcgggaggcgaaaacattagtagtgttgaggtcgagaatgttctttataagtacccaaaagtccttgagactgcagttgtggccatgcctcaccctacgtggggtgaaaccccgtgtgcgtttgttgttctagaaaagagtgagactactattaaagaagatcgtgttgataaatttcagaccagagagagaaatctgattgagtattgccgtgaaaatctgccacattttatgtgtccgagaaaagtggtgtttttggaagaactgcccaaaaacgggaatggaaagatccttaagcctaagctaagagacattgctaaaggtttggttgttgaggatgagatcaatgttatagctaaagaagttaaacggccggttggacattttatttcgcggctttgatttatacttctccgacttatatatttgtatgtatggttgtcgattgaagcacttcattgagggtccttaagagagtcattcaataattataaaataagaaacaaccatagataatacttcatccgttttctattacttgcccttctattttttttatatataagtaaataataagcttaatatatagggattgtttaagggctatattaatacatatgtctcaaaaacttgaaaattagatatttacaatagatagttaaatattaggtaagcatgaaagagaaaaaattaaagccataattatcctttttattttgttttatttaccaaaatgtcattatctcaaaacactatttattaccagatactgtatgtatgatattgttcatcaattgtttgacgatactattcatccgaaatttacaacactatttatcattagattgcataaaacatttatgatttatgtggataactatttaattaacatgttaactagtatagtattgtgctaaatacagataactattttataaacatattaactaatatgtatcacgataaatttatatatatcgtattaaacaatttaccatatcatacaaagtaatatgaaataatcaatttaaaattataataacatattatactgaatataacgtgctaacatattaaatatctgaataatatttctataaatatggtaaaatagttgatatatagtaaaattataagaataattgatacatggcatatatggtaaattaaacaaagtaagaaggacaataatggctttaatttttttctctttcatactaacctaatattgaattatcaatgcatatccattaatattttccattgtttaactgataaaatttatcataaatctgcattataaataaaaaacgagaagaaatatacaaaaaaattgggtgtgtttttttttttcttctcttggcttattccacgtttcatgctttcttttcccctcattttcatcgaagttcttttttttattatgtatttgttcaaatatgtatatttaatttaattttcaactaaaagttaaacatatgagataagcatgttagataggatttttatataccaataaagacacttaaaatgatcataaatggtgtcttaattattgtacatgtttaatagcttcatgtcccaatattatatacctaggcagattcagtagatataaatgtccactaagccaccctactcttaacatgtggagtaatcgctttttcttgtttggcatgataattttataattaaaaaaaaaactaattttaaatattttgttttcgcttttttaaatataccatccattcttctaaaggtggttcctctaacatcatcttttgattatagactcaaaaggaaagtgggatcgtgatatgttttctatgacagattccaaaactttaggcatggccagcttgcaattcatttattattcttcgaaaattacttttatattgcataatagcaattatattttgaggcctctcacaatcttctatatatatatatatatataatgattatgcatgtccctattccctcacatatacacatacaagatg

SEQ ID NO: 9216 - DNA, 3000 bp, Unknown
  misc_feature (1)..( 3000): cDNA_ID_2181198_gDNA_ID_1972022_Annot_ID_178099 3000 nt of promoter + ATG
ttctgaaactgtgtgaggcaggggaagtagttaagcttgacaaaggtgaacaactatctcaattcgcggcgcatttcatcagcgatactgatcaacctcagacttgcaattttgcaaacttttttccacttagtgaaggaacacctcttcaggtgccaattattatctttgcatagttctaaacctaaccaaaattgataaccattacacattttgatatgaggttgtgctggttttgtaatcttgaataagcgagcggagtggatcaaattccttggagcgtttacaaatcttgaaactaaagccaatcaagtctatgactcggttagtgactatttgtgattctcttagcaaaatctgcctacatggtctattcttgctgtttataaagtatgttatggaaactttaaggttaaagcaagctatacttgcttgtctcaaatggctgccaacaagacaaaatccttcaagccgattgtagcctggatgggatatgatcaaaatgtaagaaaactttcttcttcttcttttttgtcaagggttgtctctagctattttaactgttttgtttcttaaaatacgaagataaatgtctgtttatggtttcaaactcataacgcataattgttttttcaagggaggcatgtggagttttactaaggaatcacacaagctaaaggtacgcatttcaatatttgacactttcaattattcccttaaatgcttgggaaaagctttggaactgaacatgacaaacccatacacaacagtttgtagaagatgctggtggtgaaaatatcgacaagtctattaacaaggtctcttacaatgtctctgatcctgatgatttggaagcactccatgccattttatgtgtaagctggtcatacttgttttgctttcatctttttgatgaccaaaaacaaacttcttttgcttagcctctacaattcgattgttcagactgtggatgctgtgatcgatgaaacgctatcatctgaccctcaaaactacacacagacaacgttcttggcgaacataaacgtggatgataactcttgttttgcgtttcttgctaatcaaagcatctggagatatgacaaaagggtcagaaacagaacaactcttggtaagaaagttataagacattgttttttttttttctgttgatttgagctaaaaaccagtgtcttggaaattgtgaatgagtagactggtatgacggagcaatctcgcaaccaaatcttgtactggctgacattgttgaagccttgtttccaacgggaaactatacaacttcgtacttcagaaacattgctaaggtaacaaagtctaatcaactctatactttgacattctaaaattttaaagctcgtcatttttatttttttaatcaactctattcaccccgtttggttgtccaaacactccaaaccactcgtatcatttttcgtctattataagttgcataattttgaccacataactacacatggcagggtgaaggagtcataaacattagtccggatatgtgtgatagagacgcatcattgccgttagttccttcaattccagcttgtggatgatttttctatactttcacagctcaccaagtattccccaacaaacgtcgaatgtaatatttgacaatgatagttgttagagattttgatttttgtccaagataactacgaataatgaattagaaaaaaatgattagactattatgacaatgatatattatgtattatatatataatttgaacgtgaaaataaggtctcgaacacctctttgacgacctcaaatgtggaaaaagcttgaatgagttcaatacgaaatttgagttgaaaggtgattctacaccggaaaatcttttttggttgaaactcaacttcatactatactgtccaaatttcaataaatttgcatggtaagtaagtttacatcccagcagatgatcttttagatgcttttgcatgataatcatatatcattattttgcttacttgcatccaaatgacaaccaaataagataaaaaaaatacccaaaacacaaaagaatgataagaaaagaaaaaactaaagaaacaaaaagctgaaataaaagttataagaaggtaaaaacgaatcatcatcagtcaccatctggatttaaattgacgaaaaaaataatttagctctgttggatttattgagtaaatgaagagggatacaaacagtatggatcaaccttgtcggtcagtagctgagataaatcgtggttcgtggaaatcactcaattccaaatttttttgaaacctgaccacaaaaaaatgttgagaaggaaaaggacccttgcaataatttcctttcaataattgcaagcgacagattatttttatttccaaaattagccgcgttttacatttaggggtgttcctatttaataaattttcatgactttaataaaatcatagaaaaatgaatgaatgaatggttttaaactatcttgtaaattttctcaaacaatttttttattttgatgatatttttcattattttattttgtgaagaaaagtatataaagttataaaccaataacacaataatttaatttattaacaatcataaattctttttgttttaattgaataacaaaaaaagttttgttaactttataaaagaagaaatccaataacttaagattttagattattttttacaaatattaaactaatatcaccaaactttaccaaaattttaaaaaatcttgattaaataacaacaaattctacataacatttaagtcattaaaactttatttaaatcacacaccaataattaagtgacaaattatttttcttactttttagttttagccacgttttacatatagttcttaaaatatgacttgttgattctcattatttttctatatatacattatatctttgtgtatcccttttcccacacataaacgttcattaaacacaaagaataaccagacgaagaagaagatg

SEQ ID NO: 9217 - DNA, 3000 bp, Unknown
  misc_feature (1)..( 3000): cDNA_ID_3040606_gDNA_ID_1972022_Annot_ID_178098 3000 nt of promoter + ATG
ctgcggcccgtgggggtactagtgtgtgtatgaggcatgtgactgccccggagatctataaaaacatagaaatgcataacgtgacgcatatgtgttgtgttcctacggtttttaacattcttctgaaaggaaattcacttgacctgtcacataggtctgggccggtccatgttcttaccggaggttcaccgcctcccgctgctcttgtcaagaaagttcagcggttggggtttcaagtgatgcatgcctatggtttgaccgaggccactggtccggttctgttttgtgagtggcaagatgagtggaacaggtaatcatcatttgtactatttattcttatgtatacagtattaggtttcacttatcattatcatttaccaaaatttaaaagttctttaatttattgatattattaagattaatatgtcactcttattactcaattgaaacagattacctgagaatcaacagatggagttaaaagcaaggcaagggctaagcatcttaggcctaactgaagttgacgtgagaaacaaggaaactcaagagagtgttccgcgagatgggaagacgatgggagaaatcgttatgaaaggaagcagcataatgaaaggctatctgaagaatcccaaagctacatatgaagcatttaaacacggatggctcaactcaggagacgtaggtgtgattcatcctgatggacacgtagagatcaaagatcggtccaaagacataatcatatctggaggcgaaaacattagtagtgttgaagtcgagaatattatttataagtacccaaaagtgcttgagactgccgtcgtggccatgcctcaccctacatggggagaaaccccatgtgcatttgttgttctagaaaagggtgagactaataatgaagatcgtgaagataaacttgtgaccaaagagagagatttgattgagtattgccgtgaaaatcttccacattttatgtgtccgagaaaagtggtgtttttggatgaattgcccaaaaacgggaatggaaagatccttaagcctaagctaagagacattgctaaaggtttggttgctgaggatgaggtcaatgttagatctaaagttcaacggccggttgaacactttacttcgcggctttgagattatacatctccgacttataaatatgtatgtatggttgtctattaaagcaccttagcttcattgaaggtcttaagagagtctctcaacaattatgtatggttgtctatatatatagtaatgataaaattgtgattctccattgatggacagtcaaaacattgaccaaagtaatcaattatgtacgtagttattaaaatgacatttaaaatttaaaatttcttaccattttttatcacccacacatttaaacaaaaacaatattctccaattcataattctagcacgggaaacattgaacatattattaggcaatgagagattttgatctcgtccaagattaccgaggaattaattatgcatggcaattctgagttgtgactaccatgttttttttattagtcttcttttatttacattaatcatgtgactacaaagttgccgtttatccagttctaaaagggagtgaaaatgaacttaatcaaataccaatataagccacgcaattcttgaatcttttcgaagttcatgaagacgagattgtatctgaaatccttacctgcgaaccaactggatgtggatcataatagatttcaggttattttaaaatttcattttggttaaccgatcagtttggatgaatccaaaattgaagtggatatggaaactggatgagaaggtagttacctaaaagttaggtttagaccgagtcgacttgaaatgagccggttcagatattgtagttctacttagatcgaccaatcatttttaatgcaaaacacaaactcttcagaataattgacaagtgcaagggaccggttgatgtccacttgacctttcgagttatttatcactttttcagaagtcaagtggacatcgcccggcctctttagctcgtcgattcttctcgatagtttgtgtatttgcattaaaatgatcggttgatcagtggaaatagtttatattcatcaccttttgggtcagtctttaagacgtttagtcagtcacctcatttcttctacaattatcgttgcactttatctacgcatcagaatatcataagttcattacttttgtctttaccttttgatctgccggttgatattagttgaaacaccggaaaatcttttttggtaggaaattaaacatcactggctagttgaaactcaacctcgtactatagctatccaaacttcaataaattttaatggtaggaaatttacatcccacattatgttttagacgcttttgtatgatcctatatcattattttcttcacttgcatccaaatgaaaaccttacaagataataatgctcaaaacacaaaagaatgatacacaaagaacaagggggggggggggggggggggggggttggtggggagtcgaaacaaaaggttgtaagaacatcagtcacatctggatttaaatttgacggagaaaaagaatttatttcttaatgatttatgagtaaataatgatggatacaaatgtatggatcaaccttgtcggtgagtaacagagataaaacgtgttcgtccaattctgttgaaacctgaccacataaaaatgttgataaacgtaaacgcctatttatgtagaattaaaattgagagattttttgttaaaaaaagtaaaggaagaggaccgttgctataatttccttttaagtaattgccataattgagcgacggattattttgaattcccaattttagccattttttacatctacttccgaaaaatatatgacttgtttattctcattaattttctttatatactatatcgttgcacatcccttttctctcacatcaacattcatttaacacattacacaaagtagaagaagaagaagaagatg

SEQ ID NO: 9218 - DNA, 3 bp, Unknown
  misc_feature (1)..( 3): cDNA_ID_4305304_gDNA_ID_1972023_Annot_ID_178121 3000 nt of promoter + ATG
gaa

SEQ ID NO: 9219 - DNA, 3000 bp, Unknown
  misc_feature (1)..( 3000): cDNA_ID_2181300_gDNA_ID_1972023_Annot_ID_178136 3000 nt of promoter + ATG
atggaccgcaatgacttgtaatctgattctaggattcaatatcggagttattccataccctgagcaatcatcaagttcatgttactttatatcagctggactgatcaagttcatgttatcttcaaatcagttgtatttatatatacacaccttttcatcagagctaactgtcatcttctgtgaaacaatcacttgttcttccctgtttttgtaagtattacctacaacccatgattacgacagataaaaaatctgaggagttaatgacatcagagcaaatcaaagcaagattgaaaatatgatcccaccaccatcactttcagcagacgaattaaactccccatccttgaagagaatgagccttggccccttcaagccttctccatcctcctaaatcacagagagaaaaaacttcaacaaaacgcatggtcaaaaggttttaaggagatgacctagaggaacctgtaacttccaacttacatgttcaatagcgctaagtctaaggtcatttgtcgtgaatctctgcagaataatggtagcatgtcaacaacagtgtattgctcgagaaatataaagcataaagagaatgataaaacaagactgagatctgaaaacttggcacaaaatcaacagcatgctgaaaacagatgaatccagagattgaagactaaggaacacatacaattttggataactcttcaataaattctctacgacctgcaagaagacaatcggcaatggaaaatcaaaacaaatgtcagatgaaaaaatcccaagaccaagacaacttctaacaaaagcaagcgaatttcatgtgaatcaatctaaaatcaaagcaatcaagcatttccacacgatcgtcaagtacaatgaaatgaaaataagaaggagaggagacgaaactgaccaacgggagtgatgctcttaagccgattcgatacgaaaataagcggagcgaatacagatatcgatagcagagcgaggatcaaaatcctctgccatcgacgaatttgtttcatgaatctacaaataaaaaaaaatccccaaatctatcttcctcgatgactattcttatcacatcaaaccctgaatcgttctccaggaagaagtagcaagagactcacaaatctcggagatatcctgcttgatcaacaagcaaaagaacgaaacgtgaagaacttagggtttctgggattgcttttctctagtgggagattctattcctcgcttgaatttctggatttggggtcggagagaggagttttagattcagagcttcttcatgcatcatcgggggattgtgctcacttatatatatttaattaacagaaataatcattgtttaatttgtgttaggtctctataaaattaaattaatgttattggtcgaacgaattaatttgtttataactttatagtatatagttttttgggtgttcgtgttgacatgtcaaatgttattagggtgaaaggaagcagtgatgcggatcaggtgcgggcaggtgtacatgtgaagacatgtgattatgccgttgatgaagctgtaagtaatttaatgtgatcagtcttctttgcaaattttatcaatcaccagtcagacgaagacacgtggataaagtttttcctccctcctcttagaagacaagaaaggaacttcagtctcatatcaatggatgattagcctattattatgaaaaagatatctagcatgtcggccaaaaaaaattatggcataaatagaattgtaacgaaaaatgacttttgccgattctgttcattatttttcaacaaaaatgttaactggttaacgaaaaatgtttaactaagtcaaatgggtgttaacgttgactatggatgcttttttttttttgagccaagtaagattacattttgggttttttctttatttaatgaagttgttggcaatttgcttaattcgctattggaacgacgggtcttttcatttattatgtgtaaaatggtggaggtagattatggagtacataacactcggtttaataaatcatgacagtatcatataaagatacttaatatgcgcaaagctttgaatgatcaaaatcgctagctagtgtatcatcaaattgttgccgaaaatcttaactttgacgtcggttaaaacactaatcagcataggacacataaaactacatacgtacatatgaaaatttctctgtttttcctaatcaccattcatctgtatgctactaaaaatcgaggtgtcaatattgaaagtttgaaaccttattagccttcatgcttcgattagcgaatgggtacataagccttctacaggccctttggaacaaaacctcttatctgatgttatctcgtaccccattatacgaatgacgaatcgttacatttggtcgttgattcgaatgttccatattcattgattaatgtaaacgaaatccattattatagttatacaaatcatttttaccatcatctgattataatatgaagagttcaccatcatttacttttcaaaatattaggatagcaaataacaatttctcacccaaaaagttgaaaagaaatttatgtcgttcaactttttttttttacaaaactcttctttcctaattagattaaccaaaataaagaatgtttgacctagttttcctaattaaagtaacacaaagattttgacccaaaaaaaaacgtctttgagcgctcgttttcttgtcgacgagagagctcttaagacagaacacaaagataaaaagagaaacccttgttccaataaaataaaaagaagtgacacatcgcgtctcttaaattttaatagacgacgacggccacttcttgtccgaatcgtacgtcaattcttcttccatctctctcgcaccataacatttattcttcagatcaccagcgaccgagcgaaagaaacgacacttcttcgccgttttcgtccacatgcagttttggggatagcacgttgtgagtgattaagcccaacagataaagagaaag

SEQ ID NO: 9220 - DNA, 3000 bp, Unknown
  misc_feature (1)..( 3000): cDNA_ID_2181294_gDNA_ID_1972023_Annot_ID_178134 3000 nt of promoter + ATG
gggtatggaataactccgatattgaatcctagaatcagattacaagtcattgcggtccatgttgattagtttatctaaggaatagaaaagccaagtttcactttccatcaaattattagatgtttcatgattacaatttattgggttttttttgtgtcagggtcaaattctaccaacagtcaaccaacttgctaataaaacggatttcaagccccctttatctaagggtgaaaagaacacaagggttcagcccgacagagcaacagatgtgaaaacgaaggagatcagagacaaaattattcaagctaaagcctacctgaatttcgctccacctggaagtaactctcaagttgtgaaggagttgagaggtcggctgaaagagctggaacggtctgttggtgatgcaacaaaggacaaggacttatcaaaggggtaagcacaactgcttgattcaaaaggagaacataccataattgcattcagaaatttgctgttacaactacaaccttttagtgccaaaagtcgtgctgtttaagaatattattttagtaacctctgacatgattgtttctttcagcgctctccgcagggtgaagcccatggaaaatgtgttatataaggctagtcgtgtctttaacaattgccctgccatcgctaccaaactccgtgccatgaattataacacagaagaacaagttcaggcgcagaaaaatcaagcagcgtatctaatgcagcttgcagcaaggaccaccccaaaagggcttcactgtctctcaatgcggctgacatcagaatacttttcactggatcctgaaaaaaggcagatgcctaaccagcaaaattattttgacgctaatttcaatcattatgttgtcttctctgacaatgttttggcttcttcagtcgttgttaactctacgatatcttcatcaaaggtatcatgcatttcttatacaaatttctacttggttatcattatatgttatacctaattttagagtgtcttacactatatcttctcatttacttccgccacttattaatgtggcttctgattgctgtttgcaggagccagaaagaatagtcttccatgtcgtgactgattcacttaattacccagcaatctcaatgtggtttctgctaaacattcaaagtaaagctactatccaaatcctaaacattgatgatatggatgtcctgcctagagattatgatcaattactgatgaagcaaaactctaatgacccaagattcatttctacactcaatcacgcacgcttctatctcccggatatattcccgggtttgaacaagatggtactcttggaccatgatgtagttgttcaaagagatttaagtagactgtggagcattgatatgaaaggaaaggtggttggagctgtagagacttgtcttgaaggtgaatcttcatttcgatcaatgagcacatttattaatttctcagacacatgggtcgctgggaaatttagtcctagagcttgcacatgggctttcgggatgaatctaattgatctcgaagaatggagaatacggaagttgacttctacatacataaaatacttcaacctggtacgctatatacacacacacactctactgcacttgctctccctatggaaataacactgtagccatattcaaagttttcaaatgggttcttagatttgttgattcgtcattatatatgaaaaagattgtaataattattaggttttaggttggctatatcgaggatgaaaggttttgaatttagaacacaaataacattgctgtaactagcaaagaacataagcaagctagtgctaaagatcatctcctagaagaagaatggttacaagcaacaacatatcttgtctatgtaatgggcgtaaacctaacaatggttttggggaatttgtttttttggcagggaacaaagagaccattgtggaaagctgggagcttaccaataggttggttgactttctataggcaaacattagcattggacaagagatggcatgtgatggggttaggtcgcgaatcaggagtcaaagcggttgacatcgaacaagcggcagttatacactacgatggggtcatgaagccgtggttggacattggaaaagagaattacaaacgttactggaacatacacgtcccttaccatcacacctacttgcaacagtgcaatcttcaagcttgatacgaaaaaaaaaaaaaaaaaatctggcaacttaggttcagtttcagattctttttgttaaacaagctactcaagcatgatatcaatgttatgattagcttcattctttatcccacatcagtgtatatcttggttcttcttttttcacacttttcatcagagcttaatattacttagactatagtgacaggctgacagcaacagattgttgtcataccttggacttggcccaatttccttttttggcccaccggtatgaataaaaagagtgcggttttcagttcggttcggtttataagcgtaacgatgacaaaccgatcggtttgttttaattcttgactttaataactaaaccctaaatcgttcttcttcttccgcatcttcctcactcgattagtaggttctctcttcttccaatctattcccaacttctcacttttccgtctaatcgttgtcttcatcaccatctctccgagttcccttcgagaccatcttatcttcaatggtttaggtattgcccgattttagatagttttgttctctcgtatagttatgacaatggcagatttttgtacgctctgcacatgcttaatcttgaggattgggctattattacgtactatgatttaatgaattttagatttgaattttggaacttttgatgatatgcatgttaatgaccaagaatgctccgaatttgtctgattcgttattcgaattctacttctttgattgtttgtttccaattttccatgcatctgacttgtgaattttgaacaaaattttcagaaatg

SEQ ID NO: 9221 - DNA, 3000 bp, Unknown; identical to SEQ ID NO: 5864
  misc_feature (1)..( 3000): cDNA_ID_4262256_gDNA_ID_1972023_Annot_ID_178142 3000 nt of promoter + ATG

SEQ ID NO: 9222 - DNA, 3000 bp, Unknown
  misc_feature (1)..( 3000): cDNA_ID_2181315_gDNA_ID_1972023_Annot_ID_178140 3000 nt of promoter + ATG
aagatcaccttctctttcatatctcccaaagaaaaaaatattgccaaccaatcatttacctgaaatttcttcatccactaataagattcagctgaaacaaaaaatctccatcattacccgatgttatcttctggtttacaagtctctatgcaaatccttgagagccatcaaaggtctccaaaatcacgccgccaaagaaaatatgtgtgtcaggcgagtttgtttcaaagattcaagatgaagccttcacacaacacctcccaagttcaagttctgcaagcaattcagaaaccactttttccattgagattgtttctatcagctgcttgttgctcctcccatcctttatcatcccttttgaaagaagattgattctagatgactctgaattttcagccaggagttgttcgaaaaacttctcttcatcattgagtttcgaggccttcatcagatccaccacctgatgcctttttgcaacatttctacctgctccacagcccattgcagttgctgctccaaccgcatttgcaattgttaaggtattaacaagcggcatgttgcgtatataacctaatgcaattgcagccacaaaactgtctccacatccaacagtgtcaaccacttccacctgatgatgatcatgttttcgtaaagaaaattagatcactacacaaacttacttactctatgatacatacataataattcaattttcaacaccttgatgtgaatgccgaaaatgaacgatatttatgatctgtaagcaggtaccttaaacgcaggtgccactgagacactagatttcgtcactagaattgaaccctttgggcccatctttacaatcacccatttcgttccctttccgttcctcagaatttcttgtcctgctttaacagggttcctgatgccagttagagcctccacctaagtaattcattaaagaggtcaacaataatttgacacagtagagaaattttcagcattagcgagagatgcacaatgtacctcctcagatgttagaagaagaacatcactcattcttaagaaatgagcaagtgctctacgctcatcaggagttcccttggacagactctttccccgtggtccaggatcgaagaagatagctgtcccaactttggcagcgtaatctatcgttgacataataaaactagggctgaaatcgtcaaagtcataaccattgcagaaaagaacttttgactgtctgattgccatctttacttcatcagataggtcagtgatccaactgaaagcaggttcctccttgaaatcagctcgactaaaaaaagagaaacaactagagagaataagttcctatagtagtaaacaagaatattacccatcagaaatttgtttcacaaatagacaaaagaattaggaataaaatgggacagaaattccctgagtcaacaaattcaaagaactaggcattggaggcaagtatgacaatatcacccactagcgtttgtctcaatattagaaacaagatctctaaacaagaaagccatatctttctagacatatagcattaagaacactatcagcaagaaaaatattccgatagaaaatctggtatctacacttttttgtttccaaaaaagttctatcaaatgaaaagttatatttctaggtccccatcaccatccccatcacagttcatgaatgagatgatgcattcactatatacccttagcaaccgtttccccacataaaccagctctaccatccatagatattatcaagttttggcgtggcaaaaagcagtacctgcaaaacccatgcctctgcaaaggatccacaagaacccagcaaatgagagtttcacagaatgagctggtatctttttcatttgttcctccattcaatgcaaccgtacctattccttcctcatgaagcacatcaagaagaaactcaccatagatttcatccccaacgtgaccaatagcaacacaatgaagccccaatctagcagctgctatagccatgttacagttgccacctgcttcccagtatttctataagcaaaacagggaacatatacttcactattaacatcaacagactcaacaatactttaaccttaattcaactgaaacgagaaaacaaagattcaattttctcatcaaagagattgagctaagaagttctttcgatcaatccgaactaaggcagaacaaattatacatacaatgttcgaaattatcaccattgaaacactaagaagcagttaaagtcaagatttagaacccaaaccttatctgggggagacatagagagttcgtccatgagggccttgcgttctccacgagaaggagggggcaattcgtgaacactgagaacaatgtcgacgcagagattacccaaggttgagacatctataggtttctcgaccaccgcgacatctccagtttccccgaaagaacagatggaggaggagccatcggcgtatataaccggagatacatcagcggcgctgctccggcagcggaggcaaacagagctggtcacatgagggactctagcgaatggcgggaggagaggattagggctttgggtggagaaattggagagggataacgcatagtgaggagagaaggagtgaaattttagggaaaaagcgtggtgatacattcagaaaaacccaggaaaaaagaatgaagaagaaagagagttgattttgaatctgcttcgtcgttctctctcagcttctccttcgtcttcaatcttcttgaaatgagatactttattgttcttcaccatttgaggaagaagaaggaaggctttcttgttctgtggtaaactaaaccggagtgaaattggaatatgaaattataccgaaccgggtttgatgtggttatttaaaccgccttgaaattaaaacgggaggttttataagaaagggtttttcatctttacctgatttatacttgtcgacggcggacaccaacagctttcttcatcgtttagagctcacttcaagcc

SEQ ID NO: 9223 - DNA, 3000 bp, Unknown
  misc_feature (1)..( 3000): cDNA_ID_2181311_gDNA_ID_1972023_Annot_ID_178139 3000 nt of promoter + ATG
cgtcttgaagatagctttcctcctcaaccttccaccatgaatctcagtttcctgcttcatttcactttcattacctactatatcctcctcatcatcgccagattgagactcactgtcagaaccttccggcaaagagtgatacgcatcttcagccttaagttttgtttctgaactggcactagtctttttgccaaaaaagttaatgaatgtcttatctagtttctcatcaacagaatactttgtgttctgcaacgactttaccaaatcttcaccaacatctctgccctttcctgccaaaagaaaaaatgtcacaatcagagatgctagagctacaaaaagtgagcaaaaactattgggtttctatcatggagaatgatgtaaaccaaatttaaaatatgtagaaattctttaaacatgaaatgagcaagacactcaaaagagactactgcagttacatacagaccaagcatatgacaataaaacaccataaaataacctttattagtaggttctccctttccatcgtcagttttagagtactgaacttggtgactatttatgttgatgtaaacagcatctttgtcatacacaagatctccaatcccggacataggagcatagaaaagcttatccctgtccctcagcccttttttcttgccagctgaaggtaaaggacaaggatcagttaaagcagtcaccccagctacaatgaagtcaccaactccagcaatatgaacctgataatcataagaaattatatcagatgcatgttaaacatgaaagaaaggtaaactgtaacagctaagataccattttgcacacaaaatcattccactagataaagaagcaaagaaaatttcagtacaacacagaaggtatacaaatttatgctcctcctcttagaacttcactcgatgagagaactagctacgtgtgaatacaacgggttactttaggtagttctaaatatatgtgaatcgctaagaatctatggacgaataccagtaaggaagactgtatatataacatcaaattgacatcaaatcagctcatctctaggctcaatttaaaaattggtcttttcccaaaatattgagtattttgcgccacatactgctaagcaaacaaataggtcaaggattcaggccatagaaaaaggttcagatgaaccagtatctaaggacagtgatgacataccttcatcctttttttgaagttacaaccacgtaggtaaccaaacacagtgatatttctatcgcatttcttatccatctgaactttctccggaggggtaacatcttcaaggcgatcaaccaacacataaggatgtgctgttcgccatgtcaatggctgaggcttgataacaattacaaagcgggcgaggttgtgaacttcacgcggcgtatacctaccaataaaagataaatcaaaggtgaacctcagacgctccttgcacatgtcattcatgttggtgatgcaccaattcagatacttacttcccatgaatgagaccagataaataaaacaatttagctccatgatatatttcagtccaaaaccgatgcttgagatgatgttttgtttttctcagcttcttaacatcattgaacttatcaaggtgagtgagaacacccataactctaggaaatccatgcacttgcataatattgaggaattcaaaggtttcctgagggtgaaacagattaaaagacagttcacgtgtcaaaccttagttgtttatcacaaaaaaatgtagatcacaaaaaaggcccaacagtgatcttgtatacataagaaagattcttcacaatctagatcattatggaaagaggagaaagctacagaaaaatagtgtctcaccatctcaaaaccataactcccgtctacaacaagtagggctagatcagcaacctttgcacaatccaccatcgcattgatatcattcgggcactccacaaattgaaaccttctctgtttacctaaatccatgaccagccaaaatgagagcaggagtaaattccaaccctaaaattcaagatagatgcatacacaaaaaaagaaaagaagaagaagcaataaacaaatacagcacagaaccttgtacaatggtaataggtcctcgaacctcgggtacattctgttttgtaaattccttcacaagagatttaatcacgagagactttccaacctacaggaacaatcaaaacttgtgagaaaataagcaaaaccgagagtgaaaatgcaacatcagtctcaaagacagtactcctggggggccttgaaccacgacgacgaaaggaggagcttcgccataattacgatcaattttcggaagatgaagccgcttttgctccttctccgcagcgtgatgttttgctttcttcgcatgaacaaccgatttaacaccaaacgcctgcagaaccaagtaaaatcgattgttcctataaacaccccaatcaacgaagaaactcttaaaagacattgacaaagagaggacaagtaggagtaacccaccttaaggtttttctgcttgtcaacggagattccacgcttcttcttatctagttcagatttcttcctcgcggtaggacctgatttgggagtcctgtgtgacctgtgagacggcatcagttcgtcggcggccatggcttgaagtgagctctaaacgatgaagaaagctgttggtgtccgccgtcgacaagtataaatcaggtaaagatgaaaaaccctttcttataaaacctcccgttttaatttcaaggcggtttaaataaccacatcaaacccggttcggtataatttcatattccaatttcactccggtttagtttaccacagaacaagaaagccttccttcttcttcctcaaatggtgaagaacaataaagtatctcatttcaagaagattgaagacgaaggagaagctgagagagaacgacgaagcagattcaaaatcaactctctttcttcttcattcttttttcctgggtttttctgaatg

SEQ ID NO: 9224 - DNA, 3000 bp, Unknown
  misc_feature (1)..( 3000): cDNA_ID_2181307_gDNA_ID_1972023_Annot_ID_178138 3000 nt of promoter + ATG
ttgagtctgttgatgttaatagtgaagtatatgttccctgttttgcttatagaaatactgggaagcaggtggcaactgtaacatggctatagcagctgctagattggggcttcattgtgttgctattggtcacgttggggatgaaatctatggtgagtttcttcttgatgtgcttcatgaggaaggaataggtacggttgcattgaatggaggaacaaatgaaaaagataccagctcattctgtgaaactctcatttgctgggttcttgtggatcctttgcagaggcatgggttttgcaggtactgctttttgccacgccaaaacttgataatatctatggatggtagagctggtttatgtggggaaacggttgctaagggtatatagtgaatgcatcatctcattcatgaactgtgatggggatggtgatggggacctagaaatataacttttcatttgatagaacttttttggaaacaaaaaagtgtagataccagattttctatcggaatatttttcttgctgatagtgttcttaatgctatatgtctagaaagatatggctttcttgtttagagatcttgtttctaatattgagacaaacgctagtgggtgatattgtcatacttgcctccaatgcctagttctttgaatttgttgactcagggaatttctgtcccattttattcctaattcttttgtctatttgtgaaacaaatttctgatgggtaatattcttgtttactactataggaacttattctctctagttgtttctctttttttagtcgagctgatttcaaggaggaacctgctttcagttggatcactgacctatctgatgaagtaaagatggcaatcagacagtcaaaagttcttttctgcaatggttatgactttgacgatttcagccctagttttattatgtcaacgatagattacgctgccaaagttgggacagctatcttcttcgatcctggaccacggggaaagagtctgtccaagggaactcctgatgagcgtagagcacttgctcatttcttaagaatgagtgatgttcttcttctaacatctgaggaggtacattgtgcatctctcgctaatgctgaaaatttctctactgtgtcaaattattgttgacctctttaatgaattacttaggtggaggctctaactggcatcaggaaccctgttaaagcaggacaagaaattctgaggaacggaaagggaacgaaatgggtgattgtaaagatgggcccaaagggttcaattctagtgacgaaatctagtgtctcagtggcacctgcgtttaaggtacctgcttacagatcataaatatcgttcattttcggcattcacatcaaggtgttgaaaattgaattattatgtatgtatcatagagtaagtaagtttgtgtagtgatctaattttctttacgaaaacatgatcatcatcaggtggaagtggttgacactgttggatgtggagacagttttgtggctgcaattgcattaggttatatacgcaacatgccgcttgttaataccttaacaattgcaaatgcggttggagcagcaactgcaatgggctgtggagcaggtagaaatgttgcaaaaaggcatcaggtggtggatctgatgaaggcctcgaaactcaatgatgaagagaagtttttcgaacaactcctggctgaaaattcagagtcatctagaatcaatcttctttcaaaagggatgataaaggatgggaggagcaacaagcagctgatagaaacaatctcaatggaaaaagtggtttctgaattgcttgcagaacttgaacttgggaggtgttgtgtgaaggcttcatcttgaatctttgaaacaaactcgcctgacacacatattttctttggcggcgtgattttggagacctttgatggctctcaaggatttgcatagagacttgtaaaccagaagataacatcgggtaatgatggagattttttgtttcagctgaatcttattagtggatgaagaaatttcaggtaaatgattggttggcaatatttttttctttgggagatatgaaagagaaggtgatcttacaacattagtgataaatagttcacataaagagaagtttggcactattttctgtttgtcttcatattgttaaagtcgttaagatgcgatagtttggtcgggattttgtggaagttatgttagtaccaaacttgaagatttacttcaatccgaggagttttgtgttaatttcgccaatcaccattaataatgtagaacgtatcaaaatctacaaaaacaaaattacgtcatcgtagacgcgttgaagtcattaacactaattagtaaatcatggattgggccaatgtgacctcgaataaagtaaataaatcttaggcgtttataccaatgagatgctatttccaacttaagcgacggatatgaaatgaccaacatacccttaaaacacctaacaaggttacagagttacctttttaacctgatgatatcaatcctgtcgcctcttcttctcctttgtcgagaataatatttttctccttgaaacagttaaaccctacactcaatttcttacccgccaaattccttctctttcaatgtgcgattccctttaattgtgtactcgtttctttaattgagtttcaatggatttagagtcttctcaaatttttctattgtaagtttcaaaatcctcctttttttttgtttgtttgcttttctgcaatttgcttctgttctctgtttcttatattcgaaagcattggattttgggcttgtttgtattctgctgaatgtgcttgcatgatcaagttggtaaattttcgaattgggtttgtttttgatgatgttttgtctcctccatgcattgtcttttatgttgacaggtaattttctaaaggacacagcaagaagtgagtttcaggatcttctgtaataatctgattagattctgcagtgttttcttttagttattagaatg

SEQ ID NO: 9225 - DNA, 3000 bp, Unknown
  misc_feature (1)..( 3000): cDNA_ID_3040653_gDNA_ID_1972023_Annot_ID_178137 3000 nt of promoter + ATG
gcacctacaagaaaagagttacgtaatggttctttggctgagagaactgtgaagaaggaagaatcttctggggatgagcttctggagagcacaagctcacccgacactcttaacaaattcactcagaataaaagacagtcaaagaaggtgatcactgaactactctattttctcgtaatgacttcatatttgacatgatttggttacatatttatttttgtttggtacacttcaaaagtaaatattcagtaaaaatatttgatactgttattggtctcacattcatttgagttattttgttttttgcagtcatgtaaagagtccatctccaataaagaaaacaaggatggtgatgaaccctgggattccaaaatggattggaaacctttgaactttctggttgaagtggcaaatgggacaaagcccttgaagtcttctgcttctcaagggtcaggttcaaaatctgagcacgcgaatgtatctcgcaatcaatttcaagggagtaaaaccaaaactaagaataaaaagagaaaatgtaaacgtgaggatgacaagagtaataatggtgatcctacaacatcagaaactgttactcctaaaagaatgcgtacaactcaacgcaaaaggtctgccaccactttaggcgattcaaggaatttgccacaaccagatgagtcaagtgcaaaacaggagaggagaaatggtcccgtttggttctcacttgtggcgtccaatgatcagtgagatttttgctctcatatctgaaactatttcctttcatgatctttctctctttcttcattttgtttctcttctcttggtatattgacaagggcttactggttacagggaaggaggaacttctttacctcaaattccagcaaattttttgagaataaggtaggttacagtttaggtattctttgttttatatatcctgtgttgtcgctgcatcttacatagtccctcatttttctgttatgaggaattcttttgttggggaagataatccaatgtctcattctgtgatagggatggaaatacaacagtttctttcatccaaaagtacctcatgaggaagctagatctcgagagtgaaaatgaggtaagggtctttatatgcactatggcacgagaaaggatagaacgtttgaatataatggaacttatatgtttggttgataaaaaatggacatacttatggtttatgttcagatagagataaagtgtatgggagaagcggtgatcccaacgctgacgctttacaatttagtggatctatggctccagaaaagttcaaaccaccaacggtttgctgcattggtaggttcttctgcaaaggattttacgatggttcttgtctatgctcggaagctaccagagtgcaacatgtaaaggactttaaagactcatgttgttgcagaagaagattctgtggagacagggtaatcttttcttttcggtttatggaatctctcaaagcattacaagagagaacattactagaactacaggagcagtcgaatgtgttgtgaaattagtattaatatttttttctatagacgaaatatacactcatgagtcgcttttctgtgcaagaaaatacaaaatttgtttcccttttctttcttcttcttctactatgtgtcctctctggacttgcatgtaacattgttgtcactttctaatcaaatgttgtagtttaagatgttttagattgatttatatgcatttatttgggtactacatcatttctatggaaactaaggttttcaagaattactgttcaagtgttgactgtggatgacgaatgtagtagaactgtgatgacctatatggaggtagaaaactaccaaattaactacataaaacttatctgacaaaagacgaatgaagttcattatcactattttgtgttatcgtgagtaccactatgtggtgacaaccatcatgcttaatatgagtaacatatttatataacaaattgttatgatgttcaaaaaatgttacgagtatgcaatttaacagattctttttaattcatgctttacatatagccatgatgcttaacgatatccaaaagaaaacaaaaaaaaatcattgaagagattgcacctagactagattgcctctcggatgaccttgtacatgtgttgctcttaagaaacgtaatctatgcatcataactaaaggaaagttatacatgtgttttaatatcaattaaaattggttgattacatacttaaactagtaaatcacaatctatgaataatccggactctttttaacatagacacatgacacatcaacaagtagtgtgcaacatattctagaggatggtcatcttaggtagtattcattcaaatgattttggatcaaaaagtaattgaaatcccacgtttattggttcggttcactccttgattagtcaagtttcatattaacataattttcatcgaaattctctttagcattattcgaaaaaccaaatatactgtaatactagcaagaaaaacaatagttttgacatatcttgcttcataaccgaatatctcattacaaaataatccatttttcacgtttagataatcaaacgaaccctcacagaattttctacacaatgcaaaaaacaaaaacgaatttcatcgagtatatcacgagttatggtcaaatgaatcgagtctaaaagcacaacaaatatgaccaaagcatctaatccacatccactaacttactcatcccaccatctacactccttctttctctgccgtcgataaaatttgatccaacgattaatattcaaacctgagaaaagagtagcgatccgcgtagtcattgttttaaccaatcagaagccagatatgaattgccgtctaatacacatctaactatataaatcggacgtttccaatgatcctcttcacaatcctcataatcactttcgaaattacatttacgctttcttgcaatcaaattttccgatcttaagttcagaagacg

SEQ ID NO: 9226 - DNA, 3000 bp, Unknown
  misc_feature (1)..( 3000): cDNA_ID_2181266_gDNA_ID_1972023_Annot_ID_178126 3000 nt of promoter + ATG
attctatgggtcttaaagacaaaaggctacaaaatgttacccagtttttttacaatacgtcattgttcagcagttgttggtactcgtctactcacaaaaaggtctgatgcctactccagtactccaatacctataagcaaagaatggaaaattgatggagcaattatacgtaagattaagaacaacgagagatataattatgattttaatgccgaaaagaaagtaagaagatcatcagctattaaaacaccaaccctcctaagctcaactaacccattataaagttagactaccatgatgggtgagcattgatttgtttacccatcaatttatcacatcagtggtcaaatatatagaaatcataaaatccattattcctgcatattcaatttctcccttctacagaatatgactcgttgacatagtaaaaaaccaacattgatagtattttatatgctgtattaagaagcattatacatacgctcatagttctacaggtagagtttaccttcaaagctaacttgtgtaagcaactattggcttcttagaacttggctcactatttgtgagggttcatatcattacccctcttctactctacacactttagtttcggggaactgagatgctaatgcagcagtactttattgttattctcttctaaaggtcaccagggtgacgattgtaccttatagactatgactatgtttaactcacctactcaatgacggcgctcttcacgtctcatctcaactcgaaatttatctttaatatcaccctgtgagagaatgtgtctattattagaaacaagataaaattaactccgagaaatgaataaagaacagaaagataagtgaagctgtgtacattagttctgcgcactagaactggattctcatctttgatccgtttccagtttgcaccatacctgaatcacaaaagaatgcatcaaatcaatagaaatgcatgaaagatattcatctaacatctaggagaatcttcaggtttcagtacttttcatagcctttgagtacggccagcgtttctgcagtactccaaggaagttttggccttctagcaccttctgaacatcggtttcttttcaaaggagacacgacaattcttttacgttttgatttattaatcctttcaatgtcatcgcccatttctccatctgaatcatcaatggagtcattccactaatcaaacaaacaaaaataatgtgaaaaacaaactcatctgaacaaacaagtcctatgttatacagttgcatgaaaagcacattatattaactcagctataactccgaaaccgaacatgcaaagaaatcaattcagcgagtcctacacaatactaattcccaccgagtgcagcgggctggtcagacaatatgaaataataggaaaagatcaaagaatgaatcgggatagtgctgagaaaacttagttaatctgtgtgtattgggtgggtattccatcgacctagctatttaaacacaggaagtctgaagaaaaaaacataaatgatatgatgaaacaattagaaaaagaagcaaatttacttcataagtgtgtgctgtgctacgtggctccatcaagctaggccttggtgcagcgtttgttgcagaaggattagcaacatcgttttcttgttctgtaatcgtctcattgtttaaatttgaaggtcttcctttttctaaagctttcattagctcgattttactagctctcagctttctgagcgctctgtcaacaactgcagatggaatgggattgaattgactgggtacatatacagcttttgaccctccagaagtaggtctttccagttcagtatctaagaggctctctacaacaaaaggaatgcatcagaccctttcagtatccacaaaagcacaatcacatcgtaacaaagtaaatagagatgaaagaaacaaagttgagaaagtgtagaccttggtcgtcttcttccatagcttcagacgcctgactgttctgattacccacgccctctcttgcttcaaccattgattctgtctcttcagattcttcactagattcaatctcatccgattcatccatgttgagattctctaaaacaagattgggattcaaatctaaaacaaccttcctcaaacaaaccaaagctttgtctcttgtatcttcatccatcagtgtcttacaagccttgtcgtcagtgtgggccttccataatcttcgacagcatttcaagaggtcaagagtaaccaaacaactaaccttatcgcataaaggcataatcctaccgagccatatcgttttgattgcttcggtgtaagccttttttgcatctttctcataagcgagacacttcactgtgcactccacagctactttacaatacgcttccgtgactgatttgggtactttagaaccttctttgtgtaaaatctccacaagattctctaatcgctcgagattcttctcttccacaataccatcctcaatctccatgaaaatcccttcgagtatagcttccttccactgcgagagtgccattgttgctaaatcaaccaagcaatgtttgggctttttagagaaatcagtactttctcactcgccgattccgtctctcgaattgggttacacaggaaaggtcaattaggtttgtaacacttcaaatttccaatttttcacttttcgattttcttccgattacagaggcgaaaacgaagcgatggaagaaagaaccataactttttgccgtttccatctttaaaaatagaaacgcgtgtcgttttatttactataaacggctcacattcaatatccctagggagaaaacggcaagatactcactgcttctaactttttacattttttaataaacgaaaaatcatcagaaggcatttgcggcggaatcggattcattgggtacagagaagcaagacctaagaagaggaagctgcagcagcagcagaacttgttcaccagtcgctatcttcttctcaaaacgagaaca

SEQ ID NO: 9227 - DNA, 3000 bp, Unknown
  misc_feature (1)..( 3000): cDNA_ID_3040670_gDNA_ID_1972023_Annot_ID_178130 3000 nt of promoter + ATG
tctttcctcaacgcttcgtttaaagctgtaacatcaaaaagcaaatattgaagaaatgcaccaaaatgcatacaaagaaattagcttcttttttttttgtgcttaccattacgaagctgagcttgttgttccattgcttgcaacctaagtttcagctctgtgttttcgtttgctagtccatttgtgtctctctggatcaatcaaaacaacattgaaatcaagatctgtctatgtatgtaaaacagaggaaagaactttcctattctgttgggatcaaacgaggaatcgccgaatatggaaacctggtagagagtaagctgagcagagagagtggtagcttcggtttgaagagattgaactttgcgctcaagttcttgaatgtatcgagcttttctctctttggatcgagctgcagattgtcgattcgctagaatcctgtaatcaaatccctaatttcattgcaattcttcaattctgtggaaagagaaacaaatttgaagaagaagaagaaggaccttttggcgcgtttgggatcgatgttccaaagctcagagagtttttcaggaggcatagctttcttagcgtccatgatatcaccggcatacatggcgcatccagcgtcaacggaattgctgtgacggtggcgaggacgagaggaaggaggaggaggaggattagcagcgccggaaacggagttggaggagagggaaggattttgaaagggattgggattagaggtgaggctatcgacatcgatgaaagaagagaagagatcgtcgtcggagggaaggtcgtcggaggaaggtggtgcggcggaggagaggggatccatgaacatgaacatggacatatcgtcggagcgagatcggcggtggaaggaagaagatggaatcggatcggcattaggaattggatcggaggaggggataatagtggcgccgggctttgggactggtggaggatctgatttctccatttttttaagagaatctgagagatgaatgctttggttgtgtgaataattatgattattattcgcaattgagaacaatgtcaatggagataatgatggagatgaagaagacgaagctctttctctctctctctctctctctctctctctatcaaatgaaatgaaatgaagagcgtaggagagaaactcgactctgtgaggagagagaagtgacgtcactaactataaaattgcgaaattgagttgatttattaataattaaaaagaaaactagttgatgaaaagtaaaaggcacattggcacgtgaaccatcgcagcatcttgtctccctcccttttttttttatttttttttcctttttctttgtattttatttaattattcgatttcatgatttaaatttgtttaactttaaatcttctttgtagcattcattacaagattctgtagttgcttcaacgaaatttattaatttaagctgttatggcattacatctccccacgtctgagtgtatatttttgtatctttgagtcaaaattttaacaagtaaaaaataggcagaaagccttgtatgaactgagagtctgagagaatgttttgtgggataataagttggtaacttggtatggaactatctatggattgggaaacaagtaaaattcacttatagtgaaaaatacttattggttggatctaaatcatacggaggccttaattatcaggcccatacaagaagacaagtattgttttgttttaagaaatcctcgagcatataatgcgcctgtagtggacaggaggatgttttgggccttctcttaaattggcaattgggcatcactttgtttaccggtcaaaataattaaaaagatggtcgtattgatcgctttaagtaataagttttttagttaagtctctctaaattgtcttaaacgcaagtagtggaccggcatcatttaatagtgattcaaattaaaaacctaatgatgcttacttttaccagctaaagtttcttttgtcttttttttttttgttttattattatttatcaacatacttgtgaattgtgattctccctttttttatatataaataatgaacatacttaagatatagtttctcccatttattgtcacctaacgggtattttttaaaaccaaattctgttggaaagttcttctctaaacataaataatatatagctcatgtctatgctttttaatagtgcccattgtatttcttttcttatttgagtaatttattccagctgtttcttttttttccctctcgtaatgatacgacatagtgacatacatcttctgtttcttctttttttgttcaagaaaatcataatgactacaggtaattaatcacacttctacaaatcagttgataatcagcaccattttccaataaaagtcgatactttggaaaatttcgtgacttttagtatcgtgggggccaaaatgcacataaagatacgatatcgatgaccaaattgccatatactatatgattccaatataccaatgattgctactatttgctaatggtatacgtttttaaattttaattaatacataaaaaaaaaatcaaggtgggataaaaaggtaactttattgacaatatttggaaattcatcgcacctggcaagagatttacctactgtcattaaaaaaggattaaaaaaacgacaaaaaggtcaaagacaggtcagacaaggaatcattaaacaaaggaagaaaaatagcaagtagaatggttttgacggaagaaggtggtgaagttatggcggcggcgcaacggaaacttatgatgacgctcttccgtcggtctcatccattacctgaaatagtcaaacttagaaaatgtcgtattatcactcttcaatgctcccacccaataccaactactttcctctttctttgtcttgtgtttcttacttggtcatggccttttccttctaaactctctctctctcgagatttcgttttttccttgggtctcctctgtttcctcctctctcgat

SEQ ID NO: 9228 - DNA, 3000 bp, Unknown
  misc_feature (1)..( 3000): cDNA_ID_3040666_gDNA_ID_1972023_Annot_ID_178132 3000 nt of promoter + ATG
ggaacggttgtggcaattaaaagagcacaagagggatcattgcagggtgagaaggagttcctaactgaaattgaattgttatcgagattgcatcacagaaaccttgtttcgttgcttggattctgtgatgaagaaggcgaacaggtactttgtccaaattcctcttctggttgatgtccaaaacgtttatatgtatctcttattgcttgtattgttaagcgtgcagatgctggtttatgagtacatggaaaatggtactttgcgagacaacatttctggtatgttttacttcttcactgagtcatctatagtggtgcttgttctctatgtgaatcagcaaagactacccaccgatgttcactgttcttaatgtgaattctttggagatgacttataagcagcatagatgatattgtgtgcttttaagttcggctctattcctcgtgaataacaatttacatacaaatatgtgttttggcagttaaattaaaagagcctctagactttgcgatgagactacggattgctttaggttcagccaagggaatcttgtatttacacacggaagctaatcccccgatatttcatcgcgatatcaaagcaagcaacatattgttggactccagattcaccgcaaaggttgcagattttggactctcaagacttgccccagtacctgatatggaaggcatctcacctcagcacgtgtctactgttgtaaaagggactcctgtaagatctcattcctgcattgcttctctaaagtttttttctcaaactcatgactgagagttatttgtcgacttgcagggttaccttgacccggaatatttcttgactcatcaattgacggacaaaagtgatgtatatagtctaggcgtagtgttgttagagctctttactggaatgcagccaatcacacatggcaagaacattgtgcgagaggtaattctgagtagataataagagcgtgtgttttccttttaggcgttatataaattgtgtggaatgtttgtttctgtcagatcaacattgcctacgagtctggttcgatattatcaaccgtggataagagaatgagctcagttccagacgaatgcctcgaaaagtttgcaactttagcgctgcgatgctgcagagaggagacagatgcgaggccttcaatggcagaagttgtaagagaactagaaatcatatgggaactgatgccggaatctcatgtagccaagacagcggatctctctgagacaatgactcatccatcatcgtcatcgaattcttcaatcatgaagcatcattatacatcgatggatgtctccggctctgacctcgtcagtggagttgctccctcagttgcacctagatagaaactttcttcgactcatacaccatacactgtttctttgattattcagtgtgattttgttgttgttctttctttgtacaggaaaaatgattgtaagcgatgtaacggtatatgttgcagacattttaatatgtctgcctttgtgagttatctgttccgcttcttatgtgttttgacttggatcatactggatttttttaccttcgaatcaatataacagtcttataattatacgtacactttcccaatgttatacaaccaataataataccaaaaaacacattacaaagatttggctcaattttgttccttattgaataacatatacatagctaattaatatcataaatactccttcgttgttgtttaacataaatatggcttcactaggggaacgagcgagctgcttaggtgcatggacattacttcgttggtcgaaccaacgagcttgccaccaatgaagacggctgggaccggctttgaacaccctagcctcataagagccttctctatctctcggcattcagggtccttatcaatctcgtggatcttagggttaacaccaagatcttggaagagaacttgaaccgcataggacaaacaacaggagctcttggtaaatataaccacccctttttcggacgacattctcataactttgtccattatcttgcataaggtgaagaagaagaagtatatggattgaaaggagtagctagagtctcaggctatttataacaggagggaagaataactgaataagaatccacatacagagatcacaagaagatcgttgaaaatgttcccaagtccgactttattatatatgagcaagatgattcgacgagaccgaaccttttcttcggcagcctttacccttttgattgtaaggaccaataatatgaatgatcattccatatattttctcttggatacaaagatgcggtctcaacgatcctcctacaagttgctaaaaagagagtgtattcgacgttgaatatagatagatagatgcttcatacttttggaccatttgatttattctgcagattccatgaatatcggacataaggaatcttggtgacccaaactatgcaacaagaaaatcaacttgcattcaacttttcatagctattccaacttggttgggtctcttaaaggcaaaagagctcacatatttttgtatccttaacaaatcttgccgtaatgttgtttcttttgttcagattatggttttaatgtttaatcaaagcttgtacaagtgtaacgtagtatacacataacgtaatcatgatcaaagaagggcaagaatcatatgagaccaaaaaaataatgacaagccaaggcaatgggaaaggaaaacaaattcagaaaactgaaatgaagatgaagaagagcagatgatggagaagagaatcagattgaccataacagtggatcgagcttgtcagtcgtttttcgtgccatatagatatgatgagaatcaaagaggggtatacaacgtgatgattttgaagggtatagttgtcattcttcttactgtagattctgattgaggggtaggtaatttgatttcgctgtagaaattgattggttttgggaaatattcaatccaaggatagtgtcgagcaacc

SEQ ID NO: 9229 - DNA, 3000 bp, Unknown
  misc_feature (1)..( 3000): cDNA_ID_2181290_gDNA_ID_1972023_Annot_ID_178133 3000 nt of promoter + ATG
gaatattttacaaatcttgttttgtaagtgtacttaaaacttgtattttgctgtgctttagggaagctgttaaaaggagaaaagcttcctaaagaagaagaaaatttccagaaagtgtacgtcaaggctccatcatttctttcaattcacatgggtgttaaagcagaggttctccctccagatacagattgccatcattttgtgctcgaggtttgatagtttcctactaagatctattcacttgccaggtttatagttattgaatagcgactttcgttttgctgcatccgtaggacgattggaagaatctggaggagccttatggcagtattttcctcagcattccaaccattcttgattcatctttggctccagatggtcgacatatacttcacatatttacaacttcgtccattgaggattgggaggtaaggctactaatattattgctattttccttagctgtagaattatcctattgagtttttattgatttgctcatctttgtttatcaattcgtctatattttggtactagggactccctccaaaagagtatgaggcgaaaaaggaagatgtggcagctagaataatccagagactagagaaaaaattgtttccagggctcagttcatctattacgttcaaggaggttaggcttgttctttattcccctactattttacatgcacattgtagaaatggtgatagtaggtctgcatgatatgagaaatctgtatctgaaacccatgagaataagcctatgccttatttgggtatttagcctgtatatctaaacgttttttgaggcaggtgggaacaccaagaacacacagacgatttcttgcgagggataagggaacttatgggccaatgcctagaggaaccccgaaaggtttattaggcatgccattcaatacaacggtaagctaaagaaagagatagatagatagataacatcaggtttagttagttctggtggtgaatggttttgctaatgaaagaatggttggactaataataggctatagatggtctatactgcgtgggggatagttgttttcctggccagggagttatagctgtggctttttcaggagtgatgtgtgctcatcgggtagctgctgatattggtgagaaaatgccatatttttgcaatatgttaaatagaatgggttgattattatgagcataagaagcaatcacttttgtgttttgatttttagggcttgagaagaaatcacgagtacttgatgttggccttcttggtttacttggttggctaaggacactcgcatagatccaatacattatttccttttcttctttattatgttaatttctattgttttactatttcttcatagaattttacttttctttattttcttatttcctcgtttacttttttctagttctatataaagaagaccttcttgtaagaaatacatctcataataattttcttaagaagcatagagtttttctctcttctactggattatagagtttctggtggattccagaattttatttttcaaattcatagcttgtagacttgtaaaccgatataggtttggcgcttgcattttttagggtttttcgaccgcgtcagatttgtgcatgggaaaggttgattcataaaaactgtaagcccattaaagtaaagcccattgttaactctaaattatcttcattcagagttatatcttcattcattcaggaatttcgaaaccctagtcaattatcgagatcgatccaaccaatttttttttaaggttaaaagtttttgattcgtgaatgatgatggagcctccgcctacgaaggagattgctttggcccctgtatatgtgtattgggacatgaagaggtgtccggtccagatgactatgatgctcgtcgggttggtccgtgtatgaaacggattttaaggaaattaggctacaatggtcctgtcaccatcactgctgttggctcactagcaaaggtccctcgtgacatccttgaagcggtttcttccactggaatctctctttatcacgagttctacagtaagcatttctcatccttattccctttttattccctttattagataaagagagtctctctaagtatatagtttctgaaacaggtcgtaaaagcatggtttcgtgtttccttggccatggtatattgaatccacgtccatctactatgatggtcatatcccgtccaccagtgtacattcctccacgcttctattctaatattagccgccgacgtgaaaatagatacaactccattttcccgtttccacttgagtctcctcgagaagcctcctccaccctctggaaaaagtttcttttagctgatccagggccacttgatgaggaggatagctgcagtgaaacgcctggacttgcctcctggctttgctctgtgtgccgtcgtattggttgtggtccaggtattgctggtcaaggcgttgataattttatcacgcatatctctactcgagaacatgaactcaatgtaagctaagcatccttgccactagtttaactatattccctttctcagttgttcttttctttgcctacatttgaccctgtgttgtctttttcctcgcagcgtcgaggctgtattaccccaaaaggtgatcgcaataactccagattgaaagagagagatatgtgtaaagaagaacataagaaaatgatataatgagaacaattctttttaatccgtaatgtgtgtgactgccaaatattctcaaatgatccaccattttcatgattttttggctgttagaaataaaacgtttagaatttgtaccaaaatacggggatggatttaaacaatcaattgtacgttaagttcaacacatttgaaaatgatttatacgcatgcatcatgagcattattgtattattgtttattttatataggtccctttatatattataaaagagtgcaataaatttggttacgactttgaaactcatcgagctttcaaca

SEQ ID NO: 9230 - DNA, 3000 bp, Unknown
  misc_feature (1)..( 3000): cDNA_ID_2105733_gDNA_ID_1972023_Annot_ID_178127 3000 nt of promoter + ATG
tttttaggaaaatcttcttagatcattttgtttttgcattgacattaatatctgactttttgcaggccagtatagcaaaacttgaaacttctttatctatgtatggtgataagctagagcttaaagtgtatggctttaatgagaaaattccagctcttctatcaaaaatcttagccatagccaaatccttcatgccaaacctggagcgatttaaggtatgtgaatatttgcatgtatagttgtcatatttttaattctccttttatcttaaatttcaagttttgtgtcattttcttatcctcatcatttcttgatttaacttctttttctttctaaccttgtaggttatcaaagaaaacatggagagagggtttaggaatactaatatgaagcctttgaaccattctacatacttgagactgcaactcttgtgtaaacggatctatgacagcgatgaaaagttgtctgtactaaatgatttgtctctcgatgatctcaacagctttattcctgaactccgctctcaggtaacattctgcatcagtgtgattcctgttttacttaatacacagattttgtgactgttctctggttttgtttaaattgggcaaaggtcatgtaatacctctgttatgttttcagatatttattgaggctctatgtcatggtaatttgtccgaagacgaagcagtgaacatatcaaacattttcaaagacagtttgacggttgaaccactcccaagcaaatgtagacatggtgaacagataacatgtttccctatgggtgccaaacttgtgagagatgtcaatgtgaagaacaaatctgaaacaaactcagtagtcgaggtaaaaaggaaacagtattttcttgtgataagagtcagccaagaagagttgaaaacattgtactttcctcgggtataatcatggttttgaattttaacctgcatctgatttgcagctttactatcaaatcgagcctgaagaagctcaatcaacgagaacgaaagctgtgctggatctctttcatgaaatcatagaagagccattgttcaatcagttgaggttagtcatcacatgtttacctagtttttttaatagatcaaaattgtattcatgtatagtcacacatatatatacatattttggatataggacaaaggagcagcttggttatgttgtcgagtgtggccctcgcttaacgtatcgtgtgcacggtttctgtttctgtgttcaatcttctaagtacggtccagttcatttgctggggagagttgacaatttcataaaagatatcgaagggcttctggtaagtctgtaatcaaaaagaatatattgattttttttgttaaatctttacctcgctccacatatgttaatcggactgtaattgcaggaacaactggatgatgaatcctatgaagattaccgaagtggtatgattgctagattgctggaaaaggatccctctctcttgtccgagacaaatgacttatggagtcagattgttgacaaaaggtaaggatctcaagggtttgaagttatgtgacctgtagtatctatagaactttcaatgatttacttggatccatatccacaacggtcactggcgaatgaaaatggagttaactctctcacaggtacatgtttgatttctcccacaaagaagcagaagaactaagaagtatacagaagaaagatgtgatcagttggtacaaaacctatttcagagaatcatcacccaaatgtcgtaggcttgcggtaagggtttggggatgcgataccaatatgaaagaaactcaaacagatcaaaaggcggtgcaggtcatcgcagacgcagtggctttcaagtcaacttctaagttttaccccagcctttgctaatgagaagaaacatacaaaagagttttgcttcgtcttcccttttttttatcttttatattttgattcactcaattttcttcataccctcattggataggttatacttttgggtgacaaacaccaaaaatatccctttttgttacgatttgagaatacgctttttaaattattatttttatctggtggataatttgatatttattgattagaaaagcattatcttatacaatgtatagatttcatttacccaaaaagaagcagcaaaactaaaaaacagacagaaaaaaaaagttatcaatcgataaaaacttacttcaaataaccatcgaaactctcactaagaaaaatcccatttggaacaattttctccttaatgacaggtatatgtccactggaacaataaatgaaaagaaagtataaaatgacctttgattgtacagtgaatgtcttacataaataaccaacggtaaaaaatcaaatgtgaacgtggatcatgaatagcttgtttgataattacgattatatcccgcggttaatttctctctggtagggcctatcaaacgtagaaagcgaaaactatctttcttcttcctctctctcactatttttctctgtacggtggtgagtgaagaccatcaaaaattgcagaaaataggcttaatctgaatctcttctcctccgtcgaagttttgaattctctctggttctccaattctcctgtgagtctctctctctctctcttccctctttctccttccttatgttctccttgtttcatttcgcgtctcttgaattttgccttcaactgatttctttgatctctgtctcataacggcagatctagggtttatggcttctggctttcaataaatctccttcgttctcccactcttttatctaacgagtttctattttctccattttgcttcagctcgagctgccttaagcttcgcatttacgtttacgttatgcacgaatgaggttcgttttctccagatcgctcttgttttcttcacgttttactgtctaccgttatcattccttgtataatttttggtggattagatcatcgtagatcgtgattgaagaagcgagagataaattaggagagcgaag

SEQ ID NO: 9231 - DNA, 3000 bp, Unknown
  misc_feature (1)..( 3000): cDNA_ID_2105067_gDNA_ID_1972023_Annot_ID_178125 3000 nt of promoter + ATG
taagaaacaagtaaatatattacttcaaaattcagagacaaagggttatatctacaattgaaaatgattaattatcccctgcgtccaacttacttaggggaaattaagtataaataagtatgtgacaagataccttctctaaaccagagtcagtgagatgtatggacatgccgaacacatatgctagagacgagcggttgattccatcatccccaacaccagcagacagtgaggttgcccaacccttggctttgaggaatgaatgcagacttcctctaccctctaaaaaacacaatgtgataaacaacatccttcaatatggacatgcacaagcacacttaataaaactttatacaaaagataaaatcgatgtgatttctcaccatgtcctaatagatgtgctaggtagtcttccggcttcttcacataggcagagcgaagaggagggagagtccatgtcaaatcaagtatatgaacatctttaaccgcctctaggcgatataacttaccgcctttccaaataggaccttctgcctccagagttggcctgattttggatccgtttttgacatcaccaaatagttctacaacccaactttcaagcatgtcgagagattctgcaagatattaaaggtaaccattaaactacaataaactcaaacagtaaagacaagccaatatttaggaatgaatataaagattttccaagaatcacagccagatcatacacctagagaattttacctcccccaatgacaacgagcttcatcagtccaccatggtaatattccttgtataatttcacaatacattcccgtagatcaaccccattttccattgcaccacttaagctcttcttgttaccttccagagcacatgaaggacatattaacaataaatcctctcaagaatatcttaaatgtggcaagtaaggcacactgcggtatccttaccccatgcaaacctattaaaaggatgaccctttgcagatgtatagcactgaagttgttgcaggcgacatgcatcattttggagggcctggttaaattctacaaatttggattttgttagcaagacacttttaactatatagaaagatttatatatctgaatgttgattggagatggatcttttgataatttcaaacaaagaaataagagtacgaaacaagcaagataaacctgaatcaacggccaggacttcccgttccatagcttcagtcttcatgagcggtgcaacaaaaaactgagagaatctaataataacgagaaaacagttctaaggtcaaataagcattttgaataagaaaaatgaaaaggaaaagattaaacttaacagaaagctcaaatattgcgtacggaatttttttacaacaactggtataggaaagacaagtaattacataatgacgaccaggaaggataaaaaactatgcatcttccttacaatgataacaatctctgggcatgcataccgacataaatatcgactgccttggtaaattttacagcaaaatgacgtttatctagatatgtgaagtagcagctcaagcaatttttgtaccttttcaaggccccttgaagaaattctctcttgacttcgaagtgatagcatgtatgctccatttctgtgtatgcgttagaggatccaccatgcttagacaagtaactatcatactgcaagaagtcaaaaccggaagaattaaaagatacatcatgctaacaaaacgaagtccatatccattatatccaagctccgtaaagattcattgttatatctaatcattctaactcggttagtttcttgattcaaagatagaaaattctaaagtaagcagaatacttatttcatatgaatctataaataatgccaaaccattgaaaccatagaaaataatgcaatgcttacttcattctcatcggggaactcagtgctacccataaaaagcatgtgttcttcaccaaacataaacatgagagtgattcaattagtaaaaaaaatcagaagaagtgcattcaaaatgtagttcaaactcatagaaagaagaaaataccaagaaagtgagccaggccttgtgcctccggaggatccaagaagcttcccattgaaacacacatagctgcagcagcctgagacacacaacacaaaatatactagtttaaaaatcaaaacccgatacaagaagaaaacagagatatagcttttaattgaaaacctttttggtctgatgatcccctttccctttcacttcatcttcatcctcatcctcatcttcttcatctccttccccatcttcctcatcatcttcatcatcatcatcatcttcagagctcccgtcactatcttcttcttcaccgtcctcgtcatcttcatcaatttgatccggaacagagccttcggggtaaatatctggatcgtgaatgagcagagcacacaatccattctccaattcaatcactctgtataacctccgatcgtttggtgacttcaccactacattgtccaaagccgagacggatttcattgaagacattgttctcgttttgagaagaagatagcgactggtgaacaagttctgctgctgctgcagcttcctcttcttaggtcttgcttctctgtacccaatgaatccgattccgccgcaaatgccttctgatgatttttcgtttattaaaaaatgtaaaaagttagaagcagtgagtatcttgccgttttctccctagggatattgaatgtgagccgtttatagtaaataaaacgacacgcgtttctatttttaaagatggaaacggcaaaaagttatggttctttcttccatcgcttcgttttcgcctctgtaatcggaagaaaatcgaaaagtgaaaaattggaaatttgaagtgttacaaacctaattgacctttcctgtgtaacccaattcgagagacggaatcggcgagtgagaaagtactgatttctctaaaaagcccaaacattgcttggttgatttagcaacaatg

SEQ ID NO: 9232 - DNA, 3000 bp, Unknown; identical to SEQ ID NO: 7942
  misc_feature (1)..( 3000): cDNA_ID_1809791_gDNA_ID_1972024_Annot_ID_178156 3000 nt of promoter + ATG

SEQ ID NO: 9233 - DNA, 3000 bp, Unknown
  misc_feature (1)..( 3000): cDNA_ID_2181363_gDNA_ID_1972024_Annot_ID_178166 3000 nt of promoter + ATG
ttgtgaaaaaactagaagtaatatctatgaacaatttgaataaaaggaaataggttgatttatttttaggaaaatttattagagtaacccatattttatacataatgacccaaaaggaatgctaaaaatatgagttatttgagtaataattatacctaaattatccttgttttcctttgcagagaaaaacaatattacagaaatgccattactatttaattccagcaaggcaataaaaccacatttatttacgaaaatgccatcgtcgtttttggtaaatctgtggctcttgttgcgacggatttgttatcgatcacagatttgttggtcaaccacagattttttacaacagacttgttttgtaccacagactttactgtgttatgttacgccagatttttttttttccggagattttttaaccgtgactgatttgtttcatatagtctccacagattttatttaaatttcaaaagtaagaatgttgaaaccaaatctgtcactgatttgttttccggaccacagatttttctttatggtggcaacagattttctatttgcacccaaaaatctgttgtgttataacagatttgttaacctcgaaaaatgttatataggcatgacagagttgttttgtgtaatcacagatttaattaacttgttaacaaatctggtgttttacaacagatttttgttaaaaaataaaattactacacagtcacataatgataacagatttgtttttagtgatgacagttttgtttttcagtgtcaaagcataacagatttactcatgtcaatgttatggccgatttgtttatgactagaataacctttttagtaataacagactttttttggcagatttatttttaaaatttcgaaattttttgttatatgagatttattagttagccctcaattaaattatttccggtttgattgtatgttaaatccggtttgactggatttttttttttttttttgaaaacgttacgacagacttttattagccgacagatttttctgaaatattaccatatttgagtcaaggaatattctcgtaacgcctagggttttcaatgaaaaaaactgccattgtcgttttcttttttcttctgtaacgcctaccaaatctaatttcaatacaatccattattcttctacctattcgagatcttagttgcttcatctttgatacaaattcgattcccttgtttattcgattctctctttggtatggatcaagtaattctcgtgtgtggtaaatgggtatatgagaaaacgagatggctttttgtggttgatagtacaaaaggttgccgtgtacttgaaggtaatagtcaaaccagttatgatgatttcatccaaatggtgtatgaggattacaatatcgagaatatcaaattgtatcaccacagaaaacagcccaccaaaacctactaatcctcataattcaatagtgataacatacaatctgccattcttaaacaatctacgacaatattactttaattgataaaaaataaaatgtggaaaatgatttacgagctacaacggattgataagaaatagacttttcggtgttactcgaaaacatgatcttaacttttcggtgtacaagaactggaaaacacgagcgaaaggctttttaattttacatactaaagttcttaacttttggtttgcccatttgcttagtacgttcctttacaagctatgacaacaattaatttaattgataagaaatagaaatgtggtttccataaccggatttctgagttttgttatttttacatttgtttatttatttttattagtaatttttttttttttaatcaaaatatagttttaatactgactgaggttaaatagtgttttaacttaaaatatgagtcataatagttagtcatcgattataggagtcacaatagttatttctattaagattagagtcagtctaagcaattttcacttatttttacgttggtgaacatgtttgtttacatgaacgagtaaaacttcatagtatcttaggaggtacgggacaacgacattttgtttttattaatattctcttaatcattaaaaaggataaacatgtttaacatagtacatgtcagtaaatgaaaacatagttaagtaagaaaattctacagatatttacaaatgtttattgaaaaaaaaagagagaagacaactctattcttggaacgattcaagttttgttttgtttaatctaaacgtacacttaggtgatgatacgataacatggtgtcatgatttgataagaaaaccactttagataatttattgaaagcctgattagctttataaacacacatatattcccccatcaaaatattctacttttccctcaaacaaacaaatattgatcgtactttgttcctttaatctcgaagttgtctttacgtaatatgaaaacataacataactctcttgatattaaatctaggtctagaactcatgcgaaccaagttttggaagagaataaaatgaacctaagaatatatcaaaagatcaaaaatatccaaagaatatgcaagagttagaagtgaatcggagatcaaaaagctgtgactgtgagtaaattagacaatatatcctttccttagagaagaaaattagtgtaacgaatctaaaatataaaaggaatatgaataagtaaaatattcaaaaaagttgctaaattagttaatgtttaaaattggtgaatccaaaattgagagaagcaaaagacggccgtttggagaaagagaaaatttgggaccctctactaagaaaagtatcttccaaattagctgtccaacagctccgaccagtctgttctcttttgctcttctcacacacacacaaacataacatctcctccattttctctcttctctctttttataagaactcttcttcttcttcttctctctcaattccatctctctctctctttctagttcttgttccctttcgaatcaagtgatc

SEQ ID NO: 9234 - DNA, 3000 bp, Unknown
  misc_feature (1)..( 3000): cDNA_ID_3040713_gDNA_ID_1972024_Annot_ID_178174 3000 nt of promoter + ATG
acaatggcaaacgttttcctcatcagtagcagaaacagaagatcaatgcggacaacaacagaatcaaaacccaagaatcttacggtgaagagatcagattcatcttcagactataactactcatgcaagaaacatccgaagcacagacaatctcctggaatatgttccctttgtcttaacgagagtctctccaagttgtctagtgagttttatgactatagctcaagcatgagctcgtcttctttggctaaaacgatgtcgtcttgctcctccgcttcttcggaatcagaatcagatttttcttcgacggcgatatcttcttattactcttctgtctcctcttgtttatctcctctgcaacatagatacagtgagatcgtcgttaataagaagaaaaagaaacatgtcaagaaacaaagcttcctctctagattatttctgtaattatttacaacatttttgtgttatatattcatttgtgcttctttgttttttttcacacctttttaacacacaggagaaaaactagaccaaaaaaaaaacagagtaaaaataataatcacaagacgatacaagtaatggttatttcaaaaacaaaatatttacatcccaattacatgcgtttggtttctaaaaaaatagaaagattttaaaaaatgttaaagaatgtaattcaactagaaccgatttaatataattttcttgaattcacggaaaatgtgattaatttacagtggcattttgtgattctatatgtaaactatgtgaactttcatttttacttttacagcaaacagagaatacagacgaaggctgtgattggttggcacatgacattacagttggcaatacaattaatgtacggtaagaggaaaaagacgtgtcacgcttcatttattcaggtttggtattagagctggtcaaatttaataagtagcctagccataatatttacacaaccgcaattaagttacttaaacggcactactaatcaataatctacacaagccaaatactagtatgaaatatcataacaaaatcttcatcccggaaaagcttttccagaaagtaatttaagtggaaccatgtaatgtacgtttttaaaattaatgctttaatttttccaagatatccagcacttgtaatttactaggaacttgaaacgcttgatgacagttcactaatctaccttgaaacttgtttgctacattgaatacgggctttggtaataaatcatcgtatttatgtttttgattaataaagcaagaatagattaatggaagtagtggctaatgatgttaggaggaaagagcgaagttaggaggaaatgatgagtgttgtacagacagacgtacaagtgaagtggccagttcatgtctgagcagtgatctggtgtgatctactctcagccgttttccacgaacattctctctttctctcccacgtgacgtttgtatgattcttctctccgtacatatcaatacagttacaaattgacgctattggctactttgtaatactagattttcttataaatatgaatatatgatattgtgattttggtgaatttgaattcgtaaaacattaaagtgaattaagtacaaactatggagctaaccgttttttttatttttgttttttcctggcaaattgtgtggataagtttttgcaatccggccctaagtcatttcctttaaaaaataatcagtctcaccttaggaatgaaagttaaacatggtttattaacgataaattaatccgttgtaattgctatagtcaatatatatacagatctttaaaagacaagacatattacagatttacctttgtatactaaataaaatataacttcaaaacagacatttttctttagctattattatggtcagactcaaagtcaatttcttatataaaaggatccaatgcttagtatagcagaagctgttcctgagatggatccatgatttgtgtgatgatgaataaaatattctctaaaatataactatattctgttttcaatgttgttaaatgaagaaacaaaaaagctatagatttaattaaccaaaaaaatgcatatagattttcatcaaaaaagaaagaaagcaaaaatagacgtagcattttaacaaaaaaacaaaatagaagttagcagatgcatatcgtaaagaaaatgataaactaaaaaatgaaagaaaggaagaactccatgtgatataacttgtgagcactatgttcattgatcgttatcgccactaaaattgtcatctcaataatcgttacaaccactaaaaactatgactcacaaaacacaacacttttaaaatttatttgatcatatactccttaaagagaaaaagtgtgaatatcattccaagtctcaagagtgtctaaattagctaaataacatattttgatgtgatatagtaccattttaattgtcaccaaaattatatacttaaacaatttttcaaaacgttaaacatttctatttatttattttaaaaacattttacatttacattgatgatccacaatttaaagtttcaaactaaatcttgaagttttaaactaaatcttgttgatagcactaaattatgatatactataggttacgaacggtgtccattgacaaaattggaaatcgtctccacgtataataacgcacctctttctctagaacaggtcaaacgtcacgtgacccttctctaacctttttagcttcttaactcttaaaatagaaaacaagcgaaaagaccaaactaaactttggaaaaagatcgtcgatttttgggcattcatcatcgtggcattgattgattgattggcatctcatactttcctttttcggctaatctctactcccaaaaatagaaagtctcattcactcaccaagcgaaaacagaacaagaagaagattcaagatccgttttttctgattcttttctttgacgagcggtttgcttttcctgaatgtttccggttggatctttcacataagaa

SEQ ID NO: 9235 - DNA, 3000 bp, Unknown
  misc_feature (1)..( 3000): cDNA_ID_3040710_gDNA_ID_1972024_Annot_ID_178176 3000 nt of promoter + ATG
ctgaggatttggcaagtctaacggtaaattctccggaactagtggtggaacgttctctagttgtacatagttctctagttgatttggtgtccaatctagcggcgaagtcaccggtagaacgttatctggttgtagattgttttgaggatttggccagtctaacgaggaagtcaccagaacttgtggtggagtgttctgaaagttaggaaagtctagactcattgacggtgaagtcgccggaaccagtggtggaacgttctctggttgtagattgttctgaggatttggccagtctaacggtgaagtcgctgaaactaacggtagaacgttctctgattgtatggggcagtctagactccataacggtgaagctgccgaaacttgtggtggaacattctctggtcgtatattgttgagaggatttggcaagtctacactccctaacagtgaattttccggagaacgttgaactggagacaacatcaagctcggagagagtggaccgttcagagattctggcaactgccaatataaagattcgtccggtgaagtcacctgaactggtggaggaatgccctcggatagtagatcggtcatagaattggcccaatctaatgatccggacggtaaagtcgtcggaagtggtggttgttgaatgttctccgtttgtagattatcaggagacataacccactcaaaaaaaccgaacggtgcacttgtcggaactggtggtggtgtaatgttcgctggaactggtggtggtgtaatgttcgctggaactggtggaggaggaatgctctcttgttgttggcactcatcaccatttacgaacaggggaggcaacatagacccatgtaactgttcctggttcatatcgtcttccatcactcgcgcttccaccgaatctttctctcgaggaagagacggtggagacggaggtcgagtgttgagtgattcaaccgttgaggtgatcatgggatcggtcatagtcgggaccgtaggaaatcgataaggacgttgtgtagtaatacgagaggcacttggtgggctattgttaacaacgaatggcggaggacgtaacatgtcgaaacgacgaccacaggttgagccggtgaggcgatgaaccatctccttaaaatggtgtttgtggattttcaagatcaccggctctttagctttcaattttgatctctcagaggaaacattgttagtttggtttggatcaagatccattgagaaactttgaggtaaattggtaattttctggtttcttgttttcattttttcttattttgcttgtgcttcatctcacgaattaaccagatatatatagcaaatgttcttcctatcttcccaagtcccattaattagatttccaaaaacatttggtttgaaaatatgtagtgtatatatagcaactatattatgatttctgttttattttatttttactatttaggtaatcttttgaatttaaattaggaataggacccgcgaaaaattacgcgcgaaattcaaaactttcagttatcttctaatgattaattaattatttataaatttgttatataatagtaaaattaattcttagtaaatataaattaaaattttgaaaactagatagtttatttatatcacttaaagtaaacattttcaattaccaaatgagctcttttagttttcttttacatgaactgtttttcaaaaatattaaattgttcccttttgaaattaataagtaagtacaggtcataaatatgttttgagaggtaataattaaaataaatgaaatacttttgtttgccaagtagtcaaatttactttttctctttttaattacttgtttatattatttatatatagatataaacaagtaatttacttcattaacataagtgttgaatataaagttttggaaaccttttcatgtttacttgtttatatggaaaggaagtaaaacaagaccctctttatcaaacaaaaaaaaaataagtaatcaactaaacaagacccatccagcgattttttgtttttcaacttcgactgttcaatgcttgtgataatattaaaattcccgaatcacattgtacatatatgattctgacttcatgactttattactgttctaagattgatgaacttatcttcaatgctcattagtaaactgcaaataacgtaacttgcactttcttatttggaagaaatactataaattatgcacttgatattgttattatgaatctctgaccatgtagtaattgtgatactttgctgtccaaaacaatttatagatatctaaaaagagtgatcgacaagaacattcgtaatagattgagtataattcggagtggcggagagatgaagtttgtgggaggtattcaagagtggtttgaatcaagacaagcataaaaagatctagttggtttttactgatgtcttttaaaacaagtatgcattaagttgtagaacaagtttattttttttgaatataatttcacactaaattaaaaaacaattgtgtctgaaattttaaaatcttttaatgcttagaaaatactcatgtatatgggaaaaatcatgatggggtgatcaaattaagaatatatatgcagtcttcaaaaatctagagaccatgacttcacacatatactcgaactaattgaatatcttgaatattagtttctaatttctcagttttagtaacatatttctcttaagttctatttttgttaatgctcttattgaaaaagaaaaaaatgtaaacacatgttttgactctagaaatgcaatgtcatacctttaaacacatgtacaactctattgtatatgtcgcgtgtcactctagtaaatatgtatcgttgattaaaaaattcatactaaattccatatttaataagcgttgtagcagttgaaaaatctttaaaagataagatacgaagaacaagagccccctctctctctctcgtccactcacctattgtgtatctcatcatcaccatg

SEQ ID NO: 9236 - DNA, 3000 bp, Unknown
  misc_feature (1)..( 3000): cDNA_ID_2181407_gDNA_ID_1972024_Annot_ID_178179 3000 nt of promoter + ATG
ggtgcccattttcctttacccacattaactccaacgggcttcgtcaacgttgccggagtcgtcgtcgccgccgacgccgatgaagcagctggtgtttttgggtcggtttgcacggcggagatccggaaagaagtgggtctggagacggcggaggagaagtttggttgacggtggttgatcatcgatgatttgaccgatgatagattcatgcttccattcataagcgccattttgataaaataaaataaaaagttttgatttttctgatttgggattggtgttaagatttcgacaaatgtgtgtgtgaaatgttacacgaaacctgagaagtgttgagatgagaatttgagggttttataaacgaaatcggagatggtggtggtgtttggtgaagaagaaggctaatgtgttgttgtagttgtggtaggtaatttacttgtaagggtattattggtaattccatgtttgcgattgttagaagggtagatttgtcaattttcattcaaacgataaccggctaacgtgtccgtaatcaaaaacgtatccggtttagcttcgtgttgaatgggcatgtctttgccgctaacgttcggtgaaattcttataatcatgtatactttattttattgatttggagactcaattgtattataaaacaagtttttcttattaaaacgaagatttttcaaattttattttacatgtgtcgaaattgaagatattaggtcgaattgtaatgttttttttttgacatctttgtattgttaagttattaatgtttaattctgaaaaactaaattttttatacgataagaatataaagaaaaaagatgtaattcaattaaaaaaagtaactaaaactaaaagaaagttatattgaatattgaagcaaaattagtatgggatattttatagagttatatcaaacattatttattaaaagtttttttaaaaaaataatctttaaccgcgtatagtctttataaatataaacacggcgttggtcgtggtcttatatatacaaatttaagatggtcatggtcaagattttgtatatttagttatttataaaagttggtcgaatgttgtgttatattaaaaaaaaacatgggtgtattaatttgtacatatttgaaatagtaataaattaattacacttataagtagattgattgataagaataagttaataaccgatcgagattaaatgagactgagtaaagctagcttatctcacctaacacccgtcgtaaatgacggaaccccacctttctaatttcgccaactcccacatttgttataatcttatttattgttcatttgtaattgtttatggtttcaaagtctattcgatttctacatattatttattaccaaactttttttgttggtttgttatattagtattgatttgtaagagttgtttaaatctcatccaatccgtggtataatgcattcgtgtgtgttattaacgattattagttctatatttgtagactgaagactgaaaaactttccgttcatatgatcatgccttctcgtatacgatcaaggaccacattcaatggacatattcttggtatttgttatagccttgtaggtattattagtaaacgtgttatgcagacttggaaaatagaatgaaaatgaagagcatattctttcgtgttattctcctatagatcacaaaatggaccgtcgatgtgataatgatctggtgaggtagaccctacggagtcttgttcttcaatatgttggtggaaaggagagagagagagacacacacaaaatgttaggtgtgttgactttggggttatgtgcttattacaaatatatatactagtcattagcaacgtcagtaattatacttcttgtaatttcatgaaattttgtgttctttgcgactttttttttttttctgtttgtttgacagaagtcagaaataatgtgtcagtgttcttgttttctttcaaggaatccactagattaaaagtcacttggtatattagaaaatatattagggcaagagttaattacgaatattaattaatgtggtgttgttaagacttaagatatataagacagttcaagcatagttacataccaaatcgctagatatgtttccatctctaattttctactgatttcaaggccatctgttcatgtaatgttaagtaaaaaaaaataagttctagcaacgttacatgttttacatatcttccacgcgagagataaaactgactttcaacatttaaggatcataacaattactccatgttgatattgatgtacgacgaaatgtagcctcaactacaaaataaacggcagaattaacgtatttgataaacaacggcttattggattaaataaagaacgagcttacactggaccctagggatattgataatctgatactaagatttgatgggctaagaaactccattgggcctagtagtcatgctccctaaaacaggtgacaatttttattctgaatttctgacgcttcatctcatgtttgcggcacattagagcaggtccattgggaagaccttatgagtttcttagaagaaaactaaagaaaaaaagtcaaaaattaattcagaattgtggtattaagcaaggttcgcaccttgcattaggtgttttttggtttttaaggttcgtatacgtgtcattctcttattggaagactatacaaacaattttttttttccttcgttgccttctctcctccttgtttgctccgaagctctacgcttctcatcttcgtctcccttctgcaaatgatgaactctcttctcatcatcgtttctcatatcatcatcgtctctcgatccgtcacgatccccatcaagttttatcacgtcttcatcaccggtagatcaagcggaatcggtgaaattagatacgtttcatgagcttgcggcgaatgagatgatgcgttgtgcagagcacggtggagaacggtgcggaggcagtgagcaagccggaaaataaaaa

SEQ ID NO: 9237 - DNA, 3000 bp, Unknown
  misc_feature (1)..( 3000): cDNA_ID_2992732_gDNA_ID_1972024_Annot_ID_178178 3000 nt of promoter + ATG
aggcaatctagcttcattcctattatctaaaccagccaaaaatacgacaaccatcatgataccaagcctacagctctaaccatttgagtccacttctaaagatatcacacatcaatcttgcttgtttcccttatattctgtctcaaatagaagtatagagacacattaccatttgttgtcgcaagttctccgaagtatctcgcacgtatccaaccttctgcccccattttttattttccggcttgctcactgcctccgcaccgttctccaccgtgctctgcacaacgcatcatctcattcgccgcaagctcatgaaacgtatctaatttcaccgattccgcttgatctaccggtgatgaagacgtgataaaacttgatggggatcgtgacggatcgagagacgatgatgatatgagaaacgatgatgagaagagagttcatcatttgcagaagggagacgaagatgagaagcgtagagcttcggagcaaacaaggaggagagaaggcaacgaaggaaaaaaaaaattgtttgtatagtcttccaataagagaatgacacgtatacgaaccttaaaaaccaaaaaacacctaatgcaaggtgcgaaccttgcttaataccacaattctgaattaatttttgactttttttctttagttttcttctaagaaactcataaggtcttcccaatggacctgctctaatgtgccgcaaacatgagatgaagcgtcagaaattcagaataaaaattgtcacctgttttagggagcatgactactaggcccaatggagtttcttagcccatcaaatcttagtatcagattatcaatatccctagggtccagtgtaagctcgttctttatttaatccaataagccgttgtttatcaaatacgttaattctgccgtttattttgtagttgaggctacatttcgtcgtacatcaatatcaacatggagtaattgttatgatccttaaatgttgaaagtcagttttatctctcgcgtggaagatatgtaaaacatgtaacgttgctagaacttatttttttttacttaacattacatgaacagatggccttgaaatcagtagaaaattagagatggaaacatatctagcgatttggtatgtaactatgcttgaactgtcttatatatcttaagtcttaacaacaccacattaattaatattcgtaattaactcttgccctaatatattttctaatataccaagtgacttttaatctagtggattccttgaaagaaaacaagaacactgacacattatttctgacttctgtcaaacaaacagaaaaaaaaaaaaagtcgcaaagaacacaaaatttcatgaaattacaagaagtataattactgacgttgctaatgactagtatatatatttgtaataagcacataaccccaaagtcaacacacctaacattttgtgtgtgtctctctctctctcctttccaccaacatattgaagaacaagactccgtagggtctacctcaccagatcattatcacatcgacggtccattttgtgatctataggagaataacacgaaagaatatgctcttcattttcattctattttccaagtctgcataacacgtttactaataatacctacaaggctataacaaataccaagaatatgtccattgaatgtggtccttgatcgtatacgagaaggcatgatcatatgaacggaaagtttttcagtcttcagtctacaaatatagaactaataatcgttaataacacacacgaatgcattataccacggattggatgagatttaaacaactcttacaaatcaatactaatataacaaaccaacaaaaaaagtttggtaataaataatatgtagaaatcgaatagactttgaaaccataaacaattacaaatgaacaataaataagattataacaaatgtgggagttggcgaaattagaaaggtggggttccgtcatttacgacgggtgttaggtgagataagctagctttactcagtctcatttaatctcgatcggttattaacttattcttatcaatcaatctacttataagtgtaattaatttattactatttcaaatatgtacaaattaatacacccatgtttttttttaatataacacaacattcgaccaacttttataaataactaaatatacaaaatcttgaccatgaccatcttaaatttgtatatataagaccacgaccaacgccgtgtttatatttataaagactatacgcggttaaagattatttttttaaaaaaacttttaataaataatgtttgatataactctataaaatatcccatactaattttgcttcaatattcaatataactttcttttagttttagttactttttttaattgaattacatcttttttctttatattcttatcgtataaaaaatttagtttttcagaattaaacattaataacttaacaatacaaagatgtcaaaaaaaaaacattacaattcgacctaatatcttcaatttcgacacatgtaaaataaaatttgaaaaatcttcgttttaataagaaaaacttgttttataatacaattgagtctccaaatcaataaaataaagtatacatgattataagaatttcaccgaacgttagcggcaaagacatgcccattcaacacgaagctaaaccggatacgtttttgattacggacacgttagccggttatcgtttgaatgaaaattgacaaatctacccttctaacaatcgcaaacatggaattaccaataatacccttacaagtaaattacctaccacaactacaacaacacattagccttcttcttcaccaaacaccaccaccatctccgatttcgtttataaaaccctcaaattctcatctcaacacttctcaggtttcgtgtaacatttcacacacacatttgtcgaaatcttaacaccaatcccaaatcagaaaaatcaaaactttttattttattttatcaaaatg

SEQ ID NO: 9238 - DNA, 3000 bp, Unknown
  misc_feature (1)..( 3000): cDNA_ID_2181414_gDNA_ID_1972024_Annot_ID_178181 3000 nt of promoter + ATG
tccgaagctctacgcttctcatcttcgtctcccttctgcaaatgatgaactctcttctcatcatcgtttctcatatcatcatcgtctctcgatccgtcacgatccccatcaagttttatcacgtcttcatcaccggtagatcaagcggaatcggtgaaattagatacgtttcatgagcttgcggcgaatgagatgatgcgttgtgcagagcacggtggagaacggtgcggaggcagtgagcaagccggaaaataaaaaatgggggcagaaggttggatacgtgcgagatacttcggagaacttgcgacaacaaatggtaatgtgtctctatacttctatttgagacagaatataagggaaacaagcaagattgatgtgtgatatctttagaagtggactcaaatggttagagctgtaggcttggtatcatgatggttgtcgtatttttggctggtttagataataggaatgaagctagattgcctttggttggggtgtttgtggctacaagtttttggtttttgttgagcgcacacaaggtgtttgataaaatgtcaaagagaaaaacagattggatagatgcaaaattgttgttggctaaagaatgagtaacagatagcaagtaggatttaagtttaactttgccttctatgtgagagctttgtgttgtgtaattgtcatgtttgtgtgtctaggtgtgatggatgtatgggttctttcctctccttagctgcgtatgatggctgcagcaataccagcaacaacccctgagaaagatttcaattccttacaaagttatgtatgcatgtcacaattcaggccaaacacaaaaaattctgtacaaggacaagcaacgcaagagaatccaaaatccgatgaaggagatattaaaacaattggaaatttgtgattcgaggttcctgtgcgtgtcaaattagctatgttcttgtaattgtcattttttgtttttttttaagaaacccacttaagattctaccattgggaaataagattgaataaaaactctaaacttccatttattcaaaatataataatataaaattttaaggaatccttaattaaggtgtttcaatgggggtgctcttaagagcatcctcaatgggaggatttaagaggtttcttaggttaataaagggatttaaattaaatgtttaatgatgattttagcttagaggccctcttaccttagaggctctcttagaataggtgtggaggtgacgtggcattattctcgtgtttcttcttcctcctcctctctctctattccgcgatcgaagtgaaatcggaacaaataattctcttgtccggagtttctataatcctttcaattcctctacttataattcaattttctctcgttaatgtatctgatgcttttgtatacacaggttccattcgataaaatagtttttttttccaggtaagtttcatgatgattatgtgttctctcttttatatttcaattgtaggatatatgtaattgttttgtgtcatgggattgatttgtgttaatgcgtttaggaacattcatgggattgatttgtgtcatgtagagagattgagtttgcctaaattagctcatgacttttttggtgcatgtactctttacattacatagttctctaacttctgtctgtgatgaaacgaatgaatccgatcattcttctgtctttagtttaacgaaagagatacaaaatatagtgatgtaaccactatgttaatagctattttgtcttatatttttatctaagctcatgcagcttaatcttatatggtgatgacaaatttaacaattggagacaaagttgtactttatttccagccatgtggataacctcccattgaggatggtctaacatcctcgtgtttcatactaatcttttttttgttatatttagcttatccaattcgcttgttctttatcatccgttcaaccatttataccgtatacgactagtactccaccaatttatttcataattgcaaatgaaaactcgagtcaaacccaagtccaaaagggcaattcgaacttggttattgtatccaaattttgaagtcaaagccatgcatcaacttggttacagactgtatccaaattttgtttgtcacggaacgtatctttcttctttgtcacggtgtatttaggcgtgggttttgcactttttgtggttttctttctttggtgaagttcctttaatttgacatatggaatagtggaaaaaaaataaaaggacaaaaacacttaaatttcccgaacaaggacaaaaccttaatagttccaaaattattaaatttcacagaaagttagaaacaaccaaaggtatccgtagaggttaactttaaaggaaaataaagcaagtggtccactcccacgtcgatagtcaacttattgctcttttcgacataatttacctccttattaaatctccttggactagtataactttctaagtatgcttatatctttcatttaaaggcgaaaatttgaaatctgttaattaagcagacactaaattccagattaattattcggcacaagacaagcaaaatagataggcacatgtgccttggaagatgaagatatacttggaacgtgatcatgatctggtgccacggaaacctatatattttgttgcacgtatccctaaatgattaggtccattcggcatatctggcattgtagattttctgcagtacgctcaacttgtagatgaacattatcttatattaggtttttatgaattttacacataaatggaaatcccgggctcatggcaggttttggatactattcacacgtgacgtaatttgtggacaaccaccaaggccaagaagttattagtttggtctcttttttcttctcttctttcttctcttctttctctataaaatggcttatttcaaaggcaaaccaaaactcacatttgttcattacaaaaagaggaaactgacaactgatttcgcgcaagagaaagaaaa

SEQ ID NO: 9239 - DNA, 3000 bp, Unknown
  misc_feature (1)..( 3000): cDNA_ID_2181388_gDNA_ID_1972024_Annot_ID_178175 3000 nt of promoter + ATG
tagaaaaatgagctattgacaaaaacaagagaatctttttggggagataatataagaagagcaagtgactctcactctctctctctcagatccctccatcattgttcaccatggacaaggcttcaatcactgaaggaaagccgattcgatgcaaagcagcaatcttaagaaaagcaggagaaccattggtgatagaagagatccaagttgatccacctcaagcttacgaagtcagaatcaaaattttatgcacttctctatgtcacacggatgttactttctggaaactagacagtgtaagtttacattatatcgcaaaaagtcaacgcataaatctatagttcaaaaaactcgatttcacgaacatttttattcttccagggaccgcttgcaagatttcctaggattctaggtcatgaagcagtcgggtgaatcttcatttacttctttaattttcattcttgatcttcaagaatttgtctaatttttttattttcttgtctaacttgatattgtaatcaagtgtggtcgagagtattggagaaaaggtagacggatttaaacaaggcgacgtcgttttgccagtgtttcatcctcaatgtgaagaatgcaaagagtgcatatctccaaagagcaactggtgcacaaaatatacaaacgattatttatcaaacacaagacgatatggaatgacttcaagattcaaggactctcgtggagaagatattcaccatttcatctttgtctcaagttttactgaatataccgttgtagatatcgcacatctcgtcaaaatatctcctgaaattcccgttgatatagcggccttgctcagctgcagtgttgccacaggttagcatcttcgtttcatatttgtgtagggttggttttgataattttaactttaacaaaggttttaaaaaaaaactagtataaattaagggtgtgtgatataaataactactacagtttttacgagtttgataatggactttgtaggacttggagctgcgtggaaagtggctgacgtagaggaaggttccactgtcgttatctttggccttggtgctgttggactagcggtacatttatttcaaattaatataaactatatatgtgatgattttgtttaactttaacaacaaaataatataaagatcttgtagtataaagtaatttgtaaaaagttatcgtaaacaggttgcagaaggagtcagattgcgtggagccgcaaaaatcatcggtgtggatctcaatcccgcgaaatttgaaataggtttgattggtctaacttttgcaatattttggtttacctgatttcctaatgaaatcttactaattagaacactggttaaatttacatgattcgtatttttaatatatttaacagattcaaacaatatcgcaacacaagatatacgaatttgaattcaaaattttttatctgatccgaactccaattgtttggagcagatcagatcacacacatatatgtctatcctacatatttgctcatattattaccatatcactttttaaaacaaacttataactactgatgtgtgagtaggtaaaagatttggaatcacagattttgtcaatcctgctttgtgtggggagaagacaattagcgaggtatgtcttcaaagctcaaactcttataaaaactttcaacattgtaattcgaaccatgctgaaataaactaatgtaattgttggaatgataatggaaaataaggtgattagagaaatgacagatgtaggagctgactacagttttgaatgcattggtttagcttccttgatggaagaggcattcaagagtactcgcccggtacggttttaccggtttctatttggtttagcatcattacatggataaaaccgaaaccaattttcttattgatttccttgtagggatcgggtaaaacgatagtattggggatggaacaaaaggctttgccaataagcttgggtagttatgatcttctcagaggcagaactgtatgcggcactttatttggcggtttgaaacccaaacttgatattcctattctcgtggatcgttatttgaaaaaggtatatattagttatatatagtttgtgttatcatttatatataaaaagttgaaagttatgattatttgattttagtatgcgatatgattttttttttatatatataaatggcaggagcttaatctagaggatctgattacacacgaattaagctttgaagaaattaacaaagctttccatttattggctgagggaaactctatccgttgcattatatggatggataaatagtccttttatcttcatttgaattttcttcctagttcttctatgtcccaaaacatagtacttggtaacagaaaataaaaaaataaaaatctaccaataaaagaaatttacaaagttatcttcgatgtccctttgttgggatttgcttctattgctttggctcttgttttttttttttgttgttgtgtgcaagtgcaactattgctttggtttatatatgccttcttcaatgattatatatggtgtgaatcgtgtgatccgttcttatattgtgttcgtttccaaaatcatattttcaaaacattattgtaataaaagtctaacgtaagtcacataaaatcgtcatctcctaaccaaaagcctaaattttagttccccaatcaatcaaaagggcaaaactccacagataaaaaaacgatttcgttggcgaaaattttgatttccaaatcccttttatctgatcagtggagagcttattgggcctaaagcggacttagtaaaacaggcccaaattatgttagaacaaaacaaaacactgtcgttttgtcggtaaggacatagccagatagagagatcctggagaaagcttaaacctaacaatttctctcagagtgttatcatcaaaagattcttggtctccgatccagtcacctgaagattctccgagcttcttttgaccacacactttcaatg

SEQ ID NO: 9240 - DNA, 3000 bp, Unknown
  misc_feature (1)..( 3000): cDNA_ID_3040720_gDNA_ID_1972024_Annot_ID_178168 3000 nt of promoter + ATG
cttatatatacaaaatatttgtgtgccaatgtgattaccattcaatttttttgctatgtgtgtaaatttgaacttatattagtctttttctactgtggttgtgtcaagttttgttcctttcggaccgttattcttggttcttttagacaattagttaaagcggttaatacattttaacctgattttgaatgaagagaaaggcagaaagataacttgctaaaaacataactaacagtacaactagatcagaaatacagtttccttttctgacggaccactattcttcattttatatatcacttctagagattatttctgacattttcaaaatcgtctgtgcttcattgacgacatgaaaaagggaaaggcctgcgattcgaccacttttgctccaccgttggggtctccaattattttgcgcctctcaaaaattgttgtaaatctatagtatccgcacaagatttgaggttaaaggttgctagctttttttttgagtcacggactcacggtggacaacattttaatctggtaatataatgtttctgcattaatcaacattttaatctaagatgtgaatgtgatatcatttggttgaaatgaaaaattcgttcttgggattatgatatttggatatactcggagtcgactataagtctatagttatcaatacctttcttcaggtacttacacatttgtacgtccgactctaaatactatagattttgctgaaaacataatttgatatagtatacacgtaaaatgaaacttatcagcttccgatatgtcttccgagaaagaagatctgatctagtgatctgacaactccgtttagtctcacttggccacaaaatgccaaataattaaatgaagcagtattgaaaaatcaggatcttatgtcgaaagctgacccaacaagcacacagtatccaaagaaaaagcctgtctaaagttacaaaaaggacttattattatcacatgtatgcaatttgcgtgtataagaatattaagaactggagtggagtgaccatgctaataatatctagtgcataggtaggggcacatgccatgcatggaccaacaccacaacaaacgaccatgagatatgaatggcacacatgtacattcccttccaaaaagaaaaagcataaggcccattaatcggcccaatattcttcgcctgcacaaaaaaaaaacctccagatcgaaaaaaaatcgagaagcgaatagcggaagaacagaaaaagggaaattctgagaatcaaatcggaaaggtagaagaatcgagtcggaaaaatggaaacgacgaagagtaacagcagcgagtccgatgtcaacgccaaatgggacgcttgtctcgatctcactgctcgtcgctttgtctactcttccctcggcggcgctttcgccggtcttctcttcttcagttcggtgttttccaatatcccccactttattcttatgattcaattccgttcacatagtgttgattactgattaggtttctgggtagagaaactgagaattcatgatcatttagggttttgagtgttgttccgatttgaatcatttaggatttattaggtttaaatggttttttgtgttttgacgattaattgttgcgttgtgtgccctagggagtccggttacgagatgggcgtcgattgcttttggtgctggaattggtattggttctgcatacacagattgttctcgtgtttttgatgcgtcttcttcaacttcagctactttattagcagctcccaagagtacggagacttctgtatctcaggttagtcggaatctagttttgtgggatcgttttgttcgtaacagttgaagttagaaaagatgctaatttaagagggtttcatagtagcttagagggaaatatgatttggaagaatggttacagatttgtgagaacatatgcatctttagtttttagctcttaatagttcaatattctgaccattgacatgtaagagttttgtcgctgttgatcttacgagcaaagaacaaatgcctgattgtattgtggcatagagtatcacgactggactacgtattggaaattaatgattagtaatcggatatcttacttcatcactatcatagttagcaagttactaggtgttttggtaggtgcaaacatgtttaatcttgttccaatgtgtatgcatttggtcgaaagcaaatccgttcatgtttctagtcatcgaagtccttacaaagtagaatcaaattagctgagtgtgtctgtttttatcttgttgattgattacaggcagcagaagagtgaagacaacgaggaagcttggaggtaaaaaaccaaacattgatagagttacattacgaaatggtaattgatcttgcaggacaaggcttttgagataacgccattgttaaaaaaaaacttttgcttctcagtgtggttttgtacactgatgtcaaaattgttaatgacccactcattttttttgttttgaaaaatcttatgttcttttacttgagaaataattcctccggtttgatttgtttgcctctactgttccttcattcatcaaataatctcctcacatatcgactaagttacaggttttaaggattaatgatatgtttttagctgctactaaattgactgatcgagtagttttaacaactcaatccatattttatctaatttataattttagtgttgttatttttttctgtttttgcggccttaaattaaaaatatacatataattaaacaaagccaccaacgcgttaacaggcatggttattcactcatcttgatgacctcaattagaagcctttgaacggctcagattgcatatttgtagccgcgtcttagcttaatctattgccacgtgtttccgataattattttcttaatacttaactgctacggaaaagtcataattaacactctatagagcttccgaagaacgacgctgcgacgagagagactaatagcagaggaggaagacgaagacgaca

SEQ ID NO: 9241 - DNA, 3000 bp, Unknown
  misc_feature (1)..( 3000): cDNA_ID_2181359_gDNA_ID_1972024_Annot_ID_178165 3000 nt of promoter + ATG
gcattccttttgggtcattatgtataaaatatgggttactctaataaattttcctaaaaataaatcaacctatttccttttattcaaattgttcatagatattacttctagttttttcacaagttgggcaacactaaactaaaactttctagaaatcttctatatgtggtcttgaattaaatctttttgataacagagatatgagatcatgaaattgaaatcattatattttatcacaatccaatcacataggattattacatggaaacgactaattgttttcttttttttttgccggcagaaacgaataattaagagatcctcttaattagatgacaatatgacatgtaagaatatatgtatatagagagaaagagagagcatattattgcataaacatattataaattagtcttttcgttactaattctttttcatttcgctgcaaaacaaaaaaactagaagattcacacattaagcatttaaaaagtaaaataccatatgaaatgagaggatgacacacatataacagactgcttcgcacgtaaagaaagcatcttatgatttcgtattaataatgtatacatatttggacccgtattgatgcgttgtaatctaaacaaaacgaaaataaaaatcaattgttactttattatataaaatataaattaaatattttaaatttgatattaacagtgaaatttcatgagattggagctgtcacaagaactattaggattacagtttaatttaataagcagcctgattcatgtaggcctacacaacacacctcatcgttacaactcctcatatgggccattacaataagaaaacatttcatatgttactaattgaaacgcaatattttatatgaattatatgttacatgtcaaccaaatacacccactaaaattatgcaaatttattcaactccccttcattcctttgtatatgcattttactctcttttgcttttgtttcaataactgattaattgtattgttttttttattatgtcaatatttcttggtcaggcactgctgctaacgtctaaaacccataccaaatcactagctttgctgaccaattcattgtgtataatcaaatttcttaaactaggggaagtaatattttaagataaaagatagtagaactagaattgatccactgcttgaaaatgtatatgaatgtaactaaaaaagttaggtagcataatctcgtgggatcggagaacttatctgttaattatattctttcaggtagctttgaatttgtcaaaagctaaaagtaggccgagctgtttggttggtgtgtcatttgctggtggtgccgtcttattatatactccactaacaaaatattggatttagctgtgtttatttcttttgattctccaataaagaattgttagttatattatatactatgtcgttctagtttcttaacaaatgattgatggccaggtacaatttagcaatgattatcaaccattattgggatttttaattttgtataagagatgtctatgtttaactagtttcgtcaatacattatttacacaaaaaggtttaaaatcacagtattaagattatgagtgaaataagaagttatgttaataaaagaaattaaaataataggaaatagttaagtagcaaataaaatttcatacaaatcatactaaaggagaaaatatattgaaatggtagaaaaacgaagaacttgagaataaaaatacaaaattgtttaacagataataggagtacaaacaaattagactaattagaaatgcatagaaaatatatgaggttcttagaaaaacaccattatagaattctcaactccaactaactcaactaaaaagagaaatcatattcggaaatattgtcggaaacaacacttaagtttgttcgaaatgaaaattgtcgaaaattaccattaatcgacatgtgtaaagtttatgaacttctaacacatttctaatgacgtttcaacaaatttccgatgaaggttccgaataatgtccaacaacttaatttggtaacgactaatgtttatttcatcaaaagttggaaataaattggtcacaaatttttgtaggtatttttctgaccatggtcgtcaaaaattaagattgttttcttctagtgatatagcaatcagtaaaggcaattgctccctaataacaacgtgttatgcttaaattagagaaaaaaatatattgtttgtaggagaaagataacgagagaatagcagtttctcctatgaagatttactcgctctagagtcaaactttagaagctttgactcgactcgttttatggttggccgttaccaaacctttattgatacagtattatgaagtggccatcgcatcgcaaaacttcatagccaagtgttagataattccacttgttacaatttttttgtctatctctctcttacttaagcatgatgattttggtgataaaaatttctagaattattctccggcggaattgtgagaatgcaataaatatttcacgaacgtcgctgattttaaagtgatgatcttcttcaccctataaatattaccgaggttaacgttgatgatatcgttgaaacttgaacatgtcattgtagtattatctatgttactagtggagaaaacttccactaatttcgtgttacaaagggctatttattacaaaagattatgttcaaaaagagcaaaaaaaaactaagtaccacgaactaaaagaggaaaggattctctcgtccccaaaatgttatctctatattcaatgcaattgccaatgacttttgtttataaggaaacaaatacgaccataaataaaaatgataaatgttccacagtgatgcgagtaacaacaccaaagcatctctatttttgttttcttcattcacaccaaaacaagaaatcaaatttggtttgattgattgatacaaaagacttcttcagatatttacttcttcatttggagaagccgattaactgaaatg

SEQ ID NO: 9242 - DNA, 3000 bp, Unknown
  misc_feature (1)..( 3000): cDNA_ID_2181347_gDNA_ID_1972024_Annot_ID_178162 3000 nt of promoter + ATG
tatataatttatttatttgtttgtttagcaattgagcaaaaactattcttgtaacgctttttcatgtttgacatgttgatttttgttttttgtgacacgatttgtaatataatgatataattattagctttttaatattttttaaaatgatgaaatttactttgtcacacctaaaattgataaaattttgtatttttttagaaatctaatgttaaattatattaaaaaaaaatgcaaacgtttatacatcgaaatgcaaacttttcttaaaaccgaatcaaaatatggttcaatctatctatccttgactttgttgtgacgcaaaccacacttaaagtcctccaatgtatttttcttcccctttcattgttatggtgctcaagcggtttctcatatttctatcaatcagcttgacaaatttctcttttcttgatggtttttctccgtgtcttctatcattcctttcacgccaaatagagtgtatcgtgttttggaacacataccttagtataaaccttttcgttgtgtctcggtttttgttcgcaagctccctcatgatatcccgccatttttcagtgaacttgtttgctaggatcccccgtgccagctcctcccacacctttctcgaatacggacattggaagaacaagtgctctcttgtctccaaaggatcttggcataagacacagctttgatctgcattttggtttcattgaaacatcctttcccctgttgctaacctgtttttcatcattaaccaagtgacaaacccatactttggtgtagcgtacttgcaaaatttcgtacttgcaaaagaagtttctacgaacttaatgatgacggaaaaaaatacatatgaaacactctacataaactagtattaaaattctttatctgcatggttgttccttaagatagttagagatcatttttgggaagtaaataaatttccactaaaacttaagacattatttgaaacaccggtacaccggtatagtgccttctaaagaacattcaatgttcaagacttccaagtcataatattttttgtttgactttaaaagagaggaatccatgtaaatataatttattcgatgtttgtttgtatcttttcgtgagcttaaagatattacatatctcgatcctttcaatattgttaggtcatgatgccatttatcgatcttccgcatgtcacgccgttcagtctaggcgtgagtaccaatcctaactcctaaggatacgacatcatagcaacttagcaaccatgtatgataaaatggttcacacaaattatttaggcccgtatttcggccccttttgatttcgaaatattttgggcctataaaaaagagagaatgtttgagactcgagagtagtaagaaaggagagaacgcaggtttttttttttaaatgaatgatttcagagaacgcaagttatacacgtactacacgtataacacgttcctcagcaagacaacaatattatcttatcctcaagtggatgcaaataatataaagattttaatattcatttactacatcaacccccaagaacaaaaaatgtcttcaacaaacaaatctacaatcaacgaaacaaacgtaatcaccaaatatgaatcaatcagcagtatgctgaaaattgttgccaacataatttaagcatgcgactttcaaaaactcgaaaaattgtcaacaatttgagtaatccgaatttttctgtttctattacacatgaaaagacaaagtaacattcaaaatccatctcatctgcttggcgcgataacatatctgataagacttttttttgtgtgtccaaagctgataaggtttccaactttatcagaatcaatctatatttgactattcaaaactgaaatacaggagattatttctgctatgaacaaatattattttgactatttgactgatctatcacaaacatcttagccaaaaaataaaatttagtgaccacagcttgagaaaaaaggaaacattcgtgtagaatgtattttgctgatttgtggagagtatagtcttgtgctgtgaacaaatacattcatattaccctgcaacttgcaagtaaaaagaagttatgaagtgacagctaatcaggagataagaataactcgatcataaatacggaacaccgcaacaagcggaccaaagagcatgcaagtagccactagccaagtaggagaaagaaaaatatacaactacataataaatattccaaattaaaaacttattgatttagtctcagcatttatacaaatgtaaaatgtttatacaaatgttgtctattttttttattgttaacgaattttctaattttgaaataatagtgatcaattatgttgcttttgtgactaaaaagtaagtgaatttacaaataaaatgatacgtcaaaattatggttagctaagcctaagtctaagagcttgaatgatatatggatttttggtcgatccaacccaaaaacatctaaatattctatcaacatttatactcaaataacaattgtacatcactaagttacatgttttttataacttaattttaagaataagtcgtgatcaatcaaattacccttgatgttgacttttgattgaaaaaaatgacaaaaagaatttgctgatacaaaacaaaacatggcaaatatctagctcgtacgtgtatcacttgtccaaaggaagtatgcgtattattgcgtaataatacaataatatcggaaagttatataaaataaaaatacaaataagataatgtaattgcatacttattttttaacgcgtatagtacactcatctcaaatgccaataaatatacagatacacataaaagaaagactagaaagtttagttacccaaaatatcataaattaatgtaatcgtgttcactagttgcgcaagacaaagagatcttttagcttaaaaatctcatttaggcatttaccctttaaaaagttttcacagagattctcaacctctattggtgagagaa

SEQ ID NO: 9243 - DNA, 3000 bp, Unknown
  misc_feature (1)..( 3000): cDNA_ID_2181355_gDNA_ID_1972024_Annot_ID_178164 3000 nt of promoter + ATG
ccttgatttcctctgaagaaactggacgaataagcctctcattcatctgatcaatgacttttgcttcgaacccaacaaaccagtgagagaaaccagaaggattagaagatttgaacaggttggagaagtaagcagtcgctacctcaccccttagcaccatcagagaaatgctcacttccattgatatccagaagtttgtcaatccgattcttccccctattattcttcacagaattgtgaaagaacagagtattacgatcaccacaatgcatccaagtttctctactcttttgactccaaaaaacctcttcctcccagtacgccttagcaagctccttcttaaggtagaaaatttgatagaaccttggagaaagagccgattgttcctcctctagagctttttcaatcttgtgaatgttttcttgggagttcagattattatctctcttccacccactgagagcctctacacttcttaagtctgtcactaacacaaaggtcattaacaacattcagggggtcccacgactgcaagatggtttcctcaactctaggcttatgcagaagccttttgtcaaaccgaaactgccctttataagaatcttgagaagccatcagtttaagcaaaacaggacgatgatcagaaccacgcatctccaaaaattgttgattagaagcagggaaattcttcagccattccttattaccaaaagctctatccaatctgctctggatccacaagtcataccttctccctgcccaagtaaatctattaccagtactcgccaactccaccatcccgcaagcttcatgcatttccttgaaaggtttaaagtaagactcacatctcttcgggccaccaatcttttcctcattatgcagaatttcattgaaatcacccaccatacaccatctttctctccttccaactccaattatgcttagtctttcccaaacaatctttctttttttaaagtcggggtcaccatacacacaagacagaaaaaagttcaccgcaccaaactgcacttgaagatcaatcaaattcttatcagcaaacttgatatcgatcttaacactttccttccaaaagatagctaaaccaccacaccttccaacaggctctatagaatacactctatcataacctaaaaatgtatgcaaatcaacaagaacatctctactattcatagtctccatcagaaacaacatctcagggaaatactttttacgcaattccttaagacgagggaaagccaagtcttgagaccgtcccaagccttgacaattccagctgataatgctcattgcgcggtgggcaatcccccctttgggatcacctctaagggattgagttttgtggattttgcagtgctagttccctcatcaactgcctttcgtttctctttagcaccatgactgagacctttcttcaactcttgtgatgcagcaagacctgaagccggtaaaggattagctttcctctgattcttagttggcctttttcttgcctttgctttcttaggcttaattccggataagctaggttcaaagaacccagctttaaaaaccgccgaattatcctgaaaaggctgagacaaagcaagaaaattggcatccacatcaaaggcattagggccagcctgatttaaattccacgaatgtgaagaacttgaagtcccaccctcttcacgcagattgggctgagctaatacttttccaacattcctcaagttaatcccttcatcagcatagctaaagaaaactcctttgtctttagacaagtccagatgaaccacaggggctggttcatgactcagcattgactttctcagaactggatccttctctacttctccaacagactttttcaccttgttaatcctcagcagcttctcagtttcatcagagaccaaaagatattgtctcatcccttctaaaacatctgcagcgattctcggtctgcccgtcaacttgtcaatcccaacttgatcctctcttaaaaccccaaacaaagggtctgattctttcaaaacagggggtttcttaggtctctccactggtttaccagagcgtcttgccaaagcagcatcttgtcttgcttttatgaggacagggcaaacatctctctcatgagtcaaacgttgacactcatagcatctcttttgaacccgctcatactgaaaacgcacttctagtttatacttaaacaataatacgtcaaaataaaattttcaatttttagtttcccttaagtttattcataaaagtgtttatacttattatacatgtaatgtgacgtttttaactgaataacagttaaagggtcttacgacggttagttaaattataaacaattttaagttatacactatttaattactttctcgactcatagtactttctttattatacaggaattgtggtatataatgcaactaattttaacaaaaataaaataaaatcatgatagcacaaaatagtaatctaaaatcattatctgaattaacacgatttaaaaaggattattacactaagaattaataacaaacaattactaaaaaaaaaacttttagcttatttaaaagatgaaaattagcttgtatggatcgtgtcatttaaatttagtagctaataaaccctaatagttgacttttgatttctgtaagataaaataacgaaaacagtgatatatagacatgaaaccgcatgtttattggttgttagttgtaactttagattatgtaatcatattagaggattaaaatatagctcgtgaatcacgtccatttaaaattatgatagcagctgtacaaatcataaaaataatacagctcctcataatcaatcactcatctgactagactatataaaaagaatatatacatatcacaatctatttatcgtgttcattattcacgcagcaaatatagctttaatatcaaaactaaatataaataaatacatatagcttaaaatccagtttcctccgacaagaaa

SEQ ID NO: 9244 - DNA, 3000 bp, Unknown
  misc_feature (1)..( 3000): cDNA_ID_2181351_gDNA_ID_1972024_Annot_ID_178163 3000 nt of promoter + ATG
ggcttagcctcctacttgtatgttgcaaagtcttacgtctctaaaaggctcgacaccagttaaacccaaaatctctcgtttaaatatcgcaggtactctctttccctctcttgtgtaatttttgaatacacaaatcattactgtgcaaatgtatacttttcatgtctggtatatcgtgttgatcatgtggctcttttgccaaatccatcgcatctttcacgtccctaccattacatggctcaacaccagtaaatgtatattttttcatgtttggtgtatagtcttttccttatcgtgtatattatccagctgtgttccaagctaacttccagagatttcatcttaataaactaaaattgttgaataaaaaataggttaaagagtttctaaccacgttatgaataaccaaatatgatatgaaagtagatacacgttgactttttttttcttagacttgatctacacggcgatacacatacagcctggataataacaaaaacgccaagaacccaatggcagtgaaagcagcaagcaaccagtaaaaataatcgacatgggctctgttcaggttagtattgaaccagctatcgccgccatttttcccggtagcccaattaatcacagtgattagaaaaccgctcaagaagctcgcaagacccatcgcactcaaagaaagtgcaagaccaatactccttagctccgtggggacctggtcgtagaagaattcttgtgtccccactagtgagaatacatcgatcatcccaagtagtaaatactgaggaacgaaccaccatatggacattgggatggttgcgtccggtctatccacaagcccatgttctttagccgtctcgagccgtttcatttctactaacgctgcaaccaccatatttaagctggagagcaccattccagctcctattctttgtagcattgtgatccctgaaggctttttggtaatcaatctagctaacggaaggaaaacacgctcataagttggaactgagatgaaaatcgataaaccgatgagtgcttgaaaagaagccggagggatctcgaaacccggcaagatttttctgtccaccgtaacgccttgttttgtgaagaaagtagcatattgagcgtaaggaatcgtgctcactactgatgtgatccatatcggaataagcctaaccaaagccatcgcgtcttccacgtccctactactacatggctctacacctccttctcctggtagcaacgcttttgctaggaaccttagtaaaaataaagaaaactttatactcaagtcacaataaaccaaaactcaaaagattcaagacttgtgaacttactcaagttgtcctttacatttcttgtacgaaccaacttccaactgacctgaatgtgttaacttcagtttccgattcttgaacgccaccaagaaaactctaccgatcctcgcaaaagcgttattcttcccctcgcgatctcctcttggatatctataagtttttcttccaaacaagaagagagcaagagccatgaccatgaacaaacaagggataccaaacccaagagcccaattaacattgtcttgaacgtaaaccaccacaataatcgacaaagttattcccgcggataaactcaagaaccaccaattgaaaaacgatcctctacttattctctcctttggatctcccacatcaaactggtcagcaccaaaagcttgaacacatggcttgtgtccgccttgtccgatcgccaccaaatacagagaacaaaagaataatatattcacccaaaaaaacggtttagcagaagcgttgcggttatgttgacgttgctccgataatcccattaggattaagatagaggataaggtcaatagtcctagtccctgtaacaaaaatcccctcaaattttagtgaaaattctaaaatgttatcaagatattgaagtaagagacaagaacgttattacaagtatgtagatgagggaagcaacaacaatggtacggtaacgaccaagataagcatctgcaatgaaagctcctaaaacaggaagtatcgaggcggttcctgaccatgtgttcacgttcacggcggcggtggctgttgattgtccgagaggtccggtgaggtaagtaattaagttggaaccaatcccaaagtaagcaaatctttctccaacttccacacctaaaaaaccacaccaaaaaaataaaataaaatgtttaaaaaataatggtttatgagacaatttacaaatcacaaaaactgttctttacctataatgtaccaggcggatctccatccgccggtggaagattttccggcaggaagtccacggtggtcaacggagtcgctgacggaatcttctataagtgcagcttcttcttcggctatcgccattttcttgtcggaggaaactggattttaagctatatgtatttatttatatttagttttgatattaaagctatatttgctgcgtgaataatgaacacgataaatagattgtgatatgtatatattctttttatatagtctagtcagatgagtgattgattatgaggagctgtattatttttatgatttgtacagctgctatcataattttaaatggacgtgattcacgagctatattttaatcctctaatatgattacataatctaaagttacaactaacaaccaataaacatgcggtttcatgtctatatatcactgttttcgttattttatcttacagaaatcaaaagtcaactattagggtttattagctactaaatttaaatgacacgatccatacaagctaattttcatcttttaaataagctaaaagttttttttttagtaattgtttgttattaattcttagtgtaataatcctttttaaatcgtgttaattcagataatgattttagattactattttgtgctatcatgattttattttatttttgttaaaattagttgcattatataccacaattcctgtataataaagaaagtactatg

SEQ ID NO: 9245 - DNA, 3000 bp, Unknown
  misc_feature (1)..( 3000): cDNA_ID_3041090_gDNA_ID_1972029_Annot_ID_178197 3000 nt of promoter + ATG
ataatgattaggaaatgatgcaagtatattaatctcagtattaataatagagcaagtgaaagcctctatggagaactacaactaaacagacagttactaaacattgatcactcagaataaagttaacaatatacacgaaaaaatgttcctaatatctcatgaagaatacactgaagggaaaggatgctatatcatacctttcatcattagaagcggttctatatgaaccatttgtgagccctctaacaccaaactgactatcacctttcagtgtccgtgttctacgtgacagtggttgtgagctcattcgactagctgcaacagctgttgtcgttggtacttcatcatctctttcatatatgcttgacgcaactgaactgcagcataaacatggtcaagaacagaagattgtgcactgaaagaagtgatgaggcaaacaatcaaacaagcaggccactagatccgaggataaaaagcagcacagcttctgaaatttgcttatagaattgcaaaagaaacctacctgtattcacctctattgtataggtgtgcatgcaaatcatctagaattttgaagaaaagggctccccgcaacttagttagctcagatctgacatcttgaagagcaccaacctaggttaacgtaccaaaatatctatgagttcaacatacaagtgaacagtagatcccttggacagagatatttctaaagtcccaacagaacttcgatgatcccagatcctcttcaatggatttattacaaaacaatcctagagatcaaattgataaatgaatgggaagacccacaatattcccatgacaatgcatttgttaaaattggcagtaagtaaattaccgtttgaagcccctcacgctccagcattagagacgactggagatacacttgaatagcagcgtaaaactgcttatcagcaatgagcttctcaatacgagatggaacctgttcaaggtttcaagaggcagggtcaccattttcacatcagaaaagcagtttcttttaagtaagccaaaatgaaaaaaaagtaagtacatatatcgggagcatatcaacaaaagtaacatcagagatacagagatgatgaatgaagtatgaaacttgatagcagcgcagatacatagcaagcactgtaaactcaaaataaacaaagaaatgttacagctaatccaaccaaccttggcaatgccctcgatttgatccaaaagtgagatgatgtgccgcaatgtaacagaacggtaccacaactgatgtaattgtttattgcgtgcacccaagctctgtttcgcttctgctaaatcgtgcttcaagtcgcctatcttttcagtggactcactgaataatcgcaagatctgatgaggaatacattgaaagcagagcaaaagaagagagataatcaaaaccaaggtgttccacaaatgaaattttagtagataaattacaacagagggtactattccaaaaagaaaattctacatgcagaaaccatagaagcagccatagttagtatcaatattagatttgttgtatctttggcaaatgaagcgtgcaatatggaagtcaataagcggtaacagaggatgctactttagaataacagaacgaactatccaataaaaaggaagagctaacagatattagaaacctgtgaatagttttgaatggccttgttgaaaccaccatgataagcatggacaacttcatcaacaacctcctcgacaacatcactttgttcctttaatatatgaatgtcagcttcacggtcttttgatgtcaaaatatgaacaacatgtggtaaagagtcaaatcgtgcagcagcccagctctcatctattcttgccagctcctccctaaggtactgcaataaccatcaacactcaggcacatatacacacacatgtactccaaaaccaaatacataaccaaatcaagagtggtggtaattcagtcaatttcttgtctagccatcgtacaacttcttacaattaactccaaccccgaaatgaagagatataagaaaaagaaccgttatacttaaatgtccctataaatccccaaggggatgaaagaacaccatagaacaacacaattcctcataagcccaaacttcaggttttccaactcaagtaggagtctacgagtgaggaaagtgaacttacagttttatccgagggtacaggcaaaccattgaaaatccccatgctggcgaactcactccgattggcttattagagccgaaatgaatgttcctcagcacattccaatcaaagctctctgtagctgaaagcaaaagtccaaaaccccaagacgagttaaacacatacacgagctagagaccgcgatattacgcagttcagtacacacaaagaagctagtggacccaacggcgaacatagaattcaagtcaggagaacaaaatgtgaacaattcaatcattactccttcagcgaaagatctgagaatcataattcgaattacatgaaaaattcaactgatgacgagactatcggcgtatacaaaaattaatcaaacactacgtctggaagtagatctagagagaaaagaatatcgagaaacaaattcgatttcagctgcgaatcttacctgggatacgaatccacgctagaatctgatcaacacgttcccgatcacgaagagaaaagctaaatctcgagaaaatggagaagacgaagaagaaaaggtaaaaatctatacgatacgcgtttgttttattctccttccaatttcttcttctaattttccagacttttcttctctctctatttttttttctttttctgttttactttttccttgttttctgttttttcccaaataataatttaaaaatcgtgggaaactaaatcatcaaaaagctcttcaattaaataaagataaagttaatccagtaaccaaacaatccttttcttcttcctcttctcatcgatcactctcctgcagtttctacggcgacggaaacgatg

SEQ ID NO: 9246 - DNA, 3000 bp, Unknown
  misc_feature (1)..( 3000): cDNA_ID_3040859_gDNA_ID_1972029_Annot_ID_178223 3000 nt of promoter + ATG
gctcacagacttgactctattacagatatagtagtaaccattcattctcactaaaaccctattcctgccgtcagattgaaaatgcaaaaaatccaattcaagatttgactctcaaaatctcaagccaagaaaccaatctgcacaaggtaatgccaagtgaactttctgattatgttttttctcattgattgagattgatcctttcctccaaaagaatcaatgctagaaaaattgcagtttcaacgagacccattgttgattgtgtgcgatatgtttaactttctggatataaccaattttcatatttttgctggatatgattgcaggatgcagctgcagaaaacaaggagaaggcaaagctaaaaatgagactcaggggtatgcaagcacgcttagatgcaatcagtctacggtacaagcagtctgtgcaagaatcagaacttatgaacaggaagttcaaagaggcatctgctaagctaaaggagaagttagcatcaaaagcactcgaagttctcgacctcaagaagcaactctctgcttcttcaagaacaatgtgatgagcttacatcacaactcttaagtagttgattcacggctagtaaatgtcttaaagctgtaaactgttaaatgattaacgtcataatcacagagaactgatgtgattatggaagagtccaatacatatataaattatgataggtagattaacaaattacatggagtttatgctaaagtaattaagaggagaaactaagggcattttggtccaccgctcttggtcttccagttgttatagcaaggacatacttgcttattgccataagtacctgggggcacacacaagcacttgttacaacatttgttgcagaagaacaaacacggcttcttgtattgtgtattcgagcatctatctccacaccttggcccgcactctaataaaggtggaatagcggatttagtttcgcattcagcacaaacattaattaaaaactaggctagtcagtgggtttaccttggggttgaagactgccttgagtagtaccgtactgccaaaatcaacaagaagatgcaaaggatgttaaaaaggttttgtagattcgatgaaactctttttttgagtagtgatgaaccgagaaactcacttgagagttattgtgatgcggcagttgtggttgcgactgtggtggttgtggttgtcgagcaggagattccaagtatataggctgtgttttattcagggacgtataagataaagttgataaatgtgaacatagaggaatagagtgttgaaacacttacatgcatatgggcagacagaagaagatgtaacacaacaatggagaaaacaatgatgctaagttttgttgccattttctgaaaacagaaatgattgtaatgaagctcaggtagattatatattttgcagactaagctcattatgaacaaatgataggggtccactatatatagtccaatttccaaatactttttaatctagaaaatatatttctcctgtcactgatttttttgcaaactagaagagtagaagccattaataaaattattgtctaaatatactcttgtttttttataaaacttttcaacggtctaacgataatgaaattcatggattgaacaaccaatcactaatcatatgtaaaaactaaaaactaattttaaaatacttaattactgattaaacaccagaattatgtaagatatactacatttcccctaaaaaatatctgaagttgtgattttgtttatgcatggaatttgtataacaaaaagtttagtaagtacaaatatagacttcatgttcccaatcttggacaagtgaagcagagagccaaagatgtgataacgaacgaaacgaagaatagcacatgtgtgtttctactgctttctaaccctatctctttctcgtgactccacttttttcccttatactatttgttttaaatcttgtgatttgtttctaaacgttcttggagacgaattttgtaagaaaaagacacgtggtgagaaattttgggattcgaagtagatttctctgtaggcttccccgtgacctaattgtgattacctgccaagccattttgcatgttcagaattgttttgtttggtttaaaatgttcagaaagttcttgtgtctcacattgctgggcctcttcccttttctttgtcttgggcctttaactttttcttctttatttctgtatccatattttgtgttgggcttaggcccaagttgtttgtatcatcataaaaccaaaagtcattaacatgaaaactttttgacaaaatacattttacatctgatatgcaaaaattaagatttggatttttgttaactactttgatattattaactgtttgagacaaggaaaaaaaaacaaatatttattatttaattgaaaggctttaatttagttaaggatgaggaagatgaagatgatgatgattcgaaaatgaaggtggtggatactgcaaatggctgctgagtgctgagacactctcgaaccccacaaaccctaaggatctcctccgaagatttccactattactggaagtgatatagatacgttgcaacaaagaagaccacacaaaaacgttattgagcagccgtgaaatcgatttaccaattgaagcttccccccatggttggtctctatccgtctcttattctacttttcgggttcagctgttattgattgaaagatttaaactttataggtatttgtgttcatcaattgattctgtttgcttgcttcgaaaattggttgtggctgaacatatatatcagtgttcctttctctttatttgatttctatctatatagtttctccaatcttagcatccacattgttgtcactttgagagtactatggaagcttaaagtagacaactttattgaggttgaaaaatgcatgaatggaaagagagaacggacttaacaacttatcaagtatattttggttgcagatttgactttccctg

SEQ ID NO: 9247 - DNA, 2750 bp, Unknown
  misc_feature (1)..( 2750): cDNA_ID_2181517_gDNA_ID_1972029_Annot_ID_178222 3000 nt of promoter + ATG
ttccagactttagaaatcggaattgcaggctcagacatgcattagatggtaccatcaaatataatgattaatcagcatatattgttaaccatcgagtgatctgatttttctgttaagtgctaattgctcgaaattggaaacaacagcatctcacataagtgctacattccttctactgacttatttttcacgttacattttaaatcttaggacctgcattagctaaagtgaaacagcaacttacctttccttttgttcctgcgacatgaataacttttagttcttttattttgtcttccaggtccaaaatctgtatttctcaaaccaaaacagcagacaaattcacagtattaaggtaaaagtcttcaacggaaaggataaaacaaattgacttgaatcacaacactccagaattctcaatggccagaggcaacataagtcatgatctctcaacagagaaggcccagataagctcagtctaaagagaagaaaaatctaccaaattccatgatcatttgagacagttcagaatgagttatctaacatccatgttgcactacaatattgaaaatattctcaacggtctttgtatgatataatttttatttcattagagcttatgcttacactagacagaaccacttaatagcgtttgactgtaaatggctgtatcaccttgagatatgtgacgacttgttcaagcttgtcacgatttcctttagtaggtgtgcgatccccacggtttcgacgagaaataagagtcgacagagcttccatggcatcatcatatgaagataaagctggattatctgccttgtcttcctttgaacccatattaatggcagctttctccacaacttctattgaattgcttgagtacctaagatctaaagacgccaacagagcaataagaacaccatccccaggcatgaaacagacaagtctaagcagagtggtgtatataacttactgttgttgaaataaacacggaccccagtgcccaaaggtaaactgtgaaagcccctcttagttttagtgaagaaggattttcttttgtcacaaaagaatggaactccaggtgctctgcactttagaaaccctttcccacaaacgagcatcagggaaagtcaaatctgcaaccaaaatatacttgataagttgttaagtccgttctctctttccattcatgcatttttcaacctcaataaagttgtctactttaagcttccatagtactctcaaagtgacaacaatgtggatgctaagattggagaaactatatagatagaaatcaaataaagagaaaggaacactgatatatatgttcagccacaaccaattttcgaagcaagcaaacagaatcaattgatgaacacaaatacctataaagtttaaatctttcaatcaataacagctgaacccgaaaagtagaataagagacggatagagaccaaccatggggggaagcttcaattggtaaatcgatttcacggctgctcaataacgtttttgtgtggtcttctttgttgcaacgtatctatatcacttccagtaatagtggaaatcttcggaggagatccttagggtttgtggggttcgagagtgtctcagcactcagcagccatttgcagtatccaccaccttcattttcgaatcatcatcatcttcatcttcctcatccttaactaaattaaagcctttcaattaaataataaatatttgtttttttttccttgtctcaaacagttaataatatcaaagtagttaacaaaaatccaaatcttaatttttgcatatcagatgtaaaatgtattttgtcaaaaagttttcatgttaatgacttttggttttatgatgatacaaacaacttgggcctaagcccaacacaaaatatggatacagaaataaagaagaaaaagttaaaggcccaagacaaagaaaagggaagaggcccagcaatgtgagacacaagaactttctgaacattttaaaccaaacaaaacaattctgaacatgcaaaatggcttggcaggtaatcacaattaggtcacggggaagcctacagagaaatctacttcgaatcccaaaatttctcaccacgtgtctttttcttacaaaattcgtctccaagaacgtttagaaacaaatcacaagatttaaaacaaatagtataagggaaaaaagtggagtcacgagaaagagatagggttagaaagcagtagaaacacacatgtgctattcttcgtttcgttcgttatcacatctttggctctctgcttcacttgtccaagattgggaacatgaagtctatatttgtacttactaaactttttgttatacaaattccatgcataaacaaaatcacaacttcagatattttttaggggaaatgtagtatatcttacataattctggtgtttaatcagtaattaagtattttaaaattagtttttagtttttacatatgattagtgattggttgttcaatccatgaatttcattatcgttagaccgttgaaaagttttataaaaaaacaagagtatatttagacaataattttattaatggcttctactcttctagtttgcaaaaaaatcagtgacaggagaaatatattttctagattaaaaagtatttggaaattggactatatatagtggacccctatcatttgttcataatgagcttagtctgcaaaatatataatctacctgagcttcattacaatcatttctgttttcagaaaatg

SEQ ID NO: 9248 - DNA, 3000 bp, Unknown
  misc_feature (1)..( 3000): cDNA_ID_3040862_gDNA_ID_1972029_Annot_ID_178221 3000 nt of promoter + ATG
ctctgcaccaattacagaacctctcattgtttctgtcgctctttcttcttcttcttcttcttcttcttaaaggagaagtatctatcgtttcttcgtgttcctcgggattcgtttctactttactttcgaatccaaacaatggatcaagtaagcagagtgagagagtggtcttcagcctttgagacttgtcacgtcctcacttaatctacgtgtcaaaacagttttatttagatgagtaatatcttcagaaattaatatctttaattttagtaatatattattgttttttcgttttttttttcttttctctattgctttaaattttgaagtttccatattaggacgattcggagattatgaaattgatttgaatatttaagttatgaattatgatactttcttgaattaattctatctcgtaatctctaaattcttctaacgattcactgtttggaaacttaacaatcacaagttgaaaaagaatattcgttgacaaaataattaaggaaatactttagttgttgaccaattattttggacatgtatttaactgatatatatcctattagatttgaacaaagaccaaaccattaatcacgagttgtataaattacaagggacacctatgaatccaaaaatccatcttcaatcaaataagtgaaaaaaaaatggagaaaatttcagcattcttcgtcattctcttccttgtctcgtcgtgtaagtaatttatgtcaatctcgatatatcaaacacttattatggttttcaatatcattagtccttaatttgcttatactattgaacgtatatatatacaggcttggtgacaatgagtgttggagatatatgtcaaacggatagagattgtgttgagattgggattccaagatgtaagagaacaggaaagatgccgatttgttacaacggatattgttgttgtatctgttctgctaaaagacttcctgcttctactactcgaaaacctccttctccatcaacctcaaaattagtctgatctgatataatatatttatgcatgttgcttttattttagctgggattaaagtagttaattaggactacttcattacttcactattatcttcttcacacgcatctttcatctacaatgtatttctattatcaatcatccctacgactcatacatacactgacgagctaagttaacatggccaattggtttttaaaacctaaatattatatactaacattttgcaaaaatggcagtagaatataagaaaatagaaaatggtacaagaatcttatatattcaaaggagcaatgaaattaagaacatgccttttgaggaatctgacaaattagaccattgtttttctttcacaatttaatggaaaaattattgtgcctcacatgtcctagcattaatggtataaatgaattttgactgaaaaagctgcaaactgagtaaattctcaaatctaaatgcatctttatgcaatttatttaatttaagaatggattatatcagaatctttattattaattacttcatactcaaaatttcatcttttcttcgttagaactacagcttattcagcttaaaaaaaacactaattcccaagaaaacaaaagatactcgtaaccctagaacaagggcaaaaagagcttcataggcatagcaaaaacaagaaaaaaaaaactttgaaaaaaaagaaaagggaagatcaacgctggagatccatcattcgtgagaactcagtgaagcacacaaaaccatcaccgtcctcatcaacatctgctatcatacgcttacaatcatctaacgtgcaccgttcatctccgatggtcgagaaaactcgtagaagctcatcagccgagatcaaaccgtcacgatccgcgtcaaagaactcgaaagtctccttcagctcagtcgagtcacgagccggatctaaagagactacacgactcgcaagctcttcaagacggatcgtaccgtcgccgtcgcagtccacctctttaagcataacgttgatctcctcctccgtcaaaggatcaggacctagccggctaagtaacgactcaagatcgtgtctagagacagctccgtcgttgtctctgtctatcaacttaaacgcttggagaatctcgacgtaggaataaggagaaggaacctccgggagaatgctagtcggggtaacggaaccgccaccgccatcaccaccggagtttttacagtcttggccggaagatgaggaagcggatccgaaggaaaaagccgtgggggacttagagacagtggaacgatctttggatctgatgaagaaacgttttggaattagtttggcgagtttcatagtgtgaatttaatgatttgatggagaaagtgaagacatatataaatggggggagtgataagtgtgagagtttacctattggcaatttcctggaagtttcctactcaactttaactttatcgttatttcatttatttttttagtgtaactgtacttagttagattaaccgaaaagtacgagttttagttgtctttagttacgtgtttcaaggatctttttttggataaattatatgcaaacattgaatatatgtattctaaagtttatcgattcataatcctcaatcatactaattaaacaattacaaacatattcatatgctttggttagaagttagatttatccaaaccttgtttttcttttcttttctttctgagacgtacattattacacttgaacaaatatccaaactttgaaacattaatgaaattacaatttatcataatcatagttcaaacttcaacaaggcgtagtattttaaaatagtttggttggggaagcgcgattgtctggtgtattaactaaccggttcgatacggtttttgaaattcgatttttttttaaggtaaactagattttgagagggagggaaaactaatttcgaacacctgagaaagagatattttaggtcttactttgttcgccggagaagattatcggaga

SEQ ID NO: 9249 - DNA, 3000 bp, Unknown
  misc_feature (1)..( 3000): cDNA_ID_3040874_gDNA_ID_1972029_Annot_ID_178210 3000 nt of promoter + ATG
ctatatgaattgcattggttttaattttgttccaagctttttgtttgacaacagttttgatacttcggaaaagagaagtaaataaatataaacataggaagggaggagctacatgtctactatttttattttataagccaatcagagcgtttcatgtcataccccactctcacctctcgggcaatttcacacccactctcaccaatcgcgtgatgagcgcgtgtatacgttttctgtgggttctaacccaccaaatggcttgttttgaaacacactcgctcctttaaaaaaaagcctcgagtgcgtgatttcagtgtctttctcctttaattccaattcaaacccaaccgaaatcaattgaatttttcaaaaccatgtaaaccgaaccgaaattaaaacacaaacgacaaactagcaattgtcacttccactattgatccaactccgacgaaccagattgataattttgattcgattccacacagataacatatagtccaaaccaaacgcaattcataagagagccaaattattacgctatgttcgaagcttttttaacttgccacaaatcaattcacaaaataagaaattgtgctcagaaattttcagaagaattctcgatcataactttatgcggtggtggtggctgtgaatagccaacggagattgctccatgagaaattgaaccggcatcgccgccggtttcattgtccacatagtaactccgattgctgtgcgagtttatctcagtctcccttattgcggtaatggtgaaaccagtccacatatattttaatcaatggattattgggctttttatattaggcccattaaattcatccggcttttaaataaaatgagttttgtgatagtccgagaccattgcattcctcagtgaatacaacaacattatctgtcttactaaatgtaaatgaccatatcaacaaaaaaaaatcgacttgtttgtcaataaataaaaattcctcgatttccatattcatataaaagaaatagataccaaattgttggcaaaaacaagcaaataatacatatttgtggggagagaaacaaaaaaaaaagctacactttaatagaaagctaataacatattgttgacttatgataacttgtaacgtgacttcacacgcgtagtagtattacttaaaacttaggtcacgtgaactggatacttatgaaccgagtcaccccacgggttacccaccaatgactcgttagccggaatcgttctcaatgctctccacacaatactattacatttaaaacccgacccaaacgccaactgccaaaccctatctcctcgtttgacccgacatttagcctccacgtaagccagctcgtaccacagcgacgagcttgaagtgtttccaaagcggtgcaaagtcatccgagacggctcaagatcaaactcactaagtccaagacctttttcaaccgcgtcaagtaacgctctaccaccagcgtgaatacagaaatgcttgaaacatagtttaaaatccggaacatatggactaacctttaaccggaaaagcttactctttaccaaaaagaggataaaccggagtttttcagataaaggcaaaacaagcggaccaagtgctgttagattcgtctttaacgtgtcaccagcaacaaccgttagttctttagagagtgcgactccaacgatacctttactatcttctttttgttcagcacaagtgtagtgtttatcgctagagcctttgtgagtccttacaatatgagtcaattcgtacttagaccggactcggtcttgactccggtttgagagcataaccgcagcgccacctactcggaatagacagttagggactaacattgaccggtcgttgcctcgatacatgcttagagtcatgttctccgtactaacaataactgcgtaggtattagggtttgcctttagtagatttgtggcgaggtccacggagattcctaaagaaagttcaagaagctatgaagagtggtaaactctaaaaggaaagatagaaactggggagttggctgataaagatggacagtaacgattgcgtaatataaatttatcggcctcgtcaagccccggcgctgcatcccataccggagagattgtaagttttgacgtcggttttaagcttgtaccggtttacgatcatggacgagagagatgggttagggttaaacaagctgcagtttacgatgaagattccgacttctctcggttcgattccggttttcttaaatagtgagttaagagctccgaagatgactaattcggattcatgtctcgcctcgtacattgatggagttggtggagaggttaacatgcaacgtggggagtacgtatcgtctcctaaaccggaccggtttagtatcctcgtcatgaattggattgtttcttcggtgtagagttgagcgcctttggccatgttgaagaacgtttcggatgagattttgcaagaatccgtgggttggtgacatgagaaatccactaggtaaaccggtttagaccgggtggttgagtaggcatagaagaagatggatatcaggagtaaaccgatcttgaccggaaaaggagagaagaagtcatggtgaaagtgaagtagatcaagttcaaagagagatagaaggatgagtataagcaaaagaagcttgaaatctgccattgcaatgaacatatgagaaaatattgggcattgggtgggttttaatttataagcaacgtaccttaccaatatttatgatatgaatagagatggcgttaagcgcgtttgtgccgcggaaaatgtggtctgcgttttaaggttcacctattcaaacaaaattcagagacatcgaaaatgaaaaatccttaatggttttttttgggctgcaaatcataatcggaatttatttaattgaagtacaagaactttgggccgggtgggtttgagtaacccggcccgacatgagtacccgtaaaacttgtttgaagcagaagaaaac

SEQ ID NO: 9250 - DNA, 3000 bp, Unknown
  misc_feature (1)..( 3000): cDNA_ID_2181472_gDNA_ID_1972029_Annot_ID_178209 3000 nt of promoter + ATG
agccagctaacatattcagttaaccctccagcataaaaatattcactatacacgtccctttctggatcatcatcctccttttttagagagattgtaacctgcattcaatatgaacctcttgattatgacaaaggaaacagtcgaacactagcttctgctaaataagaactcactaaaacgagcaggttaagaatgctccgtgaagcacacaaatcaaatatcacggctgcctatacctttggattgagaaaagcaagctccctgatccgtccagcaatagtgttatggtcgaattgaattgcagttgtgaatactgattaccagtttgtttcagaaaagataagttagtcatcaaatcctatctttgggagggtacaatagataagtacggaaaacaggcaaaaccttctttgtcaggccagaaccggatgcatgtcccttgagtcccccttgactctggtggtaggacatgacatgtaagtgttgttacgggctttccacgagaatacttctgctgaaactccattccatctctgcgaactataacctccaatgcctgtgaataatgggagctccataattagttgtatgcatattatcctaatagactcctgatgtcttgccaaatataacagtttcttatagttgaaagtatctgaaattgatagccccagcactcagtacagaaccattccaggatctttctcatatgatatcaggtttggacattagattaactttcacacaaaataaagaatttgcaataacatagcaaacccttcctatacgatcaaatgcgcaggatctaattatcattacaaacatgtgacagaggatattttcaatttagcagaaaaggcaacaatgtactaacggttacaacacacctctgacaatgcattcacaaccgataaacctacgccatgcaatccaccagacacgctgtacccactactcttgccaccaaacttaccacctgcatgtaagacctgcacaaataaaaagcactgattaattgcaggaccaaatgttaggataacaaaaacaaaaatacgtgtgaatcaacattgagacaaacatagatagctttctacacaatatataagtataaggtgtactaatagatgtttgtcaagtggcagtaccgtaaggacagtttccaaagacgattttcccgttgcaggatgcaaatctgtgggtatctgcagacagaaagcttgtatgaataaaagtgaccaaatgcattttgatattagcaacaaattttacttctgggatgaaagaaagctatatacaaaataaataaaaaaaacgtaaatgaataagatagagcatgattgacatatattgtttactcttggtgcacattagatataaaaccggaagctttgagaaaaatcagctaggaataccaaaattggctcctacacataactacagagtacagaatgccattgggtgccacttaacctttctcttgcatctcggcataagaaaacaatatccatgttttcagttacaaatatacgcgaagatgagtaagtggaacaaatcacataccccacgtccattgtctgaaatgctgactgaatcatctgaatgtaaaacaacgtcgatctttgaagcaaaaccagcttgggcctcgtcaattgcgttgtcaaggatctcataaacctaagaaacaacatgtattgggaaggatataaccagttgataggagccagtcacgaccaagaacgtcaaaagaaaaaggcatttaccagatggtgcaaaccacgagatccagtgctaccaatatacatcccaggtcttttcctgacagggtctaagccttccaacacctaatacaccatagagaatttaagatacaataacccaaaaaagtgaaactaagagattcatagtaggaattttcaataactatagaagaaaacatcgttccaatgatcgagtacacaaacataaaaacagcaaatcatctaaaaaagcaagaaaacgaaaaagatctttagaggaattacttggatgtgctcggaactataatccttagaggtagagctctcttggagagactccatggtcgatgacataaaacttttaggtgagaccgcatttctttgtacaagtctttgactaaaaacattggctaactgaaactttatcctgaaaccaaatgtgaataatggttatactaccaacttttgcttcagactatggaagcgaatcacatagctaaatgttaatagtaaactaaagccctgaaagtgaccaaatacgaaaaacatttttgaaggagctgaagaaagcaattgactttcacttgaaaagtagtataacataaaattcccaattccgagaaaacttggaaactatcagcaatcgcgtaaaggaatgatttttatcatcggaggcaaattggtattgcttcttctattcaatcttcatttcactgcgtaatttccccggaaaccaaaaccggaaaagtgaaaagaagaaatgagctaattaatacaatacctgggtgttgaagagctgagagctgaggagtgacggtgaagtgaaggatatagagagtgagagaagagacgaggacgaggacgagaagccatgagacgaaaataacggagaagataagagtgttgtctctgaactagagccatggaggagttgatggtgacagtcaaagacatgttttcttctgcttcaaacaagttttacgggtactcatgtcgggccgggttactcaaacccacccggcccaaagttcttgtacttcaattaaataaattccgattatgatttgcagcccaaaaaaaaccattaaggatttttcattttcgatgtctctgaattttgtttgaataggtgaaccttaaaacgcagaccacattttccgcggcacaaacgcgcttaacgccatctctattcatatcataaatattggtaaggtacgttgcttataaattaaaacccacccaatgcccaatattttctcatatg

SEQ ID NO: 9251 - DNA, 3000 bp, Unknown
  misc_feature (1)..( 3000): cDNA_ID_3040885_gDNA_ID_1972029_Annot_ID_178202 3000 nt of promoter + ATG
gttacaccattgaccattgttgtcttactgcttctgtgttctggatgtatcggttcacagccatttacatgaagctttttaagctgttgcaggaggagtcccatatcgattgcagcagcggttatatacatcataacacagctctctgatgagaagaagcctcttcgaggtatgttccattcacattttgtgaactgaaaacagcctaacatcacggaaactgtaattgaaattttgaacctgcagatatatcagtggcaactggagtcgcggaaggaactataagaaactcttacaaagatctttaccctcacctttccaagatcataccagcttggtacgctaaagaagaagatctcaagaaccttcaaagcccttgagtgtcttcctcttctaatctcttactcgcaaccataccttcaagtttcgattgggattatgggttataaagttgttttgtccagaagtgcgactggaggcacgcttgaacaagagttttacagtagatttgtatcactttttcttcataaggtactatacattgttgaattaatgagatggtatttctagttgatcataccattttcagcatcatgccactgacctatatattaaccccgctaattaaggcaacggtttaaagattgattaatgtttacttcttaacaaaggaaacagagtagtatctcattgttatatgagtaaaagagattaatttgtaatgttctatcgccggtccacaagcatttgaagcagtgcaactgttcaagatatgaaaatttttaagagctaaagatttctatgggtaaaggaaaatggttccaatatatatacagaaacgcttttacatgcatggtttctagtaaattaagattacttcgcatagaaaggaaaagtgatttctgagaaactaataactttcatgcagaaattaataaagacataataaaataaacgaaaaagacaagtttgcgcatcattggtgtaagtttacctaccacaaggataaaatggaaatctacaatctttgctagagattggaccatgtcacctatatgctcatttttcatcttctattcaaagtaatgatcaaatcatcattttttgtaacaataaaattttgaagtcatcaagttttttttttaagtacatatattcttggttcagttatatccagaagaatatatatagaagaaagtaaaagttacatgtgagaatcctgaactagtttgaaaagctgcataaatgcatcataaacatgccaattttgtatctagagtattttctgcatacacactctttggatcgtaatctctaaaccagctagaatatgaagaagtgataattcaaacaaatgaaattttcttcgttaaaaagaactcaaacaactgaagttagtccatcaacccgtaaaccagtttaccgttatatatataagaacaccttttatataaatcattcgagagggttggtatttatcttaatttgtttttaagagatgtataaattaatatctaaaattccatgatttagataataattattatacaaaccctaccataagattggtgagaggtatgactttggttggtgaagaggaggagcggaaaagactttacccaaatcttaccaactctatccattatcaaattctttaatatttgcatgcatttagtttatgtgtttggtaagcttttaaccagatctataggagaattatacgtacttaacttccattcccattttcaatattctaatttttctcatcttccgtatatgaatcgtcgattatgtataaatcattagtcacgaggctaaattcatgatgtctttgtagttttgagtgttgtccacttaactccatgttttggattccaaatttccaattgtgtagtttcaagttctctaatatctccgtccaaaaatattccaaattaaagccgatttagatggagttatacttttacccattttaattataaataacggtaaatgaagacctttttttataaacttaattaaaagtgtttatttaaatcaattcataaatagataaaaatcaacataaattaaaaagatcgaccggtgtgttgcctaaaatgtctaatgtaattaggacgaaccttggatcagcaacaaacacacaattaatgcagataataaatgagttgtatacttgtattagcttttttaggtatatgaccgttcgacagaaatagtagtcgtgtgaatgcaacaatcgaatgagttatagacacacaaaaagacctaacgtattcagattctataaaaagatacctacctggtggtagtaataaatgacattctatcaattatacgatctggataagatttggtataggagctatatattaatggaattactaagttttctgaaactacatgtcagaaccatttcatgcaaagaaagttgattacgaaaaaataaagttttatatgattaagaaaattaatactttgtaaaaaaaaatgttaaatatggatttgtggtcttcctcacaccagaccaaacatcatgtccctatctctggcaaaatacctgacgctcgagctcgacaagtaaaagaagactcatatacatggaagacacgtggtgactatattgtccgtccatattgcaattaacatctgacggttgtggacacatttcaactaacccgactcgttcgttctcaccaactctttgcgtctgtctatttaaaacctccgatgtcgctcacctttctctcaggaaatttatttgctattaaatttcctttttatttctccctttactttttttataatcgcaaaaacaaatttcaatagttcttgtaagcgcaacgtgtaagtagagacatacacacatttgtagtgttttgttttgtataataacatcatcgcatatagagaaaagaagttaagacgaccgtatatatcgttttgaaaaccgggtcggataaaaaaaaaccggtttctttaaccgagtcggcgcgcatg

SEQ ID NO: 9252 - DNA, 3000 bp, Unknown
  misc_feature (1)..( 3000): cDNA_ID_2181450_gDNA_ID_1972029_Annot_ID_178204 3000 nt of promoter + ATG
ctgctaaaagaggattcgtcggaccaccgacacgaacaggatcattatcaccggactcattagcgaaagtacgccactcagaagtttcatcgattgagtgagattcaagcacgagaccacactctgaacaaactgtatctccggcggaatggtcaaacacaacctccgtgtgcctcttacagtccgaacaaaacgcgtcactcatagcttctctttctcttctcacaagaaaaccccttttcactaattggactttgattactaaagattgttactttcttcttcttcgtctttttcctcgtcgcgccttgagcttacttactttttcaacgatttgttttcttctcttttctttctttttcccgaaagatcaaaatttgcgacgataccgaactcggcagtatatcaaccgtccacgtgtctaatgaggatcgacggctaatatgatagacatgtttttgtttgttcagacttcttcagacccatctatctataatagggctctgaaacaaacccggcccaacgttttgaagccctatattgttttgggtctctaaatgattctttttacttttatgttcatgcacatcatccatacggccataccacatgagattatcacacatgggtcataagtcataacacaccaaacagacacagtatatgatacacaactttggataaaaataaacatggacataactaggcaaataccaattagcaatctcaatattgtaagacatatatcgcatatcatgctctcaaaataccaattaggaacggattttaggaagtgaaataaataatatccaggctttccacaagacttattatataataatgattgacttttatgaactttcttaaactaaccctaagaactcaagttttgttttcttatgaattctataatataaaaggtataattatgtcatatttaattaatacaatttatttatacagcaaactcaaaattgacatatgaactaacacacatgtaagcaaatgattaagacaagtgtacgtattaaacagatgcactatttttattttggtcgatacccatgaccatgaggatatctcttgtttctttgtatttttaaaacatcacattttaattattaagagaagaaagttgtttcgtttcgtagactataaaactcaacaaagaaaatttccggtcatctgaatgtattatgcgttactcatgatcgtcaaaaagtggatatggttaaattcgcaatccctataaagcaaagtctcggtctccaatgatcatctttgcgtacttatattgcagttcatcgatcattttttccaaaaaaaatcataattaattgtctcaacatgtaacctaaaaagattacacgagggcaccaaaatatggacgtcaataatttagtgtcaaaaactttggtaaaatattggcatcaccatcattatttctcattctgtttaatgtatatgacagtttatatatataacccttcttaatcaatgaattttatagatcttattagagacttagacctttacatctcttcgaacttggtctaaaagtgggtcacaatactttatattgacgttagaaatttctacataacttgaactatacatgaatttagattatacgatagaagataatatattcctaatctgctgaacatgattaatcaatatcatattcttcttttttatttttcattcttaatattctagaattttcgcccaccagtttttctctttatgaaattcttatttaagtattttttcgcctaccaacttttttattttcccttgggtctatattttgtattaaacgtgttatatatcaaataatagtgcatcagaaggtggcttttggcaagcaaaaaaaaaaaaattaatactagatgttgtttgtagttattgatataatgacatgtttgtatgtatttgacctttaagaacgcctccataagctatttgatcatttcttccttttcccatgacattctccgcggtttttataatattaaaatgtccaacaatttgaaattctttattcttaattggtcatccctatgagtagattggtctcatcaattatttataccaatatataattttaatcatactataaaacaaatttttgtttcaatggcatttgtgctatatatgacaacttaattttggattttattgtgttgaaccataaactagtcttggatcatgcagtctttcactgattttttaaaattgttttatttccggttcaacctataaaattgttaagtctaaaataaagatcacaatgagctggacctcagataacataagactccagcgcgccagaaataatacattgaattttgtttgagtcatcatatacactaacatagaaaatatttggtgtccaataacttgatttaacttaaagcagtttctcttttcatgctgattaagacataaattccacttaaggaagttgaacatgtcactgataggatgatttcaactaatcacgagtataaagtaagacgaataattagttattttaccaaacatgatttaaggataaaggaatcttgtgatgcaagaaacatatataagcctaaaagatgaatgatgggtttggcctaagtccctttctcgttctcccacacgtctcctcattcccctttctaagaagatcgaatacatcccaagacttagtaactttctctctcttaaccaacaataccaaattacgtctctctcttccaaagaatagtatgcgaacgtctctctctaaataaatactctgatttcaaagctaaaacttacaacaacacccacaaaacttctctctcttatctcgtctacttgatctctctactctctttcctctctagctacttctctcccttacgtctccaaggagatagattgacaaattctgttcacaaaggaaaaaagttcctctgcatacgtctctctctctatgttcttcatttatatgacttgaataacaagtaaagg

SEQ ID NO: 9253 - DNA, 3000 bp, Unknown
  misc_feature (1)..( 3000): cDNA_ID_3040878_gDNA_ID_1972029_Annot_ID_178205 3000 nt of promoter + ATG
ttggaattatcttgttgaattttcctctgcatattgtttggtttgactttgatgatcgttggtgccaaatcctcaagttgtattattattaattcaagttgaaagtattaaaaaaagtcaaatttttaattattctccctgctagcctggtttttgagtatatactgatttaagaactccaaattgcaggaccaaaagagtttacttcacttttctttagtcttcagaattggagggtaagttcaaaggtttttctaatggtttgatgataattgttggtcaagaatgttgggagttgttagctcatgtgggttttgtttggtgttgcttctttggaattggtttcagtctatctttgagaggtttgataaggacagaagcggtagaatagatacaaacgagctgagagatgcactcatgagccttgggttttctgtttctcctgtgattttggatctgctggtttcaaagtttgacaaaagcggaggcaggaacagggctatcgaatatgacaatttcatcgagtatgttcattcgtttcaacccccttaccttttcttactctgtaacaagtataattcatcactgattctggtttattttccattgatgtaggtgttgtttgactgtaaaggtatgctattttcatggcttgggtcgtcacattctcatgcaattctaccatttgaattattcaagattgttcctttacaatgtgtctaatgtatgttatgttttgataaaaaataatcgcaggggctcaccgagaagttcaaggagaaggatacggcgttatcaggctcagctattttcaattacgagaacttcatgctcactgttttaccattcctcgtcgcttgagtgattgtttttttttttttttgttgaccaaagagattgttttctaactctattttctttgtgagcttttggatattttatttgttgtctttttatctttctccggtaagattcagacgtgggtcttcttttcatatgagcaaaaccttagtaaccaatcttgtggaataagtttgaatggactaagagcccaatatttccaattacagtaacgacagcatttgtgtttcaaaaagtgaaactcgattttcttaagtttcgaggccaagtaatccaaatgggtatgaagaagccaaaatcaaatctattacgtacgcaatggtttaggacgaagattgttgctagaaaatgtattttaatattaacagtagtcgttcattgcatgagtaaatgattaaataattaaaatttatatttattaaaatataatatttagcacagatgatctagtgtatcttaatagttggtgaaaatgcaaattttcatggttcgcattatttataaattttttgactcaattaaagaaaaatgagtaatttctttcatcactcatccatattttcttgttattctactacaattagtttgaaattcatattaacattaacatttaacataaatgttgtttttagatacaattaaagtgataatgtaatagattttcccgttattaaagcatagaactcttacgatctgacttttaattattttttataaaaaatatcgcacatgtagggtcgcgtgcaattgacgcgatacgttaaataaatttgaaccgttgatttaggtaaagaattttttaatccaacggctgagcaagactaatttgaatatgcaactctagatctctttggacaaagtttttcaatgtctcaaaactcaaaacattctatgagtcataaactaaaaccatcttttaaaacttactcatagatattttaaacttaaatttatttttttaagtattttttagatagcaaagaaaatataaataatctggtgaatttagaaaaaaatatcatgggaaaggtaaatgtggcatgaaaaattcaattctaaaaacatatggaagacattttgatcactaatcatcactttttagtggagctattttttcacaataatttatatatgagcgacacaaaatgcattaatttagtactattcgttattgaagtctataataaaaaatggtctttttgtattggttagaagaagttttctttgtctcatcatcagttatatcaataaatgttagtatcactacttttacaaatatgaaaaaatattatttattctgttttaacaaaaaaaattttatttatcttgttttaagaatttcagtagaaaaagaagaagacaatcccatatagctaaaaaaaatcaaaagaaaaaaaccgttacatttttggaaaaatatctttaatgacgtttaataggaataaatcctctacaattctctacaaaatacaaatgattggtgaatggtgaaccccttataaaccatttaacaaaaacaaaaaccttaaaaaccctttaatactttctatctctttctaaattttttaacaaatgtaaagaaatctaggatgcggtataaactatgaaaatcgtgatgattagttaaagatgatatttatttcccaaaattagcataactaacaaatttgaaatccaatgtaattaaaagattattaaaactgctttgcattaccatcttcgagaaatcataagccgttgacacatatgcgaatcggacggataagattagttcactagatatttgaattcaaacacagtaaaagagttaacgttacaattttgtccgcttaggttaggatccgaacctaaatacccgaaccagaaaacacaaagaaaacaaaggaaagaaagcttcgaattataaagaaaacattctaagcgattcaaagaaccagaatcagagaagaagaagaagaccagacgagactctcttcacattttctagggttttgatctgttgcccagaaggaaagaaacagagtccataattggtaacttcgatttctttccttggctgattctgatgtgcattgattttgatcgattagtcaacttttttcgttttcaggaagataaacgagaatttggactctaatg

SEQ ID NO: 9254 - DNA, 3000 bp, Unknown
  misc_feature (1)..( 3000): cDNA_ID_2181461_gDNA_ID_1972029_Annot_ID_178207 3000 nt of promoter + ATG
aagaaaatcgagtttcactttttgaaacacaaatgctgtcgttactgtaattggaaatattgggctcttagtccattcaaacttattccacaagattggttactaaggttttgctcatatgaaaagaagacccacgtctgaatcttaccggagaaagataaaaagacaacaaataaaatatccaaaagctcacaaagaaaatagagttagaaaacaatctctttggtcaacaaaaaaaaaaaaaaacaatcactcaagcgacgaggaatggtaaaacagtgagcatgaagttctcgtaattgaaaatagctgagcctgataacgccgtatccttctccttgaacttctcggtgagcccctgcgattattttttatcaaaacataacatacattagacacattgtaaaggaacaatcttgaataattcaaatggtagaattgcatgagaatgtgacgacccaagccatgaaaatagcatacctttacagtcaaacaacacctacatcaatggaaaataaaccagaatcagtgatgaattatacttgttacagagtaagaaaaggtaagggggttgaaacgaatgaacatactcgatgaaattgtcatattcgatagccctgttcctgcctccgcttttgtcaaactttgaaaccagcagatccaaaatcacaggagaaacagaaaacccaaggctcatgagtgcatctctcagctcgtttgtatctattctaccgcttctgtccttatcaaacctctcaaagatagactgaaaccaattccaaagaagcaacaccaaacaaaacccacatgagctaacaactcccaacattcttgaccaacaattatcatcaaaccattagaaaaacctttgaacttaccctccaattctgaagactaaagaaaagtgaagtaaactcttttggtcctgcaatttggagttcttaaatcagtatatactcaaaaaccaggctagcagggagaataattaaaaatttgactttttttaatactttcaacttgaattaataataatacaacttgaggatttggcaccaacgatcatcaaagtcaaaccaaacaatatgcagaggaaaattcaacaagataattccaaaaactcaaacctagattgttgaagcaagacaatcttctagttctagaaagcgcaaaaaaggaaagacctagaacaatcaatttgagatcagtttgaaagaaagaagaaactgaccaatcttcctgacattgctgttggtgaatagatacataaggagatgaacagttcttatgctgaagctctgattatacgaagatagagctccttgaagctccttatcatcgatgaatccactattgtcccgatccgcagcttggaaacaagccacaatgttcggatctgttccgggaggaaacgccgacggaaccagagacgcaaacggacttccataagaagcttgcggaggaggagctccgtaacctcctccatgtccagactgctgcggcgctcctccgtaacctcctccatgtccagactgctgcggcgctcctccgtaaccaccgtagtcggaaggtccagacgatggatgagcaccgtagccaccgggagatggagatccgtaggaggcgccgtgaggtttctctttgtgcggcttattatggtctcctggaagagacgcgtacggtgctgacggtggtgcaccgtaaggagcgggctgagctccgtagggaactgcgtacggtgaggaggctgatgatccgtacggaggaggaggattgctgccggatgatccgtacggaggagggttattgccggttgatccgtacggtggctgaggaggtggtggattaccgccgtaaccgtaaccttggcttgatggaggataaccagacatggtgagaagaagaagagaagctttcagagagatcaacgaagaagaaagtgaaaaaattagtttgcgaaatttggaattatgatataatgaagaaggaaattagctaagtcagatattttggggtttggattattacgatgaagccattagttaagaacgaattagctctgtacgcgttgaggggtgaaatcgtaattttaagatgatatacgcggctgacgcgtgacgactgacgcgtcaattaaaatgaacgaaacggctgaggcccattaatgaaatgaaatggcagacgaaaaaacaagaatgtattgagagccttgaggcccagtatattagtttttttcttttggtaggaggcccagtatattagttaattatccaaataattcatatctcgcacacatttttctttatatcatgaaaagtgaaaactaagagaaacgttaaaacttctaatttcgtgatacatgccatcaaatagccactaacaatctcaaaatcttatataaaccaaacatgaaccaacaacaagtccaaaataaataaaccaacaaggcaaaaagagactcccaatagaatacgtaagttgtttttagtattatacatttttgttaataaaccaaaatgtacagacaaaatctaacaagttttcatgattttacgaatcacaagttttagatataaagtataatataaagaagttctgagacattggcctagtcctactaataaagaataaatctagacttttggaccattttttggtaaagagccgaattttttacctaatctgggggaaaaagattttgtttattaaattttattttcctctttgattatcataataatcaatgtaacacaaatacaacagttttatacataataatttcaaaactcctaaataagattagtcaattcaacttttctcaaatatactttccaatttaaaaatacattaattagtcaactgcacattaattaatatatagatttcaacttaataatacattaattatcccaaacaaataatttgtcagttcaacatatatttatatatctttaaaaaaattaaaaccttcgtttttttgtaatccatctgagcgcttcaaga

SEQ ID NO: 9255 - DNA, 3000 bp, Unknown
  misc_feature (1)..( 3000): cDNA_ID_2181458_gDNA_ID_1972029_Annot_ID_178206 3000 nt of promoter + ATG
atatataagtaagtataagtctataggttaagatacaaaaatgagttaagtgaaaatatcagtctttgagcttcatctaaacctgcgtttagtctctccataagcaaccaccccgagaacggttatactgtacccgccaattcccatcaccgttaccgggtttcggaaaagcaggatcgatatcacaactgcaaccgctcctttagcatttccaaggacctgaaacattaaacatacacatgtttgatccaattaggcactcctctagttttgtttaagttcaaaatcttttcagtatttttacctgcagggtaagtgcgcttgtgtgcttggtaaccagaaagtttaacaagttggctgaataagccattacagagttaaccagcagaagtatatacatgtacttatgttgtcttccgagtgttagtgtcacactcatcacgtccggctccataaaaattgtgacaggcagaagagcaatgacggctattggagacatgtacagcatcaaattcatcgaattcaacctttctctgcaagaaaacttaacgatctgttaaaccctaagatgagcattagtagcttcagcttcctactttgcttatccaactgtagttgcagaaccttttacattattatagcatataataaggttttctgattcattgagtaaccaaatgcaaaagaaaagttaacggatttacccctcggaagaaagtaagatgccttgaagaacagatttaaaagctcttgctgcagtagcactaatgcacataatgaatccaaaccagtgaaaacctggttcaccctgtaaccacaaaggcagacccagagcaggatcattcaatacagaaatcccataatcaacaaacaaaacattcaatagctaaggcctagcaaagagatcaaataattcacagaacaatgtagaatgtaagaatggcaatagttacaagaagaaagtctgaagctttagataacacatgactggaataacgcattaaaggatgaagctttagataagtagataatacagccacagaggactcaaatttgtacttgacagggaaaattgaatttgtatactgaatgtaatcacattcatgaaactaagcaaacctattttgggtttcagacacatacgtggaacacaaacaatcatcttgaatggctctaaactaacaacaaatcagacatcacaatctacaggtaaaagaacacatatttcaaaatcggcagaatcaaaatcaacaaccaaagacgttttcattacgagaattgtagagaaaaagacgtaccccactggcgataacgacaccggtaacaacggggacgagagcgccataagtgacccaagcttctctcttaaaggtcatgatataagcgaagagtgcagtgaaaaacggcgtcgtagcaccaacggcttgattaaaggagacagggagataacgaagggagatgtttccaccgacgacagaggcacaaaagacaatgctgagagtcgcaaccttgagaaactgagaacgagatttgaggtattggagagggacgagcttgaggaagacgatggagacgtagctgaggatagcgcaagcggacatgtgacacattgtgaggaaaatagggaatttgaatccgtaattggagaggaggaacttgttgaggagaagaacaccgatgttggaggtgtaccagagaatgattaaggatgatatgaagagggtttgtttcttcggagaagatgaagaagacgacatgtcggatttctgatctgggttcttcttgttcatcttcgtcgtcgatgagatcgagagatttggttgttttttttggtgggagaaagacaggagaggaattagctccttacctcgagcatgggacgacattcttgaagcgctcagatggattacaaaaaaacgaaggttttaatttttttaaagatatataaatatatgttgaactgacaaattatttgtttgggataattaatgtattattaagttgaaatctatatattaattaatgtgcagttgactaattaatgtatttttaaattggaaagtatatttgagaaaagttgaattgactaatcttatttaggagttttgaaattattatgtataaaactgttgtatttgtgttacattgattattatgataatcaaagaggaaaataaaatttaataaacaaaatctttttcccccagattaggtaaaaaattcggctctttaccaaaaaatggtccaaaagtctagatttattctttattagtaggactaggccaatgtctcagaacttctttatattatactttatatctaaaacttgtgattcgtaaaatcatgaaaacttgttagattttgtctgtacattttggtttattaacaaaaatgtataatactaaaaacaacttacgtattctattgggagtctctttttgccttgttggtttatttattttggacttgttgttggttcatgtttggtttatataagattttgagattgttagtggctatttgatggcatgtatcacgaaattagaagttttaacgtttctcttagttttcacttttcatgatataaagaaaaatgtgtgcgagatatgaattatttggataattaactaatatactgggcctcctaccaaaagaaaaaaactaatatactgggcctcaaggctctcaatacattcttgttttttcgtctgccatttcatttcattaatgggcctcagccgtttcgttcattttaattgacgcgtcagtcgtcacgcgtcagccgcgtatatcatcttaaaattacgatttcacccctcaacgcgtacagagctaattcgttcttaactaatggcttcatcgtaataatccaaaccccaaaatatctgacttagctaatttccttcttcattatatcataattccaaatttcgcaaactaattttttcactttcttcttcgttgatctctctgaaagcttctcttcttcttctcaccatg

SEQ ID NO: 9256 - DNA, 3000 bp, Unknown
  misc_feature (1)..( 3000): cDNA_ID_3040893_gDNA_ID_1972029_Annot_ID_178200 3000 nt of promoter + ATG
gcataacatcatcaactgaattgttagagagctattgggtcaaaaatagaattgattattcctcattaatctgaatctggatataccttaatgttaagatagtcgctgattgcgtccagtataaattgaatctcatcttcatgaggttctggaagtgaagtgattgaagtattagagtctgtagtgcctgctactgttcttcccaaccacggtaacataaacacaacgcggccatccttagttttagggactatcaaccccatgccttcaggagaatagtaatcaggcagcacgatgtgtacaccgctgcttggacaaatcattggttttgtatcttcatcaatcattttcctaatggaatcacagaacggtcctgccgcattaacaactacttttgcatagctgttaaattcttggcctgtcaaattgaaacatctcatcaaaaactgcacaaatcatgacagagcagaggtatactgaattgcacgaaattgctagtcgttttacctgtgagattgttacgaattcgggcaccaattattctcttagtagcatcatcagtaataagcgagacaacctcggcatggttgagaactgccgcaccagctaacgcggcagtacatgccaaacccacattcagacgtgaatcgttcatttgcccgtcataatacacaacagtacccctcaaattcttgtctttccctttccttgcaagagtggggaagagctcaatagactcttttgcagagtaatatctggacagatgcaataaccgtggtccagcaaccaagtcatacatcttcaaccccatccagaagtagataacttcgaaccaatcaaaacaaggtgtcatacagggcagagcatgacagagatgtggcgcattctcaatgagctgtttacgctcctcaagagcgtgaaatacaagcttcagctgtccataatcaagattgaaaacagctttctccaagtaacgaacccctaagtgtaaacgagcactaaatcaaatggtgtatcaagagccgcaaatgtaatacatatccttaacatgtatgttccttcaattattgaattaacaaacaaaaacacaacaatgagtggcaaaaaccaagtaactagctacaaattcttcaatataatttcgtcaattgaatggtcataccactcaattccaactagtaaactaagaaatggtttaatattaccagacaattcagagagcttcttatacgaaattcggaaatccacgccacatagaaaattcaaaaattaaaagtacctccatgaatcagctttgtagatcgcgaagaagtcccagaggagaaatcctcgcgctccaccaaaccaacacggaggccacgtgtaacagcgtcaagagcaactccagaaccggtggctccaccgccaatgacgagaacatcgagcggatcagaagcggtggctgcaatcagagcagactcttgagcagatcgagacggtacagaagcggtgggatcaccaagcctacgcctcaacgaatctagaatcggaccacctcctttgtcgctggaggcaaccgacggagacaggtagacagcgccaccggatgcagcggcaattacggcagctccggcagctaaacggcgaatggaagcgagagacatggaatttaggagagatttagagattgggtgaagaagattgcgttgggaagcgagagacgatcatgggaaagaagaagaagaaaatgattgcgaatgatatcaaaaaatggaaatagaaatctctgtaatggaaactatatcgttttaaattactgtttcaccctcacaactttccatacatagaaggtaagtgaagtggggatggtttggtcatttcatatgaatagagagttccgagttctaaggaatggtttgagtgggctgcaagagatttttcttataggctttgtaagtttttgattaaaaactgttttgtacaaacaatagtgtttttgattttttaagaaaaatagaagtaatttgtgcgagttaatttaataaactagactaacaaattataaaattgaaaataattatttcaaaatatggaggatttgcaagtgagtttttgctagttcttaaaatgtgcgaatcttgctctcttaagattggaaatgtttaggaatatagtcagtaagacataactaaatatttgatcattattagtattaaaagagttaagccatactaaatatttgttttaatgctattaccgtagagggtatttctctattgtaaataaactatattaattaaacttctgtataaagattacaaattaattatcagaaaaatgaatgaccgtaacgaaataaacgaaaaatacaaacttctctctgattaaaaaaacaaacgttagaaattgtgattatttattgtctcgatttaataagagattcttgaatttaggtgacaaatttaatcattaattaatcatccttttaactttatgtaatttgtccatcagacaaagagatggatatacgatgtcgtaatagccgcatcttcttctaatcaccttttttaagattagtttatgtaattaaaaaaggttaagtgtgacagtttgggagaattaccagaggatgaaggcgatctcagacatccatgatttgcctcttttgtcttctttaccttattcgtctctcattctttgaatcccctttccctttctctcaatcttcctcacttacatttcttatctcactccctctctcactttctccttcaatgttctctcctctgcgttttcacgaaacagagaaccttatcgttccgtcttcgtagacattgaaatcgatagagaggtgattcattactttgattcgcgatcggattctgatcattactctttttcaaaaatcgatagattcttctccgatttcgtaacaccgacacgaatttgtttttggctttttctggtttttgcaggtgttgatttgattaggtttaatattgattcggatgaagggaagag

SEQ ID NO: 9257 - DNA, 2147 bp, Unknown
  misc_feature (1)..( 2147): cDNA_ID_2105228_gDNA_ID_1972029_Annot_ID_178198 3000 nt of promoter + ATG
gaattcacctcgatagttcggatcctcagtaagatgcccaaaggtatcgagatctgtgctccaaaatacatacggaaagagcattgcaactttattcagtaacccaaaacctaatctctttatacaatcaagctttctctgaggtaattcgggaacaaatttgatggatccgttcttaaggacaccaaggggaactgtacacagcaccatatcaccctcatacacttgatttccagcagttaccttgacaccatttgaaccatatctgattgtttggacggtcttctcatataatattggtacattttcagccaaagcctgaaccagccttccatttcctccaggcagaaagcagtgatctccacccatatcatatgggtcatcttgatcccagaatgcaagagaaagctttgatactaggcccgcatttgcatactccaagttagcaagatgccagttaaacaaacccatctcctcggtggccacatcattcccagaaacctgcctgaatgtctcgagtgctgccccaagggagacatccatggaaacatcacccatcaactgcctaagtttacttgccttgtctagaagctggttaaacgctacctcaacctttatatccacatctggatcaaccggcttaccatccaccctataaagaggacacttgtctcgtaccttatagagagaagaaccaagctgtctcgctataatccctaaaggatttcctaatgttccagtcaaaacactcccacctaaatccgctgcagcacctaccctattagcttccatctttttggtataaacccgtccaccgggtcgtttcctaccctccaaaaccgtgactttgaagccaaacctcatcagttgcctagctgcagccaacccagataaaccagcaccaactataatcacactagacttgcttgactgagcaggaaacttatctttaatcgcctgtgctattccaaaattgatatatccatgtgtaaccaagtaattataagccgaatctaagagactactacaatgtttaggaatcgaattaagaaacatctcctttgtgacccaactagatatattttctcgccatttggatataatgtggttcctaatcaaaatgtaattgacttgttcaatgcctccaacaataggcaccacaccgaattcaatctcttcctcggtaagcgaatcagcaggaaacccagcagtgagagcaagcaaagcttcagtggtagcttccttgttaatcgtaatgatctcatcaccaatcccaggataacttttcacagtctggtttgatccattgacgacctctacgttaaatctaccggaagaagaagctgaagatgacacgaaattactgttaccaggaagaagacctacgttagggacgggaagggaattaagcgaagacattgagcgctgagaacgtcctctccttcgtttctttggtgcggagaatgagaccatctgctcaaaactagggttagagattgaggtagagatcgaattcggaaatggattcaaacttgtttcggtattggtgtttgagctcgactgtggaggaggaggagtagagaattgagagtgagaaacagacggaacataattatccggtggattcatcgtttccgtcgccgtagaaactgcaggagagtgatcgatgagaagaggaagaagaaaaggattgtttggttactggattaactttatctttatttaattgaagagctttttgatgatttagtttcccacgatttttaaattattatttgggaaaaaacagaaaacaaggaaaaagtaaaacagaaaaagaaaaaaaaatagagagagaagaaaagtctggaaaattagaagaagaaattggaaggagaataaaacaaacgcgtatcgtatagatttttaccttttcttcttcgtcttctccattttctcgagatttagcttttctcttcgtgatcgggaacgtgttgatcagattctagcgtggattcgtatcccaggtaagattcgcagctgaaatcgaatttgtttctcgatattcttttctctctagatctacttccagacgtagtgtttgattaatttttgtatacgccgatagtctcgtcatcagttgaatttttcatgtaattcgaattatg

SEQ ID NO: 9258 - DNA, 1451 bp, Unknown
  misc_feature (1)..( 1451): cDNA_ID_3040936_gDNA_ID_1972047_Annot_ID_178236 3000 nt of promoter + ATG
gaattctctatatagtttttcataaataatttctgaatttcaatatctttgtatgagagagaattggtcattccatgtgtgtggtttggcctttgtgggacatgttcgattgaagtattcctaataattttcaataattaacaatttcttctcttaatagcatagataaatgttgaatttattttgttaataaaattaaccctgatgaatacaacaattttgaatatgtcaaattagaccaattcaaaatataactatttgctttctttcttctcataatgtttatatatcccactttagtaaatggacccccacgaagcacaccacagcatactcttttttattctttccagtttctaatggtttacttatatactcttatcattttctaattgatcaatttgtcatttattggcttatcttcttataaatgttttttgtgttagttgttgatatctcattttcttgtccagtgaattatagcatttcaatgtgtccctcatgtcgtcaatataatgttttattttccttgttatgatccatatcttcatgtgtggtccatcttcaaataaagaatggattgttactactcttatcgtttgggctagtttttataattagacacaaaatttgtaactttcattctttttttagtatttaacacaaagtaatttgatggattagtctaaataataaaggcaaaaagttaagtaaatgtcaaaagagatatggcatatgtctaatcataaccaatgaattgcatggttctatctaaatagcaaccatatcatcccacatgccattgtccaccttgtctatcttaggaaaacactttgtttgtaactctattgtactctttgaattatgaaatctatgtaaacccttcttattgtgggggacaaaggctaattttaatggtctgtccacttctgcttgactttgatacataaattaggggtggctcatgtcatatctatgagaattaggtacaaaagagttttcaaatgagcaagttgtatttttattcgattagccgtcgtattatgtcaaatataagttaaaaatatgtaaaagtacaaaatgtagattatgatattagggatgaattgagataaaattacctataatttattactacgcataataaataatttgttacgttaattctcatagatacgttatagccaataccgaacccctatttaagtcaaaagtacttctaagtattttttagcgtaaatcaatttttatgaaaagcaacaattaagattaatgtagtaatctagtaatcgttaaaaaagccactttgttagtattgcttaatactctctctctctctctgttcccaaggagatgaaaagcttcaatctcaaaacatagcagctctctcaataaaccaaacccaaatgcaagctgtgtagagagaaacggagtgaggaaggaaggagatg

SEQ ID NO: 9259 - DNA, 3000 bp, Unknown
  misc_feature (1)..( 3000): cDNA_ID_3040971_gDNA_ID_1972047_Annot_ID_178249 3000 nt of promoter + ATG
attcactgcagatctatcagagagaagaatccacatatttccgaagacaagcttggcgacaacattaaactgcgtttggcgatcaggtgctcttgtccacaagaaggcgtttcaaacgctagttttctcgttacgtatccggtgggcgtccgcgacagcgtttcaagcctggcggttaggtttaacacaacagaggatgccattgtctctgcaaacaacaaatctggtgtggttccactcaagcctgctctcatccctcttgatcacaaaccagagaaacaaggatcccggaaaagaaatccatccaagaagaaacggtcaaagatgaagctcatgatcgctgtgagcagcgcgattgctggagtttgcggtcttgtcactctcatggtgtttggttacttacactggaagaaagagacgcagattcaaacgcaaacgcaaaagtggattagcaacaaagaccccgagacgcggcagctgagtctgagcatccgaaccacgagtgacaagaaaatctcgtttgaagggtcgcaggacggttccatcttggattctcacaacaccgtcggcaccacaacgccccgaaaacccgttctggagatttacgcgtttgaagagttagagaaggccacggagaatttcagttcaagcaatcacatcaaaggttcggtttatttcggttcgctcaaaggcaaagacttggctataaagcaagtcaatgcagatgaaatgaaaagattcgatttcgggcttctcaatgatcagtcacactactataaccacaatgtgattagggttcttggaacatgttttagagaaatcgatcaagattcttatctggttttcgagtatgcaaggaatgggtccctgtgggattggattcagaacaaattggccatcaagaatcaattcatcgagtcttgttactgtttcttggcatggaaacagaggatcaagatatgtcacgatgtcgccatcgcgttaaagtatatgcatcggatcaactacgtccacggcaacatcaagagcagaaacatcttcttgaacgaagatctcagaggtaaagtcggaaactttgggatgtcaaagtgcgtaaccaatgaattagccacagaagagaaccttatagagagttcactgtctccagcttctgacatatttgcttacgggataatcgtaatggaggttttgtctggacaaaccccagatatgttgcttggattgcaagaagtagagacaacatcccttgggacacaagaaacttttgtttccgaatggagtagattaagaaggcttctcggggacaaggaaaagctgagggaagtgatggacagcacattgggagagagctattcggttgattctgcgtttgaaatcgcaagtattgcaagagattgtactgcagaagaagccgagtcaaggccgagcgcggttgagattgcagagagggtttcaagattggtggatgacgatgaagatgaagaagatgaggcagtaatagatagagagagtaccttaatttcagagagttcatacaagcctttggtaaagaagagtagtataatagattaaaaatgatatttgtaactaatgaatatgttattgcatcatggccctaaactcatcaaagttgataattccatccctattaatatcgaattgggaaatcataacctcgcagtccttgagacttttggactcacccaacaaactaagcatcctcttcaaactttttggtgtgatgccttcactctcttcatacaacttgaaagcttccttcaaatccttctccttgtctgcctcctctccttcttccaccaacttcacgaagtcctcgagctccaacgatttatcatcagtcgactcctctggatttggatttgtagtatcttcttgatcaactactgcacgtttgccagacttaatagcgtcgacgcatctttcgattgtagaaacagataccttgccttggtggctcttgtcaaagcagctaaagactcgttgatactcatcacgtttgttaacgttctcactcttcatagaagatcgatgaagaagacttgagcgagagataggagaaaatgattatagtttgaagactattacttgttcagtttggcaaaatatatagaagatgaaggagagacgtttgaaaaacgttgaaatataagaccgtacttttaacacatgcggattgtggacttgttgatttgtttacggcgctacgtacaaaagaagaaacgctttgttcccgcggcttctatgttgacaagtttctatttctgtttttattatgaacaacaagtaaagttcatcgttatttcgttactaaaatattatatgacgacgaagtttccgttgacgttgactagtcttctataaaaagaaacttgtcaggcttcatgtgaataagtatctttactttttatttatttctttgggtggttaacaatggttgacaatttcggtcgttgaatataattaggtgggccaagtctgggctaagagacgtttgggccttattaaacgtgtttcagtgttgtccattcaattctcactcaaataattatctgagcgacaaataggaagcggacatgtgggcagtggcaatttcgtggattcgtgagtaaaggagtggcaatcaattaaaaaagaaagaaagaaaagagagagtgtcagctgtcccataaacctcggccctccgtctccgttcaaacccctctctttaagctctctctctttctgtggctattctctttctctctttctctctgaatccgccgccacgccttcaccatggcctggcttagccgcgtgagaggagtttcgccggtgacaaggctcgcagcgattcgtcgatcttttggatcagcggccgcgttggagtttgactacgactccgatgacgagtacttgtacggagatgatcgccgcctcgcggaaccgaggcttgggttggatggatcggggccggatagaggagtgcagtgggtgcttatg

SEQ ID NO: 9260 - DNA, 3000 bp, Unknown
  misc_feature (1)..( 3000): cDNA_ID_3040952_gDNA_ID_1972047_Annot_ID_178259 3000 nt of promoter + ATG
tgtaaaacgtttttccgtcaaatatgatttaaaaaaaaaaaaaaattgttactaacggctagtttacccccaaaaaaaaatgattttactaacggaggagaagtgtttcgaaaattcgacaatgattaagaagaaagttagatcaaacgaacaggatcacaggaagaaggtacaacgtgaagcaatcaatgaggctaaaataaaatattgagaaatttgctcaaccatatgatttcattaatatataataatgaataacagttctatcatataaataaataatttataatccaccacatgacaacagatgggttttcccattttatttaactataaacagtattttgctctcacagatccacaaggacaagcatattcaaggatgttttagttcttaaagaaaagataaagagagaccagacgcatagtggtaacttggtctacaagttagagtggccaagccggagaaggacacggtgccacgaagtgttgagaacccctcttaggttccacaccgactccacattttccggttgaacattcgccgccgaatcaacctgcacatttccacagttttctattaactcttgtcagaagccatttatattagctgagcaagatgttgaggctttaccgctttggcgatgacctctgtagtctgtgaaacatcaatggtggcttcaaacaacacccatgcccatttgtcactggagctgtgttctgagatgtactgctttcctggttcctgcgttctagaagcttccacccagtttttgcctccatccagggatatgtccactctttctatcccgcgtccacctcctgaaaccgcatatcctttgatacttacctgcaattttttttttttaattgaattagctcttgctttcctacattggtcagatcagattaggtagtgaattccgcgttctaacctttccaggcttcaccatttgcacatcctccacagagcagattgcactctgttaacaatgataaacgagtatggggtcaagactcaagacaaactaatgttcatttacaaattctactatctgatcaaattcataaggcaactggtccaaacaagtaaaattttcagtataccagtagaaaatatgatcagtcgattcatcaccatcatcaactgttttcatggaagaatacagaattacgaacttcgcaagaaaattggaaaatcttaattttgtagcgcatataaacgaaaaacgtcattacaaagtcaagtattctgtaagaaagaagggaaagttgtatttacctgaacagggaaatccatttgcggtctcctagaggaccagttgatattatcccaattgacagagggtggaaacattttgtaatctttttgcatgaagaatccctacatcacattttgatccaagtcccttacaatgttagaacagtttctgattgctaaaaagagggtaaaagccggacactttagttgagacctggctttcttcagcgatgacattgatggaatcaagccatttgaccgaacgagcaccaatcacaccagggacaaccacccttaacggaaatccgtgatccctgttcagggtcttcacagaagaaacacgttttccaacaaataagcacatttccgagtactcactcatactcacatgtcaaacaagtgatgatttaaacacaagtgagactaatttaggagagcgatatcaaacctctccattcatctcataagcgagtagaacatccgcttcaggatttgtggcttgacttagagtgattgacgccttataagggcccccattttcctcctagagatatagaaagagcatagacttttcatgggaattcataacaaagcataaaaaggtggaatttattaatatatatctaccttacagcgatcaacactaacgaactcaacatgtctggctcctaaattggtagaagcagtcagctttggtatccccacaagctcaagaacatcggccagtttcgccccaccccagacagctgaaaggcaaattctttcaagacaagtatgtattgaaagcatgggaatgggagaaagagagacgaaccgttgccaatagcagaaacatcccatccaacacctctaacattcctaactttgctcatggcagtccttctgttaccggcacactgcattgaaacaaaagtgatgttaaattaaatgtggagaaaaactaaaggtagaagatttactcaaaggaagaatgaacctgaagagtagcagtaacattgtactttgggagggacctgcaattttgaggaggaaacaagagtggtgcttgatggagagatacaagatcaaagttggagaatgtaaagagaggcaaataaataaaggtacctgatgtctttgataaagagctttctcgggttctggatcaatccagtaagggtgacggagtagctggtttggcaaaagaaatagcagaaatgagcggaggaggcaaaattgaagatgaatgagagtgagagagagacctttgaaggtgatcaacaatggggatgggaccatgatttcgcttgtagaaaaggtcgacgggagtgacataagatgagactaaggccgagcggggaggctcggcgttgaaaggttcctgcggatcacccaaatttagatgccatgaagaaaaaggctatatcagactagtgactgattcgattggaaagagagaagaagaagaagaagaagcttaccttggcgttgaccttgagagaagggtgacgaggtggttcctgcgagtattccgaaggacctctaattccaggcattcttctttcgaggaggagataccgaggaaatgacgattgagtgctttcctttgtgacgtctctctcttcttcaaaggaaaactatggaacggcgtcgttttaggtttgcgtctcttaatttgtggataacagacagagcccaaattgagcccaaacaaaaacaaattgtgagagatggcggtggccaaacttcacggcggaggt

SEQ ID NO: 9261 - DNA, 3000 bp, Unknown
  misc_feature (1)..( 3000): cDNA_ID_3040948_gDNA_ID_1972047_Annot_ID_178266 3000 nt of promoter + ATG
tcacaatggttaagctgttctctcggaatgttctggttatgtctgagagaagaccaactcggtcttctgctgataattccagctctaaaccctgaaagtatgtttcatatgcacaatctgtcttgagtatatcagaaatcgatgcagaacagaatgtaatttgagccaagacagagaattttcacattcctaattggttacctccgatgctctcctctcaatggctgcttccagacattgtatgacacgttcttgctctgcttctgagtttatgggaagtccatccacatgacggatgtaaaattcctgcagcaaaacactcatattattgttagaagagagatcccaacagacggccgttgagtagttacctgataagcctccactggttctgtgctgaccatgccatggaacaccacatactgcatatcagtcaaagtacagactacgtcaaacacaagctttggtctatctttggacctcatggtaacaacggtataatccttctcaatgttcattagtgtgacactgggccttgacgccgatgtccttgctcttttgactccctcgtagtccctatcatcaaacatgatctgatgcaaccgtctctccctgtgtgtatcagaacaagagaagactgttttcgcagctcttgagccgctgtttgtcctcactacattgcacagcagctccttgatggtggaaaggcgaatcgggtcagtaatggcagaatgagttgaattgtccgtgacatgaataaccgctgcagctctggtgttgtgagtccatatctcagcgttcacaacgttgcagtgaaggtctgtgagaacagcagatacttcagacaagagaccgggtctgtcagttccagcgagctcaatggatgtgtattcgtcagtgggcattacaccaactgagcttctcaaaggtggaatgaaccacccagcgttgctctctatcctctgcgcaatgaattcaacaaacgttttacacaaagaaaaaaacctgttgaaaatgaaagaaaaaaagtgatgaaatacattagaaaccttttggatatagtcaaggacttgagtgtctctgatcttattgccatcttggtcgatgactttgaaaacgtccatgaaccaacctccatcggaagagatgtaagctttcttgatcacaagattcatatcagtgagcacttgtactacttccaatagagtcccatgtttgttcacactatcaaccttttatttagcaccacaaacaaacagggaactctgttttctcaaaatctctttgtttggtacagaaccacttgaacaatttgaagagacagatttatttacctgaataacagtggcatcgtcgcttgcgttgttgtctattacaactctgtatccaccatgaaacatacataaataaagatgaatgttttagcagctggaatctttacaagggtatagaggctcacaaacggagcatggagaaacagaggacctagaaaacaataaaagagtatggagagaaagagaaaaacctgggaggattcattctcctgatgagcttggcatattcatcatcatccatggttgtagtatgtatctccttggtgatttggctgcagcagaaacccagaagagtgtgagtcctccaatttctgaggaaaattcctaaaagagagagggagagggaagttgaaggaggataaaaatggtaggccaccggaaccgaaccttgttttcattagttgatcgagcacgtgccactaaagattcttagagatgacgtggcacgggcacagcaacttttagattctgttataattgttcgaatactaccaaaagtcgggtgaagatttggggtcaatttgatgatcataaaggggattatattctccttctcaagcaagatgtggtatttactagtataatagatcattcgttatcttgaggtagacctctccgtaacgttcacaggtgcatgaccaagtaacaatttgattcctttccagcataacgtcatgttggttgcaaaaagaaggcaaagtagagcaagcaagcaagcaaagcatttttcttattttatattttgttgcggattccaccacccacttgaaaaattgacatgtcacaatgatttcgtatcctagtcttttattatttaacactctcacaatcccattactctacacctctttcattaagtcaacacacggttttcaaaaatccactaccctcccaccacctagaatcttttgttacctaccaacaccctcctttgttctctttatatattggtccaactaaatcaataagggaaagcatccttttggttggaggaattgctttcattctcactctttgtgtgttgatcaatggactagctaataacaagttcctcctctatatatttcaaaagaatggaacagaaacataaacgaaagacagagtacctgatgttgatgattcattgtctgtctggagctcccaaatgccttttatgcttacatattcataaccaacaacggctattaattataaaccaaaaacacgaaataagtttgtagcaaagtgaaattaggaatcttggagatggatccattagtagtaggataataggatatgatggaatttggttggggaacagtgataacttacgcttgcttccggcgccgggaaagttggaaaacctacaaagtacagaaatggatctgggccttgaagtgggctttttattaaagaaaaaaatacatctccgttatcaatcaccatcttcttctatctacaaattaaagaaggtaacaacagaacgtggtggatcatgtggttaggcattaattatttgctttgtttcgccgttttggtaacacacagacacagttccggtaagagcttttgcagccactctttatagttatttagaattggcgatcgaatcaatctcactccctccctcccttaagtcttgttgaatctgctgaattgttttataaagagttactttggcaaaatg

SEQ ID NO: 9262 - DNA, 3000 bp, Unknown
  misc_feature (1)..( 3000): cDNA_ID_2027099_gDNA_ID_1972047_Annot_ID_178265 3000 nt of promoter + ATG
gagggaagttgaaggaggataaaaatggtaggccaccggaaccgaaccttgttttcattagttgatcgagcacgtgccactaaagattcttagagatgacgtggcacgggcacagcaacttttagattctgttataattgttcgaatactaccaaaagtcgggtgaagatttggggtcaatttgatgatcataaaggggattatattctccttctcaagcaagatgtggtatttactagtataatagatcattcgttatcttgaggtagacctctccgtaacgttcacaggtgcatgaccaagtaacaatttgattcctttccagcataacgtcatgttggttgcaaaaagaaggcaaagtagagcaagcaagcaagcaaagcatttttcttattttatattttgttgcggattccaccacccacttgaaaaattgacatgtcacaatgatttcgtatcctagtcttttattatttaacactctcacaatcccattactctacacctctttcattaagtcaacacacggttttcaaaaatccactaccctcccaccacctagaatcttttgttacctaccaacaccctcctttgttctctttatatattggtccaactaaatcaataagggaaagcatccttttggttggaggaattgctttcattctcactctttgtgtgttgatcaatggactagctaataacaagttcctcctctatatatttcaaaagaatggaacagaaacataaacgaaagacagagtacctgatgttgatgattcattgtctgtctggagctcccaaatgccttttatgcttacatattcataaccaacaacggctattaattataaaccaaaaacacgaaataagtttgtagcaaagtgaaattaggaatcttggagatggatccattagtagtaggataataggatatgatggaatttggttggggaacagtgataacttacgcttgcttccggcgccgggaaagttggaaaacctacaaagtacagaaatggatctgggccttgaagtgggctttttattaaagaaaaaaatacatctccgttatcaatcaccatcttcttctatctacaaattaaagaaggtaacaacagaacgtggtggatcatgtggttaggcattaattatttgctttgtttcgccgttttggtaacacacagacacagttccggtaagagcttttgcagccactctttatagttatttagaattggcgatcgaatcaatctcactccctccctcccttaagtcttgttgaatctgctgaattgttttataaagagttactttggcaaaatggaaaatccggcgaagagagtgttgatgacatccaacggcgacgaggtgtcccgaaacatcgctttccatctagccaaacacggttgcaagtgagtctctcattttgtcttctttcctcctatcctgtgtttcttcttctagccccgatttgtgttgtggttgactttggtgtctatagttaaccttcaaaaaatgcaatgtactgttgctaggttggtaatgatgggaaatgagggttccctaaggagcattgtagacaagattagagattccattgagggagccttccctgccgatgttatagcactcgacatggaatctgactctgaagttgcttttcatgccgctgtccaaaaggcatgggaactttccggccatttcgatgcttttctcaactcttatacctaccaaggtttaatttgcttcttgtttttcactaccctgcctttgatgctcttgtgtgttgatcattcctttattcaacaatctttctttcttgcaggaaaggtgcaggacattcttcaagtctctcaagatgagttccacagaatcacaaagatcaatctcaccgctccatggtttctcttgaaggctgtagccacaaggatgaaggaccatggatcaggaggctccattgtcttcatggccactatcgccagcggagagagggcgctttaccctggcgctgatgcctacgcttcaacttctgccgctattcaccagctcgtccgggtatgcatcctagctcctaattagacacatcgcgttcgtaacttgaatatgtttgttgatgattgggtttcaggcatcagccatgagtctcgggaagcacaagatacgggtcaacatgatctctagagggctgcatctggatgatgagtatacagcttctgtgggaagagaccgagcgcagaagctggtcaaggacgctgcacccctcggccagtggctcaacccggacacagacctctactccactgttatctacttgatcagcgatggctcacgcttcatgacaggcaccactgtcttggtggatggagcgcagtcccttacgcgaccccgtctcaaatcctacatgtgatcaatgcctagtattattataattctatgttgtgtgtaaaaagtgaatatgaatcaagtttgaataactatggagggatgaataatccatggaatcaatgattatatacttttgacaagtatagaagaaagcaaagagccaaaatagtcaacaatctcaacatcattcgagctcattgtttattgaattcaatcaagtttggtaggtgaacctcaaatacacgtgatattggatattatcttggaaaccttgctaatccaaattgtaaatcaaataagaaaagaatgattacctcagagatctagatgcatattgattcttgaccaagaaatatgtttgaaatttgaatccattgaaccaaaatttgaaggagttgcatatataataatataaatcagaatgatgtagccgccacacctttttgtttccacaaaactctttttctgtgatggatccgctaatgtagccatattttcaatatatatcactttctctggcatcttcgctaccgtgtacgtctctctttctctccctcccctccttggcttttttcaagttcccaccataaacgcagagggagttaagaaatg

SEQ ID NO: 9263 - DNA, 1045 bp, Unknown
  misc_feature (1)..( 1045): cDNA_ID_3040944_gDNA_ID_1972047_Annot_ID_178270 3000 nt of promoter + ATG
ttctcttgactattctccataatgcccacatatgacattaaggcccatgggcgtttttctaatgacccattaaagcccttgtctctcaattcatacaaaccaactgcctcttgttgttcccgcgctgtttaaatactaactatatacatatcgccatgaatcattattaccttcactatttaattcatgcaataatcactatataaaataaaattttgctactttcctttttttcgtctctcgactttaccgtcaaagtttgttagatctcatcattgacattggacgtccattatctatttgagtatttctgatatcgattgtttattcctctagtgaatgtaattgcataaggaaacactaaatgtggaaattgttgacaatacacctgatgccacgtattatgcagtttgtatattattgctaatttaatcaaacaaaatatgtatatctatgagtaggtggccacgttttttcgatttaccatttgctaacaccccctcaacctcctaagggttcactaatggaatttgtagatgtcacgttttccaaccaaaaaaaaacaaaactttagttaaaacgactagtatatatgtgctaaaccaggagtttgaattattattaagcagattcatattttggaaaagaacactgaagtcgaatgatcgttcgattctttcctttgcctataaacatttaacatccgagaccgagttcactccgcagccgtctaatctttttagcttgggatcttgaccgtctacgatactcgtcttgatacatagctcggagcttgtccggctttgtatcaagcaatcgtgagccctgtcaactggtatataagccaattctcaatctcctctctgcaagatccatttttttatttattcatgcatttagccttgactctgttttgcttctacggatcttcgtttcaggtgtgcgcactaagcaagcatactctattatttgtcgaaatcacaagagccagccagtctctctgagttctatcacaatcttcttcttcagagcttattgagtaatg

SEQ ID NO: 9264 - DNA, 3000 bp, Unknown
  misc_feature (1)..( 3000): cDNA_ID_2123597_gDNA_ID_1972047_Annot_ID_178267 3000 nt of promoter + ATG
aaagtgatatatattgaaaatatggctacattagcggatccatcacagaaaaagagttttgtggaaacaaaaaggtgtggcggctacatcattctgatttatattattatatatgcaactccttcaaattttggttcaatggattcaaatttcaaacatatttcttggtcaagaatcaatatgcatctagatctctgaggtaatcattcttttcttatttgatttacaatttggattagcaaggtttccaagataatatccaatatcacgtgtatttgaggttcacctaccaaacttgattgaattcaataaacaatgagctcgaatgatgttgagattgttgactattttggctctttgctttcttctatacttgtcaaaagtatataatcattgattccatggattattcatccctccatagttattcaaacttgattcatattcactttttacacacaacatagaattataataatactaggcattgatcacatgtaggatttgagacggggtcgcgtaagggactgcgctccatccaccaagacagtggtgcctgtcatgaagcgtgagccatcgctgatcaagtagataacagtggagtagaggtctgtgtccgggttgagccactggccgaggggtgcagcgtccttgaccagcttctgcgctcggtctcttcccacagaagctgtatactcatcatccagatgcagccctctagagatcatgttgacccgtatcttgtgcttcccgagactcatggctgatgcctgaaacccaatcatcaacaaacatattcaagttacgaacgcgatgtgtctaattaggagctaggatgcatacccggacgagctggtgaatagcggcagaagttgaagcgtaggcatcagcgccagggtaaagcgccctctctccgctggcgatagtggccatgaagacaatggagcctcctgatccatggtccttcatccttgtggctacagccttcaagagaaaccatggagcggtgagattgatctttgtgattctgtggaactcatcttgagagacttgaagaatgtcctgcacctttcctgcaagaaagaaagattgttgaataaaggaatgatcaacacacaagagcatcaaaggcagggtagtgaaaaacaagaagcaaattaaaccttggtaggtataagagttgagaaaagcatcgaaatggccggaaagttcccatgccttttggacagcggcatgaaaagcaacttcagagtcagattccatgtcgagtgctataacatcggcagggaaggctccctcaatggaatctctaatcttgtctacaatgctccttagggaaccctcatttcccatcattaccaacctagcaacagtacattgcattttttgaaggttaactatagacaccaaagtcaaccacaacacaaatcggggctagaagaagaaacacaggataggaggaaagaagacaaaatgagagactcacttgcaaccgtgtttggctagatggaaagcgatgtttcgggacacctcgtcgccgttggatgtcatcaacactctcttcgccggattttccattttgccaaagtaactctttataaaacaattcagcagattcaacaagacttaagggagggagggagtgagattgattcgatcgccaattctaaataactataaagagtggctgcaaaagctcttaccggaactgtgtctgtgtgttaccaaaacggcgaaacaaagcaaataattaatgcctaaccacatgatccaccacgttctgttgttaccttctttaatttgtagatagaagaagatggtgattgataacggagatgtatttttttctttaataaaaagcccacttcaaggcccagatccatttctgtactttgtaggttttccaactttcccggcgccggaagcaagcgtaagttatcactgttccccaaccaaattccatcatatcctattatcctactactaatggatccatctccaagattcctaatttcactttgctacaaacttatttcgtgtttttggtttataattaatagccgttgttggttatgaatatgtaagcataaaaggcatttgggagctccagacagacaatgaatcatcaacatcaggtactctgtctttcgtttatgtttctgttccattcttttgaaatatatagaggaggaacttgttattagctagtccattgatcaacacacaaagagtgagaatgaaagcaattcctccaaccaaaaggatgctttcccttattgatttagttggaccaatatataaagagaacaaaggagggtgttggtaggtaacaaaagattctaggtggtgggagggtagtggatttttgaaaaccgtgtgttgacttaatgaaagaggtgtagagtaatgggattgtgagagtgttaaataataaaagactaggatacgaaatcattgtgacatgtcaatttttcaagtgggtggtggaatccgcaacaaaatataaaataagaaaaatgctttgcttgcttgcttgctctactttgccttctttttgcaaccaacatgacgttatgctggaaaggaatcaaattgttacttggtcatgcacctgtgaacgttacggagaggtctacctcaagataacgaatgatctattatactagtaaataccacatcttgcttgagaaggagaatataatcccctttatgatcatcaaattgaccccaaatcttcacccgacttttggtagtattcgaacaattataacagaatctaaaagttgctgtgcccgtgccacgtcatctctaagaatctttagtggcacgtgctcgatcaactaatgaaaacaaggttcggttccggtggcctaccatttttatcctccttcaacttccctctccctctctcttttaggaattttcctcagaaattggaggactcacactcttctgggtttctgctgcagccaaatcaccaaggagatacatactacaacc

SEQ ID NO: 9265 - DNA, 3000 bp, Unknown
  misc_feature (1)..( 3000): cDNA_ID_3040964_gDNA_ID_1972047_Annot_ID_178252 3000 nt of promoter + ATG
ttgttgaatacattacatgtttatagaatacaattgattttttacaaatataagttttcaatatctgacttttattaatacattaagtgactccatgcatgaatcttaattagctagaaatttaaaaatctaaatttgacacttacttttaattacaacaatgaataaactcttatagtatatattaacaattaattctcagtctctttttgaaatagactagatcctatagttacgtctaatatttgtctcaatcccctaaataaaggtttatagtaatacactaatttggggaaacttttataatactggacttttgattttattattttatcaagatttgtatataaatgtgttttccatacgtcagaaaataagaaagcacattaaccagttaactaaaatctgacgattaatactttccacatatcctccacatacatttcagtatttcacactaaaaggcatttcgacttttcatcggaggttccccctctttcccttgatcctttacaaataatgcaatgcatcataagcattacgagacaacattgttcgatcctttggaaaacaacaatcaaggacaaattaagaaacataatgtatagtaatttaatattatttaaagttttttttttctttctttttgtcttctttagcgttggacgtcaataggggcatgactagtcatcatattccgtcgccgatcagtgaagctactacaggaaaccaaacgcggaacgcagcgaccaagagcagctgatctcactctcttgaatttttgctgtctttctttgttgttattataaggagtggccggcgcagaagatctaacaggtgttcttatccagagacatgctcttgctttgccttctgccacgtaatcttcttcctcttcatcctcttcgtcttgtgtctctttaaagagttcgaggagcctcttcttgttatcggtaggagacgcttcttcttcttcttctccgtgtttgttctcctctccttggtgaggagtttggtcacagaatttgtgatgcaccggtgttgttcctcgcgacggcgtaaattctgtgttgtaaactcaaattctgtcaattcatttgttaaaattacaaaataagaagaaaaaagaagaagaaaaacaaacgtaccaccaccaacgctcatgaaatcatcatcgcagtcggaatcaagccacccccgtgaatcgaaaaatatcatatcctctttgttaccttaagacataatccaaatcattgttatctcatgtaacgtattgcaaataagaagatactaatattaaaatggtaggttatgtatgtgaatgtagtatacttttagttgcacacacctaaatatacggttgtaaatttctagcgataaaatttttaagagcatatgcatttattaacattaagataaataagcaaatggaagtagcaacttgaagtgtggtccatcacacatctctcgcaaagatatatgccttgaagacattctaacctatatcgtacgccaccgttgtccaccatgtgctgctaaatgctactgtagcagatatatagaagacccggttgcacattcacccatgtttatttatgatgcatgaccatgatccatttcatatgtaagtcataacaacttttttaatcaaatcttgacttaatatataagtatacgattttgtaattcatcagtactaaatacctcatttgtgcctacatcttgattgggtctgaaaaagctaaccactttacatttgtcggcactaaagcttacagtcatcaacaactttaattactatataaatacttctaccattcgttaattagacctttaattattgtttctagagacaaaacaaaaataaatcatataaaataaaataaaggccgatatgaactaaactaaacgcaaagaatagttatcgtaataataaacctgaatcccaacgaccggaatcgatgggagggttgccgttgatggtggaggaagtgatcatgacgtcagtcttgaggggcggtgtggagtctggtttagagatgaaagaggcaagcttcacgacggaatcagaggcggatgagctcttgctttgagaagaggagacacacgaacccatatgatgatgatgatgatgtgaaagagagagaattcctgtggtttaggagaagaagtgaagatatgggtttagagaatctaaaaggcatagagagatggaagacgaagaagcaaagatgagaggaaagagagagagtagctttggaatgggagggcttggaagtgaagtaaatggacgacccaaaaaggagcagtttccgatttggtatgtgtcttaattgtctcttcagtgaattcttatttaggttatggcttcttattggtcctcacaatcatattgtgggctcccctcctttaaaaataaataataatcaaatcttcctaattttctgattaattattagtcattttgatgatgttgttgtgtttcatgctctcaggtctcacaaatgtatgtcgcaatcgcatctaattggaaatatctagatttttttttttgaggttcagataaatattaagttaaatttcatcaagttttgtttagtatagattgaacttgaagggacatgacaaataaattccataattaaaggaagaaaaaagatcattagatcgttgacccacaaacaaaaaagaaagaaagaaaaagagacaattgggccaactgttttgggtggtatataaatgggtcgggtcgttgtagtaataagatccattaaaaaaagaagtcgtctctctcaaattgcaaaatcacccccacaccaaaagacaaaattaccctgcgatttaattattatgaatttatgacggtacctccacgtcaacataatggctgatgccacgtcatcacgcatgttgagatttggtggagagatccggggttcttagaggtatccaactatccatccatcatcggtcagtccccaaagtcggcggaagaagatg

SEQ ID NO: 9266 - DNA, 3000 bp, Unknown
  misc_feature (1)..( 3000): cDNA_ID_2034525_gDNA_ID_1972047_Annot_ID_178248 3000 nt of promoter + ATG
ggcaaaaaatcaagtatgttgtttattcctcatttccatttatcaatcactcgctcgtgaatcttattaacatgatttgtagacttttcaagtagagggattgatagattcttcttgtactagttgtagttggtatcaaaagagtttcttttttcttttgttttttgttgtatgaacaacggcatttctgccttcttcttcagaggacgattcaggaacagggatggtcgacgcagctccagatatcggacctaccgtgaaagcagcagcctcttctcaaatggaggcagccattgatgcattgtcccgggatttaactaaattaagaaccggaagagccgctccaggtacttctcacctctttctttcgggtttaggttaagcctctctgtgtctgtgcttattgtgtgcatttgcaggaatgcttgatcatattgttgttgaaacgggaggagtaaagatgccactcaatcacttagctttggtctctgtcttggatcctaagactctctctgtcaatccttatgatcccgatgtatactgattctttctttctcttttactaagaaaaacttcgactacattagagtgtcatttttctccaacaagccgccattgacgctttgtttgtctctgcagacggtcaaagaacttgagaaagcaatagtcgcgtcgccattaggattaaacccgaaactggatgggcaacgactggtcgcatctatcccagcgtatgaaagttcttctctgtcaaatttcattgtttatcacagccgtaattgactgactttgtctgatttccgctctatgtttttatttcgtgagcagattgaccaaggagcatatacaggtaaagcatccaagtcatgtgttattgtttagtcactgaggttgagccttgaccctatctatctatatgaactccaggcaatgtgcaagattgttacaaagtccagtgaagttgtcaaacaaagcataagaagagcgaggcaaaaggtagtatgaatggtgtagagcacaaccatagaagctgtttgttgtaaactctctcctacacgtcagaacatctaatgatcagagacttttttttttggtcaggcactggacacgataaagaaagcaggctcgagtctaccaaaggatgaagtaaaaagactggagaaggaagtgagtgtcattgtatgatctttctgcaaatatgcatcctacttcagttactgaaaataatggcctttgtgtgaacaggtagatgagttgacgaagaaatttgtgaagtcagcagaggacatgtgcaagtccaaagagaaagagatcaccgaagcctgattcatcattcctatacatcactagtcttttcacgctaccttgaaagaatcttttattcattaccaagatttgttttcaacttttgaatgtttgatttggggatcttggaactgcaagaaaattgatgatgaatagcgatggaaggcccttcaaagggcccaagaaaggccttgaaagaattccaataattatgatgttatttttcgagtttcatatatagtagtactaattggcttttgtagttgaagagaagtttccaaacttgaaaaccaaggcaaggggggaagaggtaggagatgagtcaattagtttaccaataatttgacatgatagtgaaattgatgtgtttggtaaatttgttacaaccccattaatctaatctttttttttgtacttgttgcaaagaataattcaatgatatttcttaaagaggaaatttctatatacatataaacgataagcttatctcagcattccaaattgatagtgcgctttcaaacatattataaaatttcagacatagtttactctaaactcggtccatctctgcaacaaaattaaaaataaaaccgtcctcaccaaccacaaatcttatatttaaaattgaatgcatttaatttttaaaattgatcactaacaaagaaatgtaggtaatataacaagctgtataatttgtcggcaaaaagatataacaaagaaaaacatgtacatatacatttatctaaaatgttgagcaataacaatattgaagacgcaataacgataccatttaatctttgcccactcgcattggtgacggagactaaggcaaaatctatcgaaagtggtgaccattaaaaagcgcgtcggtgttcactttttttagtcagggaccaggagatcaccgtaacgtcgccgtttcgatatttgcacgatcaaactcctttttttattcttttttggtcatcttttttttctttcttttctttatggcatcataattttttttagtcgtaatctatagaggagactaaagattcttcattctgtgtcagtggctcacatcctctgattaactaaaacgcacacaaacaagaaaaaaagctatgaaaacaggaaaaaaaataggaaatatcagtcttgtctaaaacgacgaagaagaagaggaagaatcgagacaaacatttcacattcccagagattgtggtgtcgttgggtattcattctctctctctctcacattactttgacgagttcttagtgtgttggttctccaaatgctctgcatattacattaaatctctctctgcttttttttgggctataatatatgttgggttttcttcaacttgcttggatctgttgtaataagcgagttagctcaaaatctctttcttaatgaatgagctttcaaagttagctgttttttcctcttcttcttctttatcttggatcttgatcaatcgaatcagtaatgtgtttggaatagaattagttacatacatttacctttctggttcatgcattgtcttagcatttgacggtttcgctgtttcagattaaaagttgaattcttagggtttagacaaagctttccctgttttgttacttaaatgtttgctttgcattcggatgatgcttgtgcaggtacttacttcttagggtgattcaggacttgctaattataggcaaaaa

SEQ ID NO: 9267 - DNA, 3000 bp, Unknown
  misc_feature (1)..( 3000): cDNA_ID_1989361_gDNA_ID_1972047_Annot_ID_178242 3000 nt of promoter + ATG
ttcatgggtttttggtcaccgaaacagattcagacacgtcaacatgttcgcaaagtgcactcattatccctcgttgacttctatttaaaactgacgagtaattattactatcaatattgggctctcgtatatggtatattatcgggcccaacccaaaacatatttgggccggattagaaactagtgagaaaaagggaatgttactatgttagtattattgttgactgttagagtttttttcgctccgcctctctgaaactcgccgctagtaagcttcttcttcacttgtgctcttcttcgacgtaagttttctctctttccttctcaaaggtttctctctcgattgacaatcctaagtttcctcgctcttgtggcaattttaattttatttttctggatttggctaaccctaatttcgtctggaaacaatgatattcaacgaaatggcgatttgtgatttaaaaagttgctctgtttttggtatctaaaatttgtgtaggagatgaaccgtattggattgataaggggatcatcatccaaggatgtagtccggagaacgtttgcagcagcagctagtaaagccaagaaaggtggcaaaggaggtggagccagcgatgctcctaaaggttccagcttgaccaaagagatcaaatccaccactgttgttggtgccaatactctcaaagacggatctgatcccaagatcttgcctgattctgattaccctgattggctctggcatctcctcgataagcgaccagctctcagtgagcttaggaggaagaacgtcgagactcttccctacgatgatctcaaacgttttgtcaagctcgacacacggggtaaaatcaaggagaacaactccatcaaggccaaaaactgagagatgtaagatgttttcaactctctcactgttgctgttttctttgtatgtgggaactatgcttgctaataagtagattcttccagttagattacatttccaaggcgttattatgctcttgtatgttctcagacactcttagtatatccaagaaattgctgcttcatcttttctctgcatgattctctttgaaaagttggaataggtttattcttacttgctctaagtatattctttcagttatcttacttttccgagtcagtaacattatgcccttgtaagttcttgatccttaagactctttattagtgaatccaagaaattgctgcttgtgtgagtgaaactcttggctcttgtttaatctaccgaatgatatgtccagcaagtgtgtaatacaaatccttctccggatagaggagatgagttggtcggttcttaaagacactgcaggtgtaactgatccatttaacaatcagatttattgtttactgtatgggacctggctcattgatattgcatcactattctgttggtggataccaactcttgttgtctatctctttgtggggtttgataccttcaaaagaaaggtaaagcaaatgttgcatcattatctcccctttgttcttccattattgctcttctttgctttgattgttacttgtctcctgtgatttgcccagttacaatttcatattgctttgtgttaatactagttaggataagtttcaatttaaatcggttttgatttaggtcttattggtctgatattatggcttttctctctctctctctatggtattgtatctgacaagtgctgctacttatttgctttatggttatatcctcccatgcccatgaaaggtttaagagtttgaaaaggagacaccactcatcacatgcttttgtgggtataacaaaaaataaagctaacttttttctctgctcacatgcttattttcctcttttgacaccttaacaatatcttgctttgtttttgtttcgttttttgcatgttccttcttaactatatgtactaaatgtatgatttagatatgttatggatataattatccaaatctgtggtcatgattgatagaggccacgagggcggacattttaaatcgctgatccgaatttgttcttatagtctctctactataatgtaatgggacataggttgggtgtagttgcccatccttatttgttgtctgaataaactcttacctatatttatttatttatatataagtgcaacggtactactatttccagaaagaaattttgatggttcatgtttccttctactcttttattttgctcttaagaggctttatcgacatataatataaattcaaacactgctgcaattctaacggatataaatcatccaataaaatctcagaaataaaaacgagtaacgaattttgagatttgcaagaatctcaaaagatgtcatattaaaaaattcttcgatatccaattaaagactcgattatacggacttgctttggagaatccacaccaacactcaattcgattacctcgaaaacaaaagtagttcaacttttgataccatctcaaataatactaaacaagttcttgatatacatttattcccgatgggtgaaaaaggccacttttctccatgtgtctctatcattactatcaagtatcaaccctttttcactttatagaattaggcatttctcacgatcagttcctccttccaattattattctgtaacttttgaagtcatttctactccctaatgttacgcgttaaacatttatttataaaaaaagatctaagattttttccaattattccttcaaatttggtatttaattcgtgtaatgaagacaccagatttttccaagtacggttacatatataaactggggagttttctttgtttaggctgattaaagagacccaagtgcctcctacgctattcttcattttctccggtgaccaatccttttctttttcttctcctctccgtccttaaatagttatataggagcaggcattgttccttgatcaccaagaaatcgctttgacccctatctccttcttctgcaactctttttcagttttcctcaacacaatttct

SEQ ID NO: 9268 - DNA, 3000 bp, Unknown; identical to SEQ ID NO: 9056
  misc_feature (1)..( 3000): cDNA_ID_2026743_gDNA_ID_1972047_Annot_ID_178244 3000 nt of promoter + ATG

SEQ ID NO: 9269 - DNA, 3000 bp, Unknown
  misc_feature (1)..( 3000): cDNA_ID_4370927_gDNA_ID_1972047_Annot_ID_178246 3000 nt of promoter + ATG
ccactgacacagaatgaagaatctttagtctcctctatagattacgactaaaaaaaattatgatgccataaagaaaagaaagaaaaaaaagatgaccaaaaaagaataaaaaaaggagtttgatcgtgcaaatatcgaaacggcgacgttacggtgatctcctggtccctgactaaaaaaagtgaacaccgacgcgctttttaatggtcaccactttcgatagattttgccttagtctccgtcaccaatgcgagtgggcaaagattaaatggtatcgttattgcgtcttcaatattgttattgctcaacattttagataaatgtatatgtacatgtttttctttgttatatctttttgccgacaaattatacagcttgttatattacctacatttctttgttagtgatcaattttaaaaattaaatgcattcaattttaaatataagatttgtggttggtgaggacggttttatttttaattttgttgcagagatggaccgagtttagagtaaactatgtctgaaattttataatatgtttgaaagcgcactatcaatttggaatgctgagataagcttatcgtttatatgtatatagaaatttcctctttaagaaatatcattgaattattctttgcaacaagtacaaaaaaaaagattagattaatggggttgtaacaaatttaccaaacacatcaatttcactatcatgtcaaattattggtaaactaattgactcatctcctacctcttccccccttgccttggttttcaagtttggaaacttctcttcaactacaaaagccaattagtactactatatatgaaactcgaaaaataacatcataattattggaattctttcaaggcctttcttgggccctttgaagggccttccatcgctattcatcatcaattttcttgcagttccaagatccccaaatcaaacattcaaaagttgaaaacaaatcttggtaatgaataaaagattctttcaaggtagcgtgaaaagactagtgatgtataggaatgatgaatcaggcttcggtgatctctttctctttggacttgcacatgtcctctgctgacttcacaaatttcttcgtcaactcatctacctgttcacacaaaggccattattttcagtaactgaagtaggatgcatatttgcagaaagatcatacaatgacactcacttccttctccagtctttttacttcatcctttggtagactcgagcctgctttctttatcgtgtccagtgcctgaccaaaaaaaaaagtctctgatcattagatgttctgacgtgtaggagagagtttacaacaaacagcttctatggttgtgctctacaccattcatactaccttttgcctcgctcttcttatgctttgtttgacaacttcactggactttgtaacaatcttgcacattgcctggagttcatatagatagatagggtcaaggctcaacctcagtgactaaacaataacacatgacttggatgctttacctgtatatgctccttggtcaatctgctcacgaaataaaaacatagagcggaaatcagacaaagtcagtcaattacggctgtgataaacaatgaaatttgacagagaagaactttcatacgctgggatagatgcgaccagtcgttgcccatccagtttcgggtttaatcctaatggcgacgcgactattgctttctcaagttctttgaccgtctgcagagacaaacaaagcgtcaatggcggcttgttggagaaaaatgacactctaatgtagtcgaagtttttcttagtaaaagagaaagaaagaatcagtatacatcgggatcataaggattgacagagagagtcttaggatccaagacagagaccaaagctaagtgattgagtggcatctttactcctcccgtttcaacaacaatatgatcaagcattcctgcaaatgcacacaataagcacagacacagagaggcttaacctaaacccgaaagaaagaggtgagaagtacctggagcggctcttccggttcttaatttagttaaatcccgggacaatgcatcaatggctgcctccatttgagaagaggctgctgctttcacggtaggtccgatatctggagctgcgtcgaccatccctgttcctgaatcgtcctctgaagaagaaggcagaaatgccgttgttcatacaacaaaaaacaaaagaaaaaagaaactcttttgataccaactacaactagtacaagaagaatctatcaatccctctacttgaaaagtctacaaatcatgttaataagattcacgagcgagtgattgataaatggaaatgaggaataaacaacatacttgattttttgccttttgcaaagcctcgacgagaatctctgaggaaatcgggcatggacaaatcgaattgcagatctcggcctcccatcatcatgagattgggtgaagaaatgaaggagaaatcacgagattgaacaacaacggagcttcttctgagaaacccaatcgcgttacgactagatagagctcgtctcacgaacatagccatcatccctaaagacttcaactttcttcttcttcttcttcttcttcttttctgaggtttaaggaggaagacacgcaagaaaaacaagtaccttttgattgattccgtgtatagagctaaaaccctcgacctcgaatcgacgactgaaatgtaataaaaaaaatttagtttccttcatatataaagtcatttccttttcttttaatgagaaaataccaaaatagccctccgccttctaaaaccctttgttatacagctccctcctagatcttcccatttccaccgccgctgtcacttccggcactgtctccggtaaccggtgagtcatctctctggtgattctggtcaattcgttgcagacttctccatacgaatctgtataactgaaatcacattctcagttttgttttttgttttttgtctaacaaacagctgaagaacgatg

SEQ ID NO: 9270 - DNA, 3000 bp, Unknown
  misc_feature (1)..( 3000): cDNA_ID_3044430_gDNA_ID_1972047_Annot_ID_178239 3000 nt of promoter + ATG
gcaacagtgagagagttgaaaacatcttacatctctcagtttttggccttgatggagttgttctccttgattttaccccgtgtgtcgagcttgacaaaacgtttgagatcatcgtagggaagagtctcgacgttcttcctcctaagctcactgagagctggtcgcttatcgaggagatgccagagccaatcagggtaatcagaatcaggcaagatcttgggatcagatccgtctttgagagtattggcaccaacaacagtggtggatttgatctctttggtcaagctggaacctttaggagcatcgctggctccacctcctttgccacctttcttggctttactagctgctgctgcaaacgttctccggactacatccttggatgatgatccccttatcaatccaatacggttcatctcctacacaaattttagataccaaaaacagagcaactttttaaatcacaaatcgccatttcgttgaatatcattgtttccagacgaaattagggttagccaaatccagaaaaataaaattaaaattgccacaagagcgaggaaacttaggattgtcaatcgagagagaaacctttgagaaggaaagagagaaaacttacgtcgaagaagagcacaagtgaagaagaagcttactagcggcgagtttcagagaggcggagcgaaaaaaactctaacagtcaacaataatactaacatagtaacattccctttttctcactagtttctaatccggcccaaatatgttttgggttgggcccgataatataccatatacgagagcccaatattgatagtaataattactcgtcagttttaaatagaagtcaacgagggataatgagtgcactttgcgaacatgttgacgtgtctgaatctgtttcggtgaccaaaaacccatgaatgttctgtcacagctgtgaataatagaaacagcgacatgtacttttgcatattcagacgaccaagtagaaattctttaacacaacttattattaacgggcgttgatctcgatcgttggatcatcacggtaatagaaaccgttgatatttgattaatcataagaaccaaaaggtgataaatttattatgaataatatacgtataactttttattcatcttttaccaaaaaaaaaacattttattcattatcaattaattttgagtttggaatctcatattttcaaaatagtattagaacgagttccgatttctcattttaggaccacaattagattttcattcccacgcaacttcgtgtttatatgttctgccctgatcgcaaaaagaaatgtaatgtttcagagtaatatgtagtatatgatcaatgctaatttgttttaatttagaaattaatctacgattcttaaatgtaaccaaacaataattatccaaacaataattttttgctaattaaagtctataatactatgagaataaaagacaacaaattaaatggggatagtgtactagtttcgtttatcagtacatcgcaaaatttatctgatcgttgtgaatactcgtagtcgaaggttagttggagatcagtatacacgagttgaacttgaaaacaaaacaaggaaataaattcaaaacaaagtaaagaagaagaaaaacacgtcttatattagaagacgaaagccaaggcactaatcaatgttgaggtgattaacagcgggcaagtggtgaaagtggcggcgtttggaggtggtagaagcgtcttgggttcaccaaagtgaccgccgtcagtaccagttggtgacggtgaaggagccatcggaggaggaggagtgagtgtctcgtcgttcccactataggaagacttagactcggccaccataatcaacgttgccaagacgagaacacatatcattaagctgaaagctctcattgctacaatatttgatctcctctctttcttttaatttctctttctgtatttttagttagttgatacagtcggatcatcgcaaaggaaatagtacttatatataaaggtcaacgagggagaatgattctaattcgagggaaatgtgattatacggtcttagatcttgttacgttagtggctaaccatctattttgagtaccataacgtgatgtccttcatcttttttggatcgacacagtaataaaagatatatatcaaaaaggcaaagcgataattacttataagttccaatccaagaacaagtgataattgatcttaaaccaaataataaaaaatgataattgatgaactgatctatgttgtctgtatattattattctacgtttctattagttcatgcgagattcccaacagaaaaaatggagtatactcctccgaaaagaagaaagacataatcaaaaagccatttatataccaaatgtatagtacctaatgacagaaataaatgtatattattgtattaaaaataaaatggatatatagaaaatttggattggtctaatactctatagtatgtttttttgtttgggtgcaaaatagactaatcatgtttagactaataattcttgtaagaaaattgttattgtatttgtttggttattaaaaaaaatatttgtgagaataaaaaaaaaaacacaggcaagtcgccgagttttggacgtatgtgtatgtaaaatggttgccggagtccatggcagccaaaacttgggcgattcaaagagagaatctttgatttattattcaaatgccaaagatctcaactttttttatttattaattagtcacaagtggcagttcttcgtggtcgccactacctaatcataaccatcgacaggtttatagagaagaactaggcaacgcatcgccatggatcaatcatcctccatgcattgactttttttagatcggaggaaaaaagtatgcaaatttagttagggttttgaaattcgaaaatcgagatgcggtgggatttgatcacggcgattgtggctgcgctggtggtctcggttttggctgatgaatcgggtcaaatg

SEQ ID NO: 9271 - DNA, 3000 bp, Unknown
  misc_feature (1)..( 3000): cDNA_ID_2181541_gDNA_ID_1972048_Annot_ID_178294 3000 nt of promoter + ATG
gctaagttctatttatacaatgaagacaaatctacagaaagtaaatgaatgctcgtatcacgccgcagatctcgcctcattaaatgggctcctgaagcccatctcatcctgaatgggtcgaacttgttattcacccgatctaggacatatcgacggattgcgggtcgggtcgaatagacgtgatccgacatccacaatttaccccccaagtctcaaaaatgaattcaattcggggacttagatcaatttcaacatactatcttgaagtaatgccgtaattttcaggatcctcaacaggcgcgtatatcctccgaagtagggaaaggaaacaaaatatcgcgattttcgagattattcttggaaagagtgtgacgctttgtgatcctaggattttcctttttctcgctcttctgacgctttatatatcgaggttaaactcttggcttctgatatatctctgttttcactgattttatctatgttttaggtataggatttcgagtctttatattatttcccgagtcgttttagtgtcttttcaggtattctatgcagtgggacaacaatggagatgagaagacattctggagcaaaagctaaggaaaggaagccaaggacgattttggattcaggaatcagcgaggactgtcgatcgacacactcttggtgtcgatcgacaccagtttcggcccagcaaagtccaagacgctttcaagtttagagaagaggaatttgccccagaagacttccgtatttgcattattagtccttggacgttttatagggtttatatacattgtttagacctatgttttcatcatccagttttctatcaagttcttataaagctttttgcaaaccctgttactgagagacataagctattcatcgattcttttcagagattgattcagatcttaatacagtgaagagatcccttctttcccttaatctatttgttgtgtttatgttttcatactcaatatgttgtttacttcaatcaatatgtctgagtaatctgcttgttaggaagagggtttctcattagggattcatatggtttagtagattgcccccttgctaggttatctgtagaattcttcatctttaattatgcttaatgctagatctagagtaattaactagatcttgaatccagacaatagatatgcccgccataggtatttgtagttggatctattatttgatgagcctggtttataggtgtgtaataagaatcggcctatctactaaggtgaacaatcgaactcgttaagaatgtatatttaggttgataatttctcggcttctccgattattcttagctatagatatagggagttttgcggaacgccaccggttattccataattagagtttgagttcaagaatggtttgataacaacctagctttcattagatctactaaccaatagtttcctgagaataccctgttcctagctctttatttaatcgtttacatcacaatcaacttgctgtctttttattttgttttcttactattttaatcatcacctgctagcttaatctcgacattcaactcactgtttgaacaaagaactccgtgaattcgatccttaaatactgcaattgatctcttatttgagagagtagttctaggtaatttgaaccttatcagcttcctaatatcgcttataacttgctggagctcattcaccgctaaaagtaaagcctcgattcttctctcttcctcttaaacttgtttcagttaaatcgtttagttcgttagaagatccagcatgtttattaagcttagaattgcttaggatttgaacaggctgttttaggacatgattccttatcggtttctcagattttcaactttgattttgaagaaattcatcgttttaaccaccggtttctctttcaccgcctgtaatccgtcatctgtcgtcgagcctaccggcgctctgaactgctaaccaccggattccggtgataatttattgagtgttcttcagattttgggaagatcttcaacatgttcttgagccaaaaacttcccagaccttcctcaccatccgcgacacgatttcgcagtgttaattatgcctccgagaaagattaaacccgaaagattctcgattaacggtcagtttgggaaatatatgacttccctaacgactccgggcaaacttaaccttttaaagggggcccactaaacttctccccaaatcaacctgttatcccccgaaccaaccgtttcaccgaatcactgcctcctggtcatacttgcgctttcgagattttcttcttggaatgcggactttactttctgctttcttattgattttatgcatgatttcaaaattgctctgccccagttatgtctgaatgtcatctgtaccattatgtgcttccttactttagccgaagaagacggcttcatgctgtcgctgcccgaccttcttcaactatacacagtgaagaagggtcacacaaatggaacctttctcctgtcaccctggaagggtttttgagtgtttgatgacttcccagaaaaggatgaacaatggaggaagtcttacttctttttccctgtgaatgaactcacgtacggcaagaagacagacttgtttgggtctgaatggacagctcgggccgatagataatgaacttaggatgccatttttcatttcgtcgtacccttttgcgattcatctcgcattctacgagctaaccacttctgttctcttacagttaaagtcgacaaacccccagtctcacacacattgtcgtcaagacttaggttaagaatctctcacgtcggacatgatcagagcatcaggtagacggcttcaatatcgtaccgatcttgctgccttaacttctcccttccaaccacaaattctttccaaagctgacatgtcttccatttcataacgcgaagagaagagattggaaagagagagggctaatcaggtgaaagctcaaattaaatccgacaaagtcgtgatg

SEQ ID NO: 9272 - DNA, 3000 bp, Unknown
  misc_feature (1)..( 3000): cDNA_ID_4282741_gDNA_ID_1972048_Annot_ID_178303 3000 nt of promoter + ATG
atcatcagcggttcaataacagtttcagaaactccattctctagcatcataggttcactaactgtctcacgctgttcctctagttcaataataggttcactaactgtctcacgctgttcctctagttcaataataagttcattagtactcagaattcctgtatttacatccgcaaccattacaacattggcagccaattccccataatttacaccgcatgaacttcttcgctctactattggaacttgcctattattactttccaaatcactgcataactctacatgcaaaacaggtctaaatccctctttatccaatgacgttaaatatatcaacacatcctcattatctacaatataagactctctccatgctttacatatcttgtaactcaatttcagattccttttctctccacctagagcaatctttctacagatcttatctattaaatccgcatatgttattctctccaaagatgatgtcttaaacactataccgtatattgaatttttgcaacttcactcatggtctgctgtatagtaccctccatagtcaaagtgtaggttcatctggatcctcttcttcatcgcctcctacaaatataaacactatattagtaccagttgaaccacgagatgtaccagtgtctgattcaatttcagttcgtccatccattgtattatgcaaatatggtttgattctgcttacacattgattcaattcaattacattgtactaactataatacttacaggagatggaagaactaaagaaggatcgtttccagagtagccgcagcaaagatcaataaagaattcgatccaatagtatcgactcacgtagcacgcagcaccggagaaatcgacggccggagaattggattagctgacctagcaaagtttccccagactcgacggagccaatgtcaaaaatcaccgatgttggaagttaatcggaaatcgcctatctcgtcggaattaaatgaattgggtcggaattaattgggttgggtcgggataatttcgatttcgatttggattttgtttttgatttttcttttaaaattaattgatataattcattaagggtaaataggtattatccactacaagagtggcatgcagatcaaaagatggcacgccggattcaaatttccagtttagtggcattgttgattaggactccttcaagttggaataggacggtcggagatcgccgtggtttttaccgtcgctgtcacaatcacagccagagccgcagtcactttgctcattcctttgcaaaaccctaaaaaaattattgggttgggcttttgattgtatgttgggttttttaattgtattgggcttttatattatttgtaatggtttattttagtagggtgaattacaaaaatgacggtttttgaaaaagttattaaatatatagcaccataatgtgtgtaattcatttgatagcacatgtcagttgtgaaaatacacccaactccttcccaacgatgcgcttggagagaaagagaagccacaggaggaaagagaaatatatatgagtaatatatattcacccctcttgattttgtttactttattagtttaacaatattacttggttaaagttaaagatactattgaaaaaacagattttttttttgtttatctaatatgatttgaattttaaaaatcggaaacgaatttcttaaaaaatgaatagtggtatcaaattctatacagatcatcatagaaagatagaatattatatatttgttcaaatagaaacgtttgttccgatgaatccaaataatcaattaaatactttttgatggaaggatactaaaccctaagataatatatagggaacccaagacttttaatataaaacactaatcaaatcacttaatatccttaatcaaaacaaacaattcattttaaaacatatatagtacaaggtatacgtaaatagtatacccaaaaagtacaacgacgccaataaattagagagacccaaaaaaagaaatcaaatgaaggaaacagaaaacagagattgatcaaattcagcgcttattagcgagaatctcgactaattcaatttcaaaaaataaaaccaaagtctcttaaaaaaaaccaaagactccaacaaaatctgaagtcttgcctgtgtaaatcaaaacctctaattcaatttcgagcaaaaccgaaatgtcatttccgaaaattaactgtcttgcttctgtgcccaatacacctctgttaatcgttggcaaaatcaaaagcttcataaacggtggactgaaatttattagagccaaacccatgttcaaaagttaatagttagtgaaagagaataattggttttctatggaagggagaagatgaagagcgtgtatttcaaacagggatagtattggcattattacagaaaatacaaacaatattggttacttttttttagagtgttagttacctaattataatatttttgtaggttataaatgtaaatttcccattttagtattttactagatttgtgtttgtaatagagtaattgtaatatgtaaaccaaaatgaaaaaatctataaaccaagaaaaatacaaaatccagttcatgttcagaacataaattttagctaataaccgatccgaattaaccgactaccgaactgatccgaaccgaattttaattcgagtctattcagtgaaattttcaaaaccctgaattttccttaaaccgaataacccgatccgaccaacccgatttagtcgaactcccgggcctactaacttttgtagcgtttaacggaacaaccggaccggttttagtaatttccctaattcaaattcactcttccctcagtttgaaatctctaaactggtaattccaatacagtcttttcttaaaatcgcactagcttaaaccagtagatcctaaaccgattcatttaaacaacaaaaaaccacttacagagttcgttcgccggcggcggcgagtcatcgtcatca

SEQ ID NO: 9273 - DNA, 3000 bp, Unknown
  misc_feature (1)..( 3000): cDNA_ID_2181575_gDNA_ID_1972048_Annot_ID_178304 3000 nt of promoter + ATG
tttttcataaacgctgtgttatgcccctgttatggtagaccctccatatacgatagcattttttccgtatgttatgatagaatattctaccatagcattagtaaaacgctttcatttattgacttataatagcgatatatataggctatgatctataatgtttataatgctataatattcagtgtcatgactctaattttatgcggttgttttaatctatttgcatttggtggaacatgtttagttttcaaaataaccaatacatatataataataaacatccaaaaagtatacaccatttcataaaccaaaaatcaattcatacataacacaagtctcaatccaacacttaaactaatatcctaacttctatatactacttttgccaatgaagttattgatgagatcatgcaaaatccttacttcgttttctagatattagactcggttcttcaagtaatttagctcagcttcataggttgttgtagtctcatcctttctcttaggttttcggaaaacattgctaccttttctcttaggttttccccaaagactgttgtcttcatctatctcactgtcctcaacgacgagattcataatatcttctgttagaacatgaaataaaacaagtaaaatttcggcttcttgaacacaaacttattaagtcacattattagtaaacaaatctttttactcacctgaaaactcaatttgggactgagacatatctttagcgtgagaagagactaattccatttcctttatacttttactttctccaagaaaagcaaacccaagaccatcacttgtatccatcatcggtgactcatagatataactcgaacaccattgacttagatcaggaacttctgagaattctgaaaacaaaaatgacaaaccacataagtgaaatcaatctagctaatcttgctaaccactaagaatcgacaaaatgaagtttcagaaaccaaaccaattaagcaagtttgatgctaccttgactatcacccatctctcaattctctatattcaaaagtcaagtctttttctctgtctctttggtcttaccaaaactcggtctcctagtagcttaattgaagctaagtatattgtcaatagtaaactgaaatagagaaaattataagtcattattagaaggaaaactattaatcatataaccaaatcattataaactcgatgtagaaatacaattaaagtagctaaacgtaatcatccatggaaacagattaaagaaatccaaagagagtaacaacaatttagagaatcatgagagaaagcaatgagaatttgtgaaatatattagcacgaaacaacataaagaacaaaacaaaatcttttttatgctacatatgctaacaaagagaccttgcttaatgacctaagatactacaatatccacggctgaatgcaatgtcgaaccatatacacaacataattcaacatgaggaagaacacttaagatgttatagataaagtatttgtaattaggtttatgaatcatagtgatttgagatataccacaaccttggagaagagagaaacgaacccagagaaagagatgttgagtcttttcttggtttttgtctcacagtcaattcgtcgaacaccttgtgtgcacaaaaacacttcaaaaacgttacccttttgagctgcaaattcaaaaaaagaggagagacaaaaccaacagaggagcgatacaaccaacaaacaaggattagaagctatagattcaaagggaaaagagagacaaaatcaacaaaccttttccatctgaaacgtgagaggatgagtgaaagaagagagaaaggaggagagaaaggtgaagaacaatgtagaatttgggatgtaagaagtggaattagagattttcaaagaagaaatttagggtttgaaggaatcaatttgggggatttttttttttcttaagatgtgtttagcgttttgtcgcttaatatttttagatctgagacataaggcgcttaagtgattttttcgcatatatattggcggaatagatgattttagctttccgcttagtgattttctatcatagtgtttatcaaacgctattacaaaataatcaaaataaaaattaatctttcatagcagtaacggaaaatgagttatcctcttgtgctatcaatgtatcctcttgtgctattaatgtggatatttgttgtagtgataacaagattaagacttcaatcttatgttgctagcagtcatcctcaatgattgtcggatcaatttgccaaagaaagcattgttgggcagcaaagaactttgtaaagagtgaggactgatagatgagatgacacaaagattgaggttggggagtcatctaaatatctatcaattgtgacagataatgaactgaagaaaaaaataatgaaagtttcaagaacatcagtttggggagttgagatacctccaaagaagagataatatcactctacaaatactgtcatccactttttggtatcacgtagtttcgacaaagcaggaaaaggttgtttcgttttttttctttaatccagtttttaggaatttgtgtgtgttaactttcaggtaaaagatgaagactagcctatgttgtagagtcttctaatgatccttggttattctcattgcgagctcattaatccttgaatgttcaagatgttatggtcgagcttcaagtaacttaggatacttttggttctgttgaagtagggattgtcagtactctgtttgataatccaaaacttgtaatagttagcaggctttaaaggttgtaggtggttgtacccacttttataatgtttggaatctctctgtttctaaacaaaaagaacactttgtgaaaaaaaattaaaaatagaatggtcctctgtacatgctggttcatgtatagatttcaactcacctttggaagtttacaaatgagacaattgaaattgaaatcgagagaaattaagttggtagaaagctgcaacaatg

SEQ ID NO: 9274 - DNA, 3000 bp, Unknown
  misc_feature (1)..( 3000): cDNA_ID_2181617_gDNA_ID_1972048_Annot_ID_178315 3000 nt of promoter + ATG
tcacataagttgaaactatactattaagttgtcttaagtgttttctagttgtccttatacactacttttaattttcgaacacaattttcagaaattaatgttacctcagatttttcttcttccccttctttatcctcttcttcagggttttcttccatcccctgaggctgcatttgttcctcgttatcaatttcctgaaaattcatacacaaccataaaattaatatttcgttgtactacttgtaccagttatcttagaacaacattattaacttttctcagaattcaattttctaatgcaaaccaatgtatgattgatcacgttaacgtataaatccatgcaccaatcaaataaacctatactattaacttgtactaattgttttctagttgtccatatacactactttcaaacacaattttcagaaattaatgttacctcagatttttcttcttccccttcttttttcctcttcttcagggctttcttccatcacctgaggttgcattggttcctcatcattaattttctgaaaattcatacacaaccataaaattaatatttcgctgtactacttgtactagttatctcagaacaacattatcaactttttcagaagtcaattttctaatgcaaaccaatgtatgattgatcatgttaacgtatatccatgcaccaatcacacaaaactatactattaaattgtactaattattttatagttgtccctatacactatatcaatattcacataaaattttcagatatttgtatatacctcagatttttcttcttccggttcgttaaggttttccggatgctcttcgtcacagttttcgtcttccactttgttttcctctaccacttcttctcggttcacatccacttcacggatcgtgaccctctcatcttcactctcactcgaagtaggactgactaactttgcacgaaccataattcccttgcaaaccacacaacaatcaaagaaaccgttcaaatcaacacaacaaaaaccacatctaatatttcaaataaaaaaccgttcactttataaactaataagatacttacaagagtatagcggtaacggcggctaaacgacggcggtttggaacgacggcggtgacgaacatcggcggtttggaacgacggcagtgacaaacgtcggcggtttggaacagcagcggtaacgacttagcaaaatcatttggtgaagaagtagagatgaaaccggtgacggtgaactaatcggagaagagaaaacgacaaaattttccaagaatcgccggaataatcgccgtttaagttaatcggagaagagaaagcgacaatattgattttcgaaaaatattagttaggttaaaagttttgatttgggggaaaacctagtgacaatgggtcggatcctggagctatccttggatttgtggttggatcctgtagttttcctaacttaacaaggttatttcgtaatatccctctgcttctctatttaaaaaaaattcaaaacgaaaatcaattttgagattggcaaaatgaaaatttttcccgcagatgatggcagaatagataaaaatccgcatgtacacattaaaaccatttatttaagtaactttttttcaactaaaatctatatgacaaatatatccctataaaaaaatatgataaaaatcaggataattagcagataactgcattattgaaataatatcattaacaaatatagatggagtttgatgtatggatgaaatgatataacgtacaaaccaacttaatatgttaataatatatttgacgatataaacaaattctcagttattaaaccaatgattagatttcaaagactgatatatatgcaaaaaacattatatctactctattatttgagacgtatgttaagtgattctcagttaaaaaaaaatttaccttaaaatcatatgtttaaaatgttaatgtcatgaaaaaaattacctttaactgagaatcacttaacttccgttataatctttgccattcgattgaattgtttgtgtctgttcgatctctcgccttcactttaaaaacacgcggaaccttttgacccaggtttacaatttttgggtcatacgttataatcttggccattcgattgaagtgcttgtgtccgttcgatctctcgccttcacttaaaaaacaagcggatccttttgacccgggtttacaacttttgggttatacgttataatcttggccattcaattaaattgtttttatccgttcgatttcgcggcttcgcttaaaaaaacacgcggatcattttacccggtttgaaactaatgggtattcgcctctaatcttggccattgaattgaattgtttgtatccgttcgattacgtatttcccaaaaaaaaacacgcgcttctttttatcctgttttaaaaaaatgggattctccttttaatcctcgccgttgaatagatttatttcaagctgtccgattttgtagtttcatgcataaattcttccgactatatttcaggaaactaatcgtattaatttcattcaatatcttgcgtatcttcgttaacaattaagtatatatcacttctccataattatccatgaaacagtatttcgtgtggatcttctttgagaattatcttacattttctccataattatagcacatataatatttcgtttggatcttcttttggaattatcttacattttctccataattatagcacatctaatatttctttgcgatcttcttttggaattattttacatttctccataatcctatattcatacctacttttacggaaaatgataaatattttcctataatttactgatttttgatatggaataaacttgaattccaaggataatatcttttgcgcatatttttttgacctaaccactcattcttataaatatcggacgcctcatttcaatctactcactcagcttacactcacacagtttcattttcaatttcatttttttaaaa

SEQ ID NO: 9275 - DNA, 3000 bp, Unknown
  misc_feature (1)..( 3000): cDNA_ID_2181594_gDNA_ID_1972048_Annot_ID_178310 3000 nt of promoter + ATG
tatgaaagagtttctggacagatgatcaatttagatatatctgcaattacctttggagtaaaagtggaacaagagatgaaagagtggatcaagcgaagatctgggattcatttagaaggtggaacaggtcgttatttggggctaccagagtgcctcagtggatctaagcaccaattgtttggttttatcaaagacaagttacaggaccggatgtcaggatggtatgcaaaatctttatctcaaggtggcaaggaggttttgttgaaatcgattgcaatggctctactagggctatgacgcgttttaagttgcatgttagtctctacaaagatcttacaagtattatgatggattatttgtggaacaatttgcaaaatacaaagaaaattcattgggtaagttggcagaagcttacaatgcctaacttactaggagggtttggttttaaagatcttcaattttttaatcaagctctcttagctaagcaagtgataataggtttttaagatcaattaatcctaaagcactatcatgtcgttgtagtactgaaggttgtcaatccaaatgagtgtgatgctagcaatcaagatgcaatcagagttcacagagtcaagtcaagcaagaacaggttttggggtgttctagcagtcctaagtgaacatgcaggaaacagaaattcaagcagacaattaaaacacttgaccaacacagcttgttgccaagcactgggtgtggtcgagtaacagacagaaaatgtaacagagatactcgactgcagggaaaaggggattttcatacccgtaccttttttggagtgtattttcatacctaaacaaatttgtcgggtattttcatacctaaaccgtatatttatttgaatttcatacctcaacttaagaaaaagtataaaattcaaagtcaaactaacgggtgtttgtcaacttcgtgaaaacgatgagtcaacggacacgtggattatgacgtgtctaaaacgacgttgttttgcataatagacgttaaaatgataaaaaaaaaagaaaaaaaaaaaacttgcaacagacgggaatcgaacccacgccctaagagcatcgttactgattaccaaaccattttaaccaacaatatttattggttatacgtcaaacgtttaaatatataacggtaatgattttgtgttttctcattaataaaacgaagtcgttttgaattgggggaaatgaatcaaattttagtgtttctaattgaaatcaaattatagaatgtgaaaaatcgatttcaatttgaaaaattctaaaatgtagaatgttaaaaaatttagaatgtaaaatctttctaaactgaaactgaataaattttataatagttttgtattttctcattaataaaacgaaaacgttttgaattgagggaaatgaataaacttagggtttgtatttgaaattgatttttcatattctagaatttcaattacaaaccataaaatttaattcattcctcctaatacaaaataatttttattaatgagaaaacacaaaataattacccttatattttaaaacgtttgggatataaccaatgaaaatggagatggaatgtttagacactccgttaaaagacattgaggatgcaagttcgacacctttgttttgcaaacaatttaacacaaaactgttatccttatatattgaaacgtttgagttataaccaataaagtttgttggtaaaaatggttagattctccgggtaaaggtttaaacgacgtgggttcaattcccgtctgtttcaaattttttatcatttataaacgtctgttatgcaaaacgacgtcgttctagacatgtcataattcacatgtccgctgactcagcatctttacggatttgactaacacccgttagtttgactttgaattttgcactttttcttaagttgaggtatgaaattcaaataaatatacagtttaggtatgaaaataccttacaaatttgtttaggtatgaaaatacactctgaataaaagtatgagtatgaaaatcccgttttcccctcgactgcacagtctgttgtcagaaaactgggtggtcgagtatcaggtcgagtaacaggaaaaatgcaaaaactaagcaatatgtaacaagatgcagtaaacaacagcagaataaacaaagaaatcaattagattaagaatttctgaggatggggtaattgagtagtttcgtttcttcagtttacaggtgattgacatgctcaataaattatccccagacaacaagttcgataaccaaatctaagtgccaccgcaacagagaccctcaagttaaaccagtcccagactcaatcaccattgacgagagctaacctaacatgcattacgaatcaacaagttaaagccaaaacgctccctgtaaccaataccttggtacagaaccacgatctctggaactaggggttcagacattttatcgaacaccttttgggcgcggaaatgtctaggcacaaattccagttgatcaaaaagcaataagcattaagaacaactaatccagaaggatctacaaatcaaactcaaccacctagcatactgagaattctaaactactttaacccatcctcagaaacctagtcactactcagacatcattgcagagaacataaacgatgaagagaatgaaaacatgatagcaacagagtaatagcaggatgataacatggtgaacaacttagtaaacgaaataaaaaacaaatactgaataaattaatagatatccggattacaaaaacgtcaagaacacagtgtctgcagaataaaacgttttgttacaaaaatgtaaaatatatgctacttatagcgaaatattccgaaacccgaatactcaaaacgacacagtattgggacgaattaagaacgacactcgacccaggtggtcgagtgaatggtcgagtgataagctagagtcttcttcccttcattgtgctcgagtgtcttgttgagtgcggaatg

SEQ ID NO: 9276 - DNA, 3000 bp, Unknown
  misc_feature (1)..( 3000): cDNA_ID_2181556_gDNA_ID_1972048_Annot_ID_178298 3000 nt of promoter + ATG
aatacctttgcttgttgtttgacggttggtctcttttcggcctgtatctacttggtaatcgtgtgctccagagaagttacgtctctcatgatgtacgaatggtccgctctgaatgcccctcttctgggtcaggaagtttgtgtgtactttctcggctcgtgcttccttgctagcagctccatgtcctttttgtgggcgacgtaatacaaagcgcgaagcagggcgtctcggattgtcaaaggcttagacaaatttaactcttttcagaattcagatttgtacgaaatggccttccttagggccgagagggcagcgacgtcgcttattcattcgactttagccagggttgacttaaacgttgcgacaaagtcccttagtggctcattaggttgttgagataatgaccaaagatatgcgtcggatgtccatgggtcgattagcatggagtactgcatgagaaagagcgtcaacggctcttggaaactctcaaccaaattccgatccaaactagagaacaaatcttgtgcagttcctttgaggtgtccacgaacaacaaacacaagctggcgtctctctctcctagtttgaatctgcctcatctaacagctatcatgaaagacttttatatgtccctttgggtcgtatgacccgttcaaatactcgatcttgagctttcacaggtcagagatcgtggcctaagtgatcatgcgtgtgaatggcgtattgtacgattcttccgggatgcggtcaatatggaggccgaggaggccatgctatgcatctgcgaattcacgagcttcatgtcagcctcaacattggctagcgaggcttttatcacgtcgatctcatactccctttcgtactcctcggtccatttgatgttttcctcagcttcttcatcgttagtgacttcaatctgtttgattgcattagcctctgcttggggatgcagttcttgatggttgccaagctcgtccgtttagtttgatgcgtctaaatctaacggctcagcatgattgttacagtaggggatgtcgagcggtttcttaacttggctcggcatcccctactgtaattcgtatgatcccgaggtaatccataaccattggcgtttggctcggtctcattaagtgggtgaaatctgaccctaacaattatgcttagtcaatttccattctttttacacctaaccctttatttcgataagagggttttgcaaaacccaacactgaaacccttctccgtaatttctcaactccaacacttaacccacttttttcttatctcatatgagctctattatacaaaccagaacatgacagcttaaaaaacagagcacaaacgctcatcaacaaaacacatatgccttaactctgaaaaaaaaaaaactaaatcatcctcctcgtttttcctcttcaattcgtgaatgtaaccaccacggttttataaccaaattctactaatatgtaaagtccaatagttccacgatcttggcaatacaaagtgatgagaaatagaaacccaatctcaaatgcttataactactactttcattaaaataaaactacttaattccacgatctgacaacgttctaccgactggtttcgagaatcaactaccacactccaaaatatcacatatgcaaatcaggttgaaatccaccagtttcgtcttagaaaagccataagaagacatcttctagcctttatcatcttaacccgatttcttaacaaaaacgtttgtctaagacctatatgaagtactcttcatagtaattgacaaatatattactcccacataaaagtggaaccaatcgactatgagacataggaaatcaatcaatggtaaatgaaaatcgaattgaaatcctagttgaatctaaaacgaatactattagaaccagaaaagccgattcaacaaagatgaaaaagatccaactcaaatcagaaattatatgtttaacaaaaaaaacttgcgttttcattaaccagatatcacattctctctagaaaatataattgagataagagagatctaatgcaaactattttttataattacgtttcaaaaattgtactatactacaaactcaccctaacttttaggcctgggagttcggattaaaccgatcaaaccggcacgatcaacccgaaattttcggttctcggcttagaccgaagagattaaaccaaaccgaacggcaaattaatttgggcaatcagatgtcggtttgggtcggtttggtaatcagttatcgatcgattacttcgggtttaaaggaacattgtataaaaacataaaaccctagatctaattcatttcatctcttctcctccttttcgcctctcctttacgatccttctttttccactctcctcctctccttacgatcttccttgttctttcttcttctccttccttctcttctaaactcttctacatcttaatcttcttcgttttcgtctcagccttccatgacatttaccgacgtgaggttcgtgttgggatttgattattggtgttacttgattttttcgtagtgattgttttttcaagttctagatcttagaaatcgtttttattttattgatttaattgttttctttcttctttcagtgagaatgctaaaaacacattcatcaacctcattcaatgcaatctcgcttcaaggaataaatgtctggaatgccactatgtgcgaaaaagtaaccaggaatgccactcttctaattcttattttttgccgaattaaaaataaatgagagaaaatccaaataattggcaaaagaccaaaaacccagacgacccaacaaagtatccgatccaattaagatccatgcccagcgacccaaaactcatcccaaacacttaagcgaaatccctaatttctaaaatcaaaccgtttctgctctcagaaaattcaaattttccaaaatcaaattcataatttctcgcctttcacgattttccgacgaattcttgattcgtgtaatagtttg

SEQ ID NO: 9277 - DNA, 3000 bp, Unknown
  misc_feature (1)..( 3000): cDNA_ID_2181569_gDNA_ID_1972048_Annot_ID_178301 3000 nt of promoter + ATG
caatcaaaagcccaacccaataatttttttagggttttgcaaaggaatgagcaaagtgactgcggctctggctgtgattgtgacagcgacggtaaaaaccacggcgatctccgaccgtcctattccaacttgaaggagtcctaatcaacaatgccactaaactggaaatttgaatccggcgtgccatcttttgatctgcatgccactcttgtagtggataatacctatttacccttaatgaattatatcaattaattttaaaagaaaaatcaaaaacaaaatccaaatcgaaatcgaaattatcccgacccaacccaattaattccgacccaattcatttaattccgacgagataggcgatttccgattaacttccaacatcggtgatttttgacattggctccgtcgagtctggggaaactttgctaggtcagctaatccaattctccggccgtcgatttctccggtgctgcgtgctacgtgagtcgatactattggatcgaattctttattgatctttgctgcggctactctggaaacgatccttctttagttcttccatctcctgtaagtattatagttagtacaatgtaattgaattgaatcaatgtgtaagcagaatcaaaccatatttgcataatacaatggatggacgaactgaaattgaatcagacactggtacatctcgtggttcaactggtactaatatagtgtttatatttgtaggaggcgatgaagaagaggatccagatgaacctacactttgactatggagggtactatacagcagaccatgagtgaagttgcaaaaattcaatatacggtatagtgtttaagacatcatctttggagagaataacatatgcggatttaatagataagatctgtagaaagattgctctaggtggagagaaaaggaatctgaaattgagttacaagatatgtaaagcatggagagagtcttatattgtagataatgaggatgtgttgatatatttaacgtcattggataaagagggatttagacctgttttgcatgtagagttatgcagtgatttggaaagtaataataggcaagttccaatagtagagcgaagaagttcatgcggtgtaaattatggggaattggctgccaatgttgtaatggttgcggatgtaaatacaggaattctgagtactaatgaacttattattgaactagaggaacagcgtgagacagttagtgaacctattattgaactagaggaacagcgtgagacagttagtgaacctatgatgctagagaatggagtttctgaaactgttattgaaccgctgatgatagagtgtggggttaatgaagattctgataatgattatgttagggaagaatattgataataggtttttagtcaattaattctaaaacactatcctgtcgttgtagtattttaggtgtcaatccaaatgagtgtgatacaaacaaatgagatgtgatcagaagtcactaagtcaagccaagcaataacagttttggggtttctaacagtcctaagcgaacatgcagaaaacagaaacaataacagaattactaaaatcactcgactacaacaggctgatgccagaagtaggatgtggtcgagtaactggtcgagtaacagacatgatatgaaacagatatactcgactgcacagtctgttgccagacactgggtgtggtcgagtatactggtcgagtaacagacaggaaacaagataactgtactcgactgcacagtctgttgccagacactgggtgtggtcgagtaagttggttgagtaattgcaaaaactaagaaacaagcaatgagaatgattaagcgataacgataaaacagagaaataatatagacgagaaattcctaaggatggggtaatcgagtatagtggtatcctagcctatccgaatggttaacaagcgcaatcaagttatccctagacaacaggttcaacaacagatcaattcactcccgtgatagaaatcctcaagcaaagctagcccagactaattcccattaacggaatctaactatgcaggcaataaaaacagactgataaagtcaataaacgctctaaacggccaatcccttgggatagagacgcatatctcaggaactagtggatcaagcatttcatcgaacaccttctgggtgctggaatgcttgggatcgaattccagttgatcagaaagaaataagcagtaaacgcaagtagtcctaaagggattcaatcaattctaaaacttaaccactctacagactacgaattccacaactactctatcccatccctaagaattctaagtcactactcagacaacatgctcaaagacataaacgtagataaatgataatattgcataagtaaagagataaagagtagagaaacaggatgacaaatgaaatcaaatgcggaatctgaataacttggaaaaatctcgaattacaggttgcagaagcaaaagcggcgcagcagagtaaaacaaaaaataaaactgaagcaaaaactcaatgtcgactagatgtctcaggacagaaccctaagacatctatttatacaaaacgaaataaaatgatagtagacgggccaataacctaatcgcccggcccacagagtgataatgggccgagatgggcttcgtgattcgatggaggtccaggccgcttccaaacactttgtcttctcctcttctcttccttgtgcttagcttgtctggttgagtgcggatttgagtagactgtgaagacgtgatcgagtgtccggtcgagtgatggtgatggtggtgagtgatgatactcgaccagggggtcgagtaatttggtagagtgaatggccgagtgtggtcaggtggtgtggcgaagtgatactcgaccagggggtcgagtggcatcatcgagtggcctgagctgaggttactcgaccaaggggtcgagaagatgggaagaatggctccaaagtcactcgaccagggggtcgagtatg

SEQ ID NO: 9278 - DNA, 3000 bp, Unknown; identical to SEQ ID NO: 8976
  misc_feature (1)..( 3000): cDNA_ID_3044167_gDNA_ID_1972049_Annot_ID_178321 3000 nt of promoter + ATG

SEQ ID NO: 9279 - DNA, 3000 bp, Unknown
  misc_feature (1)..( 3000): cDNA_ID_2991265_gDNA_ID_1972049_Annot_ID_178331 3000 nt of promoter + ATG
tacttcgcagtagcaggctgaagcattatataagaaagagacttagaaaaagctcaaaatcgtgtaaaacaaagagaactttcgtatcgatgacaaatgtatacctgagaaccaatcttgaacccatcaacgttattcgctgcaagcaaatcaaaaaaggattagagaggaagataagtaattatcagaaataagcaagaactgtaatggttaggagtaagagcatacaatgtaactgcaagcgagaatcagcttcccaactcggtttctctggattaacattgtccgtatgagcaacaaatgtagaagtgaagtaattgataccgacaaaatcataagaacccttcagtttctccttctgctcgggcgtaaaagatggtaatcgactaccaacaacatctttcatggcctgagggtaatctccatgtgttattggctccatatgcctgtaaacagcaagtatccacactcaaaacactaagcttaataagtttgctcaaacaatatttcttaaagactactcaccagcctagagtgaaatccatagctctcttcactatctcctctgaaggactcgaggtggatttcttatcataaggctcaaaccacattggactttgaacaattccgatctttccacctgtgcactgtttgttttaaatccatggattagctcaactgaaattcgagtccaaatctgttgtgattatcctaacattcttacctttccacatttcctgaattcttccacagcttcggcatgagccaacagcagattgtgactaacagtgtaaacttcatggccactcttgcctgcaacacatttctcattgacatatttagaacatcttcctggtgctttctctccagtctcgtatccaccacgactaaattcataaggttcgtttatagtaacccaatgcttcactctatcaccatatttattgaaagcaaactgtgcaaaatcacggaaatcctccctatatatgagtttcagaacatattaagtaactgcaaaaagataggagacataactgagataacatagatcaatatttggcttagaggacttacaaaatacggtcactcaagaaaccgccgtattcatcttcaagagcctgaggtacatcccattgaaacaatgtgacaagaggcgttacacctgcaaaactcaatcaagattgccattttagccacaaggttaaaggaaaaaaaaaaggagatttcatatgaaataaagatgtgggggaatgtgtaacaaccatttgcaatgagctcgttgataagatcattgtagaatttaactcctgtttcactcactcccttgtcttttttcccatctgattgttttcaacaacaaaatgttgttagaaagtgcatctcataataaactgcaaaagaatcattaaccaaagaatagatctttgtcttacggggaaatattcttgaccaagatatagagaacctaaaggcatccatattcagttttttcaatagttgaacatcttcctgcaacattttcaaaaagttagattagatcaacatcttcagtgggaaggattgctcgtagaacaatatataccttgtaatgatgatagaaatcaactccgagcctgccgtcaagattgttgttgctttctgcagattcaaataacatgctcatgagttaataatcacaggacgagatcgaattctaaactcataacaatggctcagttttataatcttctgacctgaatgttgtttaagagtgaatgagtcccaaatgctggaacctcggcctccttcttctgctgcaccttcatgctatacaaacaaatgaaccaaattagaaacgtttggcagtagaagaggactatcaataagtcaatcatgaaacttgaagcatcatcaacagaattcaaaagtgaatgtgaaaaagaaactacccttaggcattaaaactagagacttgaaaatgaccaatgactgccttgaattggaaaaagctttaaacttttccctttcaagctatttggtttggctaaagataccaaatttgatttctttaaactagatttgagattaaagactttcttaatcgtacttacaaagctgctagagctgatattagagtaaatccggcaacgaaatattaaaactcgccggacaaaaagaatccagtcaacggcgattcaacaatgtttggacttataaatcccaaattcgatatacctggaaagcagaagttgtagcaccgaacaagaaaccatcaggaaagcttccacgaccaaacgtggaactcgccggacacacagctccaccgtagacggtgatcggagaaactatcacgacgagaaataaacccaaaaagagaatcgctttgagtgccatttttcaagtaagttttttttatgcttaacgtggttgtcgtgttccattatttataagagtcgagatcacaaagaagaagaatttaaaagatagttgtttttgagatccaatacttcgtctcgaagattaaagcaaggtgagagcgacgtgtgtgttaaaataaactatctttgatattgtacatttaattttcgatagcttagccttgtcttgtcgacgacgatggtagtagtagaagaaacaacgttaaggttccttcttaccacggtaaaaaataaataacaacaaccaataattgtaattctataacttaatttttgaaaaacagtttttaatttgaaacaacataattttaccttttatacggactaatatatacctacgacaaaaaaaggactaaatttatagctaatttttttgttttttttttcaatttatattagttagttggaccgacatgaaatatttatttaccttcaattaaagaataataaaacaaaattatctcagcaaaattaattgaatttttttagctgacacgtcaccatctttatgtttttttaattcatttatttccatttggataaaacagaaacctaatcccttaaacctcgccggcgacggaaa

SEQ ID NO: 9280 - DNA, 3000 bp, Unknown
  misc_feature (1)..( 3000): cDNA_ID_2181759_gDNA_ID_1972049_Annot_ID_178333 3000 nt of promoter + ATG
atgtcgatatattcgttgccggaataggaactggtggtactgtaactggtactggaggtttcttgaaaatgatgaacaaggatattaaggtatttctctttctcttgttttcagatttctggtttaaccttgtgattacctttatatgaaagatccttaaaacataggtagttggcgttgaaccatcagaaagaagtgtgatttctggagacaaccctggtaaggagcattgaggcttcatgtcttcagaatcaatacttttgaattgggtttatatgctttggaatcccccttacaaaatactactaaacggtttttcaggttacttaccgggaatcttggatgttaaattacttgatgaagtgtttaaggttaacaatactttcaaatcataatcaacatttcaaacgatacatctattgaaaaaataaaagaagatcatgttgaaaaacaataggttagcaacggggaagcgattgagatggcgaggagactagctttagaggaaggattgctggtatatatgataaacctctacttatgttcttgcgtctttcttatacatgacattgggtttaaaacttttgcaaaatctatacaccttaggttgggatttcatctggagctgctgcagtagcagcagtcagcttggctaaaagagcagagaatgccggtaaactaatcacggtgagtaaaaacagattgacatatgtagtaatcacagttggtggtttttagctctaataatttcgtaaaacaggttctgtttccaagccatggcgagcggtatatcacaacggctctgtttagttccatcaacagagaagtccaagagatgagatattagtagcagccattagaaaagcccccaaagtttggtccttttggagagtgtaaacaacaaatctctttgcaatacagaaaagagaggtataaatggtgtttcttttttcttttcttcttgctcaaaagttcaacttcctgttgaggtaatcttacaagccaacacctgtacaggtttcagaagactgtgaggttagagctcacacgagaactgagagataaacatgtctcgagcccaaccagttttattcaaagatttgtgaatgtatagaagatcatagaccttgttgcattattcttcttcttctcactcatatgtcagggaagtatgctgaacaaataaaagtttgatcatctaaaccctgaaattgatttgagatctccaagattggaaaaactcaccgagagcaagcatgtatgtacattatatggtggttagaactcaaaactttttgcctttgatgataacaaaagatatggttttattgttccctttggatttgttaaacagttaaaagagagcaatcggtaagatacaagaatgagtgtgaaataaattttactcttggtagaaggaaattggataaaaaaaataagaagtcgaatctttaaagagatgagcacttgtgggcttttgcgcatttgacgtccattcctcaagtcgaatatccgcatgtgcctaaaagcccaacgaaatatacatgaatgcacaatttaatacactatgacccaaactctgcccaaaaatatgtatagatagaaatgagtcacaaatgtaatttccataaaagagaatgggacaagattttacagatggaggatattgggtggaacagtgtacacgtgcaatcttactttctccgtgtcttgcataacgtggcggatttgtagggacacctttgtatctgtattatcaaagtcgtagaaagaaagcattgtcgaaaacagcatgcagtccatatttattatgagtaaacaggcagtagttttcttttaagattgtaaagtaacgtgtaacgagttttgagtggtgactcagcatgatgtattatttcactctttttttttttactgattggggttgggggttgggggtggggggaatgattagaaactccagtttttaaattttcaaaacgggttgataataatctgatttcttcagtagtatgaattttggagggttagattaaagatttggtccatatctatatcgcataatgtattttattaacaagaaaacaattgtgttgtaataagttttgtatattttttccggcattaattttggatatatctaataatacagagaactacaattcaaaattttctttgtaagtttacatatgtacgaatacacacattacacacacacataggttagttttctagtacatcataatccgtttataccccttgcaaatctctattatatgtctatagattatcaacacgtttcggttttactctgacattttttcctaaaaagaggaaaaccaggtaacttcagttttacaaatttattttattttctctattattttctgttgttcgttttcgccaacctctgtctctcttctctggtcttcttcgctttgagtctttccccttgaactaaggtaactaatcactctgtacttcgtagattcagtatatataacaaaagtgcatctgtgtgttatgttttgatgaatcttttgaggtaagaaatgagtttaaacaaactttattagctcatttcttgatatataactttctcctggctgacaatttctataagaaagggattgggaagaaaaaaaaaaaagagaaataaataggattaaaaaaaaaaaaactgtttggaattgcatatactcgtgaaaacttaaaaaacagatttttttttttgtttttgttttgttgcttttttttttccaatgaaactcgttgtaaatatatgtgtgtgattttatgaattactaatatgattaatatttatccgcctaataaaacacattccattatttcgttgattaactaaacaatttttttttttaaagttcgaaagcttataaacctttatttctttcttttttttttgttagtgaaattatcagattagagttaaagaacggaagaacaaaagaacaattagaaatgagtactcaagaagaa

SEQ ID NO: 9281 - DNA, 3000 bp, Unknown; identical to SEQ ID NO: 9090
  misc_feature (1)..( 3000): cDNA_ID_1989396_gDNA_ID_1972049_Annot_ID_178344 3000 nt of promoter + ATG

SEQ ID NO: 9282 - DNA, 3000 bp, Unknown
  misc_feature (1)..( 3000): cDNA_ID_3041013_gDNA_ID_1972049_Annot_ID_178330 3000 nt of promoter + ATG
gtttagatgatcaaacttttatttgttcagcatacttccctgacatatgagtgagaagaagaagaataatgcaacaaggtctatgatcttctatacattcacaaatctttgaataaaactggttgggctcgagacatgtttatctctcagttctcgtgtgagctctaacctcacagtcttctgaaacctgtacaggtgttggcttgtaagattacctcaacaggaagttgaacttttgagcaagaagaaaagaaaaaagaaacaccatttatacctctcttttctgtattgcaaagagatttgttgtttacactctccaaaaggaccaaactttgggggcttttctaatggctgctactaatatctcatctcttggacttctctgttgatggaactaaacagagccgttgtgatataccgctcgccatggcttggaaacagaacctgttttacgaaattattagagctaaaaaccaccaactgtgattactacatatgtcaatctgtttttactcaccgtgattagtttaccggcattctctgctcttttagccaagctgactgctgctactgcagcagctccagatgaaatcccaacctaaggtgtatagattttgcaaaagttttaaacccaatgtcatgtataagaaagacgcaagaacataagtagaggtttatcatatataccagcaatccttcctctaaagctagtctcctcgccatctcaatcgcttccccgttgctaacctattgtttttcaacatgatcttcttttattttttcaatagatgtatcgtttgaaatgttgattatgatttgaaagtattgttaaccttaaacacttcatcaagtaatttaacatccaagattcccggtaagtaacctgaaaaaccgtttagtagtattttgtaagggggattccaaagcatataaacccaattcaaaagtattgattctgaagacatgaagcctcaatgctccttaccagggttgtctccagaaatcacacttctttctgatggttcaacgccaactacctatgttttaaggatctttcatataaaggtaatcacaaggttaaaccagaaatctgaaaacaagagaaagagaaataccttaatatccttgttcatcattttcaagaaacctccagtaccagttacagtaccaccagttcctattccggcaacgaatatatcgacattacccattgtatcttcccagatttctggtcctgtagtttcaaagtggatcttaccaaacaaaccataagaaaaataccttattaggccacacacctcatatccaaaattaaaagagtaaaagctcgataacttcttacctttgtatttgctgtattgtcgaattgctgaaacatatatgcgttctttgtcttgagaacaatctctttggctttatccactgctcctttgagacccttctctggattcgttagcacaatctctgctcctagtgcacgtaaaagcatcctcctttcaatattgatagaagctggcattgtcactataagcttgtagcctttagctgcagccacaaatgcaatcccaaggccagtgtttccggttgttggttctactaatacagtctgctttaataacaccatcgaattagcaatctacaatgtggcaacacagaacattaaaatatcgaaaggcaagaagtacaataaccttcctcggagttatagctccgctgttttctgcctcgttgatcatgctcagaccgatcctgcagaaagggaaaactgttaagaatgttaaatccacaagactgataatttagagaagacgaagaatcattctgacctatctttgacgcttctacagggctccattgattcgagcttggcagcaatgtcagccaaacaaccatctgtgactctattgagatagaccattggtgtgcttccaatcaactatacaaacaaagttcgaatcctaaattatcaaacttcatcacataatctaatctttaataagaaaaaaacgtctctttactcataagcttagtaaaatttgaatcctttgaactcacttgagtgacatcttcggcaatgttgactgtctctgactcagcaatgtgttgctcttcagccacagtagtgactggcggaggaggaggtggtttccgtttggttttggatttcgatttcgttccggtagaggattttccggagatagcgccgacgacgaaggaagataccggagttctgacagccaaagaagatgaagaatcatggtgaaaggagaagagtgagagtttcgcagtactgaaacggtgtagtttagatgttattcgacctaacggagactgaggaagaagacggagcgaaggagacgcgaaagccattttccgtcgccggcgaggtttaagggattaggtttctgttttatccaaatggaaataaatgaattaaaaaaacataaagatggtgacgtgtcagctaaaaaaattcaattaattttgctgagataattttgttttattattctttaattgaaggtaaataaatatttcatgtcggtccaactaactaatataaattgaaaaaaaaaacaaaaaaattagctataaatttagtcctttttttgtcgtaggtatatattagtccgtataaaaggtaaaattatgttgtttcaaattaaaaactgtttttcaaaaattaagttatagaattacaattattggttgttgttatttattttttaccgtggtaagaaggaaccttaacgttgtttcttctactactaccatcgtcgtcgacaagacaaggctaagctatcgaaaattaaatgtacaatatcaaagatagtttattttaacacacacgtcgctctcaccttgctttaatcttcgagacgaagtattggatctcaaaaacaactatcttttaaattcttcttctttgtgatctcgactcttataaataatggaacacgacaaccacgttaagcataaaaaaaacttacttgaaaaatg

SEQ ID NO: 9283 - DNA, 3000 bp, Unknown
  misc_feature (1)..( 3000): cDNA_ID_2181748_gDNA_ID_1972049_Annot_ID_178329 3000 nt of promoter + ATG
gtaatatgatgtgaaattatttaggtggaagtgcacagttgtaaatccgattagttaaagactaggatactcggatgatacaattccaaactaaaagcgatactgatcgagatgcttggagttgtatgtgcgacatcgagtaaaatgataaaattctccaaattggccatcataagaacgtgtttgaaacggcgcgcatcataatgaaatgaaaatctaggattcttaagaataatggtcctttttaaaaaagcatcatatatattcactcacatagacaattaactgaagtttgctcaaaaaataataataattgaattcgatgtatattctatgaatctcatttgaaataataataatgagtcatttctactctaaattttcaaagaagagaattcaaccaataaacttcattatattttgaaaaatataattttagcaaatcaaaagataatatatcctgctattattataaggcatgttagaaataaccaaaaaaaaagttaagtggctcaaatgcatattaaacatacacaaaacgatagtacttaatgaatgtgagccatgtaaattagtaaaaaggttagcttgttaataaattaattagtaaaacgcttagtgatctgattttaaaccaaattcaatattagcatatcagtaccgatatggtgatatataattcggattttattagttttaatgaatatatatatatatatatatatatatatatctacgaaaaataagaaaacaataaaaaggaagagcataagacagctgggttcatcagatttctattcttgtcgattcctgctctccgaaacacaaaccttaattaacagctcgaagcaatatcttaatcggatagtgaagacaaatttttatttttttatagagccaacttctgcccattagatttagatctaaccttgtaaacatcaagtacaaggttataagtattgaactaatgttcacttaataaaatctgaaggacaaaatctataaattttagaaattacgcatagacaaatccaagataatttctttataaacttttttgatccctctccgtaattatatagggtggcacgagcacatataatattatgttgggtgaacacaaattgtcacatcatatatagtagttgtatattgaaactaaatttgtgtagacgagatcgatataaataactcaataagcagagcttagataaactgaatagaatatgtgttgccattttatacagaaaatattcaatattcaataattaatgttatactagcgatagaagaagattatttagatacaaaaattcgtattaagaaataaaataaagcaagtaggcgacaacaccgaccactataaccagtgactaggagacgcatgtttggttaattcttgatttcccaactcaaagaagaaagcatatattgtgagacttaccatattgatcttttcaaactctctccacacattttcctattggctcccatgtgggtaattaattaacttttgtactttggagatactcaacctttttagcgtttgtactttttagcttcccacattctatgtgtatttttttggtttctgattttgtttgttgactaatcttgttaaagataataaaattcggcagtgattaaatgtatgtaaccagcccataaaaaaaaaaacatacggctaatgaaagttacaatgacttgatcaaatatggccacatgctcttttctgttggcccagcccaaaatatcgtaaatccacaaccaaattggcctagcgtaaatattttcttagtaacattagttttggaatcaagatccatttgaattagttgacaagcaacataattaaaattcaaaagagctgtcaggtttcatcccacgtaaacgttgacagaccaaccgacgatgtgatttgcacatttcatttacagaattatatgtactttttcatccagaaaattgttttttttttggttaattaaattaaatatctacagacgttacgttatcaatgaataattaaggagtcacttaagatctttaaaatactatcaaatgctataaaacaattagaagataattatgcatcattatttgtagttcttaaatagaatcacctaaaaatgcattcttttgagcagcttcatcagtactagacgcagccgatgatgtggagttgtggacatttgggttcaaagcacgaatccgttggggaatcacggtgaaccacaagagcttgtgcaccagtaggaaagtacttttgtaacctaataaaatatgaacagtaaactctgtcagatctaataaattctctttaatcaatcataacgttttgaccatttactaaaattctgactaccattaatctacgcaaactttttactatttcaaatatatttatttccttcaaaatcagtggtctcagaaatactaaacaaacatttttactaaatcaaaactataggagtaagtaatattgatacatattttaccctttttcttgatattgtttttacgctaaatcaaaactatatgaataagtaatattgattaccttttccttaattttttttatgctaataaaaatcagactttttttggttaatgatagaaataaatcctttggttaaacaacaaattctaatatcgttttgattgccccgcgtctcaagatcaacgacgacgactcagtttcttccttcacaagcgagatagatagagcaaagagcgtgttgtgttgtttcttctctcttcggcgttttcatcgtttctcatctacctcgaaattttctcgtcactctaatcaaaaatctcacttcgttattttctcgggaaaaatttcccgatcactaaacctagtttttagatattttctctcctggattctggatctacacaatctttcttcctcttcttctatgaatctgttcatcgtaatttcagattcttgatatatgattccttttctccaatctcttctcttagctctcagag

SEQ ID NO: 9284 - DNA, 3000 bp, Unknown
  misc_feature (1)..( 3000): cDNA_ID_2181660_gDNA_ID_1972053_Annot_ID_178355 3000 nt of promoter + ATG
taaaaaaatacgtatcaatttgtgttaaaacgttaaagaataaagtattttccaaaaaagaaaaagaaaaaagataaaataaattttgctgccagtaaccgaataaaagaaaattaaagcatccataggaaatgacgtgtatttatcgacgtggaaaagaacgtgagacacgtggcagtatatatcagagcgagagagaaggttgatgcacggaagctgttcccttttaaaaaatttggtgcaagtctacgttgtggcactcactcacttaataaactccacttttctccaaagttgattttatcatcctttttccttttttaaaccattattggattcttataatttataatccgcatgaacatttaattaccataaattaatctctactgtatatcgtctttagtagttaattgtaatttcatcttaggtattttaagtctttctgtaaatcgccaaatattccggaaactatatggttctgagaccatcttatcttttactctcttaattatttcctacttttctatttatagagttaatactttgatagtcagaaagtaataaatctttatctctcttaatttttcaaatctctgctcagtttataatttctaccttctcattttctccgtactctctgcagatttggcctaatatattaagttttttttaaaaaatatatatatatatatatatattttttcgtgactggaaaaatgcagatctaatccaacaatgataagcctctttgataataaatttcaaacaatcgaggtatgagaggaaaaagaaaatgagtcctggtttggtaactccttggatattgaggaacatcggtttaaggccaacctaaagcttcgatggatatatttgcatcaaagattcgaataatggctcactgaagagcaagtctcggtaatacttttgctctaaacaattcgatcttatctcattcctctcttaaatccaccctataatggcaccaccacccacgttgcataagtttgtatataggtgtttctttcacaattgttttttataaaaaagaaaaatgtttttttcaaagaagaattttagataaatttaaaaacctttcgacaaaaaaagaaagattaaatttaaatattcaaaagaaaaagaccttaatccccaaagtcggtcaatgaggcaaaaaaaggttgttcaaaaaatgatagcacacttttaatggatttttgttttttgtgtcacgaacactttgaatttaaggaactaaatcgtaagaattgaatactataacgttccactacagtcagttttacaactatagaacagtttaaaaaaaaaaaatttatctataattccttaattacagaaccacctacaagtgttaatatgcatccgtttttatatgcgacgcctggcacgtatagagaaaacgtgttttgttcacgtattcgctattcgcaaaacgtatgccacgtgagatctacatgacgacatacttacttgtattgtatgtaacctcttcgtacatgatacctactaaattgaaatttaagtttgcttgaattttctttaaaaaacaattctaatgaaatttatcgaaatagaactatcattttttgtaatcatattaactttcatgagcttttcaattcgatactaattgctactaaatgagttgatctatcattaatatattactttagactttttgtattttttgatgtggaattctaacaaaccaaaaataaattaagttaaaatatagactaaacacttatcacgaaatgagctcacatcaatattttgataatcaaatgattttttctttttttaccaagaacaaaacgtttaggaaaaatagagaaattagaaacaaagaaacaaaagaacaaccttgtataaggaaaaagaatcgcaaaaaagggaatgcgaaaattatgtatataaaagagtatcaaatacgccaaatgtaaatgaaaggaacatataactttaattatagttatttctttttcatattgtacaagggtgaaggatgaattcaatgtagctaacagatagaaagctaagagctagatggtccattttagtgatatatactgcatgattttgcattttatcgacatatttataaaaaatttcctctttttctttcttttgtaaaatacgttaaacctcaatttaattaaaagggtgttgacctataaaaaaactaaagggtaagagatatataatagacttaatagtgtttaattataatagaacaaatctgcaaaaaaaaatggtttgcgcaacggttattaaagatataattcaaactagggtgcatacaaacctattgaatttcctaatctacttaaaccaggtttcatttaaaccattttcatgaaactttccaattcacatatttctttaagaattcaattagttagtttattttggttgacatctacaatgagtgtttttttccacctacataaaactccatcatttggtaaaaaaaacttttactagcttgtacctttcttcgttaaatgtttaattttcactttttaactcatccgtattttacaaacgaagagaataaaaatcaatttgaagtgtatatttggctatatacagttttagtttaattcgtataaaattggaaaacacatcttttgaagaaacagaagaagcatggtaagaaaagaaggaaaaactatttaataaatacataaatccacccacataggtgtggagacaaagatatagaattccaaatatggaaattaatctctgccattagtggaagttaattctcataacaccgaaaagctaacgattttcaactttttttttttgttactcagaagattttaaacctttataaatacgaaaaaaccaatctcacaaatcatcaacaatcaccttgatctccactctcttacatataaataaccaaataatttctctcccctcttctctctacacacatagacaataaacacataaagacagtttctaatg

SEQ ID NO: 9285 - DNA, 3000 bp, Unknown
  misc_feature (1)..( 3000): cDNA_ID_1715608_gDNA_ID_1972053_Annot_ID_178371 3000 nt of promoter + ATG
actaagaatgtgactgaacaagtaagactacttgcaatggatgaagacgagaacctcactgagccatacgatataattcctccatatgatcaagcaaaagcccttggcaagacaaacattgacagtgatcggattgcttctggattaccatgtggtagtgaaggattccttctgatgtttgctcggtggataaaacttgctagggatctctacaatgaaagaaaagagtaagtttatcatcggatttggattttagcgatgcttctcaaaattttcatctctttgtttccagtaaagttttgtgagtagcactgatagttaattttaattgcagccgatttgacatcacacagattccggatgtttacgattcatgcaagtaagttgtttttagtgtatctctagatttacacctagctttagttactcgtttttgaataagccgtaatatgttattctcaccaggtacgacctgttacataattcccatctcgatctaaaaggattagatgaactcttcaaagtagcacaggtaaacaaactgaaattcctccttccctttcctgaaactttaatcatagtttgcactgaaacaatgaactttcttgttacatctctaaaatgtatggttgactgtgctcgcttatagctaagttatgtgttatgtggttgcagttacttgcagatggtgtaatcccaaatgagtatggcatcaatccgcaacaaaagcttaaaatcggttcaaaggtgacaatctaagataagagtagttattttcctctctaacaattgtttttccaggggatctcacaacttatcatttctataatttttttccaataaaacaaaagattgctcggcgcttaatggggaaaatcttgatagacttgaggaatactcgagaagaagcactgagcgttgccgagttgaaagaaagccaagaacaagtcttgtcattatccgcctcgcaaagggaagatagaaatagtcaaccgaagctatttatcaatagcgatgaattgagacgacctggcacaggtgataaagatgaagatgatgataaagaaaccaaataccgattagatccaaagtaatagtctttactttctctctcactcttatatagatagttatttcggctactaattggtggttttcatttcgcttttaggtatgcaaatgtgaagacacctgaacgtcatgtgaggactcgactttacttcacatctgtaagtttcctctttgctccattgcttgtttaagtctgtctatgagtgaaactataatgtttatgcctggtatgatttggaacaggaatcgcatattcattcgctcatgaacgtccttcgatactgtaaccttgatgaatctctcctaggagaagaaagcctcatttgccaaaacgccttagaacgtctctgtaaaaccaaggaactcgattacatgagttacattgtcctaaggctctttgagaacaccgaggtttaacattacattccctttgactctcacacatgcttcaatatatgtatatgctctctcagtgtctgactctagacgtaaaaaacggatgcaggtatcacttgaagacccgaaaagattccgcattgaacttacatttagccgtggagctgatttgtctcccttaagggtaagagcaaaggatgtctttaactaattagaggaacatattataaacttttggtaatattgaaacatgatgcagaataatgacgacgaggcagagacattgctaagggaacacacacttccgataatgggaccagagaggcttcaagaagtaggttcttgtttaagcttggagacaatggagaaaatggttcgtccatttgctatgccggcggaagatttccctccggcgtccactccggttggtttctcgggttacttctcaaaaagtgctgcggtgctggagcgactcgtaaacctcttccacaactataagaactcttcttctaatggaaggagctaagcagagaccaattgttttttccacttatatatattttgctcatgcttttttctatgtgcagtttttaatcatcttcttgtttttctactgatgttttaattttctatgtgaaattgtgaaagggactagtgcagttgggtttgaataaagatatgattacatggaacataaatgagtcacccgtgacgttgtctagtgtttacaataggactcatctattataactcaagaaatgatgatgagtcttattgtaaacactgtgttttcatatcatgctgttacgttaaagttgttgcggatttgttggaatttatatataatctgcaaaagaataggctgatgatatcggataaacaaataccgaatctaaaacaatctaataatcggtggatttttcgttttgggaaaatctcaagacattaaattgataattgaaatacaaattattattattagtaagaatagtactaattgattggaaattgtaataaacgacttaatatacaaactgaaaaataacaaatgatcatgaaaaacattttaaaaaatgaccaaatgaaggagatacatagatagttttatcaaattttaaaaaatgttggtaatgcaattagggaacatttgtccgtgaaggaattaattagtctctgtttaaaaaactacgaaaaatgcgttttgtaactgttgttgagaagagaagagagagttagcaaacaaacacatatatatttacattattattgcccaacaaatctctctctcttgcccgcttcgtgcccgtctcttctctcttcttcgtattctctctccacagacatgaattccctttttgactaacctcctttttcccctaataagtgaatcttacttcttcttctcgccaagatcaaatttctgggattcttcttcttctctctaattcccttgcgtttgtttcctctgatcaagttccgtcctttttcctttttttgttcttgagttctcgtttgagctgctttttgggggag

SEQ ID NO: 9286 - DNA, 3000 bp, Unknown
  misc_feature (1)..( 3000): cDNA_ID_3035959_gDNA_ID_1972053_Annot_ID_178372 3000 nt of promoter + ATG
tgttaaactggtgggttattgtatcgaagatgatcaaaggctgcttgtatatgagtttatgcctcgaggaagtttggagaatcaccttttcagaagtaagtaaaacaactacaaccttcatattctaattacactgtagagttattttctttccttttctttgttttcgatttgggtaacaagtgtctacaatttagagatgtgtctactccatattgttaaagtgattagaatctatacagctaaaattggaacctttctgctctatatggtaaagttggtaccttttagtgctgtcttagatggtttatattgcttgactgtattgacccacgaagcaataagtaaatccctcgcattcattgtttcaagatttttcggcgtaaaaaatgtgtttaaaaagacacagtgcttttgtatgatttatcttctcagttatcattgatgcaaatctttttatttgtgaattaacttgtgcttcgtgttgaagggtccttgcctcttccatggtcaattcggatgaagattgcattaggtgctgcaaagggtctcagtttccttcacgaagaagctttaaagccggtcatttatcgagatttcaaaacctcaaatattttactggatggggtatgttttcctcttctttatatcaagggatcaacatcttatatacacgtctgtttctttgcttctaaagtcttaccatgtcccaatttcaggagtacaatgctaaattatcagattttgggcttgccaaagatgctcctgatgaaggcaaaactcatgtgtctactcgagtcatgggcacttatggttacgctgcccccgagtatgtaatgaccggtaagttttgttttttgtctttgcatttcattcactcctctacttatatcttctctgtatggttgaatatagaaaattagaaacctacacatatggttgatgcaaagtattactatgatgaaacatacatctaatttctttggtttgagattatatataactactgtcctcttattactccttaggtcacttgacatcaaaaagcgacgtttacagtttcggtgtggttcttctcgaaatgctgactggtagaagatcaatggacaaaaatcgaccaaacggtgaacacaacctcgttgaatgggcgagaccgcatctcctggacaaaagaagattctaccggttacttgatccgaggctggagggtcatttctcagttaaaggagcacaaaaagtgactcagcttgcagcacaatgccttagccgtgactccaaaataagacccaaaatgagtgaagtggtggaagtacttaagcctctcccacacctcaaggacatggctagcgcttcttactacttccagacaatgcaagctgaacgtttgaaagctggttctggttctggttctggtcgtggattcgggtcaagaaacgggcaaccagtgtttcggacattgtctagtcctcatggtcaagctggttcgtcgccttatcgtcatcagattccgtctcctaagcctaaaggtgcaactacttagattggctcgcaagtgtggacgcaagcaaacgtcttttttaaccgatgtaaaaccgacattgttaaccgatttaaagaaggaaaattaaggttgttccgaagaagatccgaatttgtgtatttactacctttgtgacctcatgtttcttcgtctgttgtaactcttgaacaaattgtctgttagggtaatattgtcattatgtattagtcgtttcgtatcgcttcaccagcatgcaaccaccacttcttcaatgtaaagatagatagatatcaagaatggtaatggaagatgtgggtgggggtgagagacattttgctttgaaattttgaaaattttcttctctttgatttttggacttatctacttgtagcttgtcgataatcgagttattaaaatataaatacgaaagaagaaaactgacaacttttcttacgtgaaacttttatactcacatacaagttatccactttcttggttaaacatgcgagccgcaaggaccaacgacttttatatacaaataatttccttataaaaaggattacagtaagatactttgcacactagcaagcttgatgattgtatatcaacatcataatttttcttattaagttatgataaaaaacattcaactataatttaaaatataatggaccgttccgaatttccataaattcggttaccacctccaccattttacatcaaacagaaaccaaaaaattagatttagatatatatatatatactagtagaagtagaaccatcttgttctcgtatattattacgaaaccctacagttaacagctgcagaataatataaataaagcgacactccacttttttctcctacattttgttgaatttgaacctttaaatcaatagtatataagaacatacaatgtaatagataacgcgtttactcaatcaaaaggaacaagtatatactactagataactcttgtttattggcgtctgacaaggctctgtagtatattcaacgatacgattatcctcttttcttcgataaaagtatattcgattctcttactacagaaacatagtttacattaatgttagtgaaaaataccatgcacggaaaatcaaagatttaattctgtggtttgtataatttgaagtgtataatgaaactattttttagcctaacccaaaaagaattaaaaagaaaaagtaattgttataaaaacgaaaagcatatttatcaaatattattattgaatattctccaagatataaacaatttgacttttcaatgaaaatgccactattgaataataaataggaaatttccgaggagtagtacaactagatgacaacttgacatgatcttcttcttacttttgtctatataacactcctgcgactttcttctcttcaacaaacttacagagagacaaatacctataataagccattcataatcttcttgcttcttgttcagaata

SEQ ID NO: 9287 - DNA, 3000 bp, Unknown
  misc_feature (1)..( 3000): cDNA_ID_3035956_gDNA_ID_1972053_Annot_ID_178373 3000 nt of promoter + ATG
agccgttcgcatagattctttacacagagcctttcataaattagaataattaatttccatttttaccccatgattttatcagttcttatataggctttgatacaaagagaaaaaatttagtagtgagttatatttttagcatgcttttccgacccggcaatccaatgctccggcgtatttggtaagcttagaaacggccataccatttttgggctttatcatctgttgcctagaatgcgaacacttgaaatgaggatttccagattgtctgaaatatgcattgttcatgaaaacatctttctcggatctccagttccagtttttccattcgctttctgaagcataatccctctttgtcacctatatatacacatgttttctattagtactttgatttgatgccatatatatatgtgcacactcaaatcattttggacctctctgtagtgttgtttgtgaggaggagcgatgaaacggtttccatggctgagaatggtaggaccttggctaccaccgatcgcgtaaagctcccaatgagtgtagtcattgttgacaacgtggacgaaaccccatcggaccctaggcatcctctgcacaagtccttttccgaaatggttgtaagccactgtgacttgcatcttcttgtcatccatgttgttgttttgtgcaccaagcaacatcacctaaagacagaacccaaaaacataacaagatcctttggttaacttgggttgtcattaatagtataacggtcgagttaattacgttgtggaatgctcacatcgttgtggtgggtgaaatgagagttagagatggtgattgcggtggaacccattatagcgtcgataagtccatcttggcatttagacatagaaatgtggtcaagccaaatgtttgttgccccaaagatagagataccatctccatcagcctctcctctatgcccaaagtggttaatcgaatctcttatcaaaccaccactgcttttcacgatgtggtggacgtgaagcccatggatgatgatattgtgcacgtactgcatcgtgataccagcaccatatgcgatgtgcacgttagcgccacgagcatcgattgtcttgtcactagtaatcatcagctcttggcttaaccgaatgctcatatcgtgcttaaaaacgatccatagaggttctttctggatcacagcgtgacgtagtgttccaggtctagggttcaccatatcatcgtctctggggctcgtgactacatagatgcggccgcgtttgcctccggtggtcctgtaaccaaacccacggacacagtgaacgagcttcttgcgacgtctggcccaatcaggctggcaacgccagcatttatcgatggggttgcttgcggtgcaaggtcccgttagcttgctccattttccttttccttttcccttgcccctaccggttaggctccgccttgtgctgtttgtcggactagaaatcatctcaatgacgtcctcttcctcggaagcgaccgccttctcttcctcggtcccctcgacgtcagtcgagttgctgaagatatacaccaaaccaaaaccatcataaatccaacatcctttttacaacccaaaaaaaacttctactaataaatatttgtaatttgaatgaaatcagaataaactaatccaaaccgttctctaatgattacaatcaagcctggttaatttcaacgagacgacaaatcggtaggattcaaaaacaatgcatatatagatcgagatactaatatttgacttactcgtaatgacgctcgtggaagtggtcgacgatctcataagggtcgggatgataagccataagggtatgtttacgagcttcattggccttgtttacccaatactcatcggtctcatcagcaacattggctcgtatggtcggaatcaaactggcaatacatatcacacacactaatttgaaaagcctagccgtctccattttatttgattacccctttcttttacggaaaacaaatatctattttattttttaaaaaggggtaatctttttatatattgaaatatatgtggagaactgctaagctttaaacatagctttaggtcgttatttctgtttgacctaaagccttttttggtagatgaatcgtattgcgaagtttgacaaacatgaatgttggtgtttaaataatgataaaaaaaacctggtgaagaaagtgaactactatatttagaaaaatttcccgttatgtatggaaagccaccataatttacttgtggacagctttctttgttttctttttttctttttaattttacatctccttgttttttgttcgtttcctatatttggatatttctatggagagactaacattatgatttcgaccaattttagcaacaagaaacaattacgtttacattctcatgatgcatctaaaagtagtgaaaatgtcagactgcttgtagtataaattgctaccataacggagacttgactaatcgtttactatatcagccgctaactagttgggatatttttctgaaaatagtttgataaatatgtaaaaatcacgatttcaccatcacattcgattactcattcatgactaaaataaaggatgaaatagctaaatttatgcgactaatcatcaagggaaaaaaacgattttctcattttaggcgtggaaagaaaaatgtgttattaaacgacgccgtttagttgccacgtaataaatgagaataaatttcttggtgagtggggaataaatatatggacggctgtggataaggaatactgaagcaagcgagtctccatccaacggctgataaaattatgcttgataaacaggaaaactcttctttctctgataatattcggaaataaaaaacattttagggttttcctcagtctctctctcttatagacgccaaccacgttttccagctcttgttctttcgattctcagagaagacttttcagaacatcctccaactttctcagataagcaacaatg

SEQ ID NO: 9288 - DNA, 3000 bp, Unknown
  misc_feature (1)..( 3000): cDNA_ID_2181693_gDNA_ID_1972053_Annot_ID_178366 3000 nt of promoter + ATG
tccgcagatgaatccaacttttcgggtagagtttgaagtaccttgtgaatatgaaacacacacggcttgtttagcaagaaacatttccacgtttaaaaaaattctgtttatgcgtttttgtttgcgctatagtcataagaatgggttttctcgttgttaaacatttgaaatatctcttgggcaagatttactttgtcaaagtgtttataaatgttatcaatggatttggatgccttgtttttcaagaaatttattgaaaaagaatcctaattttgatttgagatggtttcttgtaacccaatctcccctagataaacctaccttttcgccggtggctccaaggaggaaatgaatattagtggcggtaaggtatttgccgtaacagctttgaagacggatcacattggatccaggtacgatctcaaccgtccatctagtgttttttgttgtgccgcgacgatcttgatgaacggattcttgatcttcatcggcacttaggtatttgtcgttgtggctacggagacgtacaatcgttgcctttctaaatatctccatccgagaacaataatgatctctttctaaaaaattaagaattaggagacaaaaggggatggatctataagttattcttcattatcgtgatgcaacgtaggctaatatggtttgttgacctgagtcttgttttttaattcgcttgatttgagtcttttatcgttaatggtttgttatatgtttgatccatgtcaaaagtttgttgaaccgtgggattaggattgttcagattataagaccagatttctaaatagtatgacaactccgaagaccagattctgaacctcttccattaattgaactatttggttaaataaatcaaactgttctatttgtttctatgattccatctctgtaaacggtcaatgtatatgtgtgagtcttttataattcgaatcttctgctcagatatatgaatttattctcatagattacaagaatctctgaagtctgacatgtgaatttctcataaaatcatcaccgcagaagaagaaattatccaaaacgaaatttgaaggaaaatactaaaaaatcgaaagaaaagaagagagatcagagtttggttaagaattttttcggtcacggttaatctgaaacacggaccaatttgttgatcatcatatctctcgtttcaaacaaaacaatcaaaacagaagaaaatcaaatcgaaaaagatctagttgaaaacgattaagatcatcagagacttaaatactaataatcacaaagattactccatcatattgttgcagtattacctcatcacctgatctcaattttgcattatctatacggaccaatacatcataactcgaaaaccaaagatctaaagaaaactaaactgaagataaaatacgaacttgaacagagaaccctaaactgacttgataagagcttgatgtctgtcaaagtcatgtgtggtttgtatataaaggtccccaatggcggcgattcttaggtttctcgaggaaaaccctaacgcttatgggtcgtatatgagcttcataaggcccattataataaacctcttttgacccataaaaaccccaaaccaatactcaattagcttatatggatgggcttgactgaaaatttacaacttctcatttttggtttgattcaagaaaaaacaaaatattaattttaaaaaaaaatatgtacttggaacaaaataatttgtaagaaaatctacatctatttaaggcttgaagtcattggatcctattttaatggaagacaagatcaaaatttatatcctttttttggggagtagatataaacttttaagcttaatttagcatgttttgtagtaaatccaaaactggataaaatctaatttcaaactcaactaattctgttcattttatctttaaacaagttcaaacacttgaaacaatagcttcatacatacgcaaaagaaacaaacacacaacaaaattgatagaataaaataagtttggtattaaagaagatataatcgtaacaagattcaaaacttaagtaatgacatcgctacaaagatcagctgtttcgttccgacgtcaaggttcttcgggtcgtatttggagtgatcaattcatcttagatcaaaaaaatggagcaattcttcaaaatcatctagaacaaaccggaagaaatagtaatgatcttgaagataaaaatccatcacagaaatcaagttcttcgtcatcttcttcatcaccacctccatacttttctgaaatacgtagaggaccagacatctcatcttctacacgaaacaaactcgcttgtggtttatcatcacttttccgacaatgtatcggttcttcggctcgtgcttaattttgttcaatgcttgacgcaaatctgtacatatattttcttgttatatgaaaaattcatcacaattttttccgaccaaacagagttcttgataaatgggcctattattttaaaaagcccaatagatatttgagtgtccggcccaaattgaagtagaataaaagataagttaccaatttaccagtagttagcagcaaacacacagagaaagtgaaacatcgaagagaccccagaatgcaaaatctctctccgcctttttctccttccttattcgaaaattctcagcgtctttgttgcaaactcctctgaaattctccgtcttcttcattcgttttcgactctgcgttctactacttctcgtctcctatcagtatcatcgcaattcatattcagtctagtgtgttaaaccggagaatttggagtctcgccggaattttcctctgtctatgtatgattgccggtgatcaaagcgcttcttaacgattctgttctcctttgagagatctgagtatctgatttcatctactacatatgttttctcgagagtgatagaaagtaggtctcatacatatttttcctctggagggaattttgatcctctgcttcgttaattaacttgtgatg

SEQ ID NO: 9289 - DNA, 1116 bp, Unknown
  misc_feature (1)..( 1116): cDNA_ID_2034901_gDNA_ID_1972067_Annot_ID_178386 3000 nt of promoter + ATG
gaattcttgtagatgtctctttatgtgcatgaatgattcattaagctctttatgatgcttaacggacttttatgaatgtttgttcttaaatttcaggacgggaagcctgggcttcagggaatcttgaagaatttggaaagctaatttcagcatccggcttgagttccattgagaattacgaatgcggtacattacactctcttttcttctctcccaaatgcaacatatcctatagtgaatacagaccactagtatgcttacagacattattctctcttagattcattattttggttttaaattctgtgagttttgtgaaggtgcggagccactgatccagctatacaagattcttctgaaggctcctggtgtatatggagctagattcagcggtgcaggtttcaggggatgttgtctagcctttgtagatgcagaaaaagctgaggcagctgcttcatatgtgaaggatgaatatgaaaaggcccaacccgagtttgctaacaatctaaatggaggaaaacctgttctcatctgtgaagcaggtgacgctgctcgtgttcttctctgatcaatcctggagtttttggtttcttccccacttaaactcgatttttttgtcccttatatctctcacgcttattgattctttgcttgtttatctctttttgatcctgtctgagaaattctctggtctctttggtcggagtttcatcattgcttgatacattttttttgctacaaatacataatgtaaatcattctctaccgttttcgagtcgatagaagaatcgcaaacttcaaaaatgtgactaacatttctccataaatttgttaaattttcaacaattggtgaatttagttctgtaattgatctaacaaagacactatacaagtatgaaattagaaattgaaatcgaaagttagttattataatcttgtttgtataaaatagtgtatatctcaaatagagatacagattagttttttgtttggacacaaagacccccgccaaagtattgaaattcgcgcctgagaaattctccggtgtggctctctagggttttagcactttaatccatttgtacttgtaaaaatccctaaaaccctctgggcatg

SEQ ID NO: 9290 - DNA, 3000 bp, Unknown
  misc_feature (1)..( 3000): cDNA_ID_2034861_gDNA_ID_1972067_Annot_ID_178404 3000 nt of promoter + ATG
accaaatttggaaggcccgcatgcaaaagtatatagatcccaaactctctctggcttggtacacttcagtaatgcatcaaacacattacgtctctgcaaatgtaagttttgaaggttagacagaatttacggagaaatgactaaggcagcataagaggaagtgagagtttcacctgcttggtgcgaggacgaaagccataaacaattatcctcatgtctttgcctgcaagatgaaagtgatcataacatataatgtcaagtaaagatacaagacgcatcaaataaagatgtaagagaagtagaaaacacttcaaccaacatcactgtgggaagatgtccattgtccaagataatattgggacgtcaagaatcaaggaaaaaaaacatgaaacacaattcaacgtcatagcgaatattaagctatgacgtgaaaaccaggtgaaacaaaacttaggggaaatcaaatctagcaaacaataaaatccggtcacataccagtgacctgtaaaagacgtcttggtggaatcttgtcagactgacggggacttgattgaactttcagaacctatgaacacatcacccatcaatcagaaaatgcacagacttaacaatataaaaccctagagcctaacttaaatagtattaatcaaatagctctgtccccaggggtgtatagcaactgaccattttgttaaacttctcaatagttgccaatggaattgtaccaagtggaatgacttttctggttccttcactcttcacaaaagagaaacaaagaatatattgatcaacagtacttaaaaactaaaggcctaatcctgaaatagtgaaatataagtaagttcaagatctgtataattacattggccagaaaaaatagatcaaatgcatataagaaacagaggaaagataatatcataccaaaaaaagaatacggaaattagtcaccaaaagggttcctgcctcatcggtgttaataagcacaactccataaccctgcaaataaagtccaaaatcatattacttcaacaacatattcttcacactagtatcatggacaaatgcaaattgcataccaagtctcaaattcaatagccggatatggtaacaaaaattcaaataaaagagacactttgaccaactctacctcgacgatgaccctctccgattccagcaagcaactcaaattcgagaaagaacctgaccctgaagttgactgcgaccaatcaaaagagaaccaaagcagaaattgtttgagcaatcaatttcaatacaataaccaaattatgagctttttggatacgaaaaaagaaacgacattcacgtgatgtctgtgtaattgtgggttaaaaggggaaaaagcgtgaatcaggagagaattgagagcaaattacatcgagtttggtccattcaagcgtgtcccaactaccggtaccatccatcttttctgattccgaagaataatcacgcagcgaccttactcgcccagacggtggtctcggcggcgtcatgaaaaaggggggagagaaagagacggtgacgaggcttctggtgatcacctgccgatcaacggagcaaaacgacggatttgtttcgccacaccaatcaattaatacgacactgttttggtttggtacgaagttgtcgtttttttccttttgtactttattttgtttagtgttatctatttgtatttatcggcaaccaaaaaaaaaaaaaatcaaggcaaaataatctgaggtcaatcaaaatatttaccaaaatatttttccataataattctttatcttaacgctaatttagaaatttaactaaagttaaattattcaaaatactgtttttcgtattagatataatgtacgaaatgtttttcttatataaagttaaattttggacggtagaagaacttatctctagttgtgcacaattatatgtcaccgtcttaacaacaaaaagtcacaaactactaaataatccacaggtgtttatcaacaatttgaattgtattaaacatcaacatcaataatcttcaaagccatgtcacctgaattatccaagttgaatttataaaagaccaaaattacctgcaacactctgtcggttcagaaaaattccgcaatcgtttcccccttgatttataatagtatatttctcattagtttttacctaaaaaataataatttcagcatattaaaattaatcactaaaccccggaatacttgaaaatagaaaatacatgactaaaaaaaaaagtaaaagaaaaaaaaagcacacactactttttgcaccatttcccggtgctcttcgaatgtccgttcctcaatacatatgtaccacttcaatccaaaagatatgtcggtactaatttgtaaaattataaccactttaaaacctaactaagtcaatattctataacacatagcatgttgcctcctcttaccacttaaaaaacactacaacatgttatatgttttcaaccattgtaactcgttatcctctcgagctgatcggccaaatcagctttttaagcaatcaatcttgcgtggtttttgcagtaacttataagaaacgtttccatataatgctgagcccattctcaatttccatcagattatataacgtctaactgtttctaagtaatgattttatactccatataacatataaccgattgctataacatgctgtatacacgtctaatatgattattatacatgtaaataaatgaaactatatcgcaaatagaaatggtaagcaataatgcgaaggcgttaaaaagataattatacgaagaaataggaaaacaaacatcaaattaagatttacaagtcaagtaacgaccgttacggctttataacattgacgattaacctaacaaaaattatttgcctactacaaaaatatttcagtcttataattataaagcttcctcttttcttcttcttcaattcatccgaagctaaaagaaaacactagaggaggtgaagatttttaaaaatg

SEQ ID NO: 9291 - DNA, 3000 bp, Unknown
  misc_feature (1)..( 3000): cDNA_ID_2026721_gDNA_ID_1972067_Annot_ID_178414 3000 nt of promoter + ATG
atgtacataagaaatcacaattacataagataccagtcgaaaaaacattaatattgtgtagcgtttcgaaaatatactctgtttgaaactttgaatataagcgggttttcactgtaagatgttaaatttagaaggatttttttttaaatctatcgtaatattaatgacagcaataaattgggttatcaaaaatgctaatggcgtttaaaagtttttaggtgttaatttggtaggagatgtatcagttgcgtgtcctacgtgtaattgtgaaagcaacaacgcaaagaaaatgaagccttgatgaaaatatatgtttaaaacaaaattaattgacggaaatagtatgttttaaattaatgttctaattgtacaatagaaaaagcatgtacatgtacaaaactcagttatattgtaatcaaatttattgatctgtaattcatgcttgtttatgacttttttgaccggccgatagagcggcggacgcaactttgggatctgaagatattaaaagaaaatgttcctaaagaattctaatatcgaagttgattctcatcgtttcttactttatttctttatgatctcaaaatcatcaccctttagaaaatttgtttcatgaccagaaaatatgcaagtgttaacatgttttaatttagactgttttcaaaatttacagttgttatttagtaaaatttagcaatgaatacaaacaaaacgatacaccaaattaatgtttgtagtatttactatttagtaaatgcatggtactgtggtagactcgctaagtaaattgcatgtgttacattttaatatgtaaccagtaacctcatgcatgtgtatctctttcaagtttcaacaacctttttgttttttagaagtaaaaacttaaaattctttaattggcggacagaaagataaggcgattactcaccagaccaacaaaattaaatggaaattaaatacatatagagtaattaaatggctctgtgaccaaaacatggaattaatgggcgttattcattagaccagtaaaattgactggaaattaaatatatatagtaatgatacgatggtcctgcgacgaaggaggagccatgtctacgcaactcatccaataagcaacacaagctattcttttttacttctttcatgattgtcagtttcttctttcatttattctatcattgcttgagatatgtattctttaatagaagttaaatagtgtgtacatataccatgttgtcactttttaacaaacaaaaagtcatatggtatcatcatcatgtcgcatgaagaggagctacaacatttcttgattcatgcgttacgtggtctaacaaagggaatgtgatgaattgtcgctctgggagtaatttcgaaacgaaagttttcttacctaaaactctttattaattatctgagtttctgtagagagaaatagcatcaatttaaagcttgaaaagtttaacacatctttgacaaaacaaatttaggaagaccaaaaccaaaataattactatttctctctatctgttttcagtggggggacgaaagacctttctttctttttggtaatgggccgggccgggccggtttaatccaaggcaaatggcaagatccgtagagttttacatacaaactttactctagtgtaaacaagaaagtcagaaaccgcatgcgttatagttagtgaaaggttcgatttctgtcaggtcttcgcatccgtcacgtttgctatctcgaacttcagggagcatattacaaacgtaaaagaaattgatatattacgctaattaatttattcccgttgttgtcaagaaactaatgtcttaattagccttttaggttaaaccctaatttttgtcgatttaagttttgaaaaacgaattttgattgtttggattttggtaaaaggagatcagagttcatcgctggtaccatgttggttaactggctcgccgggagacccagcaataagttttatgctctccaaaagtcaatagacgagctacacaaggtattatcatatatattggcaattgatgtttttaagttcctatttatttttctgtgacattgaatctattttcaaaagcacccaataatgtggttctcattctttttttctgatcactaatgtgtgttcacctcaagacgctcgagtctcttgaacaaaaagaaaaggtttctctgctgccgtacagtacaaggaagcgaaaacatgttacctggcaggttacaaaacatgttacctggcaggttacaaaacaagtatgaaacatcttttgattttgaagcacgaaaaagtaaaatatcttattatcttttatggatcaatttaaaacatgtgtgttgaatcttgtcatgcaggtgctaaactttgtttgaaagagaagaggattcacgagcgaacagctcaatataataggaattgtcagcttctcttacatgaagctgtgagttttttctttttctttttgtgtcttactaaattatttttttattaactactttttaagcgatgaattgaatttattgtcactatttttctttcttcttaattatacagctgattttgtgtgaaagtagaaaagaacaaatgattgaagctatgcgggatggagattttactacgcagaagacaatgcaagtttttatttatctttgtttgttccttttaatcttaacttatttgtatcaatctaactcatgtattatcctacgtctatctagactgatcggacggacataatgtgtatccatatttcttggctacgcgtgtccaccttttagagactatgcctttaggtagtagatgttttactacaaaataaacatatttagtcaaataaaataaaatttgagagaatcttctacataagtagctcacagacccaaccaaaggaccattgaataccatatatatatagatacacagacatataaacacacaaatattcgtgtttttttcaaactgtgagagaaaaagaaagagagaaagag

SEQ ID NO: 9292 - DNA, 3000 bp, Unknown
  misc_feature (1)..( 3000): cDNA_ID_3610508_gDNA_ID_1972067_Annot_ID_178416 3000 nt of promoter + ATG
gttttcgagattgaagacaagggaccaagaatggtacttctacagtgcattagataagaagtatggaaacggtgctaggatgaaccgagcaactaacagagggtactggaaagctactggaaaagacagagaaatccgccgtgacattctgcttctcggtatgaaaaagacacttgttttccacagtgggcgtgcaccagacgggcttcggactaattgggttatgcatgagtatcgccttgtggaatatgaaaccgagaaaaacggaaacctggtggtactgtattgtccaaattactttcgaatttggtttatctgataatttccaaaagatctcaattctttgtttgggtgcagcaagatgcatatgtgttgtgtagagtcttccacaagaataacattgggccaccaagtgggaacagatatgctccgttcatggaagaggaatgggctgatgatgaaggagctctgattccaggaatagacgttaagctcaggctagagccgccgccagtagccaatggaaacgaccagatggaccaggtttgtgatttcttcttactctggcttcattacccaaaccttattagtttcattcaatatttcttgtatgcaaaaaactctgttgaaatactctctttcttagttttccattgggctgagtgagtttatttaactgcattagtctatttatgaaccaatctactatttcaacgttatttagtgcaaatgtacaaatttatctgatgcatcatttctcttgtttcacaagatattatatttattatctgcaaaactctgtgttgaagtgaagcttctcctaataactgtttcagcgggctgtgacgctagtaactccatttagtctgtaaccaactcttgtagaaatcaaccttataggtttatctgatgaatcaactctcttgatttagaagatatctgaattttcggtggtcttttttttttttgtttcttgggctttattcttaatcatactgattacaagatcgttcaaactttgcatcctcatttgaccagcaattttactgtgcatcatatgaactcacttaattgatcagtaaatgttgaccagaagtagaatgatttgttgttttagtgaaaatgcagttttaatccttcatcagcaaaattgattgaagcatttggtttcagataatttatgcgtcgtctggggttcacttgtaatttgttgtaggaaatccagtcagccagcaagagtctcatcaacatcaatgagccaccgagagagacagctccactggatatcgaatcggaccaacagaatcatcatgagaatgacctcaagccggaggagcataacaacaataataattatgatgaaaacgaggaaacactcaaacgcgagcagatggaagaagaggagcgtcctcctcgacctgtatgcgttctcaacaaagaagctccattacctcttctgcaatacaaacgtagacgccaaagcgagtccaacaacaactcaagcaggaacacacaggaccattgttcgtccacaacaacaactgtcgacaatacaaccactttaatctcatcatctgccgctgccaccaacactgccatctctgcattgcttgagttctcactcatgggtatctccgacaagaaagaaaagccgcagcaaccgctacgtcctcacaaggaacctttgcctcctcaaactccacttgcatctcctgaagagaaggttaatgatctccagaaggagattcaccagatgtctgttgaaagagaaactttcaagcttgaaatgatgagtgcagaagctatgatcagtattctccagtcaaggatcgatgcgctgcgtcaggagaacgaggaactcaagaagaacaatgctaatggacaataaaggctctaaaaacatctctccaggttacttcttattgcccttcgccttttatttagctttaatctccctaatactatgacccatctacatagctcctctagacagattgcgaactgtgtgaatctctgttgtaacataggataaaacggattcgagcccctgagctgagtgttttatccttcttctttttttgtgtggatgttcttgcatcttttgagaacattttttaggttgctccattgtcatatatcatctatctatctagtcttttcagacaaaaactatctttaagttgtctcgagaatgttgtcttcataacacactgagccttctctggggtagtagtggttaggtacgagggcataattgtcatttcctttgcattatcatttagatttccagacaagaagaactttctttgtttaaaataattgggaattatgttcggtctccggtaataccgtggttaatggtaaggatattttcggctaggattacgaatgtggatgcgtcagcgacgttagaagactttcgttacacgtaatttgcaataattttaaaaaagcgaaaaagtgtttggtacgattttttcaacttcaaatatattctctatttatttactctattcaaacaaaattgcatatagtatagaattttagtcatcttgatatttattgaagtggataaatcttcatttgcgcgaaccaaccaactacctcaacaaattctagagactttaaaattgatgactagtgcaagacttccacgtgtcagtttaataaagactgtcacccgaaaacagtcacagccagtcacatgatatgctctcgcggcacactttcctggaatattaaaacctcacggcgtgaaacttctttcgcacattttctagctacggtcgcttagctccgattggttcgtcgtcaccatcactcgtcttcaacgatttgcttcttttttttttctctctatttagtcccattttcctcaatttctaaaccccttatttcgaaatcattgttttgctctttcttttgattcgaattcgacagaacagctcttttaagttattcataaaccttgtgtttgagttttggtccatcgagtatatg

SEQ ID NO: 9293 - DNA, 3000 bp, Unknown
  misc_feature (1)..( 3000): cDNA_ID_3041106_gDNA_ID_1972067_Annot_ID_178424 3000 nt of promoter + ATG
atgttatcgatttgtatgtaattttcgatcaccataattgtaaactaagttaatcactcgtttgccaaaaaaaaaaaaagttaatcacttaaaaaattgccacattttctttccaggagcaaacccttccatgtacgcgtcatgcatcaaaagtcaaggtacttatgattattggcttttgtacttatggaataggacatttcgaccctactgctccattgttcttatgttttcttctgcattgttgtgaccttcaggctcaagcaaatgcttgtggtggggcttgcaaaacctttcagccaaatgatgcagatcatgagcatggtaagataaatcacagtcaaagatgaaatgtaactctttcggttttcattgttggttctaggaatctcttagcgtgatcacccttattgacttttttgtttcattttcagcttccgggagctccaacgctaactcattgcaaagaaatgagaaagccaacagtaaaaggttgggtctctcttgatgtttcaaccattgtcttataaaaacttttggacaatcttgttatcctggatttcttgcttttctttataggagagtttctggaaggaagaatcccgccaattccgaggtattagatataattggcagatcgggagagacatgtcagatggaagacaacattgacaacaagaagttggtctctgatagtgacaatgatgctgaaaaccatataaatgacaatgtccaaagcaaaaggtttatttattcaaagcgattagataacgtaaatatatatttgtatttcactatcttatttttgcttcttcttttttgggttgtttttgctacagatattgtgcaggaagacagagtagcagttctaagactcgagaagccagccaaacagaaaccttgcaaaaggtggttgacgccaaagaaattaagggggatgcaaggtttgtttaactgcctttttccactttcaaatttgggaatagcattcaaagtggatgaagaatagtggaactgacttgtgagtatacactttctctgtttcaaacaggttttctttgacaaagcattctgactggttaaaatctcaagaacctgagccatctgaaagcctatacgagtcaaggttggttaactgtcctttttccagtttcaaattttggactaacatctaaagcctgtgaagactattggaaatgactagtgattttgcactctttgtttcaagcaggttccctttgagaaggcgttctgcccggttaaaatctcaagaacctgagccatctgaaagcttccatgactcaatagagacaaccaagaggaggaggtcggcaataaggttaggctctgtttataactactgtacccttctgaaggttgatatagtgcgatatgatcttttgcaggtctgctatgtttaatatccaagagctgggcgttattcaaaacttgaacggtttacctgatgatcaagagattgctgcaaaggccaggtttgtagaagcacatgttatttccttttccactaacatatccctgaaccaagtacacttatgccatttgcggtgttttctttttctttctttgtggatgtcatttcagatgctctgcacgtgaacagtctaccgggtctaaacccgaagcagtagaaccacatgacacaaaagagataatcgggaaaagcaggttttgtagtgatagataattgtctgtattctgcagtattacagactaaagtgttaagactgttatctaatgcgattttattttccgcaggatatctttgagaagacagtctgcgaggtttaatttccaagagctgggcgtgactgaaaacttgaatggtccacatgatgatcaaacgattgctgcaaatgccaggtttgtagtagcttcacatgttctttccttttccaatcctcttgacttataacttattcataaaccaagtacatttatgctacttcctctgatttctttatggatgtcattttagatgctgtgcaagtgaacagtctatcgggtctaaacccgaagcagtagaaccacatgacattgaagagagaatcgggaaaatcaggtttgtagtgaatatagatcaattttctatattccgttaaagtaaagacgtaagaatttttatctaaactggtatacttgacagagtctcttcaagaagacaatctgcaaacattgaaactccgagagccatcaaagaacctgcaaatccgcctttgcatgatgacaatgttgaggagtctagtcagatatcatgttcagtttcaatggagcttaaaagagaatcaaagaagaaaccaacaggcgacgaatcagaggaaatgagaaaaacaactgttggaagaccttcaaggcaagctgctgaaaaaatcaaatcgtacaaggaaccttcacttaaggagaagatgcgagggggcttctgagtcttgctaagatcgaataccctctcgtcagcctcgtatgtattggattctgcgacttcacttttgttcagtgagctattgctcaatgctgtagatcacaatgtatattcgtagttgcttgtagataaagctagcgagtggtcttgctactgtacatgaagcggattggacggtttaattcggtttgatggagaacccctctgtgtactctgctaagtaaattctttcacaatctcatttgtaaaggggtgaaataatattttcttcatttttttcttacagtaaataaattagtaaaaacaagctctctaattatatcatgggtaataaaactcgagcggtggtaaaacaaaaacctgacagttttgagttgacaacgaaccccataattcaaagattgggagacagtgaaaagtacacaagtgaatcacggtacgcaatctaccgccttatttcttaaaagataattctaaggatttttgttcttttcttgttgttttcctataaaaggtttaataattgttactttaaaggttttgatttatcagataaacgaatg

SEQ ID NO: 9294 - DNA, 3000 bp, Unknown
  misc_feature (1)..( 3000): cDNA_ID_3041098_gDNA_ID_1972067_Annot_ID_178428 3000 nt of promoter + ATG
actaacttatgaggaacatcgtcttcgccacgaatttgacggatctcaaatggagcggatttccctataataacaaagaagtttgttcggtttggttttaccatttgttaactcaattacactttattgggagaggaagtcttttaagttttaacttaccagctagtatagcatcaacggtaacatctagtctttgatgaacacgacactcagttctcgatatcatctctacagcacaagtgaatgtcggaggtccttttctttcaagaattgtcttctgcacttttcttttccttgcttcttcatcaccaagagtcacactctgggcaaaataaattcaaattaaggttagagaagataaacaacagaacaaaataagaagcaaagttgttgtctaaggttttacctcaattccaccaataagaatctgcaaagaaggatttttgattatgttgtctatagtcatcccatgagcagttgcaacaagctgaacacctcgttgagcaatagtgctagcagctaaagcttcaagctcagttcctatctcgtcaatgatgattgtctcaggcatatgattctcaaccgcctcaatcataacctgcataaagaacttgttaatacagcaagatccttttgattccatcctacaccatattattacaaggttataaagttgcgagacatacatcgtgctgtaaattcacatttggaacttgcatccgcctggcacgaccaattccagaatgaggaacatcaccatcacctccaatctcatttgacgtgtcaacaatcactacacgtttcctgtgttcatcagctaacatccgtgcaatttctctgtacaaaacaaaccaatcttgtcatataccatttatcaatcacagttttaacagaaagatcatcacattataagttcatattgatgtacctgattaaagttgttttgccaactccaggagatccaatgaccaagatggatcctcctccttcaatcaagtctcttataatttctgcacttccagagactactcgacccactcgacatgttagaccaattacttgcagtttgcgattacgtatagcgcttatacgatgcaaagatctgtcaatcccggatcggttatcatccgaaaaatcaccaacctaaattcaaaacattttgattcagacacagaagagaccataatcagtataagcaagtcttatcagtcttgaagaactgcaataagctaaaacatttgagaaattagttgcatgtcttagatcagagacacacatacctttgataccgcaagctccagatcctggtgtgtcacaggctgctctgagatcacccaatcgccggaagggaatctagcaagtggctttctccctaaatccatcactacttcgatcaattcctcaatcgcctcgtgcttaacaagctccttcctcgtcgccggaggaagaatctctaggaaagcgtcgagctccaccgtaggcggagccgtcgtcggtgacttccgtgatgagatcgatgaatcagatgacggtgaccgaacatcgaaactgaatccatcagatggtctccgaacaggagacggtgacgacgccggggatttcgatgaagcgattctctgacgcgcaccacgtgtccgacggaatgaggaagaggaatcagatgaaaaagcggttgcggtggctgagattaaccggcgcgaagcttgccaggagctgttgatgtcgatcagaactagccgcgaattcaacgccctcatcacgattaattaattattttttttaattatgtactttcaaataaaaaatgaattaaataaaagattctgtcttttcgttttagctactggtgtgtatatctgtctggaaagcagaaatgaagaagctaaaaaggaaaagctgaggaggagaagagctatgaagcacaacgaaacgacaacgttttgagtattagttcttttttcatttcatttttttggaatatgatgatgcgtgaagactgaaactagtggaagattccaaaggatcaaagcatctaattacacagaaactgcatctgtatagaacaaagtagggtccattgtagagggaaagatgataacatagccgttcaagcaactggttcacgtggcgccacgtggagagttggacaatcttgttgacacgtgtctgactatggagctaccgtttattgccaattcgtttggaactctttgacaaatttagcccaaagtcggagttggtgtttctcgcacggcagatgcaaaagtcgtcaactttttagctctgcaaattgagatttgaaccaaaattgctgactaaattaaaccaaacaaaaaccagactaaatgaatgaaatacaagtcaacccaaacattgtgtatctacaacgacggttccttaatttcttgagtcatcttcgttttttagccgaatgggcttttaggtgctttacaaatagtggtttaggattgggccttctaatcagaaacacaccttgtagaatattacattcactataaaatgtaaggtttacattcacgtgaggcccataagtgtttttgtaataattaatttaatatatagtgtaaacttaatattaatatcaaaccgaccttagctcagttggtagagcggaagactgtaatgggtaattccaaagaaatctttaggtcgctggttcgattccggcaggttgaatatttttaacattttatttcacttttaaattatctgggacccacactcatccatcttttgcttcacattcaactcgcgtgcctaaccgtcgattactacgccaaacgttatctttgttgtaacgtaacagattcacccactatttctcatatttcgcaaaatagccccaactttctcgggcacgtatcggaagatatttctgtgatagttcctgccacgtgtacattctctcctcccccaaattgttgtatacaacaatctcagaaaaggaaaaaaaaagaagcacagttgaaagaaccaaaa

SEQ ID NO: 9295 - DNA, 3000 bp, Unknown
  misc_feature (1)..( 3000): cDNA_ID_2034818_gDNA_ID_1972067_Annot_ID_178427 3000 nt of promoter + ATG
aaatatgaaacacaatttctttctacaagtaaggatagaaatggtttgccagaacgaattatatctagaaatccaacgagcaataaaaattgagcagttcttttgggcttacgtttactccaccagcatgactcattacaccactgaacaaagagttgcagacaagatatgatgccaaacaagaagttgtgccatcagttcctggtaaaacaaaaacacggattcaggattcatcaaacacagagcaattttaaagataaattgataaggaataaaggagtaagtaccacaaagcttgattgatagttcgcacagtgggacaatcttttctaagcgatcatgctctttttgcgtgattagacccatttccaaagcgtagtcaggataggctgggtattggagtgcaggatctgtaagcccatttccaatagcgaatccctgcaaggttatacttgtgagtactacagacttccattaacaccttaagagagaaacaagaaatagtcacatgcctttaggttaatatgaactccctcattagccttgtttcctttatggactcgggaagcaaaagctgggatatagtgcccagcatatgactctccagtaatataaaagtcgttttttgccaacttagggtgctccgcaaagaaagcctgaggtaacatcagcaaacttcatcaagatcttgttacacagctaagcaaacaaaggcagattcccattttttcgaagactcaagaaaaccaaaacagtctaacagagttgttgtttatccaattcatagctttaaagcagaaaagtgcagtatagaaaggaattcaagagaagatccagtgacctaacctgcagaaaatcataaagatcattgctaactccagtttcgtcatgacggatatcacttttatctgtcgtgtagctgaaaccagttccaacaggctgatcaacatacagaagattggaaacctgcaagacaaactctctatcaactctcatgtgcaataatctggaatattaaggcggtttgggattataatagaaagtaataatacctgatcccatccatactcattccaagcaagagacatgttactagtgatcttgaaaggaccattctcatagaacacagccaactcactactacatccaggccctcccgtcaaccaaatcacaacaggagcatccttcttgttccgtgactcgaagaagaagtagaacatgctaacacacaccaagcaaacaaatcaacaaacaaagcaaacaaacatttataatctattcccactactttgagattccaattagaaaaacgtcaccaacagtccaatgttctaatcgaatcaaacataacctagtcaagagctagctgcaagcttctatatacctatgaaccaaaatctaaagtcagatataaaccttgcgccacgagatttcgggagcttgtaataaccagcatgatgacctaaatcgtcgacagtagggccaccatcggcaagtatattcgggaatacgaacttccgttcaacaatccccggtccctccgcagcagtgagaggcaaatcagcgacatcgatcacattcagatcctgctgcgggaaaaggtttagctcacggatcagcttctccgcgcgcgtagacggcaagttcgatctctcaaaggtgcgatcattcaagaggaacgatgaagacggtatcgttgaagcgatgaagacgacgaaatgcaggagaaggctgagaaaagttagtttctccatttttggttctttcaactgtgcttctttttttttccttttctgagattgttgtatacaacaatttgggggaggagagaatgtacacgtggcaggaactatcacagaaatatcttccgatacgtgcccgagaaagttggggctattttgcgaaatatgagaaatagtgggtgaatctgttacgttacaacaaagataacgtttggcgtagtaatcgacggttaggcacgcgagttgaatgtgaagcaaaagatggatgagtgtgggtcccagataatttaaaagtgaaataaaatgttaaaaatattcaacctgccggaatcgaaccagcgacctaaagatttctttggaattacccattacagtcttccgctctaccaactgagctaaggtcggtttgatattaatattaagtttacactatatattaaattaattattacaaaaacacttatgggcctcacgtgaatgtaaaccttacattttatagtgaatgtaatattctacaaggtgtgtttctgattagaaggcccaatcctaaaccactatttgtaaagcacctaaaagcccattcggctaaaaaacgaagatgactcaagaaattaaggaaccgtcgttgtagatacacaatgtttgggttgacttgtatttcattcatttagtctggtttttgtttggtttaatttagtcagcaattttggttcaaatctcaatttgcagagctaaaaagttgacgacttttgcatctgccgtgcgagaaacaccaactccgactttgggctaaatttgtcaaagagttccaaacgaattggcaataaacggtagctccatagtcagacacgtgtcaacaagattgtccaactctccacgtggcgccacgtgaaccagttgcttgaacggctatgttatcatctttccctctacaatggaccctactttgttctatacagatgcagtttctgtgtaattagatgctttgatcctttggaatcttccactagtttcagtcttcacgcatcatcatattccaaaaaaatgaaatgaaaaaagaactaatactcaaaacgttgtcgtttcgttgtgcttcatagctcttctcctcctcagcttttcctttttagcttcttcatttctgctttccagacagatatacacaccagtagctaaaacgaaaagacagaatcttttatttaattcattttttatttgaaagtacataattaaaaaaaataattaattaatcgtgatg

SEQ ID NO: 9296 - DNA, 3000 bp, Unknown
  misc_feature (1)..( 3000): cDNA_ID_3041094_gDNA_ID_1972067_Annot_ID_178430 3000 nt of promoter + ATG
attacattttgattaggaaccacattatatccaaatggcgagaaaatatatctagttgggtcacaaaggagatgtttcttaattcgattcctaaacattgtagtagtctcttagattcggcttataattacttggttacacatggatatatcaattttggaatagcacaggcgattaaagataagtttcctgctcagtcaagcaagtctagtgtgattatagttggtgctggtttatctgggttggctgcagctaggcaactgatgaggtttggcttcaaagtcacggttttggagggtaggaaacgacccggtggacgggtttataccaaaaagatggaagctaatagggtaggtgctgcagcggatttaggtgggagtgttttgactggaacattaggaaatcctttagggattatagcgagacagcttggttcttctctctataaggtacgagacaagtgtcctctttatagggtggatggtaagccggttgatccagatgtggatataaaggttgaggtagcgtttaaccagcttctagacaaggcaagtaaacttaggcagttgatgggtgatgtttccatggatgtctcccttggggcagcactcgagacattcaggcaggtttctgggaatgatgtggccaccgaggagatgggtttgtttaactggcatcttgctaacttggagtatgcaaatgcgggcctagtatcaaagctttctcttgcattctgggatcaagatgacccatatgatatgggtggagatcactgctttctgcctggaggaaatggaaggctggttcaggctttggctgaaaatgtaccaatattatatgagaagaccgtccaaacaatcagatatggttcaaatggtgtcaaggtaactgctggaaatcaagtgtatgagggtgatatggtgctgtgtacagttccccttggtgtccttaagaacggatccatcaaatttgttcccgaattacctcagagaaagcttgattgtataaagagattaggttttgggttactgaataaagttgcaatgctctttccgtatgtattttggagcacagatctcgatacctttgggcatcttactgaggatccgaactatcgaggtgaattctttctgttctatagctacgcaccggttgctggtggtgctctcttgatcgcgttggttgcgggagaagctgctcataagtttgagacaatgccacccactgacgcagtgactcgtgttcttcatattcttaggggtaatagatttcactatctattgattgtcatttaattgaatttcaatttttacctgtcaatatcaatcttcaagaattattagttgaggatttgtattccagatttgttaaagttgatgctagcgtctgacgcaagttccattttaatgaatatcaggtatttatgaacctcaaggaataaatgtccctgatccacttcaaacggtctgcaccagatggggtggggatccattcagtttaggatcttactctaatgttgcagtgggagcttcaggcgatgattacgatatattagcagaaagtgtgggagatggaaggcttttctttgccggagaagccacaacaaggcgataccctgcaaccatgcatggagcttttgttactggtctgcgagaagctgcaaacatggctcaatctgcaaaggcccgaggcataaggaaaagaatcgataggaacccatcaaggaatgctcattcctgtgccattcttcttgcagatttatttagggaccctgatctggaatttgggagtttttgcataatctttagtaggaggaatccagacccaaaatctcctgctattttgagggtaactctaagcgagcctcgtaagagaaacgaggacccaaaagcagatcagcactcaaacaagatactgtttcagcagcttcagtctcatttcaaccagcagcaacagattcaggtgtatacattattaactagacaacaggctcttgacctgagagaagtcagaggtggtgatgaaaagagactatactatctctgtgagacacttggagtgaaactggtggggagaaaaggtcttggtgttggagctgattcagtcattgcttctattaaagccgagcgaactggtcgcaagctaccatcatcatctacctcaggcacaaaatctggttaggctccgtaatttcctgatttgattactccttacttaccggatagaaccagtagcaacatctctaacttcttctatattgagtaggtatattaaaagcaaaatccggtgcattgaagcggaagatgatcaggtttgctacgaaatcatatgtgcaataatttctctcacttatcaaaaacaacattacagagaacctttctgttgcacagaaggattaaaggaccgttgccgctgaagcaaagtaataacaatggcgtctcagagagtataaaatcagagtctttaggtaatggcaaatccttagagcaacaacaacaacctagaatagtagagtcgataggaggaggtagcagcatgcaaggggaaagcaagtctttgagcacaggagttgcatctagttctggtattcatttttcgtaacttctttgttccttttgaaattctgatcatttacatcgataataactcacacgtaggtggttccttacatgttggtggtgagacgatgaaaaagattgaacaatgacttttggagaatccctgtttgatacaacatctgtagttcacaaaatttgtacttcataatccatttctattgtaacaactaacaaatttaagttataaattttttcctaatgataatttgtctggtatgtttccagactttttatttgcaaatgtaaaaagaaaatatttgattttttcttgcttcattacatcgaattttttttgtttgttctttaccaatataaatacaaataccctttgaaagctcagctttcaaaactggaacacaaaaattgaaattaagtggaaatg

SEQ ID NO: 9297 - DNA, 3000 bp, Unknown
  misc_feature (1)..( 3000): cDNA_ID_3041096_gDNA_ID_1972067_Annot_ID_178429 3000 nt of promoter + ATG
tatacaacaatctcagaaaaggaaaaaaaaagaagcacagttgaaagaaccaaaaatggagaaactaacttttctcagccttctcctgcatttcgtcgtcttcatcgcttcaacgataccgtcttcatcgttcctcttgaatgatcgcacctttgagagatcgaacttgccgtctacgcgcgcggagaagctgatccgtgagctaaaccttttcccgcagcaggatctgaatgtgatcgatgtcgctgatttgcctctcactgctgcggagggaccggggattgttgaacggaagttcgtattcccgaatatacttgccgatggtggccctactgtcgacgatttaggtcatcatgctggttattacaagctcccgaaatctcgtggcgcaaggtttatatctgactttagattttggttcataggtatatagaagcttgcagctagctcttgactaggttatgtttgattcgattagaacattggactgttggtgacgtttttctaattggaatctcaaagtagtgggaatagattataaatgtttgtttgctttgtttgttgatttgtttgcttggtgtgtgttagcatgttctacttcttcttcgagtcacggaacaagaaggatgctcctgttgtgatttggttgacgggagggcctggatgtagtagtgagttggctgtgttctatgagaatggtcctttcaagatcactagtaacatgtctcttgcttggaatgagtatggatgggatcaggtattattactttctattataatcccaaaccgccttaatattccagattattgcacatgagagttgatagagagtttgtcttgcaggtttccaatcttctgtatgttgatcagcctgttggaactggtttcagctacacgacagataaaagtgatatccgtcatgacgaaactggagttagcaatgatctttatgattttctgcaggttaggtcactggatcttctcttgaattcctttctatactgcacttttctgctttaaagctatgaattggataaacaacaactctgttagactgttttggttttcttgagtcttcgaaaaaatgggaatctgcctttgtttgcttagctgtgtaacaagatcttgatgaagtttgctgatgttacctcaggctttctttgcggagcaccctaagttggcaaaaaacgacttttatattactggagagtcatatgctgggcactatatcccagcttttgcttcccgagtccataaaggaaacaaggctaatgagggagttcatattaacctaaaggcatgtgactatttcttgtttctctcttaaggtgttaatggaagtctgtagtactcacaagtataaccttgcagggattcgctattggaaatgggcttacagatcctgcactccaatacccagcctatcctgactacgctttggaaatgggtctaatcacgcaaaaagagcatgatcgcttagaaaagattgtcccactgtgcgaactatcaatcaagctttgtggtacttactcctttattccttatcaatttatctttaaaattgctctgtgtttgatgaatcctgaatccgtgtttttgttttaccaggaactgatggcacaacttcttgtttggcatcatatcttgtctgcaactctttgttcagtggtgtaatgagtcatgctggtggagtaaacgtaagcccaaaagaactgctcaatttttattgctcgttggatttctagatataattcgttctggcaaaccatttctatccttacttgtagaaagaaattgtgtttcatatttctgcatttgaagtaaggaaacaaggctaatgagggagttcacatatctttgtgtagtattacgacatcaggaagaagtgcgtgggaagtttgtgctacgatttctcaaacatggagaaatttttgaatctgcaatctgtgaggaagtcacttggtgttggggacatagactttgtctcctgcagtacttcagtctatcaggcaatgcttgtagattggatgaggaatctcgaggttggaattcccacgctcttggaagatggaatcagcctccttgtgtatgctggagaatatgatcttatctgcaactggctcggtaagttccaaaacatagataatcaaatccagacatgaaaataatgaaatagattgatttgaactgttgagggaaacaaaattggagcaggtaactcgaggtgggtgaatgcaatggagtggtcagggaaaacaaactttggggcggctaaagaagttccgtttattgtggatggcaaagaagcaggcttgttaaagacttatgaacaactcagtttcctcaaggtcggcctttcttgcataataacaacagtcgttctttggttctactggttttcttatagtatgtaacaacaacaaagggtttgatgatttaaacataaaaacacaggtgagagatgcaggacacatggttccaatggaccagcctaaagctgcattgaaaatgctgaagcgatggatggagaattcacttatcgaagatgctactgtgactgttgctgctcagggaggagaggaactggttgctcagatgtgatcacatcttcttttgcgttgcatgaaaacaaaaggcagcaaacataaaacaatgtgtgagcaattgacgttttcttctgtaatttgatctcataagtcataagaaagatacagtatatgtaggggttgcccaatttcgttataaaatcaaactctgctgacaccaaaaacataataattactacgaaatgtgttatctatgtttgtttccgaaataacgaaatgtataaaacaaaacttaaaacgttgtttatacaaaataaagccgaggtaggcttgcaagagtaatgaacaggttttgatgcggtttatgtacatgacacatggcaaaacatgattggctacatgaacgattttatctaacaagcaagatagagatgagattaggagacaaggagca

SEQ ID NO: 9298 - DNA, 3000 bp, Unknown
  misc_feature (1)..( 3000): cDNA_ID_3041114_gDNA_ID_1972067_Annot_ID_178418 3000 nt of promoter + ATG
taagagagcgaggagcgcggttgtgtcgttagatttagatctgaatctacctgccccggaagatgagaatcgggtcaacggattaagctttgcttcaaagcaagaacacgaacaagaacatgaacaaacacaacagaagaaacagagagaagaacaaaagtctcttgtcttgtcttctgctcctacattggtggattgccattactaaaatcaaaattcattaatacctaatcaaacaaaattaagcagaaattgatgaaccatttttttaagaaagttactgattccttgctttgtacaagacttgcaagattcttctctcttttttttcctttcttacttccttaatttcaaaggaaaaaccatatattatacaaatatatatactcccattaggcatatgcaatgctttgtaattacatccaagttaatgtaagatcttttggttacacaatataaataataaaaaccacattcgtttactattggggctttctcataaagagaccacattcccaacatccttctttgtatatatttaaatgaatcaactaaaatacatagaaataaaaaatttctctatactattattttcagttgatccattcaaatcattttctaaaaacttatgtcacgttcatgtatacttttagttaaagaatgtttttttttttttggattggaaaaaaaaaaagctcaaaccttttaagaaaataaagctcatgaaaagagcgtgacgggtccaactcttttttttggttaaatttgcaatttaaacagattacttgttcatgttgacattgaaatagcaggtcgagagcgagagatcaaaatgcaatgtattatgcccttaatttatgcttttatatattttgtttattaatgtcacatatcttattatggatatactttgcaacggatcacaaatcttaccctgaaatatgcaacctgttaccggaattgaaatttcataacacactattctcagctcttcaagattcagtgtttcattcgtgaagacgaatgcatgttgttctagtctcgatacgagaaactgcgtttatgaaaataagaaaaagaagaataaattagcatgggcttgatttacacccgtccgtcaccgaaatgggctacaaataaatcatgggcttttaatattctaacttagaagaaatttggcccattgcttaaacacgaggcacaaaccatatattttttttgagccaaaaaaaaaagtcttgatattttagcattttgtcctttttggagacagtggtgtcagatagctgacaacctatataaataaataaataaaatagagttttcttttactcttactttctttattagtttcataataatatgtgtaaaagtaagagttggatatttttcgttttaatttctgccttcgaattagttacgcatacaaagcataagagacaagagacatagcgtaccaaaaaagaagaaaatagtgcaaaaatatcatatagttttctggtacgcctcatcaattccacccccgtacaccataattatatagaatttcaatatcgaaatgtcgacagcaacaaaattcaacatgtcgaataatattgttttaaatattccattttactagaagatgaaaaaaagagagaagaaagtaaccttttgtctttgtcaccttgacttaaacagtaatacaaaccccacaagtaaattattcaagttcaaatcgtagttaatgtttatatttgagaattgcaaatggtttaaacgaaaaccaaactacgaattacaaatttgaagaggacttgtactagaaaataaatagagaaaagaagaataataaatagtaacagaaaatgggaaagatgatgattcgtgtggaccaagtctctcctcccctttagcttgccttattggtaaagtatcctcctgcaagcaaacgtatctgtcactccttttttattttctttcaccttctatcttattctcattaattcttcttttttggtcaacttcatgtatagaaaataataccaaaattttttgatatagtaaaactattagaactgaatttcaaacaaaaataatacaaatttaagcaaaaaaatattaaaaataaattttaaagaatatttttacatataataaatatacatagttgatacttttatataattattaatttatgatattaatgagaccatatatttacatagaacattcaaaataattattatcttattaatctatcgatatatatcactttttatactagtttttggaatcttaataatttattaatttgtagaagttattaatttatagaggttttactgtacatgtcagcatttaacttttgataagcacaaaaccattacatattttccaaccagattattttctatttatcctagcgtttgtaaatctttgaactacaataatttatcaaatacaatataagatttttatactaaagatgtatacaatgcatttaacattaaaggaaacaaataaactctaatcttttaaaaaaatactttaccttttaaaaagagttattaatcacataagcaatatttaatttttcattatttttttcatcatctgtctaacatattactttttaaaaaatatttatcgttggatacttacttttcagaccacacactaggactagtggttcctttattttactgcatagaacgacaacaaaaagctaagcagtaacattttttagggttttattactgcaacactcaaaaatgagaaattattattaaaattgaaaatgaaaaatagtaatcgcaatccgaaattactttttttctagccttctaggaactcgaaaagaaagcaaatttcttgcaattgaaggtacctgcttctctttttctggtttgtctggtttcatattaaaaaaaacattttgacaactatatttctggtttgtctgaaaaaattgagaagaaaacctagaaacaaatacggtcttttttttttctttttatg

SEQ ID NO: 9299 - DNA, 3000 bp, Unknown
  misc_feature (1)..( 3000): cDNA_ID_2034846_gDNA_ID_1972067_Annot_ID_178415 3000 nt of promoter + ATG
aaacatgttacctggcaggttacaaaacatgttacctggcaggttacaaaacaagtatgaaacatcttttgattttgaagcacgaaaaagtaaaatatcttattatcttttatggatcaatttaaaacatgtgtgttgaatcttgtcatgcaggtgctaaactttgtttgaaagagaagaggattcacgagcgaacagctcaatataataggaattgtcagcttctcttacatgaagctgtgagttttttctttttctttttgtgtcttactaaattatttttttattaactactttttaagcgatgaattgaatttattgtcactatttttctttcttcttaattatacagctgattttgtgtgaaagtagaaaagaacaaatgattgaagctatgcgggatggagattttactacgcagaagacaatgcaagtttttatttatctttgtttgttccttttaatcttaacttatttgtatcaatctaactcatgtattatcctacgtctatctagactgatcggacggacataatgtgtatccatatttcttggctacgcgtgtccaccttttagagactatgcctttaggtagtagatgttttactacaaaataaacatatttagtcaaataaaataaaatttgagagaatcttctacataagtagctcacagacccaaccaaaggaccattgaataccatatatatatagatacacagacatataaacacacaaatattcgtgtttttttcaaactgtgagagaaaaagaaagagagaaagagatgggagagattgggtttacagagaagcaagaagctttggtgaaggaatcgtgggagatactgaaacaagacatccccaaatacagccttcacttcttctcacagtaaccatatatacttagttatatataagctctttacatgttgtttatatatgcgagctaatgaacaatataattgtgataggatactggagatagcaccagcagcaaaaggcttgttctctttcctaagagactcagatgaagtccctcacaacaatcctaaactcaaagctcatgctgttaaagtcttcaagatggtaattacttactttccgattttccacatctacatatatgtgaatcacttgcatatactgtatcattatcttacacttccttaaaattgaaagtagaatgtttcattatttacagctaagaatctttatttactcattatataccatttatatataatagaaaatagtagtctgaattaacttttcttgtcatttattgacgcagccatgtgcacacaagttgcgattttgtttgaacttggctagttggctttgtcttcttctttgagaataaaaatctcatactagtaaagaatactctgtgatattttatttttaagaacaaacatagatttctctgtcaataaagaattgttactgaagaatccaagtggttcgggtcgctttatggatttttacttttttgctaatcttattataatagaaccatataaaccaaattccgtttactttttaaatttgggtttatgacttggtttggttcaactcacttttggcttctaagactttgcataacatgttttagacagacaaaaaagaaaaagactttgcataacatgtatgaatttttattttattttgtttgtgtgtagacatgtgaaacagctatacagctgagggaggaaggaaaggtggtagtggctgacacaaccctccaatatttaggctcaattcatctcaaaagcggcgttattgaccctcacttcgaggtctgttatgttaaaaaaaaatatatatacacattaattttggctgattttgattttcgatttgaacgcattttaataaggtgtgaatgtgaaagcaggtggtgaaagaagctttgctaaggacattgaaagaggggttgggggagaaatacaatgaagaagtggaaggtgcttggtctcaagcttatgatcacttggctttagccatcaagaccgagatgaaacaagaagagtcataaaaccctattgatcatttgggtatcgcatacatgaatctattccacatacatgatacacatatacgtgtttctgtgtgtgtactatgttgctctctgactttctacagttcactattttaattataaagaaggatcttgtgctatcattagggagatacgtgatactgtagttcttcttgaaattgttattcgtgagaaatatcatggtttgaagtatttattttcacaagatggatgttaacgtggggatcattttacaatcattctacaaataattttacttctccagacacaagattttggatctattttagttcaattttttctttttttaaaaaacagtacactaaaactattttttatattaataatgtggtattagtctgatgcatgataaattttatgaattttaagatttgccccggtaaaaaagataatacacaatttcctagtaatatgttatatataaatctatctacaatgttactcttttttctgaaaatgatgaaattttgtgggccaaatagaacaaaaattcttgaaacagaaaattagttttcattttttaataaaataattatatgtattggaccacaactagacatttataattttatagtaattaagaagcaaatatttgatctaagtaaaatataaagaaaagcaccatatattaaaattatgaaagatttcctatttataaattaagatatcatattgaaggttaattttaagttcataaatggaatagaattcactaagaaaataattaaatttaaaataattgctaacagtaagatctcatcggataaaacttgtataattatgtttattcatgaatcatccttgcacctacgtatccatcttttccatcatctcatctatatatatgtacatttgcaaagctgagaagaaaaaacatcatattgtcgattgagcctatctctttatattatattgggag

SEQ ID NO: 9300 - DNA, 3000 bp, Unknown
  misc_feature (1)..( 3000): cDNA_ID_2033137_gDNA_ID_1972067_Annot_ID_178408 3000 nt of promoter + ATG
acacaaactcgctaagctagctgtatatttatgtaattaattattacatttgctgagtaattttacggcaaaatatgacatattttggacatgccacgtagaaaagcatgtgatgatgatatatactgtatatagagtagatctgtgtaagtgagtcagtggtaatatctaactaaaaaagtacagaaatggaaagatctatatgatctctctcgcaggatctcaatctctggcccttttttttgtcaacccttcttcctctcttattatgttcttctctctcttttcttttggttactgtaatttgtttttttgtttattgacattgacacgttttcttgcttcgatttttacggaaagagagatatgtatatgaggaattaggataagtcgatgtaattttgtaaggccacgaaaccatacgatcacaatcaaacaatctgtagcatttagaatccatcaattataatcgatgttgaagtttcggtggtccaatatacttacggttgttaaaactttggccaaaacgaatcgtctaaaagcaataccagatttaaatggaatgtaaatggaaaaggaatcgagaaataagaacaactgatcttaaagtctcacaatgtcctacaaattaaaaatgcacttgtaataatagtaataataattaattatattaaaaaaactccttgcaataaaatcataatttatgtaattcaaaatagatcttgtctgaattagtttcaacatatttcctagaaatgcaaagattaatgaacaaaagcaggacatatataataaatcagattagagaacttctagatctagttctattacttagtcaatcgattaaaagttctatacactcagaaaaaaaaggatatatattcataatatagacagtttaacaacttgagttgaaggaaagattctcacatatattttcgaggcataagacacgatggccctaccattacaggatgataacaaggaacgaacattgtagacacaagaatcactgttacaggttggtaacaaagaaaacgaacctaaattgataagaatgaacgtgtcttttttttttttttttttggcaatccaaattttgttgcatatgcataggattccaaatcatttctgtttgttcttttgtttcgaccgtgtttttttgttaactttaaattatataagttagatgcataaaattagtacacacccatatagaagaagacaaataatcatgtgtctatcacatgaaattaaactgtttgagtatatatattagaccggaatttaatatgtaattttactaattaaaaaatgctttcaaattcgtaataagtcgcaaatcaaatttcgttgttacatttttaaaagaaagtatttcttcttttcaaggaaatattttttaaacaagatcaataaaatacgtattctaaatatagattaactctcttgttccatgtgtatctgtgtttggtgatgtaaagagctcatttacagacatttctttttcttgtaaagcggatatattgtaatgatcgcatgtgaaacgtaattacgtaaagcgacatgcaaatctgagttatggtatattaattacagtttttgtattgacgtgaattttaaaaatgaatttgtttagcatccactgccgttttaacattttattcgttgtaatgtacaatgtcgacaaagaaagcaagtgaaacgtaacgtgcatggcctccaaatcatgaacttattcgtaaaatatcatttctataataatatagtttagctatatatcgcaataataaatagaaaaaccataaaattccaaagaatatattaccaatcgacaccaaaaagtaaagataagggtcataatgggctctcccttggatggtttagaatcttcgtaaccaattgtctccctagtccctattatagctttgagagatgaacgagtaatactgtatcaatcatacaatatatatatatatatattaatttgacatatatattagagctaaccaaaaacaaatatcgcaatagcttagattagtgaatgatagttaattgttacatttgataactcattattagaccgccaagagtcccatcaaactagcaggttcatgcggccacgccgggaccaagatctggttcttttatttcccataacaagaatctttttcattttatttatattatagagaacttttaaagcagtctggttatgttggatctggaggaaaatcaggaaagtacatttgattttttaaatgtactcatatgaaaatgtaaacaaaacatgaataatcctttatatatgggagtgggacctagattttttttgttgctatttaacaaaacaacatttctccaacattctgaaaaacaggatcacttgttttgtttcactgtacagtagaagagttttcactaactagtaaactaattaattagtgatttttatttttttttaatcaactcaggcctaattgagataacttgttcgtgggtatcaggcccaatataaagtattctaaggcctactcaataatatctccaatatttttattttcggacagatcatttatttatttttgtaatattttgttttttcttctcgtaaaaccctaaaatatacaaaaccctcaaattcagtctaccagcgaggatcgatgtcggagctcacagtatctcctttcacgcattaactcaatttatctgctaaaccctaaatagcttcacgccgtttttctaattctcaatcaaagcttcaccgccgccgtgtgttgttctttctccgagtcgtgttctctaatctcaggtgaagcttctttcttcaatttgcctttggtttcgtttcgaaaaatcatgtcttttctaagatttatctccggtgctaatcagaattagtcggtatctaatgggtttctgaattatctgtctggtttggtatcagtgtttaattgtaattgagttgtttggttcgtttaggtgataaggatcaagatg

SEQ ID NO: 9301 - DNA, 3000 bp, Unknown
  misc_feature (1)..( 3000): cDNA_ID_3041147_gDNA_ID_1972067_Annot_ID_178393 3000 nt of promoter + ATG
gttggacaattagaggagcctagactagagagagtagaggttgatgtaatgtttacagaagctagtgaagtccattttcagtgtagtcaatagaatctcactttcttgcttttgaagatgttgcaacttgaaatagtttctttctccatctttgttgactgacttcttctttctgaaagattgtatcttgattttcagaattagattttgacattctttttacagatatagaatattttgtaatcctcccaaaaacaaatattcgaaagccactaaataaagacaacccaacaaatataactgtacaaaattgtagaatggtttgacaaaagtatttatcaacttttgaattttgatcatagtgacatgtatctaatagtgatttgttaaaatggataataccgtagaagataaagatggcaataaagtttgtgaataaatgaatttttttatatttccataaaatttagaaaagggatgatactttagattagatgctaaaaacagcagcaagtatttggcatcttgcaagatcggatattgttatacacctccaccaataaaagcacaaatcaagtttgctttattccttttcgttatatcgaatatttgtaaatgtccaatttgttaagtcataactaaaaacatggataacgttggtgttgttcgtttggcagcaaaaacaatggaatttgatcacaaggagctgaaattcaaaacgattgtcttaattgttccgattgatagattctatgcccactgatttaaaatgggcctcatattaaaagcccgtttaaatcagttgtctcgaaaattgactttttggtccattttgaactatgatttggagttgcaataaattgaaaacagcatgtaattcatctcttcaattgttttgtgataagaaaatgatatcaaaaacgttttctatgtaagggtgtgttttgcacaaaaaatggtcagggtgtgtagtctttgtccgtaattttcagcagaatcaggtcgtgatatcagaagctcttctgtgttcacacctattgattctgctagagaaggatccatggcattctctgcatcaagataagcgcaataacctggtacaagcaagtcctttttagataaataaaaagctaatggagtgaagaacaaaagcaagtcagaatcaaactgtaacttcacaaaatcgaatcttagccagagcaagccaaaacgcttcttcttccattcagctacaaagcaagataagagtaaacacaagagacattcgtttagtcaggagcttgggcaaatcatcaatgctactctaaaggagataactttattttggttggattgttgtcctagtttcttcatctgaaaaatcaaatctttctttcttatactcaagctaagaattgttgagaaacattagagacgaagagaacctgagataagtaagagaagaaacggaatctctgaatcggactggcccatgagagtcgacccattccccgttcttcttcaagcggctcctccttcgctgttcagtttcaattccacagttctgtcttcgatctccagtttccgccatggtcattgtccttaaccagaagtggatacataaaaatcgaaaaccgtattaaaccgatcggttcaaggctaatggaatctaatttaacggaacctattaataatctaattattgggtaatgttagagtacaagcctattaacaaaccctaactttacccatataaattcttgcacacaagtttactttttctttttctttgctttcttctgtatttgccgccgcttctctgctctccagctccggtcaatccgtacaggtacgttctggttacattcaaaacggcacttcaccataaatgaaaacataggagaatttcataaaagaagttgtgaaattcatctcttttaattatagatgcagctcgattttggatctctcttgatgttcctgcatctctctagattgtatcaatacccaaatgttgaaatttaacggcataattgaaattgaatcctcatttgtagttactcgagactcttatgtcaattgttggttctttcatagtttattagtcagaagttgatgtatctgcatttctctgatttgtataaagtagtataatgtgaatgttctctgatggtttgtctgaatttgggcaggtaagtcaaaaagttgtgaaagatgggtcgtgttcgtaccaaaacggttaagaagtcttcacgtcaggtgattgagaagtactactcacggatgacactagacttccacaccaacaagaagatcttggaagaagttgcaatcatcccatcgaaaaggctacgcaacaagattgctggattctccactcacttgatgaaacgtatccaaaagggtccagtccgtggaatctccctcaagctacaagaggaagagcgtgaaaggcgaatggactttgttcccgatgagtcagccattaaaatcgatgatgttaaggtggacaaagagacactagagatgcttgcttctttgggaatgtctgatattgctgggatttctcaagtggagacacaacaagctatggcacctgctgtgtttggacgtcccgcaggaagataccaacgctaagtttattgggtttcaatcaaagatttcggagacgagagtttggtttattggtctagtatggattcaacatcgtttcctttgatttaagattaatgtcgtttcctttgatttaagattaatgtctggaatttatagcttttgctttgttttaacctttttttttggtccattttgaactatgatttggagttgcaatcaattgaaaacagcatgtaattcatctcttcaattgttttgtggtaagaaaatgatatcaaaaacgttttctaaattccaagggtgtgtagtctttgtacgtaatattcatgatgagtcaggggcataacggtccagttacttattaatttcccgaatacgtggaaaaataggttttggctcgaaatg

SEQ ID NO: 9302 - DNA, 3000 bp, Unknown
  misc_feature (1)..( 3000): cDNA_ID_2034898_gDNA_ID_1972067_Annot_ID_178387 3000 nt of promoter + ATG
ttgcataaaaagctaaagggaggtgtaatcttgttcgataagtcaattacgaagaagatgaagatgatgaaggaaattgattgaacgagtttgaaaaacgcgtttgggtttaataatcatcagcgaattttgcgttcttcttgtcataaattatgaatttgttttctattaccaactcgttccagcagcagcaggcgatagaataatcaaattaaattttattttgtcaaatttctcaagtaatgtaagtaaccactaggtttgattggatttgatccacttaaagtctcaaactttataagagcatttataataacaaaatttattaactgaattttaaacttgttagttacaaaaaggtgtggaatactgttcacatcccaataaagtagtttgtcatgcaaattgcaaaccaaaactacgggtcaaagattgtagtgatagatttcagtttccaatcatcagctttagcttccattgtatttgtcccatataataaccatggtctctcaaagaaggaagacaggttatatgtatgatccgcgataactaaccggatatcgctttgtagccttccttttccagtagtttggccaaggagttgtctccggttttaatgattctcccattctcctgaaacccaaggaaacatacatgagcttaccaaaatatatatgatcattgtgtagccagtaaagaaggctggtttggcaacaatgctcaccatgatatgtatgagagttggtttgatgtagtcaagtaggcgttggtagtgcgttatcatcagaacagagttttttggtgtcaaaagcccgttcaccgcctttgccacatcttgaagagcatcaacatccaaccctgaatcaatctcgtccagtatagccaactcagctccaaggacctgcaaggacaggaaaacgttgcattagcgtacttccatgacctctttccatatattgcttacaaagaataggagactaatagtgttctcatgttatcgataaaccagaaatgaccactccttgggaggcagatatttcaagatcaggaaaatataaagagatatgaagacatataacatgccatgtctttttagctaaaactgcagtcaaatacttgtaatagaatactaactgccatgcaataaccgcgtctacttatggtaaaacctgtaactgcttaagctaatctacccagatatcctgaaattcctaactattagccttgtggttttgcacactgtagcatggaacaagcttagtaatccactaccttctctaatcacatttgtttcttatcatatgcagtccttatggatactgagaaacaagggaagcagaaccattaccgctaactgtagaatctcattgcgtttcctttcaccaccactaaatccttcattgacatttctgttgagaaaatcggtcttcatattcacaacttcgagttttgataccaagtggctgtagaactgcatgagccatgtgatatcagtaagacataatacatagacagttctacaattgggaccatttagcaaacaacaacaagtaagaaacagtgcaaaccaaatccaagtcatttaattcgataaggcacctggattggatcaagctctggctgaccaagctttcttttccgagcattgaatgccatattcaagaaatccatattgctaacaccagggatctcaactggggactggaaactcataaagagaccggcaagagatctatcctctggttccatatcaagtagattctgccctttaaacacaatactccctcccgtcacttcataatcgggatgaccaacaagaacctacaaataataagactctcactaagataacaaacagaaagagaacaatactctgcagcatcaatgttaatcctgagatacaagatatacaaataaaatgttcaccttcgaaaacgtgctctttcctgaaccgttcttccccatcactgcgtgaacctattagcaaccacaaaagaagccatggattacaatcggcagcaatgcaaaacaaatccacacaaatagaattcacaagttatgatatcaaactcaaaactttatcatataatgagacagcactaccaggcaaagctttctgcaaattaaatttcaagtcttaaccataaaattgcattgattaatacgcacctctccttcgtagacaaccaaattgacgcctttcagtatctcttgtctcgattcagcaatcactgctctcaaatccctaacttcaagcaacgggatcctccccacgtcatcacgatcttccaccaacgaatccgaatcgacggctgaggatacggaagacgccgaaacaataactgaacggcgagtagttcgcaggattggagcggcggcggaattagctcggagattgcataatagaacacgagagggtgaagtcccgaggcgaactcgctgagtaggaagaggaggaggagaagaaacagttggaacgaattgagctatggagtatgcgtgacggagctgtaggttaacgccggccatggagacagaaattgcggcggaagaagacggtggaggttttatccggtgaagtgatgtggttagttaggtccagggattcttttaatttcacatgttgaatgccacgtaatatatatatcggctactagcttaattaaaatggaaacaaaaaaaaaatggaaataacaaataaaacgacatcactttgtgttgatacgcatattcttcaaaaccttaaaagcttctttccttgaagtacaagaaactatttacacatatgagaccttgggatgaagaaacagacaaagtccataccctaaagcaatcctaaacccataccgtaatctcaaaatctcttcttacctctctttctatcttatatacatcattcaaacattttttatgttttcatatacagtttgattcatttatttcgtaaaggctttgaactttttgtcctgatatagtgtgatctatatataaacatatatg

SEQ ID NO: 9303 - DNA, 3000 bp, Unknown
  misc_feature (1)..( 3000): cDNA_ID_2990859_gDNA_ID_1972067_Annot_ID_178391 3000 nt of promoter + ATG
cgaagtagagaaaagtcatatcagcatgcctataggggagaaaccacttactccatctgaagccatgccatctacatcatatatttctaatggtgacgcctctcagggtacttctaatgggtctctggaaactgaaagaaacaagtttgttgctttccccattgaagctgttcagcaaagtaatatggcctctgagccaacttcaaagttcatccaagggactgagaaatcgagtatttcttctggcaagccaacctcagaagagaaacgtatccctctggaagagcctaaaaaacctgctgctgtatttcccaatatctccttttcaccgcctgccacgggcttattaaatcaaaacagtggtgcatctgcagacatcaagttagaaaagactagcaggttggtggcatgatatttttcctctcagcttgataggcttttatatcactacttgtgcctaagtgagcctcatccatattggttatgattttttttttctggtttactcgcttccgactctctttcttgatgttacagcactgcgtttggagtatcagaggcttgggcaaagccaactgaatcaaagaaaacgttcagcaacagtgcttctggagctgagtcatctacctcagctgcaccaaccctcaatggtagtatattctcagctggagcaaacgctgtcactccacctccgagtaatggctctcttacttcaagcccttccttcccaccttctatttcaaatataccttctgataattctgtgggtgatatgccgtccactgttcaatcttttgctgctactcacaattcctctagtatatttggaaagttgcctaccagtaacgacagcaactcacaatcaacttcagcatctcccctctcttccacatcacctttcaagtttgggcaacctgcagctccgttttctgcgccagcagtgtctgaatctagcggtcagatctcaaaggagactgaagtaaaaaacgccacatttggaaatacaagcactttcaagtttggaggtatggcttcagcagaccagagcactggcatcgtttttggtgctaaatctgcggaaaataaaagcagacctggttttgtgtttgggagctcctccgttgttggtggcagcacattaaacccttctactgctgcagcttcagcacctgagagctctggaagtttaatatttggtgtgacatcgtcctcaacccctgggacagagaccagcaaaatttctgcgagttctgcagctactaatactggaaatagtgtatttggcacttcctcttttgcatttacaagctctggtagtagcatggttggtggtgtatctgcaagtactggaagcagtgtttttggattcaatgctgtttcatcagcttctgctactagctctcaatctcaggcctcaaatctttttggtgctggaaatgctcagacgggtaatactgggagcggaaccacaacatcaactcaaagcatcccctttcagtttggttcatctccatcagctccttcatttggtttgtctgggaactcttctcttgcatcaaacagttctccatttggattttctaagtcggaacctgctgtatttacttctgtgtcaactcctcaattgagttcgacaaactcctctgcaagctctagtagtacaatgagctctcccctatttgggacaagctggcaagctcccaactcttctccaaactctggtccagtcttcagttcctcgttcaccacatcttcaactcctaccaccttttcctttggaggatcttctgctgctactgtttcgagcactactactcccatttttggtgcatctaccaacaacaccccgtcaccttcacctatctttggtttcgggtcaacccctcctaccactccccagcagccggtatttggtaactcagggactccatcacagtctctgtttggtaactcaactcctgggtttgcatttggtgcacctaataatggaaatggtatcaacaataaccaacaagtgagcatggaagacagtatggcagaagacacagaccaagctaatagagcatctatggtagccccaatgtttggacaagcagcagtctcgatgcctcaaccaaactttgccttcggtggaggagcagcaacgcagcctccatcaatggcaaaccccttccagtttggaggccaaccaatggcaagcacgttacagaacgcatcacctttccaggcatcacagagtctagagttccaaggaggtgggagcttttcactaggcagcactggaggtggcgataagtcaggccgcagaatcttcaaagcaaagaaatccaccaggaagaaataagaaaaacacattgttcaagagtcattttatcagccttatggtctttttgttcgctatatactccgggaaccttggggattacgagcatatcgtcgtttaatgaaagaggtaaagtatgagaatgtgtatcgtttatgctcttgatcgtctctgtcattttagtatgagtcaggattttgggggtcaaattgttcagggttataaaagttgtaggaaagttttgtaattttcagaaagtactggtgtctgtaagagtaatatagctctgtgcctctgtctttcgcttctttttctttttgtccttataaaaaaacacactttattgtagctgtttgttaaactcttttctctcttcagttctggttttagtggtttaaattaataattgcctcattacaacttggtttacccaaatcaaatcgaaccaaaccaaaattgaataaatccaattcgatgatcttcaaggaagcttcttttagttgaccaattccattaaatccaatccaattcgatcaagtaaataaacaaattctcaatccttttattagagaagccttcttctccaaagtctcgatttctctttattcttccaaattcttttgtctctctgtatcatccaaaattcccagatttattcacggagttagaagaagaag

SEQ ID NO: 9304 - DNA, 3000 bp, Unknown
  misc_feature (1)..( 3000): cDNA_ID_3088380_gDNA_ID_1972068_Annot_ID_178445 3000 nt of promoter + ATG
cagacgtgttatccaagagaccagtaagattcaagattcgtctgtgacggttcaagtgcctcaaatggagcaatctccagcgtcaaactcagtcaaagagatcactgacccgaagaagaagattaaagtatatgtggtggcagcttcaagtgagtgtaaaggtctgaagagatttattgaggtggatgtgaactcgacggatcaagtgaaaatactgagaaccgagttggttgaaagtggtcggaggggtcatataagaatgcctcacgaaggatatttctttgtggacagaaagaaagagagagtattgaacgaagatcagtcattcgagtggaaccgtgttcttccagccgaaacagtttatatggttagtggacgtgatacacattttgcctcgtcttttactcgtggctctaaagtcacaatgctttgtgctcaaaaagttctgtagaaagtctgtatatatgacacagaagaaaccaaaaactatgatacattcagcaacagaaagttatgtggatctttaactctttgctaataggttttaatctttcttcaagttttcttctggcccttaagtcacaatgctttgaaatttttgagtatatgtagatacatagaagaaacaaaactatgatacatttagtaacagaaatttatgtggattttatcctatttgtaggtgtaactcttttcttctaggttttaatatttttcttcaagtaaacttgttgttattgaattccctttagtcgaaagcagcgatcaagcttctcttataagttacaaaccctaatttcagcaaacacaacttggaaacactagcagcaacaactttgttattttaaaacattagcaaaagaaatctcattgcaacatcaaatggcaaaactggaaggtaaaaaaagcagaacttatcaaacaagactaccaatatgatgaactgatgatttttttttttttttttttggctcaacaacaaactttccattcacccatttatggatacacagtctagctcaacagagcttttaacccaaattggtacaatagaatacaactttagatcataattctcaaaagaaagagattccttagctattctatctgccactccatttccttctcggcttgtatgcacaagcataaaatcctcaaacttgctaagtagatactttatgtcttggataattggattgagacttgacaagcataactttcatgtaaccaaagacacaagttgctgagaatccacctcaaaaatgatcttcctataattgaatcgggataatgacagcacagcccatctaagagcctccacttctacttccagcacgcttcttacttttaccacagctcttgcacctaaccataacaccttccctgtatgatcgcgaagcacccaccctaagccacattttaatccttctgttggccatgccccatcaaagttgcacttaacccaagattgtggtggagcttcccatgtttctcgtctgtcccgacggtgttgtggttggtgctttccttacattctgagcctctttccttctaatccactcatctgcatcttcttgtgtccttactaatacctcattggttccaaattccctccctttaagcaccagctcgtttctgttcttccacagcctcccaagtatccaagggactaaagcctccacattcttcagatcaggatattcttgtttaagatgttgaactctatggaggtttgtatgaactgatgatctaggaccggataagttcccttcttcatagcgaacttattcaaagaatgttttgtgtatcattcttgttacattgttattaatgaaaaaatattattggtcattggactgaacacgagtgttaaatatggaccaggccccaaataagatccattgatatatgaattaaataacaagaataaatcgagtcaccaaaccacttgccttttttaacgagacttgttcaccaacttgatacaaaagtcattatcctatgcaaatcaataatcatacaaaaatatccaataacactaaaaaattaaaagaaatggataatttcacaatatgttatacgataaagaagttacttttccaagaaattcactgattttataagcccacttgcattagataaatggcaaaaaaaaacaaaaaggaaaagaaataaagcacgaagaattctagaaaatacgaaatacgcttcaatgcagtgggacccacggttcaattattgccaattttcagctccaccgtatatttaaaaaataaaacgataatgctaaaaaaatataaatcgtaacgatcgttaaatctcaacggctggatcttatgacgaccgttagaaattgtggttgtcgacgagtcagtaataaacggcgtcaaagtggttgcagccggcacacacgagtcgtgtttatcaactcaaagcacaaatacttttcctcaacctaaaaataaggcaattagccaaaaacaactttgcgtgtaaacaacgctcaatacacgtgtcattttattattagctattgcttcaccgccttagctttctcgtgacctagtcgtcctcgtcttttcttcttcttcttctataaaacaatacccaaagagctcttcttcttcacaattcagatttcaatttctcaaaatcttaaaaactttctctcaattctctctaccgtgatcaaggtaaatttctgtgttccttattctctcaaaatcttcgattttgttttcgttcgatcccaatttcgtatatgttctttggtttagattctgttaatcttagatcgaagacgattttctgggtttgatcgttagatatcatcttaattctcgattagggtttcatagatatcatccgatttgttcaaataatttgagttttgtcgaataattactcttcgatttgtgatttctatctagatctggtgttagtttctagtttgtgcgatcgaatttgtcgattaatctgagtttttctgattaacagatg

SEQ ID NO: 9305 - DNA, 3000 bp, Unknown
  misc_feature (1)..( 3000): cDNA_ID_3041196_gDNA_ID_1972068_Annot_ID_178453 3000 nt of promoter + ATG
tgtaattacctacaaagaattttgaaatgaaaattgttcttattgaataatgaagatgaattaagctaagtttgtagaattgatatgcgaattggaaactggagaaagagaacagatacattcgaatttttatccttttttaaaaacattacgttggataattttagtaagatttagattcttcgaggaggctattgacttagggaacacgtaaccgagaaggttaatatgggctaagcccaagtgagttctatttaatacgttcattaaatgatataaatactaaacaaattctctacaaaacaatcactttaattatctctctttttcttcatccgtttctattgataaagttatgaagtttctcgtcgagaatctgaatggttcatcattcgaacttgaggttgattacagggatacactgttagtggtcaaacaaaagatcgagaggtctcaacatattcctgtttccaaacaaacccttatcgtcgacggcattgttattcttcgagaggatcttactgtcgaacaatgccagatcgtccccacttctgatatccaactcgaagtctcatctgacgatgataaccctaatcacaacgactgcgatcaaaagccgcaaaccgagcaatctccagcactaccattggtttcagcggaagagtactttgagagacaagattggcctttgacagcagaagagctgagacagatttatagttatcggcctgagcatgaaggttgagagcaaccacaacgatgatcaaaccgagcaatatccaccgtcgtcgttgcgaagatgaggcttgacgagatctttggaaacttttcattattatctttggaaatttttcattattatcttcaatgtgtttactattttttttaagttagtttagataattatagattatttacattttacctaaggttttggtttctattttcttaataaatagctcattatttcccattatttcatgaagttatttgtttagttgagattttataaaaagggataataaactaataagcatactagattgtaactcgtgttggtagtagaattttaatttttaaatatttatttaaagttggatcattgtttgttttataatacagctttaatcaatccatacataatacaaaacaaagaaacttagaccatgcacatagttggtattcataaagtatcataacattttttactattaattttaatgtttatttattgtttgagaatttttataatactgataataaatctgttttcagtgatgagatccgtaatgatatcattgaaaaaaaatatttgcaaaatcgaaaatacctgctagcatcggccactacaacgataccggagacagtccgattgaagagaacagttaaaagagaagcgcctccgacgtagatataaaggagtgtgagagaatttgcgattaaggttccaagggatctgaatttggaagatgattctcgttttcattgaaaaagaatcgtatcaagatgcactgaagaggagagaagagaagagcaaatgattttttttttctctcctttcccacaaaaacgcgttgccgactaatcacaagccgccaaatcatcaaaaactagtatcagaagtatctctccagtgatacgacttaggcccaaatcagttgttttacccattaatttaatgttttttgggtttctgatactcataaaaatcctactatgtacatggtcttacccttattccattgtcggtgaaatccttcagggtttatgcttttccagtgctaaaatcgcatttcaacgaaaccgaatccctaatgaatgaaatcgcatttcaacaagtagaaaaaagtgataagactagggctttttattcaaaatctcggttttgtttaaattcgaaccaaatccgaccggtttacttaattaaaccaaattgttaaccatctctcagaagcaaacccctaatggcctaatccgatgatcgacctagttctcaatgtacttgaagattttatattgccttctactcacaatattatgcataaccctattataaagatgatcaatgtttatatacagctacaaactttttcattctcacttagtctcattgtattatcaatcaacgatatagctctataccatattgaactccgatgatcggggctataatcggagaagagagagatgtaacaaacgtttattatcaactcaaaatattgttacaaagcttaaactaaaattagttacattcacatcttatatactattcacattaatcttaaaccgaaatctagttaactggagttaaccaaattaaaccagtccatctatcccaataattcattcattcatacaattttatgtacaaggttaccaaaagaatcaaagagaaaacacttggcttaagtaagagtataacaataaacagacaattaaagaagaatcatatgcatatataatttcaccatgtgatattgaattatataaaaagaaattttcacagaagtggacgaaaaaagatttgctctcaccgtttgtcaaagtgagaactggttttcacgttttgtcttttcattcaatttcggaccaaattaccctgggaaaacttaataatggcacaaaccaaaccgtgcagcagttcgtatcggttaagttgacggcgtaaaccaaaccctacagcagttggtttcggtttagttgatgcggttcagttttgaaaaagacaaaaaaaaaaactgaaacgaagaaacccgagaaaacgaaaaagagaagagagtaacggagagatttgagagagaatcagaaagcgaaacgaaattcagtatccattgcttcaaaattcgacataacttcgaattgttggatagttgaattgagccactgaactcccacatccggggaagtgaaagttactgtttttctcggcgaagccaagagaaagttactgtttattccggcgaaatttgaacctccggcgagatagcatctttagctatg

SEQ ID NO: 9306 - DNA, 3000 bp, Unknown
  misc_feature (1)..( 3000): cDNA_ID_2035053_gDNA_ID_1972068_Annot_ID_178462 3000 nt of promoter + ATG
gtaaccgctggaccgagtttagtaatgatcgggctcaaggaaccgtgggtttcaggctcgatatagtttcgactattcggtttaaactccataggtggatcagtaagcatcataggatgcacgctaattgcaacatcgtggttggaagagacgggttgatcttgcccaagtttaaccataaacggtgtccagtctacttcacttagaaagattgattggtttgttatttgctattctctttatattttactttccttttgaatgattttgctttctttacgttttgtaacttggatttgggagtttggtttttctcattaaatgtatgatctttgagttaaacatatcaaagaaatcatttggtaaaagtaaaaacgcaaagcaattggcagatagttcaatctattacctcagtcttcttgagtctggcaaacagaataagttatggtttcctcttgctcgaaatctgagcttcaacaatttgccttctccattgatgaattgggacctgaataagaattttttgtaagatgaaacaatgtttatcggaagcaaaagcagagtccggctctgtttttttatactggcttatgataaaaaatcaaagcaaacttgggatcttggaatcagatggaagtgaagactcaatcgaagagaaagagagatgcttacagcaggaaaaccgccgtaatcccctggttccgtaatgtttttagtaacacaactattagcagcaagtcgaacctatagtcggaaaccaaaaacggatttagatgaagcactgcacaatttcattactccaattatgtttctatttttttaccttggatacaatggagacatggtctcgaacagctactcgtcctcctagtgctacaaagtcaccaatcctacaaaaaataattgtcgaaaagacgagaagcttatagtttcaatcaacggaacataatagttatttggttgctgggattagaagcatttactctgctgatccagctatgcctacttggccacagaacaagcaacatttgccaataatcacattgtgacctatctgcaatatttaagtaaacagaatagcatctcagttgtcatttacttgtgatctatgggggagttgcaagatagaatcgaagagacacctgaactaagttgtctatcttagtatcatccccgatcacggtatctctccagctgcataaatagtaaaggatatggagctagaaaagagctttacagggaactagttcttgaaatattctgttacctgccccgatcaatgcatgtgtttgctccgatttccacacgattccctatcttcacatttaaagtctagggagagcaagaaacagaacaaaggataaaagtgatgcacaattgttatccagattcaagagagcaatctaggtgtgcttacttgaggcttcttcaccatgtttccgttgtcatccacgtaaaacccaaatcctgaacagttaaaaaccaatctcaattcaatgccaattctcagaagataaagaagaaaacatggacttggtccataccatcttgaccaatgcagactccattatggatgacacataaatcaccaatactacaattgctgactgaaacattatacctgtagacaagtatagattctttcaagattctcttcaaaaacatgtataagacattaagcaaaaccgttacccgatctttgtagaagggccaattttgactgatgatccaattacagtgttggatcctatatgaacctctgctcccaatatagcttcttggtgaaccactgctccaaactcaaccagagccgaggaatcaattagggccgaacgatggtacattcctcctccgtttcgccatcttagaaaacctttctcaacattacctccactacttgtctctaatcttgacagttacaacaaaacacaagaagtatcagcaacaatcatttacatagaatagtcaccacctttacacatataacatctttccaccatctaaatatcacaatccggactctttaatagcgtaaaatgtttcatgcaacaattgtcatcaatattcgttcatcacaatgctgttaaatcatatacagatcatgaacatctttcccaagcatcataataccacacatgtcagaccttatacacgaaactgatacgaatctaggaatttcactgcatattctcagaggcattccaacaaacaccttgcgtacacgataacttgataagataaatgcaaacaaaagtcaaaactttaaaggtacaaattcttaacaagactaaccgttatgtggagaaacattaacagtgacggattcagttgattgatgagagcaaacccttaaatttcggctactagagaaaaacctagaccgcttgttcaaaaagacaccatgagtggacactgagaacaatgttcgcaaactatttgccatagtcaacaaaatttatagagattcagaagaaactgaacaaatttagcgacacgaccaaaaaaaaaaaaactttgaacttgcttttttttttttccctccaaagctttaaactctttcttttaacaaaacaaattagaactaaaaaatcaacatttccatgtaatattttatactcaacaaacaatcttgaaaccgcttcatatcacttttgtaaacaatgttactcaggattggctattatgagttctaaataaaatctgatgacaaaaaaaaactattttgatgaatttataaattttatgattccccgaaacctttgaccaaatatgttttttaatcatattattatgtcaatgattacaacagcacattttaatttcattatctagacaggcctgcctaacctatggaatattgaagtttgaacataataatttgatttaaacaatcttaattatcaatgactaactgtagtaattagactttgaatcccactaattccaatgaagattatattaagaaactcaaagaagaagaagagcaaagaaaacaaaaac

SEQ ID NO: 9307 - DNA, 3000 bp, Unknown
  misc_feature (1)..( 3000): cDNA_ID_1396277_gDNA_ID_1972068_Annot_ID_178464 3000 nt of promoter + ATG
cttcatctctgttatagttgctcgtagctcttcctctttggtctttgcatccaactctagaaataatgagaaatcaagtccatattcagtgtacacaaaacgatgtgagaaccaaacatgtaactagaaaactaaaattcacctttatcactgtatcttttctctgcagattgaagagaagaagaaagattttccttgtcttgaacatgagtttcatccacttgttggtaccatctaacacagaccttaagcttcttgataatatccgtcatttgctcaatcttaccctattagtaccacaatgcaaatacatattaaagtgatttttttcttagaatctcctataatcaaccaattggttattcggttcacaaaccttggtatcaaattttccagctttagctctctcgttaagcaaagccaacacttcatcttttgtaaactcaactttaccacactcctctgtgcttcccacatcgctgttcgcatcttgtctgttcactgtcgaaagcacttgtcttcttccagtaccttgcgtctccttccttcgcttgtcaaaaggaatacttgagagcgcttcctttttcttaaacatagttcaaaaaccaacaaaattaagtaaagccacagacttttatgaatcaatttctcaagagaacccacaagatcttctcaattgaacaaaaccctaaatcaaacaattaaactgaaaaatatcgttatgacttttacaatctccgcttctctcttagaagaaggaaaataaaagaaagaagaaggcttacgacgtttggactaggtaaaggagcgcgattctggttgcgaagtggcatcttcgatggattgcttcaccttaggctcgtcaataggatccaaatctcaatcccgagatcggcggcggatttcttaagaacccgggagaaatcagacctggttttttctgaatctgagatgggaaattagggttcttgcttttttcctaatgggggagattttaagaattgaggaaggaggaaggaagaaggaggagcctgttgtttgaatatttgaaaacagatcggcggactcttgtcaaaattgtaacgttactcttctcctcgattataatattaactttcaggcccatcagcattaaacaataatcttttttttccttagatacttactctcaggccaattgacttaactttcaggcccatcaacattgtaacgttactcttgtccattaatatttaaattattattatataaagtataggctccatttgagccaattgacttaaaactcggtccattaacactagtgatattccatattttgcgtgactttttgttggctaaataaattatgggaaagaaaaaaaagtaagatattaatcaaattggtttctattttatggttaaatctttttataaaattatttttcttttattttgtataaaatgaagggttttaaaagtttcaaattcttgtttttagtttgattcgcagttaatattcgattttgggataattttggagagttattacttactttaactaggattcaacccgtggtttacagcgggcctcggttttatatgttttttttttttttttgtcatcatcatcttattgatttataaatcagcagtgtagtcacaatgtaaagcatagcttattacattaggaacccaaaaatgattaaggaataaagattggttttggagaggagctttagcaagaatatcagctggaacattgtgatgtcttcttatccaattgaaatggattgattcaaacttccttgaccaccaatgaacgtctcgtatccagttgtgaacgccaaaatgtaccttggatccgttgattaggtcaaacagcatcttgttatctccttcaaagcaaacccgtttgtaaccatgactccaacagtgctgcattgaaatgattagcgcttgaatttcactctccagagcattgtccacctttcttcctatagcctgacccgccagtagataacttccattactatcccgaacaacccaacctgctttactttctacatctccattaacgaatgagccatcaaagttgcatttgatccatcctctttcaggtcgtcaatcttatatggtttttaattaagtatttgattatatttatattataaatttataaaatatttcttttattttaaatttttataaataatgattgagatttttattggttagttgttatttagtgattaaaataatgtgttttaatgtgtgtatgtaatttaaatataagtaaagtagtaacaaaaatgtaaaatagtaaaaacggtgtaattttttttgtgattataagtttttttattattattatttttgtgattataattctttttggaatgaaatatgctcatatttagataccaaaatgaagtagtgataccaatattgttgaacggttaagattgtctactttggatgctaaacatgattaggtatttgaattcgtgaataagtgactattattcctaacccacccgaaattaaaaatgtggatcatataaactttaatagattgaattgaccaaattattcttaatggctatgtacaaaatccaaaattgaaattgaggccaaaattatctatttttcaatttgtacttttttttaacaataagggatttcatttatttgtcaagttggattggatttaagttacaatttgcttagatattatcgaaaccggttttcaattaactttgactaggtttaaccgaattggtcaatttccacgtcattcagccacgtgacaatcgcattctgggaacactcgatctcaatcctatgtggcaaaactgagaatcaagaaaccacgtgtcaacatattagtagttaaaaccatatccgagtaatctaagtaacaacgtgaatcagataaggtattctttgtcacataaccaaacaccaaaaattataactcaacacttcactaatcaattattcaaagcagataaaaaaaaa

SEQ ID NO: 9308 - DNA, 3000 bp, Unknown
  misc_feature (1)..( 3000): cDNA_ID_2035028_gDNA_ID_1972068_Annot_ID_178469 3000 nt of promoter + ATG
aattgtttagtattagtaaagctatttgcaaattaaattctaaacgcaaacgaaaataaacaatcatatccacaatctttattaaggagctatatgatgagaatgcaaacactgagatgtccattagtcaatcccaaaatagaaatgagcataatcatccatccttgatcaccatacttggcagtgaagtagaattccggaatgaggaaaaaacgcgacaaaatcgcaactgtgagtctttttctattctcaattttgagccatttcaccagcggtgtgtatcttccgaccaaatcccatagtacattgctacgaggccaagcgtgtaccatgttcctagtctgtgttgtcccgtgttttcatataaaaacctgggtaccagggataatgtcaaatcgtagaggaggaatagattcactgcataatccttcataagcggatttacttcagtagtacttaacaatgggaagtttcggaaatacataaccatttattgtggaaaacatgtaaccgatcatattacattttcgtgtattgctttttgattcgcggtatgagaaaatcgtgattgttccaagctcaaaaggttcgtataccacaatgagtatccttaaaggatgggtaatcctacggagccaagaaacatagagaattcaactatagttttttataaccaaaacataaaacttcgaaaaccaaaacgaaaacaaattggaaaaacgtggtagtaataatcttcaagtgtgagcatattgttccaagaaatgttgttccaactccaagaatacagcaaaaaacagtgaagactttagatatgtcttatttatgttttcttttggaaaaatgtaataatttgaaattataagttgtgtcattattcgtttatgtatatcatagtacaatatatgatagattacgttgaaagagtaagatagatagataatataatgtttgatatagattttctcgtcatacccaacaagtaaacaaaaaaccttactaactgcaacaccattggaaacttatcctcttttcattggtcaatttcttcttttcgctattgtttagtcgaactaaaacgtcattaaatatcaatcaaactacagagacattatttttgtttaacaatacaataacatggacttcaaattagttttagtggaaataatgattagtactaataaaattcgatcgcctgtcgtaataaccaactcagctcaatgtcacatgctaagaagtaagaactcctgattatattttatttttaattctgttgctagattaattaaataaaataaagtcaggaattttgttttccttctttactcttttttttgtgccgacgtcaagaacctagttgaagattgaaaatatatattagatacaatttttaattatatgttatcttttttttttttcttgtctaaattatatgtatcttaaaatcgttaaatcacaatggtttttgtggagtcaagtcaaatgcatatggtgaatgattaggagcatctaacttctggctgatagctatttgacggctacgatgcatctgtcatataaaatggaataacggccagtagttctcatagaccgctattattttggccaacagattgatcgtaagaaaatataatagttgtatacattagtctttttggacacaaaatttttgatgaaaactttaacgaagttgagacgaaaagaaaaaaaaaaaatgtttctcatgaaaatatagttacattacataaggaatgcgtatggtaaatgtttgttttttgaaagttttattatgataaaattattatattagatttatattttttttatttttttgtcgaccgttattaattatttttttattttttgttcaaagatattaattgttgcattagataacataaaatatatataaaaaaccaagatttgttcacaagataaaaaaccaaaccaaatccaaatttcataagatattttctacactaactaaagtacttcaatcgaacgattctgttacaactttgtaatagtaaataagtaattagatttctgagtaaaacatagattatcaaagtcgcttttattattgttttgtttgcaagactcgtgcttacaaatctcccattgtaatcaactatcgttttctagagtttgtttcagtcattcttacactcttattgactactcttattgattattggaatttttttttctttttttttttcaatctttgcttttattcattgaaacaaagaacaattacaagcataagagttaaagaactcaaaaattaaaacattacaacaaaaggtattctccaataccataaaaaaaaaatctaaaattcatcgatttgaagtccatgagagttttaaggcaaagacaaagaaacacaatgcaacatatgagattatagagaatctaaagatcattgttttattttgttttattttgatcgaaagattacagaaaatcaaggaattgttttattttgttgatatatttttgtggtaatatttttaaaattactttttttctttcatataaataaaattcgatagaaattagtatttatatatatatatatatatatatatatatatatatatatatctgtatctcatttattcaaaattatcatttgtgcaaatcggttaataaatgtcgtttatgacactaacgagtaatgagtggtgataataatcaattcggtaatactctcacatttataaattatattaaaatattcaaacggttaactaattatattactttattttttgtgcaacaaactaattatattacatgagaaaaaataatgctgtgagaatgcggtacatgacagccacgtatctctaacatatcctcttcccgaacattcaccttaataatttatatggtcgttgaatgaaatcgaatcaaaaaaaacaaaaatccccaaattaccaaaatcctcggcgacaaagaggagagatagagagagagaaagaggcgaaaataatg

SEQ ID NO: 9309 - DNA, 3000 bp, Unknown
  misc_feature (1)..( 3000): cDNA_ID_3041184_gDNA_ID_1972068_Annot_ID_178479 3000 nt of promoter + ATG
tcaaagtgtttaaagttccatttcttgctttgtttgtgttttccctgttacagtgatattcttagcaatctcaaccttcatagaactactctgcgtgattttatatgcatatgtgttcccaaaactccccatcgttaagtattaccgaagaaaagccgcttctgaaggatctaaaactgttgttgctgatcttgctgctgctggtatccaaaatttatcagatttggtaacatcaaactcctcaagaattctttcctttcttggtttctttaaaaaaaatcatcaagaatatgtttcttgattcattctttttttctacaactttcccactctttaaacattatttagcttcatgatttttctacgcagagtgatgatgattccaagaatcaaatgctaagaaagaaagagttgttgcttcaaaacatagaccatgcagtgaatctattcctcatctacgttttgacattatccatttttcctggattcttatacgaaaacacgggacaacacggactaggtgattggtatgcacttatcctagtagcgacatacaatttttgggatttgttcgggaggtacgcaccgctggtgaaatggctgaagcttgagaatagaaaggccctaacgattgcggtcttgacccgttatttcctcgttccggcattctatttcactgcaaaatatggtgataaaggatggatgattatgctcgtttctattttgggattaactactggacatctcactgtttgcattatgactatagcccctaacgggtacaaggtaatctatctactctccctatgctgttaaccaaattaatttgaatatatctagaaacttagattagttcatatttagaaaacaaaacacattatctttacaatttttttgtgttataccctttgcttttacgatttgaaaatataacacaagttttttttgacatataaatacaaacactataataaacaaacgacctctaccttcatatttaatctgattttgtattttgtgaagggtccggagaagaatgcattagggaatttgctggtggtttttattttaggaggagcagttgtaggaatttctttgggttggttatggcttattggcaagaaatatgctttctgagttctcatcattttgtgcaattaattccgatgaatctgactctttatggcaaaaaatgagaagcttggtgcctcgctcgaacctaactgtttattcatgaaaaaagaagaagaagagaatactaacacgtaaaactttcgaaagcttgaagtgatgaattcttatttcgatgcttcaccaaattataaaatttcactttttcaactccacaatttgctgtatctattttagttaatattttagacccatttgatcattttattaactattttctaaaatcttatatggtgttatttaaccatagatttttatagaaactaaatcctaacagtctacttttgtttgatcactgattataattttatgcattaaagtttagcattgttccatcagatatttgtaaaacaaaattaatagcaaaataaagtcattcatttaagctagtaacggacggttttcttcgagagaaaaccagtccggagtagaagagcttacatgggaaaacatagaacctcgtgctcttttcttcttagcaagacaatcagcagagacattgtttaagtatgtaataaaagataaagaaaaacgagaaaaactaggctttgaagcattaaaatcttttcactccgaagaaaaagcggactactcatcaggagtgttcaaaagttgtgtcgactccttactatctgtctataaaataatgtcgaaaatggataaaaatataagaaatcgtattgcccataagagagcctcaacagatatttgtaaattatatttaagagttttaaaatttggtcttattaaccaagtgttcatggccaagtgctttcgtcatgttggtccagactagagaacacttcttttaatcatgaaaacttaactcattgtttcctttatgtaaacattttaaagtggcaaaagttttttcttaggtatctacaaatattgagaactagtttcggttacgatccaaaaaagaagtaggtgttatttagttaagattttaaatattttgctaaaataagatttcaggcattttcgtgtaatttacaaatacaaaatgtagtgtgtaatttagacccatatttcctttcaaactaaccgatcaaaacattgatcacaaaatccttgtgtgcaactaattccccaaaaaagaagaggagaatactaacacgtaataatcaatttgaggtgaagtgtttatttatttattttgctaaatatttgaggtgaagtgttattttgataaatgcttcacttatcctttttcttttttacaacaaaattagttcatccatttaaattagaaacggatgattttttttaggagaaaaccagttcataataaaagattttatatgaaaaaaagataaaactttgtgctttttctttttcggcgaggcaattaataccaatattgtttaaacgtaaaataaaaagataaagaaaaacgataaaagttaggttttaaaatattaaaattttataattctagaaatgtccaaaaactaagtcaactacttcaaatgcttcacttatccaacttcaccgattctcatcgagtctatttcatacatagtttttattttcatttattacgtttagaccgatctcacagatatgtggatatttaatgattaaggattttaaagaaagttttgctttcatactatatcgtcaacaagttgtctaaaaataggaacataaaaaaagctttcacactttgaattctttaaattctataatcttttctttttctttttgagtcttactttatcctttcatatttgctgtcacaccttgaaaaggtctattattttactcgctcatctcctctttttaagaatcttgttttgaatcttc

SEQ ID NO: 9310 - DNA, 3000 bp, Unknown
  misc_feature (1)..( 3000): cDNA_ID_2034982_gDNA_ID_1972068_Annot_ID_178482 3000 nt of promoter + ATG
gaaaaattattgattgtagagaggaactaccttttggattaaatttttgtaaaaaattacaaattttttaaaatctctccataaattaataattattaatttatcgataaattaatacctctctaaattaataaatttttgtactattattacctagaaagtgaaaattgacctacaaatatatcttcaatttgattcacatatacgaagtcacgtatgtttctataaatttagatccaaaatgtgtgaaaacccatctgtttttgcaaattcttgcaattgcaattgcacatgtttctattacgtttaaatcaatcgagctctaagtgatttatccatagtgatatacagatccaatatccatgaaacatatttaattcatgaaaaggctcaaacattatcaacaaataagatatggtcaactatgtagtaactagtaacacgtaggctgctgctctttgtggcaaattcatgcgcaagcaaagcctctagatgtttgacaagttactaccctaatatagcatcactagctatcttctaatttttttttttagttattttaatcctgtattcttttatttatttatttgataaagtgatgaaattttattctcctttttcttatcaactaatatacttattcattcacataatttcgcactttgcggagttttcatttgtcgttaaacccgacagattcttgaaccgcaaggaacgagacattaacctaatgtacttatatttaactatagtattataatagcataaatgtgacaatgattcgatcactactaatatattaatcaccaatctatatcgtcgtccttcctgattatttgaagattttgtctataaactagctgcttttgtttatgtatttttattacttggatgcttttgtttgttggaatattcgaatgaatttttgtttgcctgaaactatgcatatataataaggccatatgcgccaataatatagaatccaaatattcattaactataattagtttgttctagagttttagctactcatatattcaaattcttaggagatcaaaaaagtacttaattagttaataaaatccatttttattagttgtaattaaatgtaaagtgtcgaaacacgaaagggaagatgagttgcacaactcgtggttcctataagagtgataatctatctgacgtcacgccatgcaaaatgtatcaatcaattttcttctcacatttatatttacttcaaaatgattataaagccacccaatgaataataagatatatatatatatatatataactcaaaatcaaaaatttcaaatggaatttggaagcatcacaaattcacaatcatgtattcaaaatctcacgtagaaaaagctaataagtccaaaagattggtcttcatttttttcttgagaaagtttgatgggatagagagagagacagagaggaacagctaaatttgctgtgtatgtatttaatacttgaacatttatttatctattttcttatacatcaaactcacgaatttataggttggtaatgtcgtttttataacattaataaaaattgcaattgtagtttttattgaaatttacccaaaaaaaactattatacgaaaatatgttatttatttaaaatttgatattagatgaatccagaatcttttataaaacttggtgtgtgtgaacctgcgttaatttgttaaatacttttcacgtaaaaatcaaaattaattttaaaagttatgttaccaaacagtattctgatagttttacaaattttatccattgtatatgttttgtttttgcaaaaaagtccaaaggaaaaaacaaagcagaagggttgaattgtgaggaaagagagagtacgtggcatcataactttggcgacagctaatgtgaaaacagccaaaagctacggagagcgacactcctcgacgacgtccatgtctctttagattgtgattgcattgttaattatcatatttatcaattgattagttaagtcttaagtatcatcacacaagtttatacattaatctatacagtgtttaacactacaaaactccccaaaatcacgtgtttcatatcatacgtacatttgtctaccgtctttattaacaatattaaaacagaatttatcaattttctagttgaatagactatatactattatagagactcttataaattatgaaactcctaatcaattaaaaatagttaatttgaaacatatcactcgaaactagggtattagttggattgacgatatttttcttattaatatcaacgagaagaatcaagtgtcgttagctcaattggtaaaaaatttaggcaaagcttagagatgtctatttgagtgacgcttggaacaaaaattacatgctatggtttcaggcctagagaaatgcttcgatccagaatctcttgatattcaaaaaaaaaaaaaaaatcaacaagaagaatgtataaatggtttctatactatctaagttatgaaaaatatttttggttacccaaattacaagatttgtaccgaagtgtcacactagattcacatgcatgcatagttataattaacttaaaacataaatgacttacaaaaatacttacaaacaaaaaccaaattaagttatttagtggccagctttgttactagagttttagccattatcataattcacaataaggtgtaggaaaaaacattaatatatagtatgtatacatccaaaaaaaactttttggaaaaaacaaattttgggattataaaggacacgtagcccaatcgatgaacagaggacggcaccgaatcaatttgacttcaccttttttccccatatgataagagtctcatctctttcctatatatatttcgtacctctctttaaggaccctacgtctctctctttctctctactctctgtttcctcataattcaatcactatatttttttaaaaacatttgacttcatcgatcggttaacaattaatcaaaaagatg

SEQ ID NO: 9311 - DNA, 3000 bp, Unknown
  misc_feature (1)..( 3000): cDNA_ID_2025014_gDNA_ID_1972068_Annot_ID_178492 3000 nt of promoter + ATG
tgaacccaacacctccatatgggaaatttactactagactaccaccacgttgtttacaatacaagaaaatgacatgaaaacgattgtagtttataacattgaaccctaataggaaccatgaatccgagagagaacatggcaaaaactcaatttctcattaatgaatcagaaagtttgttacatcaatgtatagacaacaaaccaactaaaccaaaaataaaccagagattcactttaattagaatgaataaaccgggactataccgaacccttaatgacttctattatgtacaaatatacttagtatagaaactatacacaatctaataaaccctaacactttcgagatgatttagaattgaaaaattagtataaaatgcacgttgaagaaaaagcacgattgacatatttttataaatagtaaaaaaatcttggtcaaattcgagtagacaaccttatcaaaaaaagaatttataaattagacgacaaagtgaagcaaaaacagaaaacgttatctagaaaacgattaaatgaaacatcacaacctaatttcttcgtcaaagtaaaaaacatcttatgattcataattatccaacggaaaacgacacagatattataaataacttttccaaataaacaaaaatgaattaaagtaataaaatatccattcctcttcgatcatatccacagttcccacaccaacatgtcgcgaaagttcctaaaaccgccacgtgtcagtcacttatccaacagtaatccaattattcgtcaagcctccggtttattaccgtctaaaccggtagctcctcccaaatcatatggctcactcacttctccgtctatataaacaaaacatctcttactcttcacaaaagaaaaaactctcttcggaatctgaaaagccataaatcagcagaaaaaaatcttaaggatcggaaattttataatcggatgaatagagtgattagtcagttttccggtaagttgatgaaggagaagagtgttaccggtgtaagcggcggagatacgactttaagatctgccgtcaaagaatcggtctcgtctccacagagtgcgtcgtcgtcgtcgtcggtgaggaggcttaaaggagatctggaatcgagtcgatttggtgcggcggcgagtgagaggctgaggcaagcggaggaatctttgaggacggtgatgtttctgagctgttggggatcttgttagatctggttgagaaaataatagatgagaaaacgaaaccaaaacgtttctgtttgtgtttttgagttttggatttttgttttctctgtgaatagttttttttttttttcgttttctttgtactttgtgttttatgtaaatcatgtataaaatgaaaagtaaatcaatgaagataatggtttgtcttcaccaaatcatgtatttacatgtggatttgaactatagattatacaaaaaaattagtttgataaagacgatgactcaaaatgtaataagtatgttattttggattttaataagtcgatttttagataatgtataattggtaaatcgttaaataaatcgatatataaaagttgtattctaaactcagcaaattgtcataccatgcctaaataaaaatgctgaaataggtagatttggtccattttggttgatactagaattgtttgaagtctacatttacgattataataatggataacaagatattttgtaagatgtgagatggtcatatagtttggagttgtcaagctataacgttaaaatggtacaattatttatcaagctaagcgaagatttacagcggatttttgacgcatttttaatcgtttttgataggtctgggcaaaatatctaaatctgaagaaccgaatcaaattcgataaaaatttttgatccaaacttgaattcaaaactttaaaatatccgaacggatcacaaatttcaaaactcaaaaatccgaattcgaaaccgatccgaatatgaacccgatcaagtatccgaacatatccaaaatatatacataaaaataatttaataatatttacacaacttaagttcctaaaatatttgaattttaaaatattttgtatattttggatacttaacctacttttcaatagatttggatagaaaatactcaaattttgttagaaaattttatatatttttaagtaatttaaatattttgatacaaaattttgattttggatactcgggtgaatccgaaaaacagatccgaatctaacttagagtcttaggtggtgttattcaattatggtgttaaagtcaattatttaagctttagatttgttttctgatattgcttttaagaatatgtttgtatgaatttcaaaatctctgcaatatgtcttggattttgattttaatgatttactcatgaaactccaaagagctttcatttcaaatcaattaatatacaaagattttaaaagtcttttagttttgaataacattggattttaatgaaatatttcaaatcttaattgaataacaccaaactttagaatctattaagcatgatttacaaatatgagttccaataacactagattttaaagctggatttagaatcattagttaaataacagtggattagtgtggatttcaattctattaaaatccattaacgaataacacccccttacaatatccgaatggatcttagatttctaaatttggaatacccgaacccaaaaaactcgactcgaacctgatccgaccccaatccgaatacccaaaaacccaagccttattttttgagtgtaactcaaccgtttttattgcttttcagaacgcaatcactacaacaaccaaaaagtaagctttaagcgaatccaaacgctatcgtattaaacgctattactatctgcgttttagctcttcatcttcttctccacttcagatgactttctcgcttaataaaaaaacactaacccaatcaaatccactttaatccttccctctctcgcgtccgattctccg

SEQ ID NO: 9312 - DNA, 3000 bp, Unknown
  misc_feature (1)..( 3000): cDNA_ID_2034963_gDNA_ID_1972068_Annot_ID_178489 3000 nt of promoter + ATG
gatgtatacaatgaccattttttgaaaattggggaattaaatgacatttttcccttagtaaaatacttaaataaactggatatttacttaatcgagaagaagaagatgttgttttgttttgagaaatttatttttattgggataaagaagaaatttatgcagctggagaagaactttttgtaaatcatgcctaaattaatgaaatgaaggaagtctaaaagtaatatgcatcttcgacatcactttatatgatatatatgtttgatcttcaatcatcaatttgtttatttgctgaaatcagagaacaccattagtctcaaaatatgttgacttttgcggtgaaattgaagctaaagagcaaagaagtattctaataaaattgctgacctgctaaaaatgtttgtttcaacaaaaagtgtcaaataataatcaagtagatagtactctaagaaaaaacgaatgagaagcgatagtcttcttgtttccttttgagtggtagtgatgattacaccttgttgttggtggttcccttcctcttcttctcttttcgtttgctgttcctctctcttcttctgcgtcttgcaatgggatcatcaatttgcactaaacttgaaacgtaacagctagataacataattgcggtataagatcttgcagtgtttccaagactattcatttttttcaagtagccatcatctccaatgatgtaagaattgatgtgagaattagatcttttgcagtcttcagattcgactttatcaataaccaccgcgagtttcttctcctcgtcaatgaagaaattgttgtaatctatatcaaaccaaaaatcaagagcaatgagttgctcaatataacattttaagaaggaggtccacgatagtgcattgggctctatcttagtagtaatccaaatctctatcatagatgtatccaagtgctgatataaggctacgagtttctcttctctaacccaggatagactcatccaaccatgctgaaaaggtggatcaagaagctttccaaatctttctgccgtaaaatcaaaacagattagtaaatttggggtttcatctatcgtcctaaagtaagtatttccctttaccgatgcactctgcccatcatcatctatatcccacttgggaatgacatcaaaagccctccatgaataagacttcaaatcgtaaatttcgtatgagccctgtttattatcgagaaacctcaatatcttgtggtttttgttgttgtcatatctgagacaaaacgtggaatacatagtttctgttttgagttggatccacctgatttgccccaaatacgggttccaaatcacgagcctagtatccgtggtgacacataacaatataccgccgcagtaatacatatgagatatctcaactttattaagaaaattaccaatctcctttactgataagttaacgaattcttcaccattttccttgaaggttccagagatattgaacctcattgaacgaagcctataatcagacagcatgaacccttgatgaaactgctgttttggttttgctttacatagaatccgatctttggataaagcgttccatcctttgcaagtggatctcactgctcctagggaagttatcggaaccctagacaatatctctttcaccaaatcctgcgtaagatcgaacatcatcgtcattattttcttagtatgtagaaattagggttttcaactctttagctagcccactcttttctacgattattaatataggtttctacaagttattattttattttttttggtagtaattaacgtaaacaagtgtcgggccctttttaataactttcactaagataaataatatgcggtttctaatcttcgggaaatgttaaatatacaaaaaaataaaaaggacatgtttcctcactaatggaaattccgtatgtgaaagtattctctttctgtatttagttttttattttggatcaaaacctgctctatatttctattattaactttctacgacacaactaccacatgaacaaagtctaaaacataaaaattaaggaggtaaaaccgctgtaactgtcagtgaaactgcttcaagtccctgcggaaacattaatacataccgataccgccgaatgggattagggcatatggttatcacacgaccactcttaaattttaaatactcatttttgacatggttaacgacacgaaaccggttaacgacggggaacagaatgatcaaatgacaagttggagtagacatatcttgtattttctgtagtgagcaggtagaagaccgagaacacctattctttacatgtggatatgctaacgagatttggttagggctaagcaagaaggttatgggtcataattaaattctcaacaagatggaatgatattcaaacagtcctcatagacatgtctttggggatgcattgcctattcttaacatggtacaactttcagctctattcaatttggagagaacgaaacagttagagtgaagaagtattgatctatatgctaagtataagagactctctaagtgtttcagaaggtttcagggtcaactggttgacgagctaaggagatcgtgacacgtggagcgatccaatccgtttactctcaacggcattttcttatcctttactcgtcttattctgtttcctttcagtattgttgtttctctgtagatttgattgatttagaaatttgttgaataagagaagtgagagagagaaaacagaacgattgtagagagagaaagctcgttttgagctaagtgcttttagtgaattccggagacatctccggtgagacgtagggttcctcatcggagcctgaactcgtaaaatcttgtgtgtctcttttaaaggttctttgtgttcaatctcacacgagtgtccgatcgatttcgttagtgttcttgagggttcgaggatcacaaattggtatcagagcccaggttctgagctcaagaatttcagatcgattcaagg

SEQ ID NO: 9313 - DNA, 3000 bp, Unknown
  misc_feature (1)..( 3000): cDNA_ID_3041167_gDNA_ID_1972068_Annot_ID_178511 3000 nt of promoter + ATG
tccatacaattcttacttctagagatccaatgcataatgtgcccaagaatattgaggccagagagcgtcttgctttctttagcaactctctctttatgactatgccccaggctcccagtgtagaaaagatgatggctttcagcgtgttgactccttactatgacgaagaagtgatgtatcgacaagaaatgctccgagctgagaatgaggatggaatttccaccctattctaccttcaaagaatttatgaagatgaatgggtgaattttctggagcggatgcgtagagagggagcagagaatgagaatgatatctggtcaaagaaggttagagatcttcgcctctgggcttcatataggggacaaacattgtccagaacagtgcgagggatgatgtattattatagtgccttgaagaaacttgcctttcttgattctgcttctgaaatggacatcaggatgggaactcagattgcccctgaggcacgccgttcgtactacacaaatgatggtggggataacacactgcaaccaacaccttctcaggaaattagcagaatggctagtggtataacccacttgcttaaagggtctgagtatgggagtgcaatgatgaaattcacatatgttgtggcatgccaagtttatgggcaacataaagcaagaggggaccatagagctgaggagattctgttcctgatgaagaatcatgacgcccttcgtattgcatatgttgatgaggttgacctgggaaggggtgaggtcgagtactattcagttcttgtgaaatttgatcaacaacttcagagagaggtggagatctatcgtatcagactgccaggccccttgaagcttggtgagggaaaaccagaaaaccaaaaccatgctctaatctttacacgaggagatgcgattcagaccattgatatgaatcaagataaccattttgaggaggctcttaagatgaggaacttgttggaatcattcaagacttactatggcattaggaagcctactattcttggagtccgtgagaaagttttcactggttcagtatcttcactcgcatggtttatgtccgctcaggaaacaagttttgtaaccttaggacagcgtgttcttgccaacccactgaaagtgaggatgcattatggtcatccggatgtatttgatcggttttggtttgtgcctcggggtggaattagcaaagcctcaagagttataaacatcagtgaggatatatttgctggattcaattgtactttaagaggtgggaacgttacacaccatgaatacattcaggtaggcaaaggaagggatgtgggtttgaatcagatctctatgtttgaagccaaggtagcgagtggtaacggtgagcaagcattgagcagagacgtttacaggttaggtcacaggctggacttctttagaatgctctctttcttctacacaacggttggctactatttcaacacaatgttgatagtatttactgtttatgcattcttgtggggtcggctttatctagcacttagtggtgttgagaaaatagcaaaggataggagtagcagcaatgaagctcttggtgcaatcttgaatcagcaatttattattcagctaggacttttcactgcacttccaatgattcttgaaaattctctcgagcgtgggtttcttccagcggtttgggacttcataacaatgcagctgcaacttgcatcgtttttctacactttctccatgggaactcgaacccattactttggccggactatactccatggtggagccaagtatcgtgccactggaagagggttcgtggtggagcataagaaatttgctgagaactacagattgtatgctcgaactcatttcattaaagctattgagctcgcgattattctgttggtatatgcggcttatagcccgttggctaagagttcgtttgtttacatactgatgacgatttcgagctggttccttattacatcttggattatttctccatttctgtttaacccttctggcttcgattggctcaaaacagtaaatgattttgatgatttcattgcatggctatggtctagaggcgggttgtttacgaaagcagatcagagttggtttacgtggtggaatgaggaacaagagcatctgaaaacaaccggagtgtggggaaaactgcttgagattatacttgatcttcggttcttctttttccagtacagtattgtgtaccatcttcgcattgcagagaatcgaaccagcattggtgtatacttaatttcttggggatgcatcatcgggattgttgcgatatacatcacaacaatctatgctcagaaaagatattctgtcaaggagcatataaaatatcgattcattcagttcttagtaattctccttacggttcttgtggtcgtgatgatgctgcagttcactaaacttacagtagttgatttgttgataagtctcttggcttttgttcccacaggctggggattgatttctatagctcaagtactgaaaccgtttctgttatcaacagtggtttgggacacagtaatctctgtggctcgcttttacgaccttttctttgggctgatagttatggctccagttgcattgctttcatggttgcccggttttcagaatatgcaaacacggattttgttcaatgaagcttttagcagagggttacagatttctatcattctcgctggcaaaaaatccacttgaagcaaatattgggtatggttcagaataagatcttctttatatgttacactgattactattaactaaacatccattaataagactgatttcatcatatttgcagggttcttaaagtttttgaaatgagttggtctgagaaggttgggcgatatccttttctctagcaaaaaaagttttgcttgaagcagcttatggtagcctggtttaatatcatcctccaccgttttgtggcattgctccaggttaagcctggtttttcctcatg

SEQ ID NO: 9314 - DNA, 3000 bp, Unknown
  misc_feature (1)..( 3000): cDNA_ID_1989590_gDNA_ID_1972068_Annot_ID_178500 3000 nt of promoter + ATG
cgtcgtttcaccttatctatcatgttttgatatgggggaatgtctcttttatttgcattttaaactttataatctttgtgttattttttatatatttggtttgatttaaatgaataaaaacaagtctttatctaaacacaaaaggacccaaaaatggtcaaatttgggtaggtctaagagtgggttgtcaatctccaactaaccatgttttgatgtcccaacaagctcttgccttcagatttgctagtcctaattattctttgaaattataattcataataactaatgacctaccaacttcatcatcttccactaatctaccgagtaacatgttaggatttagccaaatgtcatttccttagttttggttacaaccacaataaaaattattatagtaccctatatatatattatcattcaaccgtagaacatgcacaacgttgacaaaataccccaaaaatgtcatttcctttgttttactcttattttctaaacaggtgattttggattaaaggttacttaattttggattttattataatcgtcatgtaaattttctaatggtcaagagaagaagacttcaacgagaaacgacttttttggcattgaccaacaaaaaagtgccactaaactaccatcatgggagtaattacaaaagctttgcgtagtcaaacattcggacatcaaagacaaaaagtacacaatataacaattttaggtggaaaaaacaaccaaaaacaaaaatttgacgcgttttcttgttaacaggagtattggttaatacttaatagctttaactatgcattgtaaaaataaatcataaaaggatcaatgacgatcttgattgtttagaaaaaaaaattatttcaaaaagatttattttttaggttttcaatgcaatagttattagttataattgataaattgtaaactttaatacaaattattgaatatcattggtttagagttattgaaaattgtaaatcacaaagaacaatacatttaaaaacaacatttaatatgttttcttaatatttgtgtttttcctaaaagattaaacaaaaaagaacagaaagaatatgaaataagaaaaaatgcactagctttttttgtttgagttaaaaaggactatatttattaagaggtaaatagtatatcatttttacatgttttaacgctatgtaaacgtgattaagttacttgttatcaaataatcaaaattttatgattttcatgtttttgaaaaatgatattgccgtatactgtgaatgtgtaaaaatataggtgaaaaaaacaaacgccaacaatctattatgcttaataatgactcatatataagaatagtttgctcatttcttatgctttgttaattgttgttgtatgctaagagaggattgatgtttctagtgatgtgctaggaatgttctcatgtataggatgtatcggatcttgaggttaagaaatagagattcacatttccattcttaacacaacataaataaggattaaggctaatgaaaaagagttcacatattacacattttactaattaatcatggtgattagataaaggtaacaactaaaagtcattttaaccgcactcaatattacgagcttgttagaacactgtaacacaagtgttctcttccagtttatcaatggaggaaactggtaaaatcccatggacgatcttcttctctcatcctctgttctcttgtttcatttcactctacactatatttcttctttatttccctcaagattctcttcgaattcttatttcccatgtccctctcctcatcggagctttcttaatctcctgcctccatctcgggtcgacccggaaatccattgcccgacccggaagcaatgaggattcgataggacctgaactcaaaacgggtctcggtttaaacccggattttatggaatggaactttaaattgggagctccattggaagttattcacaaagaagaagaagaacagtcgatgacgggtgtaaaagatccgacccggttcgtgatgatcaagaggtttccatcgttatcgatgtttaacccggaatctgattccgaattggaccgcgatttcccggttatgagtgaaaatgatccaacccggttcgtgaggctggaaaggtcaattaaaccggaatctgatatggattacgactccgaattggacaacaatttggttattgatgtaaaagatcgaactcggttcgtgaaggtggagatattcccatcgttgtcaatctttaaaccggattcgaattccggttcgccggagaaattgcgttgtatatacgaaatcaaaacggaaacgctttttgtagttttatattcctggagaacaatattctaacaacttgttttggcagcaatattctgatttctgagtataatttgattcgtcaagtaaaatctaattttataattctcaacaaacaaactcgaatttgatttctctaatgtgtaatgtcgtcacgatttacgtataacatattaaaagttgtcgacaaagaaaatgaaatacatttccaccaaatataataagtaacaacatggtcagattcagagaggacgatctggcttggccaccaagattgtttgacaagtatttatttaactactatactttctcttccacaatattaataatgttttaaatgtcattattaatacgtgacgaaactgtagctctgaaataaatatattaacaaaacaaataaatattctcaaccaatcataacctcgtatttgtttttgtttccatttaaattttattttgactcgacttttacacgcatgccacgtggtcaaccaaaacgtatgacaaactctacttctccaccgtcacaatcatctcctggccccctctagatctctctctcttttcctccttagattaaaatttctccaggtttcttggcgttactgtgtgaaaaattcttcttcttcttcttctcagcgattgaatcgaaccaagagcgaaaatg

SEQ ID NO: 9315 - DNA, 3000 bp, Unknown
  misc_feature (1)..( 3000): cDNA_ID_2034990_gDNA_ID_1972068_Annot_ID_178480 3000 nt of promoter + ATG
atacattaggaagggagcatatgataagtttttttttctaactttacctaataatcaaatttggtgctctctattattgtgacgtcaatagacataaggataaatataggaaataaataacattaaattttataaacttttatgaattgtttttaattcaaaaattagttcaaactacataagcgattttatacaaactttatgacatgtggcatatttttctatgttttatttccattttcattctcacttgaaaagaaatgatatacataaggtatgaattataagaaaagcttataaatagtagtttacagttttacattgatttttattttatttagcatgttataaaataattattcttatcatcaaaatatatattttcaggttttttttttatatgaagatacatcacacaaaggatctattcatccaccatttttattaagtgatgagggtttacagtcatttttgtttttgatttgcttgggcttttcttatttttgctgatctgttcaaaaaatatgggcatgattatgagacctgatttactccatatttagcactttatcaaggttgtaaatattctttttgttaaattttattagtgttttcattgttttttgttgcatttagtatccacgtgatttttcttgtgttttagaaatcctatagtgtctttgtgtgtgtgtttttagttatgtgaagttaaaataatggaatacacacatgtagatgctaagaagagaaatgatgatcatgaacaagtccaaagtgtcagaaatatcaattcggatgaaggccttactttcgaatttagattcagaaatttagttagctttccactgatggtgatttcaagccaaacggaacagaggtttaagaattatcatcgatttagtagacacatatcattttcatgcttaagaaaagctcatccagaaattttccttcaatgccagaggttatattaacttagtgcagtaggatcaacatacaattagagactttttaatgatgtaatcatctaagatatgatccactttattttggaataatccggtccaaacaaatttatattcaaggattttttagacattttttaatatagtgagatcaacaatttttagacatttttaatacagtgagaccactagagactttttcatgatatcattatccaagatttgacccgttttatcttgggtcgaccaggtctaaacgaatttgtatttaagcaatttttagacattttttaactgaaatttgttttgtgaaggattcttcaattctatcatttatatttttgtttatgcatttttcttatatctttcaccatgtttaatgagtagtcttttgtttgatcatgagttatgatagattaggataatttgatagttaaatgatgatgatttatattgcttattgtagatttcttcatttaggttaatcttattattatgtgcaccgattatgtggttcataagtatctggtgaacattttattttaagtttttttgttaggttatacagctaacattaaaaaatagtaagaaaatacaagggataatatagtgaaaaaacactgatagtgagaacatatttcctgaagtctctcttcacttcatttggaaatggaataacttattttggcaatgagatgtttgattactgaacaataacatttggtggtttttgttcggaagatttctaaattggtgaaaatagagcagcatcttgtggggtttgatcaacatatacgaatgaagtaaaagaatgcaaagaaattgcgattaaacactatgcaattaaacctcattatggtcttagtaactgaataatctactcagttactaatgtataaatatatttttgctttatgataattattaattattattcatgtaaagtttaaattccaaataaacatatggattagtcatacctcaataattactcttttaatagtgcataatatttagttacttaattacttcaatcaagttttttttttgagttttcttgtcaataaaaaatgtcccgtttttttttattttgcatcaaaaaaagtatatataaaagaatacagagtaaaatagtattttaaacataaacttttcactttaacaaaattttctacttcaattcttaactagcggcacaatacttatttattttaagtgtttgatgatactttttctacatgtaaaaatcaattaacatatataaggtaatttttcaaacaaaaatataaaaatttcaagtatatttataaaattaaaatatatcaaaactattaaaaaaaattaaaactaattttattttgcacatcacgcgaggctacttctagtgtatatatattgtttgatgatgttgtgttttatatagagaaaaaacaaactcatagcataatgctttttaatttcgtcagaaaagccaaattaattagacaaaactacatttttcttctaaccacaccttatagagtgcttttttctttcaagtgcgtttctatatctgtgacgaagaaatacgtatcgcactgctttttcttttctttttttcttcaaaaaaagagtttgaaacaaacttaatggtgagaaataagtagaaccacacataaaaagctggaacgcgtcgtacattcacgcccttactttaatctatttggttctgtttctttttcttctgtgtctcatattatatccttccatatttgctgtcaaaaaccttttaaaagtcttattattattttacttgctcatctccttgtattaagaatcttgttttgagtttttgtgaaagcgttactctttaaataatcaacaaactcgttggctctgcaaaaccctcatgcatgtgctaagttccaagtaagtgtctatagctttctgctccaacaacaaaaagaaaaagaataacatcatccagtgtttgatccatttcttgaatcttgtaaaagggttatgttcttttgatctctctgtaacaatttcgaaa

SEQ ID NO: 9316 - DNA, 3000 bp, Unknown
  misc_feature (1)..( 3000): cDNA_ID_2035016_gDNA_ID_1972068_Annot_ID_178472 3000 nt of promoter + ATG
cgttttctccattttgctaaagactataaatacatgtgttttgtctcttaactccatctagttgatgatatacagctctctctttctgttacgtatcttaaatctgaattttgttcttttacattttcagatcaattcaattcacgtcacatgttggatatgggcttcgccccaccaacatgtttaaaagcccaacacatcgaaattagcaacaaggaaggaaggaagaaaagatcggcccgttaaagataaaagagcccagcatcaaacgaagcccacctcgaggaagttgttgatcaagagaaagtcccacatcgagaagaaaactgtactatagactgtccttgcagtactataaatactgacaaaggaatgtcagaaaaggacacctgaaatatgcagagaagagcaataaaaacttctacttcggattcaaaagcataagtctagttttgacttgtgaagtttgtatttacgtaagtttaagctcggctgtagaaacaccttgtaaacggccgaacttggggaatattaataaagatcttccttaaggctcgtcatttcctttttggtttggaggttcggttttatacaccaacatcacagtatcttccctttttaaaaaaaaatatttatctcacagtaacatgtatatcttcttctaactgtttttttttatgtctccataatggcttacgtctcacaacaacttgttttctttaatatagatagagaagacagattcattttacaaaataaatataacaaaacgtatatcaacataattaaatgatttcctgtacgtagtacaagattaataccagtatattagaaactttaagcctctaagaaaaagtaaaattttaatcaaaatttaggattaagaaattctttaaaatgtcgaaactgttcaactatttattcgtaaacgcgcatattaaatacccaagaaaaaccattatttttcgtttagtgtgtaccagtggcaaagtagtagcctagctatattattttttatttttttttgaaaataatgttaaattatattccaaaaaaaaacgtttttacaacaagtgcagattggttttgagaattagagctgagaatagttttgaacaaaagaaagaaacagagctaagagattaacttcttgactgaaaccaaacttggagacttccatcataacgcttgtcccccttgaaacagatagaggacagctgatttctaatttgtttatctatccaaccaacgagttgagatgctgtgttcggaggctcgccgtgacgcctaccattccgctccctccacacaatgtagattgtggcttggaaaacatagcggcggagaaaccattccacacggtgatgctgagagtttgtaatggcttcaattatcgattgccagtgtgaagtgtactgcgttttgaaaattcctctcgctaaatctacccaaattgcagaagtgaaactgcaagtaaagaagaggtggtcccgtgtttctagagtcccttggcaaaaaatgcagtctgttgcagtgccatttgcccaattgatcatacgatcgcctgttgggagtctaccatgtgctgcaagccaggagcagaaagagtattttggggtggcatgactgaaccaaatcaccttatgccatggaaccctagctgacgtagaacgagtatgatgccaagtatctctagtagagaaagtagtcctgaaaacatcagattttcctctccaaaggaccttgtcttcagtttccgttctagtatcccaagacttagcctagctatattaacagtaatgaattttattaggaaaagttttctttttcatacaaaactgtttccagataaccagaaatagaaaataattaaaagccttcaaattttagggggtgttattggtttattgatttgtaaatctatatagaatttgaaaatctctattaattatgaaatcaagatatatggatttttaaataacatgtatttacccatggatttgaatccttctatttttctctttcaaatccattcaattacatttaaaacataatttgggttctcaaatccaaaaataaatgactatgcgaataacaaaggattttaactagtatttataaatcatcgaatcaataacacatgattttagttagaattttaaaatcaatgattgaataacaaataattttgtttggatttccaattccttataaatctataaaccaataacccctccttagattcttatgtttgttttgtttattgtaaataaccaattgtcaataaattcaagagattttttcggaaaaacgaaaagctaaataaacaaaatatgatgaatttttctaaaactatatagactattttgttttgttttatggttgacgatttaggtcttctggattggtgttagtatttaggtttactgtacagtttaagggtggtttagactattttattaatttttaaaaacctatactattttctgagttttcaaataaaatttaaattaatatcataatttttccaatgtaattaatggtttatgtcttttatgttaaatgttaaaaaccatctaatgaacgataccattgaccaaactatgtatactaattttctttgtattactagtgttgctgtaatggtgttgttctcttaatatggaagaatatgcatttaatgatcaaaaacaaaacaatgtgacaatttaacacttgtgattttttttaataaaccatttaaaaattatgacttgtgagctaactagcttgtaagtcgtattttaacattgtagcacttaacacgattgagtcttattctaacattctaaacgtcaaaccttgaagctttgaactagaattaagaaatcaacaaacacgtttattgttcatcaagatcataaatccacaaacacgttgacacttcaagatcataatactaagtttccaaacacgttgatatataaaaacaaacatcgtaattatttgcgaagagtaaca

SEQ ID NO: 9317 - DNA, 3000 bp, Unknown
  misc_feature (1)..( 3000): cDNA_ID_2035036_gDNA_ID_1972068_Annot_ID_178467 3000 nt of promoter + ATG
gccatgagattttggaattttgcgggaaagtattcattcaatttataaaaagaaaatattttgattggggaataataatgatgattgttgcgttggaatatttggataaggtaaaagcaacataagcgtgaagtaccagctaccaaacgaagatcttgacgcgttgatttccgtatcaacggacgaagatgtagagaacatgatggacgaatacgaccgcgtcgcacagaatcaaaacccacgcgcctctcgtcttcgtctttttctcttcaccaaaaacgtcgccggagaagaagataacgatagtcgagctagcagtatcagctctctcctcgatagctctgttaatcgggagcaatggttcctcgacgctcttaacctcggttcttccgccgccgcaaccgcggtatctaacggtgggtccggtagagtctttgagcgagttagatctgaagtctcgtcgattgtttctgaagttcctgattatctctttggattggataatttcgatgaaactgctccgccgcatgagcttcgtgatcgtgatccgagagctaagatccaacgagaagtctcgacgctttcggatcctggttcgcctcgtcgcgatgttccttcgccgtatggttcgacgtcttcggctcctgtgatgcgaatatctacaccggaacttccaccaccagtttttattaaaccggaaagtccagaaccggtttcgactccgaaatccaatcctcaaccggaacaagtaatgcaacagagtaatctcccggttaactcgcaatggcaatatgcccctggcccaggccaacaggttcattaccagggtcataccattcaccaatcaccggtttattacgttcctggttcggttccgggtaatcatatggtccagcaaggaaatcatatggttcaaccgggtaatcatatggtacaaccggttcaaatgccgggtcagtatcttcaacaataccatcatgtaccaatgggataccaccaacctcagactcatcagatggctggtccgggtcaagtatatggtggaacggttaggccggttatgatggcagttgatggaatgaaccggacgggttattatggaatgaaaacacccggtccggttcaaatgtatcagcatcacactggtatggttgttcctggtgtagaagaacaacaacaatacagaaccgaaacggattcggatacgggtcgggcttcttagctgtttgaagaagaaatatgaaaaattatcacatccggggttttcgtcttttcattggagtcgttcttattcgttactgtgtgaactgtgtattattttttgttttacttttgtaaaatttatttttgtgtgtaataattttgtattacaaaatataatgaacagtaaaacccaataataataacattataatctatcaatagtgaattacatttgctaaacttttttttgtcatcttattactcgatttatcataataatgttaatggaatataatttgtcaatcatatgttcctcttcgtctttgctggtgacttgtgaggaagtagatatgtcttagaaaccacaccgaattcaatctcatatgtttgttggtgatgtcttcatagttgtaacttttaatacaatctaacaaagcataaaatggaagggaggtaaggatattgtgttgcatcattcttctcacaatcacttcttctttaccaagattgtcgaagcatgcattataaccattataaccatgcatcttaaacacatcctcccctttttttccttttttgtcgatacctttttatgttcatttgaactttctctttatgttcatttgttctacaagtactattcttgtaaaacatgttatttgtttaattgtccctactcactagtcactacctattttactaaaatcacaatttctacttttagctaccatactattcataatcgtaacaactaacacacttacatgaccaaaaatagatttttgtaccatttaatcttaactattaatttgtaaacgatctcactactattgtaacgtttagtccgtccttactagtgtgctccacgttctttctcaggtctatggactcatccctgtccgacgatcggtccgccaaatctaagaggttttaaagacttgttaacgatcctacaaatcactatacgatatttcatcatgttttatcctcatttacatggttctgataatcatttctcggaaggtcacctatcttaaaactacttcgactcaaacacgtttaactgtggagttctccgcataaattaattattttattctctataaaagttatagaaatggtctcgtcattgtactgattgacatcatcaactggagagacatcaactttgggagctgccaatctcagaagaagtttatctcctttacatgccgaggtggaagctctcctctgggcgatgaagtgtatgattggtgccgacaaccaagatgtagtttttcttacagactgttcagatctggtggagatggtgtcttccccaaccgaatggccggctttctcatcgtatttggaggagttacagagcgacaaggatgagttcacaaacttttttctatctttaatctctcgtagtactaatgttaaagcggattttttggcacgaaaagttcgtacccaaccgcttcatattacatctgtaaacaacattcctcaggattggctcgtttgagtcctaattaattttcggatgacaaaaaaaaaaggtctcgtcattgttaattattattctaattgactattcccattaaagcaatcatagagttacttaagtttgacattcataaatttatgcgactatgattaattattgactaagaaaaaattaaatactaatagtactaacattaaagacaaatgtaacgttttacgtgaagtaatcagaaaccagaaatagtcttcttcttcttcctcacacacatacttctctcaccttatcctccgagatcggaaaatatg

SEQ ID NO: 9318 - DNA, 3000 bp, Unknown
  misc_feature (1)..( 3000): cDNA_ID_2035049_gDNA_ID_1972068_Annot_ID_178463 3000 nt of promoter + ATG
ttgtcaatggtttggaaaagctttgcggtgagatctttaaggctttgcttctcttccttaggcttagcggagataacggtgttgagatcgtaacggaggtacgatgctcttaaacggagatcgttctgaacatagggccaagcttttttgtcgataaatgacttaacgttgatgatctctttagcagaatctttggctctagctgcagcttctgttggtgacaatggttgtatgtaaaatctatctttcaatgccaatgaaaagtctcttgcttggtctgagttatctgttccagctgctcacacacaaaaaaacaaaaacaaaagcagaaccataatcaatcaaacagaaccggtctctataatctaattactaaaacttttatcttacaaaagtgattaaagatacgtttgataaaaacctaaattataaccatgcaagctataacacaataatttcgttttgttatctccttaaccaaaaaaatagtattagtcattatgtgaaatttaattaaattagttttacttacgtaggccaccggaaggaagtggaggaccaccaactttgatcggaatagcttcggcgaaaacagctttaacgaatgaaccaccggctaaaccagccgccacgagtccaatcactgaccggcgactactttctggtactgacacgttctgctgagccctgatcacaagtccggttctctgagacccaaccgagactcttgagatgttcaaacggtttgagccgttgatctgtaaacttccttcaaggacagcctgagatgctccacgtaagccagccatcgaagtcactgcttgagccattttttttttatctgctttgaataattgattagtgaagtgttgagttataatttttggtgtttggttatgtgacaaagaataccttatctgattcacgttgttacttagattactcggatatggttttaactactaatatgttgacacgtggtttcttgattctcagttttgccacataggattgagatcgagtgttcccagaatgcgattgtcacgtggctgaatgacgtggaaattgaccaattcggttaaacctagtcaaagttaattgaaaaccggtttcgataatatctaagcaaattgtaacttaaatccaatccaacttgacaaataaatgaaatcccttattgttaaaaaaaagtacaaattgaaaaatagataattttggcctcaatttcaattttggattttgtacatagccattaagaataatttggtcaattcaatctattaaagtttatatgatccacatttttaatttcgggtgggttaggaataatagtcacttattcacgaattcaaatacctaatcatgtttagcatccaaagtagacaatcttaaccgttcaacaatattggtatcactacttcattttggtatctaaatatgagcatatttcattccaaaaagaattataatcacaaaaataataataataaaaaaacttataatcacaaaaaaaattacaccgtttttactattttacatttttgttactactttacttatatttaaattacatacacacattaaaacacattattttaatcactaaataacaactaaccaataaaaatctcaatcattatttataaaaatttaaaataaaagaaatattttataaatttataatataaatataatcaaatacttaattaaaaaccatataagattgacgacctgaaagaggatggatcaaatgcaactttgatggctcattcgttaatggagatgtagaaagtaaagcaggttgggttgttcgggatagtaatggaagttatctactggcgggtcaggctataggaagaaaggtggacaatgctctggagagtgaaattcaagcgctaatcatttcaatgcagcactgttggagtcatggttacaaacgggtttgctttgaaggagataacaagatgctgtttgacctaatcaacggatccaaggtacattttggcgttcacaactggatacgagacgttcattggtggtcaaggaagtttgaatcaatccatttcaattggataagaagacatcacaatgttccagctgatattcttgctaaagctcctctccaaaaccaatctttattccttaatcatttttgggttcctaatgtaataagctatgctttacattgtgactacactgctgatttataaatcaataagatgatgatgacaaaaaaaaaaaaaaaacatataaaaccgaggcccgctgtaaaccacgggttgaatcctagttaaagtaagtaataactctccaaaattatcccaaaatcgaatattaactgcgaatcaaactaaaaacaagaatttgaaacttttaaaacccttcattttatacaaaataaaagaaaaataattttataaaaagatttaaccataaaatagaaaccaatttgattaatatcttacttttttttctttcccataatttatttagccaacaaaaagtcacgcaaaatatggaatatcactagtgttaatggaccgagttttaagtcaattggctcaaatggagcctatactttatataataataatttaaatattaatggacaagagtaacgttacaatgttgatgggcctgaaagttaagtcaattggcctgagagtaagtatctaaggaaaaaaaagattattgtttaatgctgatgggcctgaaagttaatattataatcgaggagaagagtaacgttacaattttgacaagagtccgccgatctgttttcaaatattcaaacaacaggctcctccttcttccttcctccttcctcaattcttaaaatctcccccattaggaaaaaagcaagaaccctaatttcccatctcagattcagaaaaaaccaggtctgatttctcccgggttcttaagaaatccgccgccgatctcgggattgagatttggatcctattgacgagcctaaggtgaagcaatccatcgaagatg

SEQ ID NO: 9319 - DNA, 3000 bp, Unknown
  misc_feature (1)..( 3000): cDNA_ID_2035112_gDNA_ID_1972068_Annot_ID_178447 3000 nt of promoter + ATG
tttatttcttttcctttttgtttttttttgccatttatctaatgcaagtgggcttataaaatcagtgaatttcttggaaaagtaacttctttatcgtataacatattgtgaaattatccatttcttttaattttttagtgttattggatatttttgtatgattattgatttgcataggataatgacttttgtatcaagttggtgaacaagtctcgttaaaaaaggcaagtggtttggtgactcgatttattcttgttatttaattcatatatcaatggatcttatttggggcctggtccatatttaacactcgtgttcagtccaatgaccaataatattttttcattaataacaatgtaacaagaatgatacacaaaacattctttgaataagttcgctatgaagaagggaacttatccggtcctagatcatcagttcatacaaacctccatagagttcaacatcttaaacaagaatatcctgatctgaagaatgtggaggctttagtcccttggatacttgggaggctgtggaagaacagaaacgagctggtgcttaaagggagggaatttggaaccaatgaggtattagtaaggacacaagaagatgcagatgagtggattagaaggaaagaggctcagaatgtaaggaaagcaccaaccacaacaccgtcgggacagacgagaaacatgggaagctccaccacaatcttgggttaagtgcaactttgatggggcatggccaacagaaggattaaaatgtggcttagggtgggtgcttcgcgatcatacagggaaggtgttatggttaggtgcaagagctgtggtaaaagtaagaagcgtgctggaagtagaagtggaggctcttagatgggctgtgctgtcattatcccgattcaattataggaagatcatttttgaggtggattctcagcaacttgtgtctttggttacatgaaagttatgcttgtcaagtctcaatccaattatccaagacataaagtatctacttagcaagtttgaggattttatgcttgtgcatacaagccgagaaggaaatggagtggcagatagaatagctaaggaatctctttcttttgagaattatgatctaaagttgtattctattgtaccaatttgggttaaaagctctgttgagctagactgtgtatccataaatgggtgaatggaaagtttgttgttgagccaaaaaaaaaaaaaaaaaaatcatcagttcatcatattggtagtcttgtttgataagttctgctttttttaccttccagttttgccatttgatgttgcaatgagatttcttttgctaatgttttaaaataacaaagttgttgctgctagtgtttccaagttgtgtttgctgaaattagggtttgtaacttataagagaagcttgatcgctgctttcgactaaagggaattcaataacaacaagtttacttgaagaaaaatattaaaacctagaagaaaagagttacacctacaaataggataaaatccacataaatttctgttactaaatgtatcatagttttgtttcttctatgtatctacatatactcaaaaatttcaaagcattgtgacttaagggccagaagaaaacttgaagaaagattaaaacctattagcaaagagttaaagatccacataactttctgttgctgaatgtatcatagtttttggtttcttctgtgtcatatatacagactttctacagaactttttgagcacaaagcattgtgactttagagccacgagtaaaagacgaggcaaaatgtgtatcacgtccactaaccatataaactgtttcggctggaagaacacggttccactcgaatgactgatcttcgttcaatactctctctttctttctgtccacaaagaaatatccttcgtgaggcattcttatatgacccctccgaccactttcaaccaactcggttctcagtattttcacttgatccgtcgagttcacatccacctcaataaatctcttcagacctttacactcacttgaagctgccaccacatatactttaatcttcttcttcgggtcagtgatctctttgactgagtttgacgctggagattgctccatttgaggcacttgaaccgtcacagacgaatcttgaatcttactggtctcttggataacacgtctgggaacaatcacaattgtatccaagggtttaacactgttacactcgtatgactgatcttcgttcaatacttgattattgtgcgtaaagatgtacccttcttgagccagtttcataagacctctcagtgttttcacctcatccgtaactttcacttgcaccagaatattcgttgggacttcattcataccaggatatggcgacacatatactagcatctgccggactcttttttttccgttagtgatctttttgactaagtttgactgtggaaattgcttcgttggaggcacttgatcgttgttgttcttactcgcaaacttcacagacgaatcttgaatgttaacggtctctttgactgagtttgacggtggagattcctctgtttgatgcgcatcttgaatcttactgatgtcttgggttgtctcaggccgataactgtaaatctttctgatctcttcctctgtcaaaggccaatcttgctccgcaaagtactcttcaactgaaatccacggtgctggaggagattgctctgtttgcgggatttgatcgtcgttgttgtgaatagggttcacgtcaggagagacttcgagttggatttgagaatcgtggaagatctggcattggtcgaggttaagatcttctcgaagaataaaaatgccgtcgacgataagggtttgtttcgaaactgggacacgttgagacttctcgatcttctgtttgaccactaacaatgtatctgtgcgttccacttcaatctcgaacgatgaaccacccagaatctcgaccacaaacttcatgactctatcaatggtgtttcaagatca

SEQ ID NO: 9320 - DNA, 3000 bp, Unknown
  misc_feature (1)..( 3000): cDNA_ID_2035097_gDNA_ID_1972068_Annot_ID_178451 3000 nt of promoter + ATG
actgcatattaactttataacataactcaagtgataaattgatttgacagccaacgcttactaacacaagtatgacattcatttcaaccgtaattgccccaaccaaattcacagtagtggttattaaagtgaagaaattactgacgatctctgactatctcatttcaaacatggttaacccgactcttcccgacgatttactctcgaagatagctaagaacctggctaaccaatgctggtccgaccttggtccactggtacgatccggcactcgtggaagagacattgtctaccgtccggatgtcctcaaagatgccaatattctcaccttgtgtaactcgcccgatgacttccaagcttgagggggccacaatccctccggatccgctgatgaaggccgacatcgaccattttttttacggtgttttgcagctaataatcccacggcagtgtattacgaaggtattcgtgttctaacgcatgaacgaaacatcaatggagccatcaggctcttacagcgtcatgctccagtacgagcaaatgcaacagttacatgcgccattgtattcatatgtgctgggtatgattatatgggcgacttgtttctacagctcttcacccgcaaccattatccattggactcggttgccactcgaatttgggtgatgagtttcttcaaggaaataaagaagtttgaccctgcatacaacaatacatatggtcctacgttctcttatcctaccagccatggaattagtatgcctccttgcgccttatattgttacatggtatcaggagctttccaaaacgtttgcaaccgctgttacctctgatcgtgtgccaggcgtgttagtcaaatgctatagttaaaatctaaagttgaatatttttcagccaaattcgcatatgatatttagttcccgaagtaaatgtaaatttggatattaaaatctaagcgtccacaactacgtacacgtgcatctaccaaataatacttaaaggttttttgtttgtctcggaaaactagatatgtacgtacactagcatgagatatcaactctaacgtacactaaaaaataacacattcaaacatatgaggtctttggtttgtctcataaatggtgatatttatgaatggacgtacactgatagtacactacagcgtacactgtttgttgggtaaatgtagaaatgtaaatgtggacgtacactacaacgtacactgtttgttgggcaaatgtagaaatgtaaatgtggacgtacactaaaacgcacactaaaacgtacacgtctagttttaagctgttattaaaaagtggttgctcataacaacaataacaaattatatatggaatactattacgttgatttgacaatatgaatacacatcatcacttaatacctttgcaataaatacaaccataacttacccaaccatatcttcaatgatgcttatttaagtgttggaatttcattttgttaaaacaccttactcctaaatataacaaacccaaatattcatgatgatttgcttgcgaagatagccaagaaaatggctgacaaatgttggtggtacctcggacctatgttgaaatccggtcctcgtggaagagacattgtctaccgtccggatgtcctcaaggatgcaaacattttcagcatgtgcgacgatcccgatgacttctacgcggtaggccacgatccaaatgacatcaactccgaaggtcgctatagacccttcttcaaacggtgcttacaagctggtaaccccacggctatttaccatgaaggactgcgtctcgttacacatgagtctgacattcagggagctatcctacacttagagcgaatctccccaaggaacgccgctgcaacccttgcatgcgcaattctttacatatgtgctggtaatgctcacatgggtggtgtctaccttcggctcttcggaagcaaccattatgctttggaatcggaggaggcacgtgacatttgtgaggaggtgctagaagatataaagaaatatggtaatactttaaaatacacatacgctaacagtttttcgtacccggaatgtggtgacttaagcactcctgaatgcgcagagatgtgttacatgagatcgagactcttcaataatctttgcaaccaatgttacatctggttgtgtgctaaacggattagccagatcctgtagagctcacattcgccacgatcctgtcatatttataagtttttcatgcaacaatatgtgagctttttacgttgattatcagtaatggaagtttgtttttaataattatcactttgtaattgattcaaacatactagctcaaactactctaatatgagacatcattaacacaaaataataataaaataataaaatatctacgtacacggtatatgataatgtacatgtggtatagtttaattccaactataaagattacatagtgagcgacggtatagtttgtaaatgaagacgaaagaaaatttgatttgacgtcgtataacacatatctagaagatttcgctccatattaattactcgctgtcaaatacacactagaagtgacctccatcacactctcattaatatctctattagacatacacggttcccgagcaacgtactcaattgatttggcagataaaataagtaagttaatgtttatttgaaaagattgttagtaaatgcgttgacccctaatatagcactatacatgaagccatattgttccacttatatgcaatacaaacagacgttaactcaaccttctgtaagaaaacgtaatgagtattttatagacatacacggcgcgattatgagaggtacacagtagtttgtttaaattaaaagttactaatatgatgcactaaatatacatccacgtcacccacccacttacattgatgattattcccctctttaaaactcatgtcaaacacacttagttgaatacacgaatccgtctaaacctcctcgtttgaaaaacaatg

SEQ ID NO: 9321 - DNA, 3000 bp, Unknown
  misc_feature (1)..( 3000): cDNA_ID_3041335_gDNA_ID_1972069_Annot_ID_178524 3000 nt of promoter + ATG
atatacttgtggccacttcatgggacaatcaggttttcttttaattccttggctcctttgtttttccatggcttaaaatctaatttgtttgtcctaataactcttgtatatatattgtaacatgtgagtttgcttcttctattgcaggtgaggtgttgggaaatatcccgtagtggagcctctctagccagtgctcctaaagcatcaatatcacatgatcagccggtaatatgtcattcttcttcttatcttacctttttttttcttttgcctttgaatctgatgcatatacgtcctttcttgtgttgaaggttttatgttctgcttggaaagatgatggaaccacagtctttagcggtggatgtgataagcaagcaaaaatgtggcccttgttgtctggtggtcaacctgtaactgttgctatgcatgagggtcctatcgcagctatggcttggatcccgggaatgaatctccttgcaactggaagttgggataaaactttgaagtaagaatgattgttcattatttcctatgactgaatgtagcaaattatagaatgttgactgattcatttatttgctgccatgaatttaatgatgtatgttggttttccttccagatattgggacacaagacagcaaaatcctgtacatacccaacagcttccagacaaatgttatacattgtctgtgaaacatcctctgatggttgtcgggactgccgatagaaatctgatagtcttcaacttgcaaaatcctcaggttagaatttttccttgttgttccatgttataacttgcgcatgagagttctaagtgctaacaatgctgtcagcatcacatggttttgggaattcgtgatcaatttagcccatgtgctatcttacaaagaatagatgaacaggctttcaccattagattaacagtttctcttgtgtaaactgtagactgagtttaagagaatccaatccccactgaagtaccagacgaggtgtgttactgccttccctgatcagcaaggttttttggtatgtcttcttatttatgttctgttgtgttttggttaattcagttttacaggaattagcttgttcgttagatgcttacattttaggttagacattgcaatgtttttatttgcaatctcgagaagattttatgtatgtcattctagcaaaaaatagagtaattttatatgggagattgttttgctagtcacatctccagatcctatctaaatcacaatggtgttgaatatgaaaaattaaccagatccaatgatctctataggttggttcaattgaggggcgggttggtgttcatcatctggatgattctcaacagagcaaaaacttcacattcaaatgccacagagatggaaatgatatatattctgtcaactctctgaatttccacccggtaagctctatctatagttatactcttatactcgtatgtattctttgaagccttcagcatatgttgagcgatgaaaatgattgtttgagttgttgtggatttaaggtacatggcacttttgcaactgctgggtcagatggtgctttcaatttctgggacaaagatagtaaacaaagactcaaggtattttcctcctgcattgattttttattttgttaaccaagtaattatctaacagttttgtattctgtgtccccacaggccatgtcgaggtgcaatcagccaattccatgcagctcgttcaaccacgatggatcgatatatgcatatgcggtatgatataaatcttatttggtttcactttatttgtacatgctcatgttatatgttgcaaaatcgagatggtcttttacttggaatctaaaaccatcattgtgttgaaaaacctttgagagcatacatgaatgctttctaacatgtattattatataggcttgctatgactggagcaaaggtgcagaaaatcacaacccggcgactgcaaaaagcagcattttcttgcacctgccacaggtgtgtgcgcgtcacagacaatagtaatatcatcatgtttcctaaacattagtgtctgtatctaacggacggaatttgttttaaatgaaattgcaggaaagcgaggttaaggccaagccaagagttggagcaaccggcagaaaatgagcgttgcttagtctgatttcttcgctagtgattttttttttttttttagcttgtggacttcgttgggctttgttatctactttagttcatgacattttgaatatacattaggagtcttgtctaaaagactaaaagtaaatctctaatgtttctagttgggcctaatttggaaccatctcgtctcatacctctttcgtttcatcatactaaggaaatctttttttcttatcaagaatttattttagtacatctgattccatagttaaactttagttattttaataactcaaatcaataaaatcaaccaagaaatgtttatctaaaactagtataattaaaacgactaatgttttcttctctcattgttactgtcggagcaaattttcctaaatttggttattagttaattttttttttggttgtgtgattaaatatggtcattagttagttagtgaagaaagagagagagataacgtggcagtagattagtggaagcaggagaagaaagcgggaatgagcaaaggacctggactttgtccatagccaagaaactcgcgtcctcttcttcttcctcttcacctatataaacactttgtcttcgactccaattttccttcaattttatataaaaaataatttgttttcgttttttgtgtttctgtttttctcccttttgttcttctgtttcgttagaataacaacagaaaagaaaaaaagatcgtgagaaaatttcactttgaaaaagaaaaaagtgcagagagagatactttggaaaaattttgtcaacaaagaaagaaagaaagaaagaaagagtgaaaaagaaaacaaagaaacacaccaccctgtttctgtaaaacaagatg

SEQ ID NO: 9322 - DNA, 3000 bp, Unknown
  misc_feature (1)..( 3000): cDNA_ID_1024765_gDNA_ID_1972069_Annot_ID_178530 3000 nt of promoter + ATG
gttattattcttttggaactgatacactagttgatgcagttctctcattttacttttgtttgttgaatcacctttataattaatatagattacaaggatttgcaagctataagagctacagtttttttttttttaaacttgcttccatttctttgtacaacataacaaaacaacacaacatctcatgctaattcaaataggtcaagtatgctactttgttgtccaaacatagacttgtcctccagctgtggatcctgcaagcgttccaacattataaggatggcaatggattctgcatggtatagctctctgcagagggttatgcagttccatcactgttcgctttagttttggattgatcacatcaatcttctttgacaaattgcccacatagatgtatgaatcatcccacccccatactgccctgcaatcaaaatcattaccaacttcagtttttcgacaaatagacgaaatcaattcctacttcttttcatttctcataacaaaaaagagtggaaaaagagtgtattggtcagagaaatagtgaaagactcataacaattacttgtggattcttttgtcagaacacagtacattaagcaagaagtgtattggaactgagaggcttattaaggtacaagatactggaacatacttgaatttggagatccatctgctggtgttattgtgatatatcatgcaagtgttctcaaaattggcgccgcttagaacaccaatgtagttgtcaaggctacaaggaaaacaaaacaaaacaagagttcagcaaaccccagagatgcacatagggacctacattatacatcagtttcactctctctacacatgtttactcttgtctacgttgctaaaagtttatgagatgtatttatttcccgtctcaaaaccatcaaggcacaaagttttctagctaagtaaagttcccagacataattgcttcaaggcagtggtgttttttcaaatatgtgcaacttttaaaccgaaatgcacagactttatgacctcaacaaaactagaacatatattacttaatctctccaatataatgacaaacaacatttgatgtgacttaaatcaaggagattatacttgtagttcttaatgaagtgtattgaataggctgtggaaaaaatgacaagataccttgtagttgcaagtgaaaggccagaaggtgagaaataagcagagtgcacagccctagaatgattaacagtagacaatgttttcggttttttggctcccatgcttctcaagtcccaaaggcaagcagttccatctgtggaacttgtcgccatgacatgcggattctgcgggttgaagtctatagagttaatcctccgttcatgtaactcccaatggaaaactgactttcctgctcggaggtcccatacattgaacactccataatcctgaccaaagtacaagctttgctcatcatttggtctctgcgagagtgaaaatatagcttcgtccgtggaataaaccagatcaaaaaccgacttctcgacatccatcaaccggatgagaccatcatagctgctgctaataacctgccatgaatgcaccaacgaacttgatgacttaaagaaagagataacgtttctccaatttcaatagacaactaaataaagacaagtcgtttaacaaaaaacttacccttgataaagagttttgctgaaacacaatagatgaaactggtgctgagtgaggagtgaatagatatatcccatcattatcttcctcattcccacaatccaaattccaaaacccaacattcccaagtttgtcccctgcagcaaccatcttaacattctcgcaaggtaagaactggacaacaaaaatcctcccaggcacaacacgagctacattctgcggttctaaagtcaacaaatccagatcaaactcaattttctcaggcttaaccggaatactaaattccttgttcacataatcactgaaggaatcatcttcaggctcttcctttttaacagaaactttagatacacgagaactactcctagtcctcaccataggagactcgttctcatccttaaccactccaatttctcccttaaccaatttgcctctacaagacttactctcaatacccaaaagagtatcaaccaattgcgtataagaaccgtatccttcatacgcggattcgaagggaataggagccaaaagacgcggcgattgcttctgaggagatggttggttgtgtgtgatctgagaacccatccggaaatctgaaaagccatcaggtaagccagcggaatctggattcaaacctctggtgcgtagagacattcggataacagtgggcgttgaagcaggtttgggcttcttcttcttaaaagatttagaatcatctcgagagcgtttggcggcggagagaagagaagaagctttggcgcggacattgagagcagccaacatctcatcgttccgtcttatgttctccaatctcttccgctcgtactccgtcgccattgattgattgatgcttgagaaaattgagattttttctctttacacacaaacaaaaaaggagagatttttttcttcacaccaaaactgaaagaagacctagaagaaaaagaaaaaagctaacaacatttgatgggtcggaaataggcggcagaataacaactgccgccaaaaaaataaaaaaacgaaaatatataattacacatttacaccaaagtgtgatctaaattgaacggtgcagattagtttaacatttatcccaaattttaagaaccgtacgatggagcatcttaatgacttaaaccctaaaagaagaaaaaccccaatcgagctctgtcaatggctcgcttcgtcagatgtctgagaagaacactcttttctaattcgtctccttctattgctcaccggagccctaggattggtttgcccacgaatctaaatcctaaaattttaatcagccgcagatgtctgagctccgggagttacgtctcagaa

SEQ ID NO: 9323 - DNA, 3000 bp, Unknown
  misc_feature (1)..( 3000): cDNA_ID_3041323_gDNA_ID_1972069_Annot_ID_178533 3000 nt of promoter + ATG
aattactttatatttctccagcaactgcaaggagaagctgaaggagtacgtgatagatgggtttaagtctcatctcttaccacttccggtaagataatatctttgctttatatgatctttttaatataaagctatttacaatcttaactaaatgtttgatgatttttcagggtactgtctacacagtgtgcggtgggcccccttgccaagggatcagtgggtataaccggtatagaaacaatgaagcaccgcttgaagatcagaagaaccagcaacttttggtgtttttagacatcattgacttcctcaagccaaactatgtgctgatggaaaatgttgtagaccttcttaggttttcaaagggtttcctggcacgtcatgctgtagctagctttgttgcgatgaattaccagacgcggttgggcatgatggctgctggatcttatgggctccctcagcttagaaacagggtttttttatgggctgcacaaccatcagaggtaaatatatgttacagaatatttaccactaatatattgtcttttgaggaacatgatctttattgctctctcttgatttgtttgacagaaacttcccccttatcccctcccaacacatgaagttgctaaaaagttcaacacacctaaagaattcaaagcaagtgtggacagttgtacatttaaatttaatagactcttataagttataactgcattgcttattcatctgttataaatgtaggatttacaagttggacgtattcaaatggagttccttaaattggacaacgctcttacgctggctgatgctattagtgatctgccaccggtgtgtatctaaacttcagaactgccattgatgattatgttacaatatatctgtctgatcactgctctcttagtgctgcaggtgacaaattatgtggcaaatgatgtaatggattataatgatgctgctcctaagacagagtttgagaactttattagcctcaaaagatctggtgagcattttaaactcgtaaatttggtaggtaccactaatccaatactaacgtatctttcttgtttcagagacacttttacccgcatttggtggagatccgacacgcaggttgtttgatcaccaacccctcgtattaggagatgatgacttggaaagagtttcctacataccaaaacagaaggtgcgacatttttaaagtacttgcttcaagcattcaatgtataatcatttcttgttcatgtcattgtattcttattgttacagggggcaaactatcgcgacatgcctggtgttttagttcacaacaacaaagcggaaattaatcctaggtttcgagcaaagttgaaatctggaaaaaatgtggtataaaataaaccactcgcaaccttatcatttttctgctctagtttctttttgcaccttctatatgacatgtcttttggttttcacaggtccctgcttatgcaatttcattcataaaaggaaaatcaaaaaagtgagtttctccaactaatatgcttcttgtggatcctctttccataacgtaagaatgttaaattcattaaaagtaacacatctgttatctgaatttcaggccgtttggtagactttggggtgatgaaatcgttaacactgttgtgacaagggctgaacctcacaaccaggtaagcccttttgctttcatttcccatgtgtctgggtacgttccacttagaattctctagtggctggtttattaaaactggttgatgcagtgtgtaatccatccaatgcaaaaccgtgtgttgtctgttcgtgagaatgcgagattacaggggttccctgattgttacaagctctgtggaacaattaaggaaaagtaagtccttggttcttgctgcttttctatctatgtatatgattgtttttaaactggagatcctaatgtatgtaaaaactgggtttgaatctaaattttgtaggtacatccaggttgggaatgctgtggcagttcctgtaggggttgcattaggatatgcctttggtatggcgagtcaaggactgacggatgatgaaccagtaatcaagctgccattcaagtatcccgaatgcatgcaggcaaaggatcaaatctgattgacagtctccatcaagtcgtcatgatgaaactatctttaggaatcatacttcattttctagactttcttttaattttttgggttagcaagagctatatgctcaaacaatggcggcttaaactgtctagctctttcttgttggtttatctttgactttataatcatttggaaccattttatttcttatgatttttaatctcaagatttcaaattctattgcgtagacttcaatcctacgtgatgccatccaacaagaattaagaccaagcaaaagacagacaaaacctgttattgagcatccgaggtgctaggtacgtccgtgatctctcgacgaacattggttcgattttgcgtaattcagttgccaccgaccgaccgaaactctggtcaatgatcaccacttaccagcttttattagtgttattcattcattcgcaaaagctaagtaaattcgaaggcagttaggcccacaagcccatataatggtgaaagatttggttcacccaaataatgtccccactccttcggttgggcttttacgttataatattcggcccaaatttgatatctcataacagagcaaatttttcacatagaagaagcagagaaaccaattgatctactttttttttttttttgtttcttcctcttcatcaggcttgttcttcgattccctcacttaaagaagggtttcgaatttgctcgaaagattgaaaggaaaaaaagaaagaggtgaaccattctcaacataaatttgttgtttaggagatgtaagaatgataatttcttggatctaatcgcgttcagaaagtgagaaagttttaggattcataaatatctttgtgttcttctccaccctaataaacacattgatacagag

SEQ ID NO: 9324 - DNA, 3000 bp, Unknown
  misc_feature (1)..( 3000): cDNA_ID_2989975_gDNA_ID_1972069_Annot_ID_178536 3000 nt of promoter + ATG
acttgcccacttcctacatcactcagaagcagattgaaatccctacctcccctgtatatatattgaacccttgtttactccaaccttgggtttccaactttgtgtttccattaagacaaaaacacgattttggatttggtttgcaggaaaaacaatcgccaccagtgcaggaaggtttgggtgcttttcaaaaactgcccatggtcatgccatctattgatttgtatgcttctgctctcaggaagtctaaaagagtccaaccaactaaaggttatttgattctttatcttgttgtctttgtttacacattaacttcttcaaactctttaactgagtctttgtccatttttggtctcaggcattgctaatattgctaagcgagaaagaaatagaggtgctaaacagcttgatgcattcatgaaagtaagttcattgcatccttcgctgtgttatggtttaaattctgaaacgttaattgtctttaccaaatcagaaattgtttttttgtgaaaggaactggctctacctttaaaaggctacatggaaagttttcccaggaagaaactcttgcatccatatgaaaggtctcttattgacttgacacttggtgatggaaagtatgaagaggtatctatttttaagtaattcagcatcttagcctgcaactgattttagcaaaggcttatagataagtttttaggtgttaggaaaagttgatgttctgaggaagaaggtgcaatctgttggaaaggaacatgcttctctctgcgccaaggtcagactcctcagttccgtcaaaagcatattgtgtcttacattttagttaatcccatatactgtagattgtgattggtactacatcagtaaaggccttataagcttcataccgatcccatttttttcatcttattctatcatatatcagtgtaggaaaagttaaacatctttcaatttcgttgcaggctttgtcaaagaaggaggcagaggaacgcttgagcgaaggtgtggagaagctggaattggttttccaacaacaagggggagctgttgatgatttgctaactatagcgaaggttccttactagaatcttttgtttgtctcttccagtgttatcagaattgtatgtatgaacagagttacgcactttgcaggttttgagggctatgccagttgttgacttggaaatgccgactctttgccttgtcggagcaccaaacgttgggaagtcatcattggttcgcatactgtcaacagggaagcctgaggtctgccttatgtaccaatctttatatatgtgataataacttgcattgtctaatgcttatggttttttcggttgtcagatttgcaattatcctttcacaaccagaggaattctgatgggtcacatcgttttaaactaccaacgatttcaggttgcgttgcttacttcgctgcgtctaatcactttcctcatgatatagattattgaatcatccagaaacgcattgcaggttacagacacccctggccttcttaggagatgcgatggtaaagtctagttgctacgaactctcatgtggatgaataactatatgatatttgattaagtcttgattcttgtatttttttatttggtaattacagaggataggaataatctagagaagttaactcttgctgtactcactcatcttccaaccgcggttctatatgttcatgatctaacgggagaatgtgggacttctccttctgatcaggtatatagtaagaaacaaatccttatggatttcgttgcatcagatgtgtcaaaggaaagcacaagaatgtgcaccgttatctgatttgccgaataattgggtctgatatatcctgattcagttatatgtttgttgtgagggcattgcagtttcaaatatataaagagatgaaagagaggtttaaggattacctgtggattgatgctgtgtccaaatgcgatctgctgggaggctcaccggtgatgtatgccaaagaagatagaagcagtgatgacgcggaaatcattaagtaccgggaaagaggacctgatgaatcaattcatgtctcggtgaaaacagaacaaggtctcaatgaggtatgaaacttaccagaaatatttaatgtggaaagaaagcaagagtgtgttttgagtggtctgtttctctacatggctctgcagctaaagaacaaagtgaaggaagtactgagtagtgagatggagaagatccaaagtggagagaaaactgatcaaagtgttgctacttgctagtgcttagctagagattttttgcccattttagcattttgacattaatgtctcatttgtttttaatatacttaaataggattaaaatcttaatgcattatatatacatagctatttctctcctcccttgttagtagtggatttggtacgcatatatatatatacatatataagttttagcaataatgcaggattagattgtttttaaaaaaagagaaaaatgttgccaaaggaaaattgtgacgcacaaaaaaaggaacgatcctgaaattgtcagaagtagacagaaacaagaaaacttgtggagaacaataaaatatcggattcagaacagagattaaaaaaaaatattaaaaaaatagaaatcgataagtaataataatattatctcttcttctctgcttccattttgggtatcgataaaccaccacatccttccctgaaaccctaaccacaacaatcgccgccgtctctagaaatatccatccacctacttcggctttgtttatcaggttcgatatatctatcaccaccgccttcttatctcaatttctgtgtttgatttttgctttgttggtgtttgattttaccgcagattttgatgaaaccagatcgggtcttcctctagatccgttctaggttttctatttccaccgtcttatcattatcatcatcatcaattcatcatcatcatcaataatccagatgctcaccaaattcgtcattcatagac

SEQ ID NO: 9325 - DNA, 3000 bp, Unknown
  misc_feature (1)..( 3000): cDNA_ID_3041304_gDNA_ID_1972069_Annot_ID_178540 3000 nt of promoter + ATG
cccaacatgcatagtgtttgacacaacaatatatgacagctaacttttaagtataattcgaaatgaactaaatcgttgattatacataagtttaggttatgagtttttgtcttttgcaatctattaattaacaattggtttgtgaccaaattgttcgttgagtgttgtaagaaccaacctatttcaatcagtttcttaaaaaaggaaagggaaggcaaaaaaaaaaagaactattagcagccttacttttctatgataatattagtcagtagggaaatatatatatatatatatatatatatatatatatatatatatatatataatttggaccgacgactgattacaataactgttaaagcttaaaccggcggaacttaatcttatataattaatatgattgtaattagctgtatgataattttatgttgttaatgatgatgtattaccttttcgctatagggtttatagattacatctatacttctgcatacaattagatattaataaagttataaaaacaaattaaactgaataattgtgtgtgtgttacgttgcatgtgttattagttatggagaaatatgatttacgtcttctgaaatgctatcaacgattggtttcagatttaaagaaactatctgaccaaaatcctgagatatcttaattagatatatctatttaaactttcaagttgttatatgttaaacagtaaatggcgttttccgtattactcatctagtagatcgtagtaagttatatacgtttttacaatgaaaggtttcggcaatgtaagttgtatacgtggtacgagtgagtatccatacttctaccggaaagaatagagatcaagaaaaatgaatataattaataaagctctaccgaggaaaagaagagtgaaggataatggagaaaaataagaaaaaagatgatgagatctgaattaagattttattattcacaattacaagaataggtacagtcctggtttgtgctaaaccaaattcgaatatcaaatataaattacttataggttcgactgtaaaatgagatatgaaagaaagaaataatatatgatgatgtaatgcatgagaaagtccaaaatgatcggcatatgggattaagcgattccatatagttaagtcaagttactatttcagataaatggataagtttgtcgtctatatgttctgttatctccaaacccaaatctataacattgcgacatttttgaatcgttaacggcaaaataagtggggaggggggggggaaggaaaaaaggaaggacactgagattttgataaagttcggtagccaaatttgtgcatgacttttaagaaaatacgtatgctgatccaaaaacaaacaactaaatagattttagtttgagaaaatcgaagtaacaaaattattatttaatatatagtgtgagaatttaacagctactaataattatcataacacgaattaagtgtaatagtaatatatgtaggaaaatggtttagcaccactcacttgattaactcgacttaaaccaaatataaagtaatatttatagatgtagttggttgtatttttgcaagctttggtactcgatatctaaatttttaatggaaaaattagtcgagtggtaattcgttatatataagaaaatattttgtttgtaattgtgcaaactttagcattggacatctaactatattctgaaaaatcagcggaatgataaaagttcggattttccttctttttatttaagtaaacataattggtgttctgaaaaccaaaagaaggaagaaggcaattaagatttgttaaagttcgtcacgatattgatgtcaagaaaaaaggaaaaaaaaaaaaaatcgtcacgatggtatcgtcaatttgtctagtggattttgaaaagccgtgtgggcttgactttgaccgaacaaggcacacgtatacatctagtactactgaagaaatctctcattagaacgcaaaccacgttccgcacactcttaatatactattagtctattactatcaccaactagttgtcattttttttgtcaaacgtgctaattaattcacaaatagaagtattaaacttcctaattaagcacgcctttactacatttcattattattatacatgtaatcaaccatttcttttatcccacatgtcatttgtagtcctgattttatgactttatgcatcaagttatctttttttttgtcactccatgcatcaagttatctaaacaacataattattgtctgaaaaatctaagatgatatacaacatatgtatttaattacacattaggcttgtttaacaattcttgattatttttactctttttgggtgagttcttgatggatgtcttgaattacaaaactacatattctgaaaatattaaccttgagtttaggccggctatgctataacgaaaaataaataaaagcaactaacccgacagaaatgtcaaccaactatccaaaatgaaaaacaaacgtggagagcgtcatattattagtaggccaatcacacaccaaatgtttgtttaacaaaaaaaataagaatgtcaaccaactatccaaaattaaaatcaagaatacatttcatatgtttccaatatgtttttcttaaacaaaattgggactaaagattggaccaaatacgtgtgcgggtggacccgatagaagccgagttgagtctaaagactaaaaagtaaacaaaaaatgataagaccatcacttagtttattgcatgaaaatgaaaagcacatgctcctctctctctcttctgcctctttccatctagtttcctcttaaaactccattatatatagaaacaaaatcttttctctcttcaacaatcccaccattaaaaaagaagaacccaagatcgactcttacttcgaatctctctcaactttcttcctcagcttacgggaacttccacacatatacatccacaagaacccatatcgaagattcatcctacatatatttac

SEQ ID NO: 9326 - DNA, 3000 bp, Unknown
  misc_feature (1)..( 3000): cDNA_ID_1447386_gDNA_ID_1972069_Annot_ID_178546 3000 nt of promoter + ATG
aaacagggcaatgcagagtagtagttcgaggtttgatatgatcttttcattttcgaaattgttggatgtaacttgaaagagttttagcttttgagaattgtattatgttgtaatttttgtaaactatatatataatttaaaatcttatatataaatatttaaactttaaactttttcgattgattaaataattttagataaattgtcttattttcttaactatacctaatatttttgttttttaagtgttaaattttaaatatgtgtaaactaattgattgtccaattatgtttatttagaattttaacacctatttcatttatcgaaaaacgtttttagtttttagtttatactaatttatatatcaatatttaaaaggtttttcgatgttttccatactcttgatggagtaaactgatggttccttgaaatgtggcatgaaaaaattgcaacacataaaagaatccaaggccataacattcatcattggttcacgagtcacagaatacaaaaatattatataagaaaatgaagtccaaggacaaaagaatacagaaaaggacacaaatagactatgagagagctctgaagatcttgccttggaaacacagtgagctcagcctttgcctgttctgcagtctggctcatatcataacacattgaactttaacttcttgtaacttgaacgtgcagcgatgcgtggacgtgtaacaatcaagaatcacactagtttttaacgtctatcatgtaatccggagagagattcctgaatcagcatggctgcaaatgattagttttgcagattcattgatattaggaatatgcaaaggtagcgatcagcaaatctagtaaactgacgaaaagattacctggaaaactgcacggcggatgtagtgaaagagtggagaccgtgaggtttgagaattgagtcattatttcagtgatcgtttgatgagaaacttcaagtcttacccctatctgattattttctgtctactgatcgttgacccttgtagccttcctgagaaccaactttttgaagattcatcctcttgctttttctgacccccttcaccttttgctcctcaagaagtttctggagcataggatttcctacgaacccctttgatttcatctctgaatagatctctctggccttttcaagccacccacatgacaaaaggccctgtattgtagccaagtaaagagcaggattagccactatctcaaaacgatccatttctgcccagatcttcaaagcattttctggttgctttcccttgaacaattttccaagaataagaagaaaggtctcttctgtaggacctaaatcagagatcttcatttggcctaaaacctctaaagttttctcgaaatttacagcctcaaggaatgcatgaaatgtatcaactgttggactaaggttctcactaatcatggttgccaatacattcctggctacgtccagctttccagcctcacaaagggggcgtatcatcgagttgtaggtcactgaatctggctttaatccttcctcgttcaactttttcataagcttcatagcttcatcaaagcaatcctcacgggtcaacacataaaccaaggaattgtaaacttcaatccctggagccaatccccgtttcttcatttcatcgtatagcctgagagaatcaaaaaggttcccaactttagagaagcaagagatcatgtgactgtaagagtccttgttaggcgtgatacagtaattccccatctctcgccaaatcctctttgcttcagtcacatcagtccaaatgttacaccaaccattaagaattacgttgaatccctcaacatccaccggaaagagctttttgcttgcaagcatgaactcttcagctttttcaatgtggccatgtctacacaatgcacatagcaatccttgaaatgcttcatcataaggagtgtgtttaaacttatccataatatcaaatgtccgaatagcttggctagtatcattagcagcagcatatctacatcaacaccgtcaccaagacaaccaattcaatacctagctagtaaatctttcaatttagcacaacaaaagagaaacttttatcaagaagacgaaaccgaacctgtccatcatgagaaacatggcctttctagtatcctttgaaacattaaacatatcacggatcaaacaccaagcaatgttgaacttttgatgattacccaacacccagatcatcaaatcacaagatttctgatcatcacagccgcgtttctctccccatttgaatgctagaaaggcaagcctccattcatctcttaattcccagattaaggagtagaaagaatcatgatttagatcaaatgatgagtcctccagagaagccatggcatccgcctctgactccagctcagagacctgtctgattaaatcaatcagacccttttctaacggagccaatgctgttaagttgatatcaaatgtttcggagatggttttggtggagaagcgattagaagaggcaaaatgtgggagatagcttaaaacttgagaatgcacatgacctgctcgatgaaatgctgaagagaaggaatgattttgggaaactgagctcgaaaacgacgtcgacactgcacgacgtagcagagattgatgctgaacaatccgccattgtggcgttcgcgcgagtttcctaccaatggcaacgatcgcggccatagcgagtgagtgagaaggcttaaattaatacatttcaaacatggtcttaatgggatgaggatatgaagttaatggggtcaaaaacgaatatatagataatatggggtctaatatggtaataaacaaagtaacactaatatgaatgggcctaaatagggcccattttagatttctttaaaagatccgagagagagagggatctaattcctgataaaccctagaagaagaagaagaagaagaagaagaagaagaagaagaagaagaagaagcaaaacctgtggagatcgag

SEQ ID NO: 9327 - DNA, 3000 bp, Unknown
  misc_feature (1)..( 3000): cDNA_ID_3041275_gDNA_ID_1972069_Annot_ID_178549 3000 nt of promoter + ATG
tagtttttgtaatacagggatttttgagaggtttcgtggtatactgcacgagggagagatagataagagagttcagtatttgattgaaagtctctttgctactaggaaggcgaaatttcaggtaatttactccttgacacattgaattcgaatctgatattttgggttgtgatagatgtagcagtatgcttattgtcacggatagcaaatcttgttgatggtttactttcagggacatccggccgttcgtcctgagctagatcttgttgaagaaaaatattcgcatgatctctctcttgatcatgaaattgatcctgaaactgctcttggtaagcttggtattgtattttaaagtttactccatgctctagagagcggttattattttggaagtactgaaactgctcttaattctacatttttctgactgaagatattttcaaacctgatcctgatttcgtggagaacgaaaagaaatatgaggcgctgaagaaagagttactcggtgacgaagagtctgaggatgaagatggctctgatgctagttcagaggataacgatgaggaggaagatgagtctgatgaagaagatgaagaacaaatgagaataagagacgaaacagagactaatcttgttaatcttagaaggacaatctacctgaccataatgtccagtgttgattttgaagaagcaggtcacaaattacttaaaattaagcttgaaccaggtcaagaggtaacttcttccaaattcggatactctatattttcctgtgctttctgcttttctattttattgtttaatgttgaaatgaatccatcttaaagtttgtgactttctgcaagtacagaagtcttatgacattcttatccaatcaatgttgcagatggaactatgcataatgctcctggaatgttgctctcaggagagaacatatctgcgttactatggattgttgggtcagcgtttctgtatgatcaacaaaattcatcaagagaattttgagaaatgctttgttcagcagtattccatgattcaccgtcttgagacaaacaaattgcgtaacgtggctaagttttttgcccatttactgggcacagatgctctcccctggcatgtgcttgcctacattcgattaaccgaggaagacactacttcctcatctcgtatcttcattaagatcctattccaggtaactagaatcttcagaactcatttgactatttcatgaaactcaatttcagagctgttcatctcattaatttgattggagatatgttcatgtgattgattaatttcttgtttcatatgaattatgaaattatggatatgttacatcacaattagggctctgctgataaattttgttaaggtgtggaaaattggtatttgagactgtttggtttgcattttttgcaggaattgtcagaacacttggggattaggctgcttaatgagaggcttcaggatccaacaatgcaggaatcacttgaatctatattccctaaggataatccaaagaacacgaggtttgcaatcaacttctttacgtccattggtcttggaggcatcacagagaatctgagagagtatctgaagaacatgccaagcctcatcatgcaacggcagaagcaagttgcggaatcagaatcaggatcatcatctggatctgacagttctgattccgagtctgaatctgagtcaggctcatcatcttcttctagttcggatgaaagcgacagagaaaagaggaagcgaagaagaagatcatgaagactgttttgcttgctgtctccagactccagcaaatttcttgaaatttcacatcttgttttggctatttcaacttgaattttcttgagaactcactgagcaatcatctggtgctgttcttgcatatcaattacgcaataacctgatgacaagagaatagacagtggaaggtttgtgaacggaaatgtttttgtttgttgttgtctaaatgttttataagacatttttatataatttgctatggtttttatgggaaattagctaagttctctatataatagctttgtattaaaattgttaaactgtttaagataaatttgatcaataggaccatagatgtatatttttgttgggtacattttgtgatccaaatttatttgcgtgttctgattggaatcatgagatattttaaatggtgaaaagtatcaaattgccaaggaatctttttttcgtatatttgttcttcaaataattttgttttttggataagaacggatattatgatcggtctttctcactgatttcaaagtcaaaatatcacaattccaaaaacatatatcttaaaaactatttcttcaaattgtctcaaagtattactgtggtgcaaagctttccaaatcgtactaatggtttattactttttaaaataaaaagttttgggtgctcttagtttagcgtgaatctactacccacagtatctaaaacatacttaattagtaaagaaaactgaattgtacttaactacaactttaaacacatgccaagtaccaacaacctatcaaccatttcctctgtctttcacattttgttaagccataccagaattaagacctcaataaagtagataactttgaacaaagtagatgctttttttatttttggaaaacaatattaaacttttttaaacataacaacaaaaaggttgggatggataactttttttttatttataaatctactgtatgtgtaaaaatagtaaaaaacaatttggccgtggaaatcggtagcgttatggataaggacactttgagatgagtcaccgtttcctttctttataaataatcccgcttcctctctttatccaatccattaaatcctaaaatccattattgattgaatcttcgagttaccaacaaaaaaaaaactctcctttatttcagtcttcttttacaaatcataatcttctctttgattccatcttgtgaaccaccggcataagaaaatatg

SEQ ID NO: 9328 - DNA, 3000 bp, Unknown
  misc_feature (1)..( 3000): cDNA_ID_3041267_gDNA_ID_1972069_Annot_ID_178552 3000 nt of promoter + ATG
attgttatcctgcacataccagcaaattaagactcggtagtcatagtcttcaactaagaagaacgaatgtacgcacataccttaaatataatctcgagctccagtattttacgagtccataaacctaagacttgtcgtaacctctcaacttctgtcggattcattaaatctacactcaccgacaaggctacatacaaatttgcaaacggtctcaacaactcaccatatatggtgttcacaaattcttcattcccaatgctcttttcctactcaacatcaaaacaatcaaataccttaattcctttttccagtgtatccaaatacattatttgaaacgtgtaacaatatatatacattatatgtacctctgatatgttgtagctgatgtgaggcacgtaaggccctagaacccaaaagtttctattaaattggagttggggggactggagggaaaggtcatctctccgacagcagatatctatgatggcgagaatgtctagactagttgttgacacttcaatggcatcaatgcgttcaagagaagacacttgcaagagctttaattttttgttctcaatcttcaaaggaaccctactttttttgaagcagcagatgcctagtacaagcacctcaagacaagggcaagatgcgagtaccctgttaaagactccaatctcgggagcgacgattgataaaagtttgagggtccggagattcgagcagtttctcaagggatgtgagctttcgagaaagtatgaatgtagcgagagagacataagacttggatgggacaaggagtctggggaaaagttaaaagttttgaactttcgatcccaagtaccataatggtatctaagtgtgagaactttcgtgcgtttcacgcaactcagtaatcgaatccaagaattgagcattccatttccaccttgatatgggacatggatgatcacgcagctctctagatgtccacgatgattgtttataaccttttacaaaccaaaaagtgatttatttaagatatgaataagcagatacaaactaataagagaaaagaaattgactgataagaagggacctgagtaatcaatgtagcaactggattcgaaccatcgagcgtgttgttggaattgataatattcttccgcatgtcgaagacgagatgagacatttgattccacacatgttcccatcgcttcgacacaacactcgtccttatggcttcttctgtggaaagtctcgataatattatgagcaatacatcgtcagggagtttgctgatccaatcaacatttttgacctgatcagatgataccattaggcaaacaaataggttaatctacgccacagtataagagttacaagtagacatgcattatataacagagaagtgaacagaattagaccttaacagagtgatcatcagagacggtaattagatagggcttatcgtcattggccaatgtaaaagttgggtaaggtaaaccaagattccaaacctgaagatgaacaagcatgtaaacatagaatgagataacatgtctcagaaccttactcggactaagtgccataatcaagttacatggttctgtatgatgcaggtccacagattttactctcgctaatttcttctgatcccataaaaccagagtgaatgatacgaaagaagagactcaataacccaaacacaaaaaaggtacacatcttctatttcatcgtcatcaccacaagacaaaatttcgaatcagattagacaaatcgtagaaaaaaattccctctgagattccactctaattcgtcggcgaatttgctgatccagtcaatattaccttatcacatgacgatgatgatgatgatgatgatctctccatattggcacggaagattccctcagatttttgaagcgtctgattctgtagctgattctaagatgaaagcacaagattttctgagaagaagaaaataaaaataaaaagatgtcaagagattattagggtttaaaaaaaaattattacatagatttgtttcgacaatatgcgtccggaaaacgccgatcggaacaatgcacacgatttcagtcgttgaagtccaagctctttgaaaaatataatgatttgtgtatgaattgttattcttgataccatatatatataggagactaacttatatttaatctaaataaattagaaaatagtaaatattttaaatttcttaattcttattccaataggaattttgtattcaatcaacttttttaaccaatcaactttttttcagtgcttatttttgtaaaaaccatacttctcttgcaaatacatttttctaatgcataccgtagttacaatactgtatcataaaactcacaatttttatacaaccaaatacattgttaccattcgaacttgtatcacttaatagagaaaacaatgatgtttctatcttattttttgaatattctactagtgaattttttatcatccaagaagatacatatttattttgttaaaaaaatgaaaaagatggtttttcttatccaaacggaaaattcctttgtttgattaggatataaattgcgttatacgtatatattcaaaaaataagatggacgaaatataaggaaaatctcattgatattatctggaaaataaaaaattccaatcgtgtggtccgtcttttgttccgactgatctatctgacggttaagatagaagagcgtatattaaagttaccatggaccttgatccacaggattaaaacacttgttttagtttcatgtttaccttttacggcgaatctacgtgtgcgcgaaagctgaaatcttcacggggaaatctagagacgacgaggaaaaaaggatgacactttcttcagatccgcgatctatttcttcatcccaacataacacgaacttccttgtgtgattcaatatctgaaaccctctctcttccttataaaaaaaaccaaaaaaagattagatttttaggttaggtgaaaacaataatg

SEQ ID NO: 9329 - DNA, 3000 bp, Unknown
  misc_feature (1)..( 3000): cDNA_ID_3041271_gDNA_ID_1972069_Annot_ID_178550 3000 nt of promoter + ATG
ctttccgttcaagttcgtaatgggttcaagtggctcgaacagagctttccttttctcggacagaagaggagttgtggtcattggttccccaactttctcggtatccattgctgttatctcgttcttctctggtgtgacctccgtaacagcctccggtgctttgtctaggttcaacaatgctgcgatcaaaatagttaatgctttgagttccaaaatcacatgcaaacggatcagatcaaaacgaaagttacaaagtctttgattttacaagcttaagacagagagaagaagactaaagctccatgtctagatctcgaggaaatagttcacatagagctaaaacaattgatgcttaaaaaaaattccaaatctttcagaccagaaatagaaagggtagctaataaaggtctagaatctttaatggtctgagaaaacaagaaacagtggaaaaaacctgatctttttcttgatttccacgcgatcttggtggtagagacagggaaaaaacctccgacaaacccatcactgactgtcttcatgtctttctcaaatccaacccctttctccatctaaatctgaaaatttcccagaagatacacgaattttgagaaagagaagaagaagaagaagataacgtacaaggaatcgaattcccaagaaaagagggctctctgttagatttcagttgaacggtaatgatttggcgttttggttacgactaccaaatgcttttgctttgtgcttcagctacagaggcttgtgaaaatgttttttattcttacaaaaagaaaaaaaatcagaagtcgaaaatagttgtcttatcgtattctttaggttgggaccttttccctctttattcctttgctaaattttcatgcaacctttaaccttctttatttttttatgaattcatctttaatccttttctaaactgtttttttttttccttttgggaaataactcattaaacgatttattgactatgatcatacgtctcttccacaagtattcttccggcacaagtcttgccttaaatcaattgaataaaagaattagtataaatcatctgattacttttttgttttgttttaatatcataatcaatgaccgttgagacttattcaaagtaatgtgatttgatttgttcagaatactaattttgaactcaaattgataagacctttatttttgtttaatcatttcttgtgttagtcaagaccttttgtatttacttgaaataaattttccatgcagccaagaaaaatatattaagctacatattattttaccaaatactaactgaatagtaaaaataatctttggggggcagcgttaggtgtctttaggacgagaattaaattactgaatacggagttataaaaataaatgtttggaacttggtaagagcatatgccacgaaacagagcatctttcttgaagttagtaattcttggaatgtgcgtcggtcttcttacaatttgcaaatattcgaatttgataaatattatcccaacccattgaaataagatgtagtcttgggctcacgacaaatcctcattcaaaattgagcctcttgacccattaagcttcttcttttctttttttttggacaaactcttcttctggttacaagaactggtcacccaaatagttagcagattttagtctgaaaagtatgattggaagagatacagtgactgaagaaatggccttgacccattgggccttatgtttccttggatttaaaattataagcatatagacattgtgtcgttttgagcatcgataagaggacatcgtgtcggcgaaagagcgccatctacaacaaaaacccaaatcgacacagatttttgtttcgccagtctatcacacttttgctcgccgattttccagatctcagtagggttcttgctacaggtttcagatctttggataggccttggtggatttttatctatcaatcgataaaaggttcttacttttactctgtaaatcgtagtttgggttgtttgtactactttctcatccatgggtaggcacggtagttcctccgacgaagaagagagagttagaagaagggataggagaagacgagagagaagccctgatgttagaagatcgaggactgagacagatgatgttgctcgtcgtgttagggtttctgatgatgaggaccgtaagagctcgcgacgagatcttgagattggtggtactgtcgctgatggtgagggacgccgtggagataaggtcagaagaaaagagacttctgatgatgaggaattagctagacggtcgagaaaggatcgaaaagaagcgaactctggttctgaggatgatagaggtaaaagaattgaggtagatagtgatggtgatggtgagaggagagtgaataaggggagaaatacggatagagttagagctgacacttcttctgatgaagaagatgatttgaaggggaataagaaggaaccgatggaggttgatgatgattacggtcggagaggaaggagaagaagccccaaagtcatggagaaacagggtagagagagaagtcataggggtagtagagtcatagctgataaaccttctgatgaggaagatgataggcagaggagcaggggaggtaggcgagaaagccagaggaaacgcagggatcatcgagcatctgacgacgatgaggaaggtgagattaggagtgagagaagaggaaaagagaagaatgatagaggtagtgaaggtctcttaaagagggatcggagggagagagacttgactgatgggcatgagaatgggagtcggcgtagggaaagtgaaagaaaagataggagtcggagggacgatggagttagagatgaaaaagaaaggagacacaatgataaatatgatgatagtcaaagagacaagttgagaaaggaagatagcaggaaaagggaagagaagaagattgaggttccaaagcccaagctggcagaactcaatccatctgagaacaatgctatg

SEQ ID NO: 9330 - DNA, 3000 bp, Unknown
  misc_feature (1)..( 3000): cDNA_ID_3041283_gDNA_ID_1972069_Annot_ID_178547 3000 nt of promoter + ATG
gcatagagatgataagggatggagtctgaaaagattttacaatgaagcaagacaggtttacagagatgagctaacgttttcaataacttgctgcttcacgaatgagatgtctagctctccattaacaattgcagcgataggcacgagaagaaccaaggtgagactcttgtactgataagtcaaaaggtaaaaactttcctgtgtcttctgtatcaaaattgtcggggtggcatctaaaccccaaatatcagttacaagaaacccatctttccccttcgaccacttatcgtgctgcaaaggtctaataacacgacctgtgctactaccatttcccgaaggcaatgtaccacctgaaccaagagggggcaccgtagtagatctagaagatatttgaggtgaaccggatcctttgcgtagatatgaccaggaacttgtgccagatgatagcgcgtttgtggttaatctcatgacagaaaatgcaaacaagtcgacggtatcatcctgaaaagagaagagagagagaagacaaagactaaagcttttagtattagtgaacaatatagtctacacagaccacgataatttaagaatcttaacgactcaacaatcttggcaaatatgattaatgcgaatgagggatttgaaaacatacaggtgagagagttgttgacaccagtagatcatgaaatagaatcacagagtggcatcgaacggtcccagcacatgaatctagcactccgacgagagactgtacatctaaataatactattcaaaatagtgaactttttttttgtttcgaaacgcatcttctgatagagaaacaaacctgaacttcaagtgccgcatctctagctaaagttagcatctgaactgttccacgctctttcaaagtgtcacggaaggaaggtaactgttgttttttcccaacgaaaagatctgccccaaaatagaaaaacttttgataagtgctactacacagggattttgtgggctatagacttggtgattattgcttaccatttaaatagtctgtgatgaatggatacaagtgcgatcttacaagtcctccagttggttctttctcaagcaatgccctaattgacccttgaaacataacaaagagagagtgcacttccttaagcactctccgcaatgcatcaatcctccatacagcttcaatctccttatttttctctacaatctaccaaagtctaaatcaaattttgttctttttatgcatatgaacaaagtgcaaatcaattgctaaaacaagtgaaagagttgataatgttgtaccatgaccatccagatatcgggctcggcctcatagaaaacatgggaatgtctctctgcttcaattacctcacaagctgcctccggggagaaaagtctgtgtttatattccataaaccacgtctcaggaacacccaacaatacaggaaaagctaataacgctcaaaatttatgtgaacatgagacaacatcaatcaatccatgaactcgaaaaatctgtgtaaagaaggaaaatctctagtagctaacctcgtgaacgtgataagcccttcactgagacctataaccgatagctgagtggagaaggttagatcaggaggatagaagaacaagatcttgtccagttcctgtccttcgtgttggcctcttcttaagtcaaacacgcaaagacgaaggctttcagtaccagagctcatggacgccattcccatagcttctaagagctcattaaacaccttaaaaagcacacagaaatgtgtatcggaaatcaggcaataatacaaactccgtatctaaaattcataactttaaggcacatcaaatcaccagagaaccctacaatttacgattttggaggttcaggtaattgcaagttaatcaatttcgttaagaaaattgcgtaatccatataaattgattacctttgaggatgaaccctaagaacaaagtcaaaggagtgatcggccttcaattcacaaagttgatttctgatgattgtggactcagatctaccagaaaattttagaagcaaaacttggtggtgagaggaaaccaggtaaacgggtcaccgggttaggatctaaaatggactcgggtcgtagaggatcttcagattctcatcggcttacgtcatccattgtcttctccaatgatcccttatttttactttttctaatcgcacgttgttgtcacctatactcgaataatttttgatttcgtctcctcaatctatgaataattcctaaaccggttataacatttcagatttcacatatcattctctcatttagtcgtcacgcttggatcaaataattgaatactaattgaattgatgcattaaattattgaacaaacattaatgaaatagatagctagagcattttataatgaaagttgcgttaaaccggtaaatttgagtctcaaccaatataaattagttaagaatcggtttgcattactcactacatgtaatttgatttcgtctacaaagtaccaaaacgcaaaaaaggttctaacttttgcttcttcttcgcattcactcaaaccaaactagaagacggaatccggccaagtcacttccgcaatcctttcgaatttagattttagggttactttgtcggagattgttaatttggaggtgtgaattgaaattttctctacaatttccgacctttttggtatatattgtctctgttttattgttttgggacgatccatctgattttgtgggatatgaccgatgaaacactctatagtattctgatcttttccttgtgatgtatgctttcttaagcttccattttttatcagagagattagtctgtatttattacttcgcttctggtatttgaaagacgatcctgcttggagaaatttctattcttgactttttatttattttatcaaatagaccttgaagagattctttttatatttcattccttatacttacctggttttgtagtatctggagattggcaacaatg

SEQ ID NO: 9331 - DNA, 3000 bp, Unknown
  misc_feature (1)..( 3000): cDNA_ID_3041300_gDNA_ID_1972069_Annot_ID_178541 3000 nt of promoter + ATG
cggtctttaccttttgcggctactggcggtccctgaaactggcggtctttgcagacttgctctgagcttatgcttgtatgtgtggtattatattcccaacgctgcaaagcattttccgttgtcagctcttggatggtttcagactgcagagtaacatgcgttccaaaatgtagaaaaacaaaaagagagagagagagaggtccttgaaatgtcaacaaaggagaacatataatcaatatgacagtattacataaagttatcaagaacccagcaagcatttcataaaatgtaaaactcaatgcagaaagatactcctatattgacaaaggtgcaacagaataggtaatgaaatcatgtcattttctagaattatccaataaaaaccaacgttatagtcaagtcaacaacgcgaatatacatgagtactttgtgagaggccaacctgagcttttagatgatgttcaaaactgggatgaagaggattgaggaacttggagccaaacgccgagcaaaggaaaagaattctaaagctgcagccaaagctaaagctgaagcggaagtagaagatcacttgaaaatctgatccgtgctgtatatatcgtaacaaacttgagcgatgtattgttagcagacacttaggcatagttgatcttgagatatccaatatatctatctagacgatgatcgtaaacccactacataatacaaaaaaaatatgttggtgtagcccttgaatacaaaaaaaaaaaaaaaggcaattaaaacttacttttaatttgatttgaagatgtgtagcatatgattgtattgggcaaaagaaatatgttgaggcctatttagagacccttgggccaaataaatctgttgatggctatttagatacccttgggccaaacaaatctgttgaggcccatttaaagacccaataaaagtcgtttttcttgggaaaatcagaaaaaacagagcaagaaaaaaagaaagcgaaatgggattattggccgcgatcggagttctgttgccatttccgttctactggtggctgtggacgaatgctcagtcatgggtcaatctctgcggccgagaaagagacccatcgacggtaatggcacgtgtttctcacgtgctcaaggctgctcaactcctttctctcttctccgttgcttctctctcctggccgcctccgctctacttctggcctctcatggcctttggccagtttctcaacttcaggtccaatctttttgtttccgttcctctctcaatttgttgaattcgtaatcgaatcgaatggcatgagatcgatgataataaagatctttagtcaaatccatttttagtttgaaattgcatctgtagacgttgtgaaagttttgtcttttcttttttcaagttttaatcatcgaatctggtttagttttgtgaaggtttgatacttgaaggtcacatctttgactgttaggtgaagttgtgtttttgtcccaacaaaatggatattgagtgatgtttgatatggtggacacttctatgttctgtaactgagctctcttgttgtaaagttttgttaacttaaaaggtcacatctttgcagggtataccaattgttaggtgaagctgggacttattacggtgttcgattcgggaagaacataccatgggttacagagttcccatttggagtcattagagatccacagtatgttgggagtatcatgtctctattggcatgcctctcttgggttccatttcaatacattctcctctggtctctcggttatgttttcatgatgtttctcgagtcaaaggaggatccaaatgctcgtgccaaatccatctcatgattcctaagcataacccactagtcttagaagagctcaactcccatgaacgtcaggtcttgactgttttctttatgagtttgtattctcttttgtactcaaactgatgctacactttcatggataatgcagttaccttttctcgggttatcggtagtctacagaattgtcgaagcaagtactattaagtttatatttaccctttatgccaaagccaatgatgatgcatctgctgcaaagaaccaactggaaatatagggcacatttgtaataaataaaaactaatggaaacaaatgtaataaacagaactttaaggagcgattgcaataaacaaatctataggaaatatctgtaataaacacaaaatatcgggaatatatgtaattattcttttttgggaaaaatatgtcattattcaaaactatgtgaaatctacgtaaatacacaaaatgtggggactcgagtacgaaagaagaagttttgtttatggtgtaattaaatctcttgtcttggcatggttttgatagaagacaaaacattcctaatctgtctagtaatcattaagcaataagcaagcaactaatttttagtttggctttgtcgggttaagagttaagaagacccatagttttgaaacttgaaacagtccttactggctaattagattttaacccggggtttttccgggtcgggtaaaccaaacgatgacgtgtcaaactgtgactggctaactacaacaactcttccttggtactcttctctttactcgctccggattcctatcgttctcgatcggaaaagtcgtctctttatttttgttttttgggttcgccgaagtaaaaaaaaaagaataaggattttctcattaaatttccaaagattagtcttttgtatgtatcttcactttcttatgaatgtgtaaaccttactcattcccgtgatcctactttgggatttcgctagaagaagtttaggtgacgaccttaatttaagtttgtaaatgcaggtcctttctttctagggtttatcgaaattggtgtaaatcttttggaattggtttgagattttttcttttggggaattgcaattcattagtcgtcgtgatccagtgtgtttttaagtgaagtaaggcattttcgatattcggagacttttaggtcaatg

SEQ ID NO: 9332 - DNA, 3000 bp, Unknown
  misc_feature (1)..( 3000): cDNA_ID_3013269_gDNA_ID_1972069_Annot_ID_178539 3000 nt of promoter + ATG
gatgttcaaaagctatcgcatatctagtgcactgtcaagctcagccaatcaattatggctcatttcacattaacacaattcaattcaactaagcccaattagcttaaataaaaaaattggcccaacacggacttgcatcggattacaccccaccattaagcattaaacttttaagaatgattgcttcatttcattcatatcgaaatagaatttgttattaaccaaaatgatataactactgtattttgtatcactcgtcgtttcaaaatttgatggtgggtatacagaaaataagcagcgtgtgttacgggtattctttgctcaatatgtaaagcccatatatttcatttattactcgcttgaactaaacccataaacgttcacatataaagcccaaccatttaaaaagttggaatttcacatactcgctcgcagtttcacgccatcagtcaaattttcacgttgactaattttttttttttttttttctccctttttcccgttgactaaataaccaaacaaaatactagtacttctctcgattagtagattcattttttatcagataacttaatttatcaaaagtcttttccagtttacatagtttaaaatatatgtttccagttttataattcactaatatattgtccagtaacaatgtacatcatgtgatagtgataactataagtctgtaacatatgcataaatataaattacatactgtcgcgatcatttcatataactttacacttgtagattctcaaacaaaaaaaggtcgcatatataacaataactgattgtcgcgatcatttcatataactctacaccggtagcttctctaaatatgttcaaaaaacacgtaaatataatgcatgataaataagataagaacgtatgtacttaagtcaactttccgaaaaaaatcataattaaatctaccgattttatcttgactgctaaatagtgccctatttgtagtttcgaaattgtggtagaagacttgagtaccttagtagaatatataatgtgctgtttttttcttcttgataaataatggccgtagattgtggaggtcaaattaatcaaacattggcatattctcaatgcttcggtttttgggataatattaagtgcaatcaatggctcatatcttagatcgtacggcttaaaggtaataaaagcatctcatgagtcaactaaataaacagtgaaaacaactttattctttccatcttcaaaataaacattcctattcttacgtaaagctatagtagtattctttagcaccggctcaaacaatcgagaagccttaggacgacttacaaaaaggggtcttttcaaacatgctaaaacaaaaaccatttcatataatcatgtcttaagcttcattacaaaaagggatttttacaaattcaggaattaattttgtgtgacagttagaggagagagattagtaaagcaaaaagtactatttattttcttagttatcatttttctccgaaaaagaaaaactaagtataaaaattctatcacacataaaactgtaaaagacttttaccaaaaaaaataattttagcattttattttcttgggctggtggcggtcacacctctgccttacctatatgagccgtgtttggtgctcttaactgttagctcgctaaatcatgtttgacgtgtaaaaaagtcagatacctttgatttaatctttctaacagtaattttttaaaccatttatattaaaaagtaaacgcaactaaaaccgtaatgaaaatgcaagagttgacatagttcttgtatcaattcagagaactacaagaagtagttatcagaacagaactgaaatatagaaatcaactatagcgattctactttgtttaccaaaataaaataacaaagaaattttgggcaacgaagcacaatcctattgatatatagttaggttttaagtataagactttaatttgattgtatcaatgagcttcgacgaacaggatccactgtatgaaaactatgtttgtgttccaaatccatatttcaagcgaatctaatcttgataggaaaacaagaaagattggtgttgattagattaggggccaagaagagaagagaaagccgtccaaatgaaaaaaaaaaaaaaaacattttagagagaatctatctatgaataaaactgaaagtgtgagtaggacccaccttcgatcgcagtcgctgagatccaatcacgttttagcttcccattacagtggacccacccactcaacttgttcatttcctacttcaacgtcccctctgtgactgtgtctgtgtgtttttttttctctatttatttaatatctcaaacagacggaaacaaataaaaattttaatatctcaaactcttaatcaatcaactactagtttattaacaacactatccgattaaatttggtttaaactagtatacaataatcctatttatcttaaaataatatgaatttccacgatatttcgacttacctaccctacatttttttcttggcctggatcataactttgataaaacaactgagaaagaaaagaacatgcatgttgagacaaaaagagtatataaatattgtctttagtgtactttgaggaggacccaataaaaaaaaacacttggtttgaacttgctttttcagagatctctcactttttcgttttttctgctacacacacttttttttttttgcaacacattttgtttctgctacacacacttctatcactctgtttttattttcctcagagtccgaggtacgtacaaaaaaacagaaccaccatttttttttttttattatttatctaagaagaatcttcaataaaatgcacctataaattaacttatccccgagtaagaagaataaaagaaaaaaaaaataacttatcgaaaaagtcgcatccattatatgtatatatatcgttgtggagttgttgtatactaaacaagaaagagattaggaagagagagacggcgatg

SEQ ID NO: 9333 - DNA, 3000 bp, Unknown
  misc_feature (1)..( 3000): cDNA_ID_3041316_gDNA_ID_1972069_Annot_ID_178535 3000 nt of promoter + ATG
gttgctatctttatgagaatgggtcgtgtattgtatctttcatatttctatttacatgatacatgtatcgtgtactaaagaagcttttgagatggagcaataattgtggatccttttctctatcgatcgacatacattattttgcataatatgttcttctccatgagaatggaactcttgcgtttgtgtggttgtaagttgttagcaaagagaatgatgataaaagcgatggttcttgacctttccttgtcacagaatgtgactcacagtcgactctctttttgtaaggaaataaatgatttgttttagtgtataatccttgcatgtattaacaccaattatcgatgcagatggttgtatagtttgcaagtataaaacatgattcctcccctcggaaattcaaggctttattaagcctttaatctccccatgcaaaaactatccgcaaaatatgcaattatgataagatgtatattattatcacgttccaagtgaggctcaaattaaatattcttgtttactaacaaaagataggtgaaaacaagattttacatgtcaaataaaagatttctgtgagatgtatattcttatcattaaaatttaaaatcacttttgagttcatctctttatttaattctttcgaatgactcttgcatataatttgtatacttttaacgttattccttttctatctataaaaaaacgaagaatctgtgatgacccgtcacaactctttagaatcaaaattaaaacactaatttattgctttgtcctcacaatcgtatgactatgaattgaagtgtcttggaacaagatttaattataattatttctctaaggtataagtttcttgaaccttattcgcttttataacttatgcccaagtatacatacccttttctaagttttatagaataagtagaggagtgagctagtggtctcggtttagattaaaaaactatgtgtagatatagataagaggtctatatatccggagaatatatacctcctaagactaagatagtcatttaaatttcgtccattcccttcaagttaaatcacattatgtcatagaataaaaatttggtacagtgagaacgcagatataatcgaaacaaaacaataaatcatgagaatgtattaatgcgtgtggtggaaatagattgttgggagtggaggaacaaatcaggaccgtttgaaagatgtgaagcgactgtttgttctaaagccccacgtcacatcgcagggcatcacagacatagtaactgtgagatttcatacattattaatttggatgattttagtgaatccatttacttcgttgtaaaaagattactcaagtctgattagttacttttctaaacacaatgcttgtaatatattcgacaattctatatagcataatttttatgtgcatgttaataacaacattagtgactataaatgatagatggtcaaaagacttcaaaaacaaaaacaaaaaaaaaagtaaagaggaaaacaaataaatgtaaaagaaatgataatgattttgaaggggatgtatctaagagtagaggggagggggtgtaaatagaaatgttgtagggtcgaataaaattgtcaaaagtccggtccaaattattttgtccctcactaatcgtggctaccatgaattgatacaactttattccattttcttcttaattagttttacaagtatatcattatcataaataatagctggctcccttcactgtgttcgttgagtcttattttgtcttcttttccttttggtttttcattcttttgtgggttgggtaaccataatttgacatgatgttttaaattagcatatcatttatttgtaatatacataaagtttttaactcttctgtatataaatgtatgcacaaaatatctaacgatgtgtataagttttgtatagattggagtttcatttgtttgaatcatagttttgaataatgtatatagtattagtctatacgaaatgctgtatgaaatcataatgtggcaggtcataattatttgaaacaggttatcgtgcatgcttaaaatttataaagaaaaacagtgactattttctaaagctattcacaactcatcaggagtttgatactcatcctaagattgctactgaaccacacaattaaagtgagcgtgataatagtcgtgtcaaacaacaaacaatttctcccaatctttttactccattaatcgtcgttcgatcatccgataatcttttgaatccctgagcagatcataacaaaaacagagccgtgcgtgaacacaagcaaaccataccaacagtcgagaacatgaaatatttataccgcgattaattcttcacgtgcttcttctatctcgtcattgcttcgacgttcttttatatatgacgaggatcgtgttcctaatctctcctctagctttttttattcaattctttcattttcttcttcacctcctcatcatctccatcatcaacttgcttcatcattttttttagttttacttggcatgtaccagtaaagttctagttccaagattggccacacaaagttttaactaaagcaagcctgacaagtaatcacccctaaaagacggaaacgacacacgtttttacgtaacacaaaaaatggttaatctaaagcccaataaaaggcacattggttcacattaagaagaaggagcactgaaacaatgatttaagtatggtaatctagtggaccaccaataaaaagcccattaattcataggcccaatattaacaacctgcgtttggaacaaactcacttcaactacaaaactcgaccctttgaaataagaagaagaaatctcggtgagtttttttgtggagattgaattttcttatctacctccactattcaatcgcatggcgtcagaggcccattagaaaagtcaagccaggggttttggattagatcgttcgttcttcaatttaaaagttttcttctttcttgttcggaactcagaaacacg

SEQ ID NO: 9334 - DNA, 3000 bp, Unknown
  misc_feature (1)..( 3000): cDNA_ID_3041331_gDNA_ID_1972069_Annot_ID_178525 3000 nt of promoter + ATG
taacgcatcatggatattaccagcaagcaattcgtaaagcttaattctctccttctcaatgaaattaaaatccagcccattccttctccaaaggtgaagctgctgcaagatatcattgcggtttacagttgatccaccagcctggctcaacaaacaagcaagtctaacatctcccttagatatggcaagttccacagctgaatcaagctctcgtccagttagaagaaagaataagtgctcaaggtagctagaaccatttagatcactcacatcttcttgtacacggtgactgacactttcttggagccaacaactgaattctgctcttcggataagcggaagagcttctgtatcaatttttgcagaatcttccttcacatcctgcatcacgtcttcctcgttatcagaagctgcatacatcaaacgttcagtactctgtctctcagaaaagagaacttttatgagttcccagaccatgacttggtgcattaaaaacagcttcgcagatgtggacaacccagcaacttccagctgtttctcgattataccaatataacttcggcagatatctgaaagaactacacgatcggtgacaacattctgaagtttaagactgaaagagccaaacctaacttcttcttctacatgattcaattccttgtggagacttaagggagcctcaaacgcagaatcaataagttctttctgaacttttccctttctatcccaaaccactttgtcaattgctatcttttctttattgatcacagaagacaataccatctgggaactggagctacatattggcttaccagtgtgaaaaagaacgccatttgggccccaacctgctcggaacgatcttcccatgaataatgctgcatcaacaacattgcgggaatagttatcagttaacggtgtgacatggctgatgtccagctcgaaacctcccgttttcgactttctcactgccaaattcttattttgttgtaccatcaggatactacctggggagcttttatcattaccagggttatactccagcaaagcaagcggagttttgcgcacgaccggtggagggtcttgatgactatttctttgagcaattttctgcgaaggtcttacatttcgtttagtcaaggatgtcataagatgggaagtttgctctctaaagtcctcactttcgtcttcatcttcattaggaaacatcagcattctcatttctttcatcttttcaggatcaagtcctaaatgagctgggagagaatgagaaagctctagctccgaagtttccatctgatcttcttcatcaatgtcagctacctttttaccatccagtcctacgggatctcccaaacctggcgcatcatccattgcaatatcttctgcctcatcatcactcaacccaaatctgctgaaatgaggaacgaagaacttccataaaccattatcgggatcaaatgagatgaaagttgctccttgtctttccgtgctctgtttcaatttataagcaatatggttaacttgctgttttccccaagttagatctggtatgtttacgaccagagtcacctcagcagccttgttaagtccctcaccaacaaccggcttggagctctcatcatcataaacaataacctcgtgcctatgaaacttaactatgtgatccaggtccaaccttctaacatccgtgtttccaagaaacctaatataaccgtaaccaatcctgccaatagtaaaatcaggaacccggctgcaataatcagggctttcaatttctcgctcaaccagctcgtttatacatggcttcaagaagtagtcaggagaattcaacataggcaatgaatcaatgatctctttggaatgctcacacaaggcagcaattccatctaaagagatccttcttttctttcgcgagtccaaatctctagccatccttgaaatctctgtcgacatagaatttttgaaaatttcaaaatcagatgataaaagttacaacctaagtagcacacgattctgaatcaaatgaacttagaacaggacttgagcgggtaaggtcagataaaaacatagcagagactcaaacatcagaaaaaaacaaaaagcaaatcaatgtactctaagcatcagtgttacaaactcgaattttataagagttgaatgatgaacatgattctgaagctaacatgatatgtaaaacattaatagcccaagttcaggcgcacgacttgagtagctaaggataaaaacatagcagagactcaaacatcaatagcaacacaaagaagatttacctggaaatggttgaatagaaagagacgtcatgattgaaggaaacagaaacaaacaccgagagggtaaagaaagcgacaagctagggttttctttcttataatcactgactctaccgcgacctttccgatttctcttacaaatccattactgagacgacgctaacttacggcggtgacgatgatcggataaaaatctaaaaccgtcctgattcccctaaattccagagttcttcacactgaagtggtcggagttagccgccgcaggggaaaagagagggaaagctctcatagtgtgtgagatctgccgggtttgtttaggatccgtttaaccacccgacccgaaccgaattcctttccaattaaagtcaacattgggccataataaggcccaaatattaggcccgataatgtttttccttttttcggtatgaaaatgttttaatcccagcgtctgataaacgctgcgccggacgtcaatgtgacgcagagagacctttataagtacttcgtcgcattctctctcttccgactcaattcgttttccctcctcttctgcttaccggaaaagtctatatctccgacggaccttcttctctctaggtttgtctcttttattctgataaaagcttttagagaaggattacttatgtgattctgtctcttgaattgaacttttaacagttaatcagacctcgcgctcgtgataatg

SEQ ID NO: 9335 - DNA, 3000 bp, Unknown
  misc_feature (1)..( 3000): cDNA_ID_2123511_gDNA_ID_1972069_Annot_ID_178527 3000 nt of promoter + ATG
tctatgtttggacaacaaagtagcatacttgacctatttgaattagcatgagatgttgtgttgttttgttatgttgtacaaagaaatggaagcaagtttaaaaaaaaaaaaactgtagctcttatagcttgcaaatccttgtaatctatattaattataaaggtgattcaacaaacaaaagtaaaatgagagaactgcatcaactagtgtatcagttccaaaagaataataacccacagaagggtacattcttcgtcatctaccacctaagtttcccttctaatcatctcagtgaggtccatcacctggtttctgtacattgcccttgtgttctttttctggctgtgatacttcttttggggagagtttagtagattgatcttcttgggttttggttggagcattccctgaaggtttcttggtttccaaaacaatttcttttattgtctcttcgatttttcccagtctctgtctcatctccattagctcttcgtgagacttggttgctgcctctacttgtaatgccttttgttcagcttcttctttctctttcttttcttcttctttccttttcttctctccaagttcctgagaattagtccaatatcatgaggcatatgctaacaataaccagaatgaagacagaggataaacattaagacatgactgaaacatcatcagaaactcatatcagtttgataatgaacaataaggagaactcacagcatccatgatcttcattttccggcgagcatattgagcaaccagatacacagctgttacaagaaacaatagccatttataaacaagtcacatttgacagtaaacattgaacataacaactaagataacgggagtgaatggcaatacctacagatggcaagcagacgatgatgaattgcaccacatgccaatcaaacctaacacaaagcaaaatccatatgagaacatactacaaacacaaagcagcacaagaactcaacttactatataagagatagtttcagaaagtcaaagagataatcgcagcagaaattgaaaaccagttcacttgtttcagcctaaagaagctcacattccacaattctacaatcctgaggttttgtagcctaaaattaacttcaaaatatacaaggtaagttgaaaaaatagggtctttccatgatttaaggcctatagaagcatgaatcaaacacattatagcatctgatagactaaacaaaggacaagatcagcgaagagtgtttgcacgcattcgagagtagaaccctctttaaaccccaaatctccggtagaaattacccaaatttgttcttcttgggtggttcagtgaacaagatcttcgcagcggtaacgaaatcgagcttatcgagtttcttataggtctcatcgtagcgagaaacactagattcagtgtcgctgtgatgcgcaacgctagattccgtcttctcgagtttattctctccttttgtgcagaaacgtcgggtcctgtaaagcttcaaccgggtcgataatccggaccacgagcctctgccgcgaatcatcttgatctctcccggcgtcagctccaatcactactcgcgcattttccacacaatatgagcgtttcaaaacgcggtcttgaggctaatgttggtctccacaataaccggatctgaccgtaccgtaccgggtctagggttattggttcgatcagatagcgaatttaagactctcatgtgtcaattgtgatcatctgactttgtaataaatttcaatcaaatttggtatgtttgtcaacaaatatttgttaccttttgttttcagtttgtttttcatttttttttttcagctttggattctatttgtgagctaagatattgaccttttttttttcccctttctgttcaattaattttaatgattattatattatgatagggaaacattttattttgaaggttaaccaaaggcaaattagtggcaggcctctaatatttcatatattaaagatagaaagttgaacttttcatacaacttgtaactcttaagtttatagtctttacaacatcttgtacatcatattatatagttgtaagaaaaaaatgaataaacgcaaagttatattgattatgatatttttgtggacactacctacattcaataaacaaacatagatccatgattagtgtcatttttccccccaaatttttattttccgcaatgaaaaaatggtttattgtactatatatatattcccactttgcaccataattagtcgcaccactttgacaccttaattaaaaaaaaaaaaattgtgagtgtattaaaaagaaaaagtgtggtctcgagacaaaaagttgagccaaagataggggaatattattaagctttatttatattggaccccataataaactgtgaaattattaaagcataccgccaatattaatttaagttctatgcatttataaaatcattggctataaacattctataaggtatctagatcgttcgcggtaatcggttttaagaaaaaagattcataaatagttttaaggaaattgtaaaatggattcataaatatatggaagtagatttatttattgaagattcaaaactagtaataaaagctaagcaagaagtctcatttctgttgctaaaggctttttaatcgaaaagaggaaacataattggcatcggaaatctcaaaagacaagtctcgttggcattttgtgtaattttaataatcttgaatttagagaaaaagggtaaagcttgtcatcaacttattcgacagtttatataaaaaccgagtcatctttcatcggaagtacttccctccggcccattttctgacgccggcgatactctctttcacctctttctttctttcttctctgtcttttttgctttgtttctctccagtgaggaaaatggcggagtcattacgattctccgactgaaaaaagaagttaaaacctttgaaagaagaggaagaatttgaaagaaaggaaaatg

SEQ ID NO: 9336 - DNA, 3000 bp, Unknown
  misc_feature (1)..( 3000): cDNA_ID_3041446_gDNA_ID_1972096_Annot_ID_178577 3000 nt of promoter + ATG
gtcagcacatcaacaatatttagcatcttttcagcagaactaggtcgtgatatcagaagctcttctgtgttcacacctattgattctgctagagaaggatccatggcattctctgcatcaagataagcgcaataacctggcacaaacaagtcttttagataaataaaaagctaatggagtgaagaacaaaagcaagtcagaatcaaactgtaacttcacaaaatcgaatcttacttatcgcactagaaacaagaaaggaaaaagtagaagatatgtgtccccaacttaggatggattctagtaacaagtcccaaggtttctgttcaaacaaatgtattgagaatgggattcaagaacagtacctccaagcttttgagcttccttgatgatatgcagagctagagttgtctttccagatgcttcttttccgtaaacctcaaccattcttccctacacaaaaaccaacaaagttctcttgtaaacacacatttagagacctcattaattgcaatacctttagcttggctagtcctatctgagactctaaattaacaacaacctttggcaatcctccaactccaagagctagatcaaggttgagggaacccgtggatatcacagaaactctcctttttctgtaaaaccgctgcaatgacaacttagagtctttatcaaaatcacctgaaagctgtgacaatgctaaatgtagagcagtgtctttctccgctacttttctatcatctggaacttcatcaagttcacaatctgaagcttcaactgaccaaacgaaacacactcataaagacaggatacagagtatggaaatcaaaagacaaaggaaattagtgattacctaaagacgaaagataacgattttcatagccagagcaagccaaaacgcttcttcttccattcagctacaaagcaagataagagtaaacacaagagacatttgtttagtcaggagcttgggcaaatcatcaatgctactctaaaggagataactttattttggttggagtgttgtcctaatttcttcatctgaaaaataaaatctttctttcttatactcaagctaagaattgttgagaaacattagagacgaagagaacctgagataagtaagagaagaaacggaatctctgaatcggactggcccatgagagtcgacccatgccccgttcttcttcaagcggctcctccttcgctgttcagtttcaattccacagttgtgtcttctccttttctactaacgatctccagtttccgccatggtcattgtccttaagaggtaagacctgaaccagaagtggatacataaaaatcgaaaaccgtattaaaccgatcggttcatggctaatggaatctaatttaacggtttgatatgaggaccggaaaagaggtaacaatttaagggaggtgtaactttagtctttttttttttttttttttttttttttttgtgtgtaactttagtcttatcccgaacattttgctcaaataagattttatttttctatataataataaatctgagaagataaatccctaaattaagattgttcatgcgtggagcataacctaaaggtctaagaatgtggagtgcaaattcaataatgaaattgttggttctcttgcttttggtggacgcttcattaatattgaatcgtatcctaagcatgaaaacatatccaacacataattccgaggttttccaaagcagacgcttcattacgtttgacttacgtacactaactggtgataaccagcgaagcggtgtggatcctgcttgcataccaaaatcaaaatgtgatgatagagtgatggaaataggtaatactccagattatcacagtagtaagttcattgatttgttggcacatctttaaacttgtaagctttttataattactttattttgtaggtatatggaggagaccgcgtactctttacagacctaaaaagttcgaccacgagattcatgacgaagaagaattatgaagttgttggtgctattttcttaaattttttggcgattggttttggtgttaattatcatcattttaatgtattagtttgtttttatttgcggaatatcatatgattaattagatggcccgaaacgtctggtacgtaagagtaagaagatatgaaagctaggtggagtcttgtgctattgacaagttctcgacccttgtaaagttgtgctcctccttcataatgccgtagagactaacacacaaactgctatttgggagataaaaacgaaaagaggaaacaacaaggctaagcggtaatgtccaataggatccattcaacttcattaatgtgagataataatatttttttaattaaaaactgttacattatttagtcgtatcccgaatattgtgttcaatcttacgaggaaaacgtcgttaaccctagtccaaagcgtttacgaaaaataaatgggagcttcttcttcgctttataaaaagtactaaataaagactgaaaagatatagaaatccctaaatattgattgttcctgcgtctccgagcataatgtaggtgtttctaacaatgtggagtgtatatgcatgcaacggcgaaattgcacttctccttgcttttttgatggatgcttcactgggtcgacattacgttttaaatgtatcgaaagcctagctagttacataatcacactctttgcagtaataaacccaaagtttttccgacatatcttcttcacaaacatcacatatgaactttgcaccggtgtgttgtagagaagagtgagtggatgttcgtcatcttcccgctccacagtctcaggggcctttgtggacttaaaaaaataaataagtgaaattccaaagggagataattaaaaatcgatttggtatgagaaaaatctaccggtatggtatgagagaaccaaaatcgagcggtcgttaataattagaacgaaaacagaacaaagagagaacgaaaacagaacaaagattgcgaagagaa

SEQ ID NO: 9337 - DNA, 3000 bp, Unknown
  misc_feature (1)..( 3000): cDNA_ID_3038923_gDNA_ID_1972096_Annot_ID_178600 3000 nt of promoter + ATG
aacaaggggaatgaattgggttttaatcattgaagatatttatcgtaattaagaacaataccacaaaggggaagagcttttatcaaaagaaaagatgatgtgtgtataaaattggtaagttagtaacgtttggtgaagagcacattattttagccatgaatggaattgcgtgagtaagttaattaagaaggagatgtacgtaattatgaatttataatcacgattcacgaatattattactgcagtctggctgtatatacgtcaccgtctcattcaattataccatgttactttccgtttaagaatgaatattatatttttgcccaaagaaaaagaatgtatattatttacacaaaccagaaaacgtaagagaattaatgaattagggacgtgaagaaactagtaagcatatcaatatatcatgaagaaaaatttctgttggcgttttaaaaaaaaaagttatgcctcaaaagtcagtccaatgttttccacatgctatgctctgggcaagtatatattctttgaaccaccatcgaaataagtaataaaaatttgagataaaatatttaaaaatacttccggtgtcaggaaattgacttatataaattgtagtttataagaatttttaaaatggagttggtttaattaccacatgttgccatggattaattgattcctcctaaaactttatgttaattaccacatgcactacgaaagtacaaattaattgatatcttattacagttaaaaagccagctaatatcatcatcccagttttttccgctataagaaaattaatccgttttatactccacacaacacaacaatatccaaaacatgtttatgtcaaaaagagcaattacagaataataattacacgagagaatcaagaagagcgattgagagaattgaagaattgtatgatgctgtaatagtaatgtgaataataattagtcttttttttcttatgaaataatgaagaaaagtcattgagtacataggaatttgaccgtacgatctgaaatgtttacacgcgaagatttcgacggttgcgatgaagtaccttatgtaatcataaccattgaaacagttgacttttgttgacaaaactatcaaacatcatcgaatcaaataatgcttagaattattgattgcattgcaagaaacaagactaatgatgacccaaaaaccacgaactgtgatctgcgtcggagacatccatggaaacatatcaaagctcaataaactctggcttaatcttcaatccgatatccaaaactcagatttcagctcagctctcgtcatcttcctcggcgactactgcgatcgtggaccggagactcgaaaagtcatcgacttcttgatctctttgccggagaaacatcccgatcagacccatgtctttcttgccggaaaccacgactttgcttttgctggcttcttgggtttgttacctcgcccttcagatgggtctgagtttaaggaaacgtggaaagagtactcaaaaagtgaggagagagaaggatggtataaaggtgaagggtttgagaatatgcatctccaaagcaggagatgggcgggaaagattagggttcagttcgattattccgcatatggagtgttgtataatggatcaatatacgatgcggcgtctacttttgaatcttatggcgttcctcatggatcttctggtgacattctccattgattcttctttctggttatagtttatgattagacgtttgtctttgtcggaaactgtaaatataggtcaagtgatcgatcatgtaattggtgatcagtcaaataagtaatgattggatctttggttaaccaaaaatataattgaatctttctcgatttggagttttcatgttctcatctctgtactagtgaaattatgaaattttataactgttttgaatctattggtattggttttgaaacttgtttgttttcttttccttgatagatttgataaaggcagtacctgagagtcacaagaaattcttgaccaatatggtttgggtacataaagaggtaagggcttttctcctaccatgtgacgtttcttaggaacaaatgttgagttgttataaagcaaatactttttgtctaagaaagcataagctaaatttgtaggaaaatgtacatgtagtaatagttatcatattgttgatactattgtaggatgatgtttgtatagaaacagaggaaggccttacgcattgtaagttgattgccgtacatgctggtctagagacaaagaataacgtagaagaacagcttaaactattgagagataaagacacaagcatcccaagaatacaacctctaactggtcggaaaaccgtttgggggatcccacaggtaaaaaaaacattgaaagaaccaaactttgtattaagatcttgctctcttttgaaatctctttgtatgactttgtttgctctggaacatactctgtaggaactggatgataaaaagactattgttgttagcggccaccatgggaaacttcacatcgatggcttgagattgatcatcgatgaaggtggtggatataccgatacacctttggctgcaattgttcttccttctaagaagattatccgcgacaccgataatttttccaattaagtatatcatgtcttcatattaaaattgaaacttctagtagtttttgtgattgttctgttgttactttttaattagtgtttcggtcttttccgctacttgtataacttgataatttttttccaaaattagaaaatggtataactacttaacactgttatgaaaaaaaattttgaaacttgtaaattcttttgcatgttgttagcttatgaaccaccaacttagaaaggagataagaagaagctaagaaaaactagacgaccaaaaaaacatgttattatttcgaaataatatatatagccaaaggcccatgaagcccacaagtacattatcatcatttcaagaaacagagagagactaatg

SEQ ID NO: 9338 - DNA, 3000 bp, Unknown
  misc_feature (1)..( 3000): cDNA_ID_3041383_gDNA_ID_1972096_Annot_ID_178598 3000 nt of promoter + ATG
gctttgactttgagtattggtattggtcatcaagggattctgatgatgagggacgatgttatgaatgttagaagcgcggaaattactatgaagagcattggtcattatgaactgcgtgttgttatagcaagaaaccgagtctttggattcgccgtatatcgcttcaagctgccggaaaaatctatagtttttaccatcttgtcgccgaccggatttgccttcttttgtttttttatagtacttgtagagattctcgaacttctctctacacttcttgccactcctagtgtatccatgttcctccgacataatcctaaacatatgaggtatataccaacaaaggaatgaaaaatgcatcactttcatgatttcatcattaattcataatttgcataataatgcaccacaatattgaatttatgaataaagcagagattatcaacgacaaaaagtcaaactaagtcaaagaatagatgtttcttatttgatggttatatatactctttttgttctttaaaaacacatgaagaaatcttaacagaaactcctaatgtctggtcattcactctctcgaccaaaacaaaactagtaccacagatctgcctatactttaaagtaattttgtttttaactaacttgaatttaagaaaaccaaggggttgatgatgtcatattctccttattaataaaaaaaaaaaatattttaacgtgaaaggtctaatctataacaaaacaattatgattccaaatcaaaaataaaacccataatcgattgtcttttttctcttccaagttctgatttttatcttaacttttcctctccggaataagggcaaaaaagacaaggaaaggggattttgggaaaataaagctggaaaaaattagggttaaaaaatgagacctagaaacttcatcccagagaggacccttttgattagcttctttgaacttgtgatcaagacgagatctgacctccaacaacatcaacgtctcttgcctcggccacctccctgttcctccgccgtccgtaaagccactaaacccaccaacacagccaccactctggatcgttgtaatagtgttactgttgtttccagccaccgtaagcccttgtattccacgtggcaataaacttatctcatggtcggtgaaatgaagacgatggtgctggtccggcgctgaaacgaggttgaagccgaagagatcagaggagaattgagaagatggttgttctataccgtactgtggatggttttgatgatcctccatttggtttgattcggtagaagagaagagttcaagtcagagagtgtgaggccaaaatattgaaaaaccaaagcaaatgttcgagcgtttttgatttccaacgatagaaggtttatactttatactactagaaaaatagaaataaatactaaataatttaattaacaaaaccaaaacaatagaaaaggttgaatagagggatcgagtgagagagcgatagaggcggatcgtgtcgtcaatgtaaaaggaaagttgaatttaagctacagtgacgatggtcccatgcatgactgtattatataaactcttaaatcttctggggtatgtgtagataacatattttcttgaactatatatattcacagtaaaaaacaaaaaagggctgtactgatgaatatttactttgactatgttttcttagttgagtttgagattacctcagaacatatatttgcaaactggttttaatgatgcagtagtaaaacgcaccatacaatatatgacaaaatgttatcaatgtttacatttgactataaagtgatttttaaaaaaaatagttgtaatatatgttttttttaatctcaaaatttggcaatttgtttatttatttttcttacaatttacgccaatactacttccacatttaccttatagtttataagactggtaattaatgtatatggaaaatgttatggacatcaaaagtttgatgacgtacttgattatccatagtgaccaaaacactttcaccgcgtctatttgatcatctttaaacgtgaaggttaccatattaagaaaataataagtttacttgtttctctttctgtatatgtctgttttgattcgcaaatcacatcctactacacataattataataatgttacgtttagaagtagcggtgtgatagagggaaggagtacatgacaaagaagacgaggagaatccaaaagctcaagactccaaaatttagagaccatacaaacaagacgctcgatgaacggaaatgcttggtcaagactcaagatgctgcgtaagcattcacaaaacaaacattgtttcatatttgacgttcaagaaccacaacgcgcgttttgtgatttttaattctctctaattaggcaaccaacatcgtcattttgtttgacgcgcctttaggatgaaaatatgtgtatttgtttttgcagtttaggttgtagcttctaaaagtagaagattctctaagtttcttgttataaagaaaaataaattcttaattaagatttctttaatatatataactcggataatttggaccgaagcccaactaatatcgaggtgtacaaacttattgggtacaagcgcaccctggaaacactcagagggaagcccaaagctaattagcatatatataggacatgttttgtagtggaccaatcatgattagcataaggattttttacctaattaagttgaatggataacattttagctgaagcgccgagctaattagccaatacacacatttcatagtaaccaagtaggattacatttttagccgataagcgtgttttgtagccgaaccgattaggataggtttactctggattctttgcctaattttgatgcatatcttgagattttctttatatggtttcccatttagtagcttcaagcaagcttatgtctagcacactctaatacactagtacctttaactttgctttgtgtttgctccctttcgacagtcttgagag

SEQ ID NO: 9339 - DNA, 3000 bp, Unknown
  misc_feature (1)..( 3000): cDNA_ID_3041372_gDNA_ID_1972096_Annot_ID_178603 3000 nt of promoter + ATG
gaaatctgagttttggatatcggattgaagattaagccagagtttattgagctttgatatgtttccatggatgtctccgacgcagatcacagttcgtggtttttgggtcatcattagtcttgtttcttgcaatgcaatcaataattctaagcattatttgattcgatgatgtttgatagttttgtcaacaaaagtcaactgtttcaatggttatgattacataaggtacttcatcgcaaccgtcgaaatcttcgcgtgtaaacatttcagatcgtacggtcaaattcctatgtactcaatgacttttcttcattatttcataagaaaaaaaagactaattattattcacattactattacagcatcatacaattcttcaattctctcaatcgctcttcttgattctctcgtgtaattattattctgtaattgctctttttgacataaacatgttttggatattgttgtgttgtgtggagtataaaacggattaattttcttatagcggaaaaaactgggatgatgatattagctggctttttaactgtaataagatatcaattaatttgtactttcgtagtgcatgtggtaattaacataaagttttaggaggaatcaattaatccatggcaacatgtggtaattaaaccaactccattttaaaaattcttataaactacaatttatataagtcaatttcctgacaccggaagtatttttaaatattttatctcaaatttttattacttatttcgatggtggttcaaagaatatatacttgcccagagcatagcatgtggaaaacattggactgacttttgaggcataacttttttttttaaaacgccaacagaaatttttcttcatgatatattgatatgcttactagtttcttcacgtccctaattcattaattctcttacgttttctggtttgtgtaaataatatacattctttttctttgggcaaaaatataatattcattcttaaacggaaagtaacatggtataattgaatgagacggtgacgtatatacagccagactgcagtaataatattcgtgaatcgtgattataaattcataattacgtacatctccttcttaattaacttactcacgcaattccattcatggctaaaataatgtgctcttcaccaaacgttactaacttaccaattttatacacacatcatcttttcttttgataaaagctcttcccctttgtggtattgttcttaattacgataaatatcttcaatgattaaaacccaattcattccccttgttgcttctttaatcgaactcatgaggtggcttatataaatggtataattaatgtggattaaaattgtaccctttaattcatgtaatgtgtcatttccgtttcttcacgtaatctcaccgtaatctctatatataagcacacaagcaacacaatcgatcataaaccaaaaaaaacgagagagagagatggggaaggggggttggcttcttaactttctgaaccatgccaaaaatcaagaaagtgtggagaatcttgacaaaaacggtgccgtaaaggccccaagcagtgggtttaagatgccgttgcattacccaagatacacaaaggaggattatgaagagatggaagagtggagattggatttgcttctctcggaatacggacttcttgccttccatgacaatactctccatgagaagcgagcttttgcaatcgacacttttatatggcctcatcacccataatttcatctccttcatttatcttgtttatatttcttaagagtaacggagattgtagagatacaacattggaagagatgacaaaaaccgggatatcaatctaccggatatatatgtcacaaaaagattttagtatatttttagtaatttgatttctactatattctttagttttcattagatctctttatgttatgttatctatataagtttggctttggattttgcatatattaacctttccgttcaataaaatatagttttaccgcttcttatggtatcaaagccttcatccaaaacttactcaaatgagattgactctcatgttaaaacagagaaaaacagagaaaaaacaaaagatcattaaagtcactatataaacatcatgattcatctccatctccacccttaatttctttactagtccgttcgttctcgccactattgttgtccgtgattgtacttcttcataagcatcactgaggaagcaaattctaaaacaatagtatcttttaacaatcataaagtaaaacagtttttttttttttgttcttatatatatactacttattacacatttaaactttggttttgaacagtgaaaatgttgcttgcaatttttttaactttgtagaaatcaggcaagttcttaagttgacaaatgacatatactagtaattttcacgaacgttatcccactaaagtagtcatacccaaaacaaaattgtttaaataaaagtaacttaattatatcattgagattcgagtgaataatgccaatgaaatttaatattcattatctgacactctgaaactatgattaactacataattatttaatttaacgtttgtaccagctaatagtatacacgtttttatgacaaacatttttgaattttttgagttaaaaaataataatggttttcgtcgtaataggagaggacagacaattccaacgtgatatgtacgtttatcatgttacttagtcagcagatcatttcttcggattatataatagctatttagaaacattaaaggtgtggattatattatagtcaagtctttccaatatgaatattatatcatccaccaatacataattattgtcaaatacaagttgagtcagattagtcaaatacaggcaaccaagactcgagatcctcatcgtctctccactttatataaaccccaagtcagtacttctcataatataccaaaaacgaaactgagaaagaagttttatttattaatta

SEQ ID NO: 9340 - DNA, 3000 bp, Unknown
  misc_feature (1)..( 3000): cDNA_ID_3041423_gDNA_ID_1972096_Annot_ID_178585 3000 nt of promoter + ATG
tttccggcaatgggtaaggttgttcttgtttctccgtcttcttcctctgagagcgaaatgccattagttcgccagacttctcggctaaccgggaatccgaacgacgaagctcagtctagtcgatcgaaccggatcgagattccgacgttgcttgatgagccagatcgggaaggttccggtggacatctcgctgctcctgaagatccggtggatttcttatctcagttcgacccactcatcgacctagaggatgcttataacacgcagccgcagtatacagaggctgaggttaatgcgagattacttcacgaggattatgttgaatttgacctcgacccagttgttagctggaacaccgagatcactgcgaaaaagaccctttcaacaaccgagtctgtcgcggaagtattcgccctatgtggctatggagatcgcccgctcacttgcatgattcccggagaggaggagcgcccatggaatccccctcgagggtatgtttgtatgtatgaagcctacttcagacagtgtcacctctggtttccgattccgtctctgatcatctcctttctgaatcgccgtcgtatggcgttctcccagcttactccggcggcgatctgcaattttgttgccgctttgaccttcggcgctgaagaaggttacctggtaaacgttcgttgtttcgaggaaatgacgacgttgaaagctgtcaggtcgcccggctattgggttgtgaacaaccgcccaaagcataactttcttcccggtcccaaagtcagtaacttcaagaactgggaagaatattacttctacgtcagggtcgacctcgagtcgtatgagcgtccgttctcggggaggaaaaggacgtggacggagtttcctggtagaccttttaaacagatagggtaaagatatgtcgatcttgactagattctcatagccttttcttttgttgcagatcggtacagacctagtccggagtttcccgttgagttcgaaggggttttagaggcaatattccgagctcggcgtcgcgcgtggaaagacatcacgaggtcgcgcgtcaacagaataatggggaaggtccggaaatccttcgttagctttgctgccgggcttttgaatatgccacctcccccggcttccatcgaagagacgcagcctttggacggagaggcggctgcactaaatcctcccgttagtgctggcccttccggtgttgatcaggtctctcaagagacgggcaatccggattctcaagacaagacgtgtcttgaaggggccgaggtcattccagctcaagagatcgccgagtgcgagcaaagtcaatccgttcaggttgtcgagcctgaagttcgaaatgttaccggcgaccgctccgtcgtcgtttatgccgccgcgccagaaagcgaagaggtcaacacgggcctaaccatccttgatcaagacaagggtgagaaggttgcggagctcggggcatccaggaggtcccgtgaggagaaagggaaaggattggctagccaatccaagaagaggtcggcttctgaagccggtctagatgaagctgctgctccgaagacgtttcgcctgtcacgaggtgagactcttaattctgaccagtttacgttcaagtattctggcgagaaattccttgtgagagatcaggaggccgccagtcatctttggcgtaacttgatgctccccggagcggcggacttccctaatcccgacgacctggttctgaaagagggatatcagaagtttgccagatcatcacttgaggtacgcgcaggttatacgtcttcctgttgcctagtatctttgtattttggatttaaccatgattctttttccagaccgctgccctggccaacgatctgattgcgacatatgatcgcaagttgaagctgaagctcgccgacagagaggccttcgataacctgaagaagtgcgctgaccaggccaaagccatctatgccaaagacatgaaggaaatggcagcattgagagatgctgccgagattcataaggcagagatgagctcgttgaacgacgaggtcaagcggctcaacggtcgagaagctaatcttcagaaagagatcagcgatcttcaagtcgcgttggttgccgtgaaagagcatggggagagggagtgcaacaggctgcggaatgaccgagctactaaagtcgcccgtaccacaaagaaagcccaagctcgtcttgataaagtgaaggcttatctcaaggagcaagaggacctcgtcgggccgaaggtggacgctgagaatcaagctaaaggagctgaggagatagtgggtattctgatgcagagaggcgcgaagattgcggcatccgagctcagcggccttaaggagttaaccagaagggcggccgacgaggtcaatgctttgaacgtcatcgagctcggggatgatgacctgaacatgtccccggatcagctcggtttttcgaggcaaacctctcaagttgctccggtggcggaccagcacggctcaaatgtcgaccttgttagcggaagtgatattcgacgcgtaagcgttgaagaggcgaaccagacgatctgaataggtcgtctttgtaatttattttgatacatcgatcgtggacccaatttttctgggcgatctcaaaactcttatttaaccgtggacccactttcggggcggttttttaattttaacttctattttcgatgattttccatcttgcctgtttccgaggcagaatagtattttttccatgtatgagctttgtcattttttggaaaaggaaattgagggaagtcaacccgtaatcatgtaaattcccattttcccagttttggagaaaatgcaaatattagtgtttctcggaaaaggaaaatgagaatttccagatcgcatttgagaaaatttccaattcgattcctgtatttgcctctataaatacttctttgttgatcaacaattgcttcaccggacttttcctcctatttgcaagatg

SEQ ID NO: 9341 - DNA, 3000 bp, Unknown
  misc_feature (1)..( 3000): cDNA_ID_3041406_gDNA_ID_1972096_Annot_ID_178592 3000 nt of promoter + ATG
ggttcgttctgatcaatattatctacctgcccgttttctttcaatttctcattccaattacaatgagtaatttctttttggtatcttctccttaaatgtagaaagaaactggaatattaggcctcctggttttagcagtgatgagttcaagacatttcggaagccagtaagaattagagatctgcattttatcaattcgtcttatttacaaaatagttcctaacatctttggttgtttccttggataatgttttgcagttgacaacagatattcacaaagagcgacttgcggctgtaagttttaacacatgattttaaacatcctaatagtatagattatggttctgagtagaagagaaacttatatattgaagattttcttgttgattttgtatatacattgtggattttgaagataaagaagtcggtcacggcaacagaagcagcaaacgccaggaatcagtttgggcatgggactgctaatgcaagaggcggtcaggcaaagacaccttctaatcccatgggctctacaactttcaatcactgatgtattagatcaaccctccaatcgtgtttggtaggaattttccattaaaaaggtacgaaatttgtatcacccattttgtaccctatctagatctcacagtccaagataactacaggcatggaggctaggctagatcttaattttaaccattagtaaagtatcttaccacctcatgggattgaattgattcaatgttttgcaaaacggccaaaagtgtatgaattgagtgatgagacacagttataaagcggttacaaaaccggactagccggtataatccattaaacagattcttctcatacagttgaatcttccatagctttgatcaattttatagttttttactgaatgtacacagaaaatcttggtacaatgttggcttcattagtccttttagccttcaactatcttcactggcgtcctgcagaataaaaccgaaaagaaagctttcagggcacttttttcgatcaaatttacccagtgtattagttgattgatttcacatacccgaaaggactctgcttgattgataacagctcaatgtcaagctgcaaaagaaagataacataaatgaacaccactttagaagccaacaaaaatttcaatccattcaacttggttacctctatcgtagcgtttggaggaatctcttgcactcctttcttcccgtaagccagctcgggaggaacaatcaccaatctctgtatataaacctcatagggtcatcaaaacaagactttgagtggcctgactttgtgaagcctttcggtttcaaaaactaacctgaccgcctacacgcatcccttcaacaccaagatcaagtcctttcagaacattgcctctctctgattgaccaacgtcaaacccataaggctgcaaaaattcattattatcagtaaaggatccttgcatattcaagtacagtaatggactctgtaagattgccttataccgttccacctccaacaccaagtccttgtcgacttgtcatgaacgttatccctttccattttgcaacatagtgaacctgcgacacaacatttgggttaagcatcaacgcttgttaaaactgttagcatttacatgtccaaagtaaaccaggaaacgtattcacaaccgtactgcgacccgagatcctttcacagcctctgctccattgccaacctttatatcatagtacctgccacaatataaacagaaaccaaacttgtgattattgcgagaaagacttgatttttcaatcctgttttgcggtatgagtactgtatcgaattcaaacaaaagatgatgcattggattacggacttgagaccattggggagagtcgtgaaatcgctttccggtaacttggatgcacgtagctgcagagaattgtatgtaagagattgagttttgagtcaagaacacaatgtatgcatagatatatatattgcttacagctcttctactggtgcttactgcctcggctgaaccagttgacaaaatcccagaagctgttttgaatcagataacaacattttctaaggattttgatacactgagcttaagtggagatgtgaagaactaatagagaatgatctaacctgtagcgagaagacatccaagtaagacccttctcccttcacaactcaccggcgccggaggcaggacagtctctgttctgatgaccttttcgcagccgggagaaggtaacgagcaccggtacggtttggattgcctttttcctgcaaattataacaaatccaaaaaaaaaacaatttttgcttaatcgatgtctcgatattggttcaaaacatacaagtaattgacagagagagataacagatgtgtgtacttgagggaaagggaatggaggaagacaaagagtgatggagagggtgaacaagtttcattgttaagatcattctttcaatgtttttgtgttagttcacagattcttgttgtctaaaacaaagaaactgactagttcttgtttgccttccttcagagtgtgcccttaattgtgtgtgagacgaagaagagagtaagtgataaaactggaattctcatccacaagttgtagatttcatgattctctcaagtcaccaccaaacttcttgtcgtagaccatataaataaaaaatatttgttttgctaaaacttagaaaagatcagtttttattttccaatatacatgatgatgaatgatccaccaacaccaagtgcgtccataatcgttattaattaatctgcaatacattagggctaatcacggaataatagttttttgtgttgggtttgtaatttatgtgtccggtgaaacctaaatacagacaaaaaaagtgctggttagtgtttggtgagaatcggtaataaaaggtttaaaaaaccaaaccggtcacgtagttttgtttgttgtgtttattaagagccgccaccagcttcttcctctctgtttaactctctctaaaccc

SEQ ID NO: 9342 - DNA, 3000 bp, Unknown
  misc_feature (1)..( 3000): cDNA_ID_3041399_gDNA_ID_1972096_Annot_ID_178594 3000 nt of promoter + ATG
gagcttagaaatgccgcaaaatccaccaaatccccaaaattcaattcagttccagcatcctcatccttacaccacctccggcgaccaacaaactcagccgccgataaaatccttatacccatacgcctcaaaacccaaacaaatgtcacccattagcggtggcggttgcgacgacgaggatcgcgggtcgggttccggatccggttgcaaccctgaagacagcgcgggaactgacgggaagaggaaattgtcacaatggcatagaatgaaatggacggatacaatggttaggcttttgatcatggcggttttctacatcggtgacgaagctggtttaaacgatccagtcgacgccaagaaaaagaccggcggtggcggtggcggcggaggaggaggagggatgttgcagaagaaagggaagtggaaatcagtgtcgagagctatggtggagaaaggtttctctgtgtcaccacaacaatgtgaagacaagttcaatgatttgaacaagaggtacaagagagttaacgatattcttggtaaaggaatcgcttgtcgtgtcgttgagaatcaaggattgttagagagtatggatcatttgactccgaagttgaaagatgaagtcaagaagttgcttaattctaagcatcttttctttagagagatgtgtgcttatcataatagttgtggtcatcttggtggtcatgaccaacaaccaccgcaacagaatcctatttcgattccgattccgagtcagcagcagaactgttttcacgcggcggaagcagggaaaatggcgagaattgcggagagggtggaggtggaggaggaagtagagtctgatatggcggaggattcggagtcagagatggaggaatcagaggaagaagagacgaggaagaagcggaggatatcgacggcggtgaagaggttgagggaagaagcggcaagtgtagtggaagatgttgggaagagtgtgtgggagaagaaagagtggataaggagaaagatgttggagattgaggagaagaagattgggtatgagtgggaaggagtggagatggagaagcagagagtgaagtggatgagatataggagcaagaaagagagagagatggagaaggctaagcttgacaatcagagacggaggcttgagacggagaggatgattctcatgttacggcggagtgaaattgagttgaatgagttacagtcttcgggtacacgggttgacccgagttccgctaaggggtgatgctgattagtatttaggattagagattttttacaactttgtagtttctaatgttaggattctcacgttttagtgacattaggcagtaaattaaatcttaaaagtatgtactattgtagacaaaaggtctttaatcagcaaattgattaagcatgtctacttttgtagtttcaattttcgaataaggattctctcacgctgtcaatatttaagtggttaattggtaaaagtgagaagaaattaatcaatcgtacaaaggttaacacacatactaagggaaaaaaaaaatgacacacccggtgggactcgaacccacaatcgtttgattagaagtcaaacgccttatccattaggccacgggtgctctgcttgcactagagtattgagaaaacattaagaaacataattacaatcagtaaaactacccacggcccacgggcgatcctcgtttatttaaagaatatatgtttctctatttaataatttacccttcaaagcatcacaatggagagtttttcttctatttttaaccaactagagttttgtgtacaagtagttattaaagatataattcaagaactgttatgatatttgtaagaagaagagattttctattataaatacttgagtgaaagtttaggtaggttacacaatgtcaataatgtgacaaagattatttgagatgatagaacacaaaaaaatatcataccataccactatattccatttccatctagtgtttgagcagatattctgctttgtacatgtttcttgcacctacaataagattcaaaagtttaattagataccattggaactatagcgatagttgcagttttctctaaagttttcctataacatattttcggacatatggtaggagcatctggaagattatgaggatcaacaaatagcggaaaacaaattactgtatacacattgctttcaaaaaccaaacaatcttcgtcaaatgaattttgtaacttttgctgaatatgataccaagtggagtccaatgacaaacaatctccggtatgaatttagtgtcgtacgtgaagtatatataagttacaaatcatgtctttagaacaaatgatggaaagtgatatatcatatatacagtgagacacgatgcgatcaatcaaacgaccaaattaaaaaaaaaaattagtaacataattatgactcgttgttatatctaaaaatgacaggaaaacattggactaaaccatttttttcagttttaattgttgtaacacctgtttccaacgttttatattgatagtattaattattttcttcgttcacccgttacatcaattgaaaattgaattgttatcatcaaaggttttataattttataaattttaatcttacaaagacaaaatcattatgggaatatatatctgtgaaagaattttgataatatgtattttgttggaaagctgaaaaatatgaggtaacgtaggttattgactgtaacggaagcgaatttaactatgtttcggtttggattaaccaaaaccgaatagaataacgcaatttaactttggttcggtttggtttttgtgaattaacttttttttattccacccttaccacttgcctaacggagccgttgtgacggcccatccacttttgcgctagttcacgccttgacgccttctccttccgtttcttcagcctctcgccgctaattaacgccgtctctggttgctaccaccgccgtaaccctaacggcattttta

SEQ ID NO: 9343 - DNA, 3000 bp, Unknown
  misc_feature (1)..( 3000): cDNA_ID_3041391_gDNA_ID_1972096_Annot_ID_178596 3000 nt of promoter + ATG
ggggcgaatgtgagaaagagggagaaatgtggggttggatttttaatttcgagttaatgttttagtgtaaaatgacttttcactatttctgtaaaaaataataattgatctgctagcattgaaatccaccattcggtggtcttttttcattatccaacataactctttttattacttattgttgtcatgtgctgtgtacttgcatggaagacaattagccagaggacacaatgtgtgagttaaatttcaatttcgagttgtgtatagttaaacagtatttatttgtgtgataataattaaatagagttgtggataatgcccgtaatggaacatggtaacaaaatggcatttaattatttatgatgacaagaagtttggtctgttctattaaatatctttgtaggatatgaacgccaagtgtcgtcttgagttctttatcaaatactaaaaaactctcgtctcgagttctttatccatacttctcaagtcccgagatttagtattgattagacacgacaattaaaggaaaactaaaatctttgagaaattatataaaacaaaagcaaaactgcaggctgtggggttcgaacccacgcgcacttatgtgcagaagaacttaagtcttcccccttaacctctcgggcaaacctgcgctgctgtttaaatattccatttttaagtttatttagtaatcgtatttctgtggtctgtgaaaattgagctactttcggcccaacgaaaaacttgcatatttaaacatataggcccagttacaactaaatcaaaagtatttatttttggatttacttaaatgtagtctttcatcctaacttctcacaaagacatatataaaattcatgcactctccttttatctagttggatcaatctcaagtaatttactgggaagaaataagaaacagctgctctctgttaggccttagtgttataccttaacaaattattaatgggctattagatattattttaggcccaattgaatcaagtactaatgcagatttaaggggggtgtattgacggcgttaaaacggtttctcaacggaatcgtacgtagtcacacgtgattttattgtttaccccggattggtcatgcgttccttcttttccacttgcgcggaccactcaatgacactctcttcttttgtagcagtggcccgacaccagaatgcagcatttaatctctcaaattaccattttgctcctacctcttttaccccttttggtattttgtgtcttttttctttctatttcgtgtgaaaaaggatctcttccttaatcgtattatttcttccgatatctacttttattctgttttctatttttggtaggttacatcttttttataaagaaaatatgagctaacacgacattagtgttgttaaccaaagaattggaaaaaagttataagagagataataagattctcttacagagactcacttcagtgaaaaaggaagaagcaagtggttcccttaagggaaaaaaaagtcacgtacgttcatatacaactttaatacgtactgtgtaactcaatagatcgtgcagtaatattcagtcgtattagtaagaaggaatttatttgctaagtaaactcaagcctcctttttctcttttttttctttttagtaaaaattaggctagtgttttttttgactcagcaacactctgcttaaatttaggagtaatttgacctattcctacgagtttctaagtgaattctgttggggtcaaagaagcaactagttgaattagtggaaaatcgtttcctttctttacgcatagttcacgttggacactcagtctcaatgctttcacgtttcacgtagcaacaacatatattcatcagtttgtgatcgtgccatcgtggataagttgcaattcagtgaaactctgcaccactttgtgcaattatttggccgtctaatctatttgtgagaattttacaatctaattgttctattatttcatttacttgtcatcaatttattatatttgtagccaatgaacgttgtaattaaagaaccaaaataaattaatatcttgaaatttgtaacagtcactagaagctgatttcttattaattgtatcactaaagtattattaaaaacggttacaaattatgataattatatatttaataaatttcgtgtgtcacatttcttttaaactacaattatgaatatctaaaactcattcatgcatatcttaaaatttgaattcaaaactttcttatcttatctttaggttcttaattaacagtcactaaaaatagtcaaagttttgaagtttatgaaaaaagataagagtataattaatggatacgcctcgtaacaaattcttgtaaagtatagataatatacatttgttaaatatgacacgtgtttattttttttttaaatatgatcaaaatatattttaactacctagatggtatgtatgtctccaattttgaataacaagtcaattgttattagaaatgtcataatataaagaagggaattaaatttgcaaagaaaaagtgaaaaacaaaggatttgtattttggagaaaattaaggactggatttgcaaaaacgaaaaagtaacttcatgtatattgtcttccttatagtctctataaactattatctcaaattttgtctggactctgaaactcacaagacttgactctggcttacttggcttcatctttttctctctggtaatctctcctgcaacttcaagctttcattttcaaataaatgtaatcaaatctgttattttcactcaagaactaattgagttctctatccctttcaattgaaattgacattaaaatgaaaagattttgaggaggtttcacctaccacaaccgaatcacttctttctccaaatattgtttctttcagtggccaagaatcacaatcaatttttgtatcttccacaggtaaattaattgtgattgaacagagaagaggacaagtgatcttggttcaaaagaa

SEQ ID NO: 9344 - DNA, 3000 bp, Unknown
  misc_feature (1)..( 3000): cDNA_ID_3041410_gDNA_ID_1972096_Annot_ID_178591 3000 nt of promoter + ATG
cccgtctcacccttttttgaaagaaggaagattgtatagtaaggaggagactcgaagttccattaaaacatttttatggtgaaatgggaaacaaacctgtccacggtaatggaaaagggtgatgttccaccgtggactgaaagagtccaagaagttcattagagcaccaggtctctcgggaaaggtgaatcggcatagaacctcgtctccaacagtagatcttcctcccatctgatatgtataaagtgtgattcacatgacaactttgcatcaaccaatgggaatgaattggaaatctagtaatcctaaaggagaaataagcacagagagaaatcaatcaaggacgcaccaagtaacgcaggtgatctttcactaagtcactggtagtgagattgacagttttgagttgagaagattccattctcttctgtagtgctttgagctctccagctgtgtgaactccgacactatacaacaatttacaaaattttgcagattagaggatgaataaactactcgggaaggaaggaatttttcaggaatggccttacctgtatagtacaacagcctccttttccgagctacatctatatttgaactcgcttatgttcattggtccaacctgcacccattaatgttttgtcttacatacactctgtaatgtgattaactactatatgctataataccaaacacacaccagctcacaaaattgcttaaagcttccaggtttttccggcatgagagtagcaagaacagcttcctgttgcctaccgacattggcgagttctgtcacaatccttagcttgtcaaagttcatgttagcgccactggttatggctacgacattcacgtcctttaggccataatatttacagtatgcctcagctccagcgagtgcaagagcccctgctggttccaatatgttccgtttctcctcaaacatatcctgtagagacaagtatctgattatctacaattcagtatgcatatgccaaacaccgtctgacaagggataacgtatcaaggatagtaccatacctttattgatgcacaaatagcatcacgagtgacaagaacaacaccatccattagatttctgcttatacgaaaagtctcttcaccaacttctttaactgctacaccatctgcaaatcccccaacctggtccaatatcaccctctcaccgtgatgcagcgacaaagccattgcatttgcgtcagctggttctacaccaatgatcttcacctgcataacccaaaagtcacaataagaaacagaagctgaaggaactcatttcttaattaaaattctggattttgtcacaagtagctgttattaacaacaacagaacagaaggtgacattgccaaagcagtcacagcaaaaagagtacctcgggagaaaccctcttcacataagcagcaataccagctattaaaccaccaccaccaactggcacaaatatagcatgcaatggacccttagcctgacgagtgatctccatcccaacagtcccttgtccagcaataacatcagggtgatcaaaaggaggtataaacgtcagaccctcttcttcagctcgtatcttagcatgtgcttgtgcttgatcatacgaatctccgaaaagaacaaccgttgcacccaaattctctacagcttgccactgttttcaatcccagaacaccatcagatactaacttcaagacatgagaaagcttaaaaatggaaaatacctttatctcaggagtcgtaacaggcataacaatcacagcagtgcagccgagtttactagcagataaagcaactccttgagcatggtttccagctgaagagcagataactccttttgccaattgatctgctggaagtttcaccatcatattgtaagctccacgaagcttaaacgagaatacctaaaacaattccagtcaccactcagtacaacaacacataaaacctcagatgtagtctcaattccatacataattcacctaaaaaatcaaccaaaatgtataaagggagaagcttcattacttacaggttgcaagtcttctcttttaagatacatacgaacacctaatctcttagatagcttcttagccaattggagtggtgactcaatggcgatgtcgtaaaccttagtggacagtatattcgtcaaatactccatagcttccgcgatgcttccgttctcagcctcgttcgtacgttctggtacagcaccgaggtaaccggcagggtattgcaacgaattcggagagaccttaagacgtggtaaaggaagctttggaggcggtggagtcatagatgtttcatctcgggacagaaccgccactgcgatccgagaacgggaggagaagtgagtgaatccgaccactggttttgatggacggtgaatgtggctacggagagaggattgcgccgtcggaagctgaacggaattcatgggtttagagagagttaaacagagaggaagaagctggtggcggctcttaataaacacaacaaacaaaactacgtgaccggtttggttttttaaaccttttattaccgattctcaccaaacactaaccagcactttttttgtctgtatttaggtttcaccggacacataaattacaaacccaacacaaaaaactattattccgtgattagccctaatgtattgcagattaattaataacgattatggacgcacttggtgttggtggatcattcatcatcatgtatattggaaaataaaaactgatcttttctaagttttagcaaaacaaatattttttatttatatggtctacgacaagaagtttggtggtgacttgagagaatcatgaaatctacaacttgtggatgagaattccagttttatcacttactctcttcttcgtctcacacacaattaagggcacactctgaaggaaggcaaacaagaactagtcagtttctttgttttagacaacaagaatctgtgaactaacacaaaaacattgaaagaatg

SEQ ID NO: 9345 - DNA, 3000 bp, Unknown
  misc_feature (1)..( 3000): cDNA_ID_3041427_gDNA_ID_1972096_Annot_ID_178583 3000 nt of promoter + ATG
gaagctcgtcagctcgtccgtctcaagtagctaatcagctcgcccttctcaagaagctcatcagctctcccttcttaagaaactcgttagctcgctcctcttcgtcaagcttctcaactcgttctcttcaccaagtccctcagctcgtcttcaagctatccagctcgtctttaatctctccaactcgcctttaagctcttcaagctcctcagctcgtcctcaagctcctcagctcgtcttcaagctcttcccatcacagcgaccatctcctcgtctagctatcagctcatccctcgactgcgaaactcatctacctcctcgcctagcggaagttcgtccattgactgcatagtccacctatctcgtcgtccagctcgtctagaccttcagcaaacaactcggtttgtccaactcgtctctctaccacggttcatccagctcatcgcacatctgccggctcgtcacctacctgccgacctacctccaacgatggcctagctcacttattctaatatgaactacgtgtggcttgatccctttctaagggtacgtaggcaaccttttacaaggttcagctataaaacgaataaactctattcttcctcggacatcaagatcgtcttccggcctcaagctcgtctttcatctacaatcggctcgttcttactccatttatgctcgttgaagaaatcatcctttgtaatccgtccaattcgcctaagtcgcgggctcgtcattaatagaaagattcttcttccttccctagagatcccattttcgtacttgtgtgattcgtgcatcaacagttggcgcgccaggtagggggatagctcgaagatatctctcaaaactacgaacccgcgacgaaccaaagtgacaacaaacggactacatggagcattcgataccgactcgtcaggctctggaagcaaaacgacaacgtcgatccccgggagagccagtcactcgacctcttcatccgatatcgcatcatgttctccgacctcttcatttccttggggtttagtaatctatcttggattttagggtatagtttttaattccattgcatttcctaaatgtttttagtattctatcttggctagtgtactagtctagtgtaccgaagtggtgtactgttctagtgttctcactttgtgtactatcatagtgtacgcatttggtgtactagtcttgtgtactaatggtgtactgttctagtgttctcacttggtgtactataatagtgtacccatttggtgtactattctagtctacttctagaatgtcaaagtatcaatccaaattataatacaatatatttcaattcaagtgttatgaagcataataataatctagggttatgactttgaattaggaatttatttatttacttggaattctaaattctagtaatctaaggctttagggtatagttttaaacttcattccatatgatatatggttttccttgggtttagtcttctctctttgtcttttagtgtatagttttgaatttcactacatttcaataatgtcttttagtgtatagttttagggtatagtttttaattccattgcatttcctaaatatttttagtataatagtagactagtctagtgcaccaaagtggtgtactgtttttaattcacttggttactaattggtgtacccatttggtgtactattctagtatactattatattctatcttggctagtgtactagtctagtgtactagtctagtgtactagtggtgtactattctagtgttctcacttggtgtactattatagtgtacccatttggtgtactgggtttctctcaaacgtctctcttctcgaactcgttcaccctcgatttgttgtacaccgactgtggctagggttcgtgaaaaaccaagaagagtaaagtaactcaatctcagaataaacacgggctcagaagttatttggataaaaaacgtaatgaaactatcgggctcaaatatttgggctcacttaatacgaattggagttaacgggcctaaaatgagttttaaaacccaatccaatttgtttcgtcgaacccagccggaatgtgtgtttttaaaacacaaggctactattgtatttgacacctcttttggatttttgctacctttttctatctcacatgaatcctattagacaaacccaataaaaagtaccctctcagcatatttccaaaaaaactgtctagttctcaaataattttctaaaaactgcctacttttacaataaacccttgtaaaaactatgatactgcagttaaatcctatggaatgattagacatatgatcatgaaagcgacatatgtgattgagttgtccaccaagaaagaataacagtaactggctcaatatgattttcttttgatttaaatattgttttaaaaagtatatcttcattacgaaaattatgttttggttttggtgtcttaatttttagtttggtttttcatatagagagggacatatctaccaattctaacttgttgatagccgtaaccaagattcaagaatagttacctgccaccacatcttcgcggcgtgtatctcaagcgtcatgatcgttgacgccgtctccaccagatgtttgtcgccgtaagctaaccctaataaagcggcggagtaataagcgtttacggcctcgcttgtgctctcttgattccggccgtcccagaactccgttaaccctccagcccatgagtgtagcttgaaaagatcaaaatttctcaaacgcggataactagaatttgaattattatcatcttttctcccaaacgtcatgaaatccgccaatagactgtacgcttgagctctgtatctctctccccacaaaggatcaaacttagcgagcacggcaatagcgtagagaaagtaaccaatatggtaatgatgattattatatataccgaacccgaaatcagcttgtttccacttcaggatcgaagtgaggaactaagcagcaatgtagaaa

SEQ ID NO: 9346 - DNA, 3000 bp, Unknown
  misc_feature (1)..( 3000): cDNA_ID_1696434_gDNA_ID_1972097_Annot_ID_178622 3000 nt of promoter + ATG
ggaatggattctacatagcaagcattattgtaaagaagtgaaagcttctgtaatggttgtggttatcggtgttgggatttgtactgtgactgatgtcaaagttaatgccaaaggtttcatttgtgcatgcactgccgttttctccacttctctgcagcagattgtaagtattcatcacaccatctctttgtttatgttagatctggaatttcttagatcagtattcatctttttacattctttgaaacagaaaggctcaaacttttcttagatcagtggtatttggagggaatcttttgtccctttgagctccatctatgtctaatctaactcagtattgtacacagattctcctgcataacgtaaactcaactagatttcctttccagatctgaattcgaaattataaatctaggagacacagttctgtattccttgctggagtcctggaaagggcatttttctctcgaaacttcttagatactatggcgtgtcaagtgttctgctgacaaattttcactttttcttttggttacagtctataggctctctgcagaagaagtactcagtaggatcctttgaattgctgagcaaaactgcaccaatccaagccatttcacttctcatctgtggcccctttgttgactatttgttgagcggcaaattcatatctacttaccagatgacttatggtgccatcgtaagtaaattctcaagttctctatgattcagatgactcaaacgtaaacacaaaatctttactttttatctctcatttttgcagttctgcattcttctctcctgtgcattagccgttttctgtaacataagccaatatctctgcatcggaagattctcagcgacatctttccaagttctaggccacatgaaaacagtatgcgtcctcacattaggatggcttctctttgattccgagatgacattcaagaacatcgccgggatggccatagccattgttggaatggtgatctatagttgggctgttgatatagagaaacagaggaacgcaaagtcaacgccacacggcaaacacagtatgaccgaagatgagattaagctactcaaagaaggagttgagcatatcgacttgaaagacgttgaactcggtgacactaaaccataagtgggtgcttataacccatttgaaattactcgtcgctactgattcgaattctttatacaaatatttcctttgtgtgccatttactttgttctttccacttcctatatatgtcttagaacattttgggcttttcagaaagcccataaatccttctttgcttgagaagaaggcccgtccttgaatagtaagtgtcctatatagtaaagtaaacagaaatgtcaactgaagcatgtgattttattcatttgattatatatgtctatgaactaccaaaacagatctcttgtatcatatgtatgattcaatggcatacaaatttgaaatttctaacaatgaccagtttctaaaattttgtggaaacgagcataactcaggtcatgagtcaggacatgtgatgtgtgtttaaaaatacaagaaagtacatgtgatgtggtttaaagctataagcaatgattaaagtaaaagataggttgttgtttcactggagctgtaaataattttgtcaatagtttgtgattgggaacattgaaaaattactggctttttaagttaaaaataaataatatacagggttaattaagatgaggaaagaatgagagaggaggagagaggtcctacaaatatgaaaccagaccccaaaaaagatccaaatcctacaactaggtaccatactattactaggccctcttttttcctctgctttaatgtctttattggaaccctcaatacctatagacaattcataaagatcaaaacaaaattttagggaaaagaatcaccttttattttttataatcccctcaatatgatcaattttaaacaaatttaaatcttaatacatataatcccctcaatatgatcaaattttaaacaaatttgtgtcactaatctttgcaaatttctttattaattgccactttattcttcttcttattttttgttccaaactctttattaatcaaaggtttgttttgtcaacttccaaagccaaaaaaaaatcacaacaatcttgttgttcttgataagtgtatagcatttattattaaacctcaatggtcgcttgactaagcagttatacactgattttggacgtgtttatagaccaaaccaaaaaagcaaaaactaaaaaaattgacttttacattacatgttctcccttaacccttattagtaaacgtccttcacgtgctcaccgaatcaactttttaataggtttagatgtctaataagtaatttacccatttaataaccaacttaaacacattgataaacctcttttttccaaaccaatttaatttccaaaactcataatttttcttttactgctatttcagagagtgtgaaaaccgaagagatttaaaacattattaatttctttgttcctttttctcttttatgtctttttttttgtgtgtgttggcttgagctttttgtgttttgttttgtcttttttttttgctcttgctttgtggtaagtcacattctgattaaaatagaaatgctttttccttggtaaggatcatcttttcatgccgattgcatcagtgcagatttccttatttactctttctcttctcaaatttccatttttttctttatctctcccactcccactcataaaattagttttgtctttctttccccaaaaatctttacttaaaatctttttcacccttttgctttaacttttgtttgctcctcctctggatcgtatcagtaaactggaagaagaaattgtgagaaaaaatggagaaaaccaagatgattacgtctatgacctgttgaagaaaccctactcagaataagagtaaaactctgtgatttttctgactaacagagagagagacacctaaatg

SEQ ID NO: 9347 - DNA, 3000 bp, Unknown
  misc_feature (1)..( 3000): cDNA_ID_2182177_gDNA_ID_1972097_Annot_ID_178643 3000 nt of promoter + ATG
aatcccggtacgacaaaatttctggctttaccaatcgtcgaagcagatgaaacaacgaggatcataactcatttaggatacgatgaacagaaggatgtattcaaggtgttatgtacaaggacaaagcccgaaactccacatcttgttttgacggtgggatcgggtaaagaaccttggcgagagatagtatgcaaatttccgcacacagtaattggtgctggagtattttacagaggaactttatactatcttgctgcttttcactcgaaaagtatcataatgaccttcgacgtcaggtctgaaacttttatgcccattacatcacctgatggagtcgatttgaatcaaggttcctggagacttgtcaattacagtcaacaggggggatttgcgttagtgaatgaatcaagaggtttcatttaccaatcgaatggcggcgatgcttatcttgaaacgtgggtttggaatgtcgatacaagaaaatggtcgatgaactccatcctgattcgtaaatggaaagattatgctcaagacaatgaagattatgactaccgtttccgaggaacccaaggaacatacgaacttgtttttgcaccaatcagggttaaagaagacggatcactcactgtcatcttatacaatactgatacacaagcattcagaagatctaaggttcaaatgatgggtgaaggtcatgagtttcgatttgtggacaccttcttggatcatgttgatagtactctgcttatatgaagatcaagagttggtctgtattcattaaactggttggttgctcaagctaaatattctctttaagtactagtactatgcttatttagtgggattgttctttcgtattcgcttctattgtccttgttaatctttatttatgatgttgctaaataataataatgttgcctctcaagtactggtcttattgggattgctagttttcatttctatataatttagttaaactttatttatgctatataataatgttttcattctggtattagttggattggtggtaaatgattgttcagctctttgtagtttgtgcgaaatgatcgttcgtctttcactcagatggaactttcattagagagccttttgatgaaacaaaagttttattaagttttataggtcagcctcagtactcaacccaaaaagttgtaaaatctattaagataacagaggaggaactaagtcaaatcttttggcacaaaagagtactatttacacacttgtatagacatattactcttctgttttacaactagcagtaattcgaccaaaagactgaacaaatgtttcaattccaataaaggactcatctacgactaataccatgcaacatacatatttccttaatcacatccatcataatagtgtcttgctcatgtttctcttcatgttatccttccaaaggttcagaatccacctcttgatgagtgttacttaccggtgaaatatgacctgaaacttttagtgtaaaaaaccataacatgttttgtagctttggtttcagatgtatgagtaagtcctcctcctcagccattccttgtggcttttcttttacgaattcttgattcactgtcttcatttattcggaagagcctcttgactttagtgccgactgcttcttctagctccaactgagtgtactcatccataagtttttctggtgttagattcagacaatgaccaacactcgcacaaccgactttagttatctccattctttcttctgcactgttgttctaagtgttgtgttcaaaaaagtttccatgtaaagttgctgcttgtacttccttctctaaggaacctttcacatcatcatctttgtttgagtgaatctccttccaacattcaactgagttttccaagattgctgtgattaaaatcagaaagaaacacggattagaacaaaattagtttagccataaaactgaaaaagtaactcaaatcaaatgaatacaagtatataccttctatagagctacactctcagatctaggagtgcaaataagagtttctctcttagttttggtagttttctcagcaatagatattgaaacgatattcttaacaaggtaacggccagtagacacgactagctcagcttcagtgctgctcactggtacttgcactgaagcaggtgataagcgcttgacaaaaagtacagagtgtgatgatacttcctctttgtcctccttaactgcagatattaaaactgtgtctcgctcaattttctcttcacgttgtccttccataagttcagaattcaactctttagtgcttattatttgagaaactatcaactggtttttccagtgtagaatccagaacattctcataatcataacagatcctgcacctttggtttctgaggaaataaggtgaatcatcaatcattccttatggcttatccttaatgcactcttgattcattttcttcaactactattggagcctcaaatgaattatgtctcgaagagttccttgtcaatctaacatttagcttcttgaatcttgacattttcaacagaggctccatttcgttcacagtcaatactggaacaacttttctgtgaattactcattgcttccagtattcaaaatgtatatctcagagaaggacaaatcacgtcgcaacgtaataattttttgcaaataatctaaattaatctaagagtcatttttgaggataaaatcgagttactgacatcttgtgtgtctgtccttcataccaaattatccggtcaaaaagccaccacaccggaaaatattattttcttatcatcgccatgttttgatttttccacgtttacaccttttaatctaaaaatcaatatttctggaagaaaaaaaaaaacaaattaaaattgtcacacaaatcacaaactgaaatctcaaaatcgaaactaaagcttctcagatctctaactatagctcaaggcggaggagactgagatcgatcatctgaatcgccgaaac

SEQ ID NO: 9348 - DNA, 3000 bp, Unknown
  misc_feature (1)..( 3000): cDNA_ID_3041466_gDNA_ID_1972097_Annot_ID_178640 3000 nt of promoter + ATG
aagacctccaccagcagcaagtaactggttcttaaaagcctccctcttttgagcttcagtcttttgctttgctgttagaagcttgccctctagcttcttcctcaacagtttctccttttccttttcctttctcttacgcttagcctcctcagcttgagcctcaagctcttcctgcctgcggcgctcctcttcctccttcctcaatttttcttcttcttccttcttttttcgctcttcagcttcttgccgacgagcaagagcctcttgcatctctctaacatgtttaggaattttcttctctgctgctttaccctttgcatccttcttcttcggctgtagtggctcagttactgattcttcttgtttttcctccttaacctctacagaagaggttgctgcagcagcagctgctgcttttttctccttctctttctccttcttctttttctttttcttcgcagcagcagtctcttcttctccttccttctcaccagcattctccacaggtgcaactggctcaggctgagctgctttctcttctacaggcgtagatgaagcaggtctttcagcagcaggggtttctccaagtgctgcaagaagtttgtccaaatcttcctcttcctgtactgtccttccactcttgttattcttcttctttttcttactctttccagtttccacaacctccacattcttagtatcagaagttttagtttcgtctgcaactgagtcatcacctactgaggccaaaacactgccgcccttctttttagaagatttcttcttacctgaaaacgttacttcagggctctcttcatcttcaattgtattttcgtcgtctctagagtttgaagcatcagtcccttcttcttcatcgagcaaatcagcggtaaacgagttagtgttcttcttcgaagacttagatgacttctttttcttaccagagaaggtgataggagactcttcttcctcatcttcgtgcacttcctctgtatcatcatcatcactaccaagtgcatcaaaagctgaagcggcaaatgaattaccgccttttttacccttcttagacgcatgcttcttacccgtaaaacttataactggctcatcatctttgtcaccatcagattcattatcctccttctcatcttcatcatcaagcaaggcaaagctaacagaaccaccgcccttcttacctttcgacttcttcttcccaacaaaagctatctcaggaacatcgtctttcacccccgcagccgaaaccttatcagaaaaatcatcatcatcatcctgctgcgtacccttcttattacctttcttacccttcttcttcccagtgataacaacaaccttctcttcctcaactttagactcctcagacaactcagtacctattgagtactcatcgtcatcaatttgagcacctttcttcttagatttagtagcaccaacgagagatgacgcaggaggttgctgctcagcatctccacctcgagcactcggcttcttccgccccattggaaaatttcaggtctggttcagaattggttccgaattcttccgactaatcaataaatcgaggtgaaatttcctacaattcgaacggaaacaaattaggttttctgggatcggcacaacacaatccttttagaaaatgaaaccacaagagagacgaggaagcgatactgtggctaagaggagagaatcgaagaagctttaccttattccggagaggaattaatcgataggctgagctaagtttagagagagagagcgcggcgcggagagagagagagagagagagagagagtagagaaccgagaaatagcgaagctttgagaaaccggcgtgaagcttcctagggttgagctaaacgctgtgtagattttaccgattctaataaaaaaaaattgtgacgtttgttaaatactatttttttctccgttttctttctcgatagtgttattttttcttttaaaataaaagatatgtcatattctttgttataaaatgtaatttctgaatgggattcaacagttgtaattttcacgttttaatatactgaaatctaacttatataattaagacacataaattttattaatatggactaaaataagggaaatcagcatgatttagctgtttaaagtattcatttaaaaaaataatcttctcgcgttatgatttgtttgaaatacttttctaaaacatatccgcatccaatgttttttgtttttggaagtttttaagagagagctttgttaaggcatgagcttctcgattcgtttctctaggaacaaaagaaaacgtaattgcttgaaaagacctaggattgccactcgcgtgcaagggagattgcttgagaccgggtttctctcggagagtcgtggcggtcgttgaaaattttctagtttcgggcaagtcagtgaagtatgatctcactccagctcaggtatcatggaacatgaacctttggcttatctctgatcttgactcatctctctccatcctcaacaatggacacatgcttctttagctgacttttgttagataggcataacattcatgcttgtgtggtttagtagaaacacttttcgactgtctatgattgattcagccattcaggtgagaacggggcagatatattattcctttttcttttgcttttgattttgtgaatttgggcttgttagaagaaaatgattaatgtttgtaaattgggttttgaatattgggcttgggagaggagctttaataattgggctaataatggattggaattagagttgagaaattagattaaaaaaaggattagattagtgatgaagtaagagtttttgctctctctcaaacggctcgctttgattactcacgtaaggtaagcttcttcgattctctcatctcctgtgtcctttgtgccgatcctcaaaaaaaactaatttttttttacctggattgattgattagccggaaagaatttggaaccggctctgtaatttatcc

SEQ ID NO: 9349 - DNA, 3000 bp, Unknown
  misc_feature (1)..( 3000): cDNA_ID_3041470_gDNA_ID_1972097_Annot_ID_178639 3000 nt of promoter + ATG
cttcttcctctttatcgtcaaaatcacctctgattttaagatcaacattatcccagctttttgcatcccattcatcatcttcctcaaccccattctcctgagctacatcagcaggtcctcctgatttctcgcctaagtttgctgactctagtaaatcaaccttttcagtgtctgctgaaccaacttcacctaaagcatggttttcttttggctctacctcaccttccacctggacagaagtgtcattgcctttctggcgagatgattttttcttgttggcataaatggggcgctttgaggaagtagcatcatcatcatcgtctgcaacaggaagacctccaccagcagcaagcagctggttcttaaaagcctccctcttttgagcttcactcttttgctttgcagttagaagcttgccctctagcttcttcctcaacagtttctccttttccttttcctttcttttacgcttagcctcctcagcttgagcatcaagctcttcctgcctgcggcgctcctcttcctccttcctcaatttttcttcttcttccttcttttttcgctctttggcttcttgccgacgtgcaagagcctcttgaatctctctaacatgtttaggaattttcttctctgctgctttaccctttgcatccttcttcctcggctgtagcggctcagttactgattcttcttgtttttcctccttagcctctacagaagaggttgccgcagcagcagcagctgcttttttttccttttctttctccttcttctttttctttttcttggctgcagcagtctcaacagtctcctcttctccttctcaccggtattctctacaggtgcaactggctcaggctgagcttgatctttctcttcttcggaagcaggctttccagcagcaggagtttctccaagttctgccagaagcttgtccaaatcatcatcttcctgaagtgtccttccactcttgttcttcttcttatgtttcttactccttgccgattctacaagctccacactcttagaatcagaagttttagattgactactttcttcatcacctattgaggccaagacactgctgctcttctttttagatgattttttcctacctgaaaacgtgatatcattatcctctgcttcctccctgttatcttcatcagcaagcagggcaaagctaacagagccaccgtcttttttacctttcgacttcttattattccctacaaaagcattatccggaacaacctcttcctccaccgcaaacttatcagcaaaatcatcgtcgtcatcctgctgctgctgcgtacccttcttattccttttcttacccttcttcttcccagtgataacaaccttgttttcctcaactttaggctcctcaagacatattgagtattcatcatcatcaatttgaacagatttcttatcagatttagaaccaacgagagatgacgcaagtggttgctcatcatctccacctcgagaactcggctccttccgacccatggataaattacagagccggttccaaattctttccggctaatcaatcaatccaggtaaaaaaaaattagttttttttgaggatcggcacaaaggacacaggagatgagagaatcgaagaagcttaccttacgtgagtaatcaaagcgagccgtttgagagagagcaaaaactcttacttcatcactaatctaatcctttttttaatctaatttctcaactctaattccaatccattattagcccaattattaaagctcctctcccaagcccaatattcaaaacccaatttacaaacattaatcattttcttctaacaagcccaaattcacaaaatcaaaagcaaaagaaaaaggaataatatatctgccccgttctcacctgaatggctgaatcaatcatagacagtcgaaaagtgtttctactaaaccacacaagcatgaatgttatgcctatctaacaaaagtcagctaaagaagcatgtgtccattgttgaggatggagagagatgagtcaagatcagagataagccaaaggttcatgttccatgatacctgagctggagtgagatcatacttcactgacttgcccgaaactagaaaattttcaacgaccgccacgactctccgagagaaacccggtctcaagcaatctcccttgcacgcgagtggcaatcctaggtcttttcaagcaattacgttttcttttgttcctagagaaacgaatcgagaagctcatgccttaacaaagctctctcttaaaaacttccaaaaacaaaaaacattggatgcggatatgttttagaaaagtatttcaaacaaatcataacgcgagaagattatttttttaaatgaatactttaaacagctaaatcatgctgatttcccttattttagtccatattaataaaatttatgtgtcttaattatataagttagatttcagtatattaaaacgtgaaaattacaactgttgaatcccattcagaaattacattttataacaaagaatatgacatatcttttattttaaaagaaaaaataacactatcgagaaagaaaacggagaaaaaaatagtatttaacaaacgtcacaatttttttttattagaatcggtaaaatctacacagcgtttagctcaaccctaggaagcttcacgccggtttctcaaagcttcgctatttctcggttctctactctctctctctctctctctctctctccgcgccgcgctctctctctctaaacttagctcagcctatcgattaattcctctccggaataaggtaaagcttcttcgattctctcctcttagccacagtatcgcttcctcgtctctcttgtggtttcattttctaaaaggattgtgttgtgccgatcccagaaaacctaatttgtttccgttcgaattgtaggaaatttcacctcgatttattgattagtcggaagaattcggaaccaattctgaaccagacctgaaattttccaatg

SEQ ID NO: 9350 - DNA, 3000 bp, Unknown
  misc_feature (1)..( 3000): cDNA_ID_2182114_gDNA_ID_1972097_Annot_ID_178625 3000 nt of promoter + ATG
ttatttaaaaatataaaaaaccttaaattttaaatattggtataaaaataaaaataaaaatatttttaaaataaaaatgtttgaatttaatatgtgcaaaagatatttgaacctaagacaccgcttaaggacctcatattatgggcgggatgttgtgttcagtcattttacacatattaaattttaacacataaaaacaaaaatattatgtatatttaaaataattaaaacattttgtctaaaatattacttaaaaaataaaaataaaaaccttaaattttaaatagttataaaaataaaaatatttttaaatataaaatattagaatttaatatgtgcaaaatagatagaacctaggacatcgctgaaggacctcatattatggacgggatgttgtgtccaattattttacacatattaaactctaacacttaaaaacaaaaatattatatatatatatatatatattttaaaaataatttttatctaaaaaatatgaaaaattaactttaaacaaaaactaagaataaaaattgcaaaaaaacttaaaatatccgtgagaaaatatcccattaataaaattataaaaatattaatttcttaatttaacaagaaaatgggatgaaaattaacctgacaagcccattggcactagccttgagccgttctctgccccgtttgtcgacgaagaaaatctatgagttttgtatcttcttcaacctcacagtaaagcccattgacaaggcccattaatgcgagtcgtcagccgttctctgccctgtttctgaacgaagaagatcgatgagttttttctgtaacttcttcatcgtcagccgtcgctcatctgtcgctttcactgtccctctctccatagtaacgaattacctaaaaatcgttctcgattaactggagacagaagatggaaatcaaatcacgaaagtgaattttttgaagagatcatcgacgtacttacctcaatatcggaaaggatcatcggcgatcctctctataagaacaaagaacttgaaagatttagggtttttttctgtttggaagaagaagaaggagcgtgcagaaattttgatttctcatgaaagaagagatgcgtgagccgacccttaaccgttctcgattaaccggagacagaagatggagatcaaatcacgaaacaagatgctttcctccgatcaaatcttacggatagatattgagatgaagaatgaagttattgagatcatcagcttatgtcaatatcggaaggatcatcggcgattctctctataagaacatagaacttgaaaaaattagggttttttctgtttggaagaagaaaaaggagcgtgcataaatttttgatttcttaatgaaagaagagatgacggttatctttcgactgatttcctttttttgttctttctgactaggttaacgttgtttccttttattcaattctgatgtaaaacaattgaaacgttattaagaaagtttaataacggtcatatttctcgtaataatttatcaaaaggtaaattatttatttgagtgactaaaccactttatgatacagaacttttgaaacagaggatatactctccaatggcgaggacagagctcaagctattattacaagtacctcacgctatgaagctttctaataagagttgcttgttccaaggcataagaaatctcaatgagctttgatgcgatgatcaagacgagaagaaagcttcattacaatcccttatctcttaccttcgggctttgaggccactagttgtcaaaaaccgccttcaggtatgaactcggacgcagttttcattgcctcgtccagtagatcataacccacccacaatagcatcaaggatagtaacagcatctaaaactgtccttcaaaacagagaagaaactaatgaaactatctgttgattctagaccggaaccattcttgaagcagtcctcgtaatttctttgattcgtaatagcgcagtgacataatacggtttcgaattgttttctcgatggcgatggcaagctggaggcatgtacgatagtgctggttgtatttcctctgattgcgttcgagccataagtacgaatatagtccatattgttacttggaatgcaagccgaaggagaatgtatgtgttccctggccctcatatggctgcgaaatcaagcagaagagtgtctcgtgatagagagagcgagattggtgatatattgagctaatgggaaaggaacagttaattcatggtgaaggagaacaaggagctaactcatgcattggctaggctacaaaaggattatgataatgaaaccaagattgacgataagtttgtctgcaaagttggtcagctaagctatgcctttgcgcaagttgagctcaagagagagaagaagctgataaggcacttgatgaggagaagaggcatgtagagtatcttaaggcagaggtttttaaatcagggaagatggttacaaaaactatgatatgaaataatataatctttcaccctaaaaaaaacaaagaattttatatcattgatccgtcatctttcttttttggtcgacatcgaaccttcatctctagatataatattctttttattaattgagttgttgccaaacaaaattgaattgaatctatacggggaaaaaaagaaagaacgaaaaagccaatgagaagctgacgaaaaaccgcgttggttaaattacatataaatgggttttgtgaattcaaataaagacgaagacaaaaagtttgagactttatctctactttgacccgaccagcgaaagtgtaaattgaaagatagatagaaagaaagagccaactttaaaagcttagcggttgatttcgaaatctcgtcgccggcgcgtggagtcttttcgtcggacaacaacaagagaaaagagatttgtggtgttcttctgcttagaattgttgttttccatctccggcagtgagatttggtggagaattttgatttgtgatcgatg

SEQ ID NO: 9351 - DNA, 3000 bp, Unknown
  misc_feature (1)..( 3000): cDNA_ID_3041489_gDNA_ID_1972097_Annot_ID_178628 3000 nt of promoter + ATG
catgtggattttattatatgcactcctaatacaccaataccaaaaccaacaagctggtcttcagttctttattgattcaagatttcaaggaatttatcgttagatttatatgaactctttgcttgtaacagtaatcagtattattcatttgttcatgagagctacgacatactgtttggacaaactgcatgtcaccggagaagctactagagattgggatactgagaggactaaagaagcggatggaaaataagattggtcgtaaactttggactggaccacctgaggaattatacctatacggtgactgatataatggcttctagttttgtccaattgatttcttgttcgactaaaccgtttggttttacctgttgttttcggttaatgttttattcgtacttacgagaaaacaaaagataatgtaaacgtagtaaaaagctaagcaatacataattggtgaggttatccattatcgaaacgcatttcaaaccattatagcaattataaccacaaagattgttttcgtctataaatttgtaaaatgtcaagaaatactgaaatacaaattctagtcagttatttctccataaaaactgattattaaagaattagagatacgctgattacgatttaatacattatggtattactattttagctttttgatgaagaaccataccgcaacagcttagcaaaaaaaccataccgcaacagccaccaaggctataacaaccgcggcaccgatgcctatccctagcgccaccgcaaaatccattttcccttacacttgttctcctcgccaaaatatatgtgtgttttgggggaggggttttatagttgaataaatcttaaaatgagttcaaaatatatttgcaatattaatcagatcataacatgtgtttgatattataatctaatattaaatagattatatgttaaatctagtaattagttaagtcacaacatatgtttaagtatatctaataattaaatatattgtgacctttataaagataaaaaaaaaagaatgtgacatttttcaaagaatttcataaaactatactataatttaacctttttttgttttgttttgttttgccatctcaaaatttgtaatcgaatatacaattcacaagcaagaaacaaaaataaaaataatggtttatttagttgtaattttttgttgggtttatagttgggctttgatgttgtgtaattgggctttggtcactcttgtactcttttttaaaattaatgaaacagtttgacgacaaaacaaaataacccaacaaggaagcccagaaaaagcccaatcgtaaatgaaacaagcggaagagacagagcacagtgaacagttaattcttaacgccgtgaaaaatacctttaacgccgtcttttgttcgtcgtcgtcgtgttctctctctcaaactctcaggtaaccaaaccttcttcagttttccggtggtttcgtttgtagaagcaagtttcttcctttcccaataaaattgtgtagatattaaaatcccagaaattgataaaaccaaaatttctcccttgtgacaaaatttgcaggtaagttgagatttcagaaaagattgagcttttaacaattttcattcttggaatcacttactttggtgataactgataagatttgtgtattgtaagtttgtaacatatagaggaagctactttcaatgaaacactgcggaatgagagttggaattggtgttgttcctgttaattttctatgtatgagtggaaatgtgtgcgttgtattttctgcttatattggatgttttggatagtgtttcaaaacgtaacttggtgttaattagtagaggcctcaaggatttaacttttcacagcttatgagagtgatcctttagcaaataatgaatctcaaaaagttaaacggaaatggaaaggaccacgatgaggatacctccacgtcaccaaaatccagtgaagcatctcacttgagctctggtcctcaggtatcatttcacatgaatcttttacttatctttgatctttctatttcactaagctcatctcatattcgacaatagataaatgcttctttatctgacttgtgttagatagacataacattcatgcctgtgtttatagtataagcactctgaatcagtctgagtctcttcaaaaaagttcaaatcgaaaggtaaactgttttcttgttggataatcttaggaaccacagagcccctacgtggaagaattcaaacttggagatgaacaattcaactattgcttcccacctcctgccgcagagaaacactctatgactggctatgattgattcaggtgagatcagaggtatctctgtagcagtttcttacttattcaaatcccgtttgtataatttatataccatgcagatgcagtcatattgatattgcagttgtgtgccatgtatgtatatttgcctttgtttctttggttttgggttttaatgtgaatttgggatttttagaagaaaatgattaatgttgatagcacatgaaaaggtctttgattaatgtgattacactgattattttaaagtaaaaatttaattaatagttaaagtaaattttgtttagattgagattcggtttttttttaagtttatattttacatttattaatattcaatatatatataaaagagttaatataataaaataataattaaatatgtcaaaaataactttatttgaagatagttttaactatgagttattttggtctcttttttagaatgaaatctttgagtttgcagtaaggtgagattttaataaatgtttgtaaatcctagattttgaatgattttaacaaatgctagattcaataagataagatttaaaataaatttaagaatatcatgattaaaaaattgaattaaaagattcatgagcttgattcggtaatgccatataaaaagatgtcatcacaatatacatggtgatttgttggaagatttcggaaccaatg

SEQ ID NO: 9352 - DNA, 3000 bp, Unknown
  misc_feature (1)..( 3000): cDNA_ID_2182136_gDNA_ID_1972097_Annot_ID_178631 3000 nt of promoter + ATG
ctcttagatgcatatataaaataatcttttaaaatagttattattttctatatttttaatcaaaaatgttacaatctatttaatagatatatcatatacttaaaggtattattcaaacaaagaaggatatactcaaacctataatataagcataaaatacataatttatagtactctagcatacatatatcacagtcaatttaatattagatataataaacacatgtcatcgtgatctgatgattgatattagatatagtaaaagctttatttaattatatataccatttttgtattgctaaagtgtacatcacataaaactaatcataaacagataaactactacgcaagacacacgcacacacaaattgttgactgtgaaaaacaattaagcgaaaatgaatattgcggtggcgtttgcgataggcgtcggtgcctgggtgattataatgttggtggctcttggtatatggttcctcgtcaaaaagctaacctcgtaataattgggatgagtgaaactttaacgtaatcagcttattttctttaaaaattagttttcatggacaataactcacgagccataagtatttcttgaataagagtttttttacaaattgttgatgataaaattatgtataaaggaaaaaatctatgtacgattattgctattatatggtttgaaatgtgtttggataacggatgaaatcaccaattatttatttgcttaatatacatatcttttgttttctcgtataatacagtaaccgaaaacaaaccggtaaaaaacaggcggttaagttaccggcgttttcgctcagccgtaggaggtaatttctcagatggtccagtcggaagtttacggccagtcttcttttccagtcgattctttagctctcttagtattcgaatctgtcgtagcttctccggcgacagtttgtcccaataaattcctgcaaaacaaaaaaacgatcagcatgttgtgattcaggcatagaattcagaaaacaatatagtgaatcactgaataaggctgatgataattcaaacaccaatctactgacagatcacatgaaaaacttgagttaataaggaaatcaagaccttgtggttttggtattggtgtgtttgtgaaaatgactcgagtaggagtgcatatgatatccacaggaacatcgtgaatcgccagtttctcgagaggtatatcatctacaagctgacaatcatgtactgcaaatgaagtaaaagcttcatgagccaaggtataaaagaaaaagtgtatataaaggtttcttctaaattgtatttataccagttgtaacaacgggtgtggaatcatcaatggctcccatgtaacgcaacattccatattcgagttccgcaaaaccctgcacacatagtcatatcaaactccaatcatatggtttggttcaactaatatcttttaaagttaaaatgaattgtaacaaatctcacctctcctttccctaatcgagcacccgtttgtgggttaaccgcaacagagccaatgacaatgagatccactttgattttctcatcaaggccaatcgctcttccatatttggctactcctacagaagtgcaagcctccatgatcgtttcgggtttcaacaaatcagattctagtacagagaagaatcctgttcttagcctcggttgaggagtcaacagcttcttttcacctacatttacacaacacaatgtctaaaatccgaattcaagactaaacttactaacatcatcagaagaaaagagaacttcataaaaaaaactgtgacaatgcaacaattttgcggccaaatgtttgaagtatgattgaacatgagttcaaaactctaaattgtgaagaatttgctcagatacatgtatacctatattaactaaccagaaagtgtaagaaacctgatttgcttttgaggcgaatcgggattaaccttcacgaccatagccatacgaaaagcatcaagctcggctaactgcaccaagaattcaaatttggcaaattcgctaactaaggcaaaacctagaaagtgaagaaggaaggtaaaattcgcaaacttttcttgcagcagccgatgcaccgacgaaattagggattcgatgatgaacaggtctagggctcatagcgtagttccgagcttccatgagatcccacatcttctttcggataacccatttccacgctttcgggtcactatctggatccgattctagttccttctttgcagtctccgccatatcctccatcgccgccgcgtcgaggctcaaccgatcagcctcataagctacagcatcgaaagcgacgccgtcgccgttctccgatccgattctagagagattcctccgctgtgacccgatttggacggagagaaaaggcggtttctgggaattgacaaaggaatcggatcgaaaacgaggattgattgcaaatccaggtgataatcttatcattggtagatccacgaacacaatcaattcagggtgtgtgttttcgaaaaatctcagctttgttctccgtgttgttctcttgttaaaagataagaaattaacggcttagatcatttgtttcagttcccgctgaaaacacttcaatccttcttgggtttcaatttcaaaacctctcttataaatgatttaattaaatgggccttttatctgcccaataagcaatcttcttctaacaatacgcttccgcgagcttttctctctaaccacccatccctccacgtcataactacacgcgctatcaatcttttgcattggacgggtaaaaaagcgagtacacaaaaagagcgcgtggtttgacttaaagagttgtactcgcgtttccaagagcgggtttagcaaattcaaattgaaacatttatgcccaaaattatctgagacgatttcgattctctaaactcttccaaaattaacatttgtgtggtgtttagtgatttatggtgagagaagaatttctcattgtttcgatctttgaaa

SEQ ID NO: 9353 - DNA, 3000 bp, Unknown
  misc_feature (1)..( 3000): cDNA_ID_2182153_gDNA_ID_1972097_Annot_ID_178636 3000 nt of promoter + ATG
aagaaaagatcaatcgtatactattcatctaagtttagattttagtaatgtttgacccaaaagttatcaataatgtagattttagtagtttgaccaaaagttatcatatttgaatggatatatcaaaatatgtaatattatactgaattaaaaagttatcaataaatttagactttatcagtgatataagttaaccaacattattttgggagttgttttgctgtgtgttacgaaatgcagttaaattgtatgtttggtttaaactgttacaacttaaaaagcgtttcactgatccagttattttatcataaaaaccgaatcagatgtttattcatacccatattcttatatccttgaagatcacaacgatcgataatatccgtttgaaagtgaaaaacccaaacaacaaatagatagtgaacaagttaaagtagggtttcttgaaatataaaataattaaaataaatattaaataaatggattgatgaattggaaagcactgcggaaattatatatagtgagataaaacaatggaaagagattgataagtaaagaaagaggaagagtgtggttgccacacgaagagcaccatccttcaccatcatcacccacgtatcaccacacttgtacatacaccaccactcgattcatactctctctaaatattatttttatgataacaactttataacaacataatatactctagatatatacatcatatgtaaatcagtatatcacccaatgaacatgcatacgtactcgcctacgtacatatatactcaccttgccacaatgattaacattgttaaaactaaaataatatgcatggtaaataattagcatgtgccctagcactgtcagcacttcctctaagccggacctgctgcgctagtgcgatataatgcctttcattttatattatcgattgatttaatagccgtgaaatccttaagtgttagtattatcatttgattgaggaaaggtttcatcaactttattttatctttaaaaaccaaaaaataggatcatgacttgtgtatggaacaacctgtagtggaggcttaagatttgacggttcatgctttccatttcaaggcttcctcttttaatgtaattactacgtgttgtctcgttttgtcttccattatcacgaaaagaaaaaagaaaaaaaattcttgaatcaattgaaataaaataaattttcgtttagtttctaaacaaatcatttttttgttgaggaaaattatttattaaattcttacttctggacagccataaaaatcaatggaagattaaaaattgaactagaatcgcaaattatagactatctctgtccctgacttttttgtcaaactcacacaaaaatatgtaggcctcaaaataatgggccgataaaccaaggctcaaaaatgggccgataaatcaaaactctttccattgagcccatttacccattcttggaagttcgtttagccattgagcccattcaatactaaaagtgattggcgtttggtccgccattccagtaaattaagcagaaactcacatcaattcgagacatttatatatctcgataattcagtattaaaatcttagatcagatttcaaccaaaatgaaattcttagatccagatggttggttcttgggtttggtactttggttattggaattgagccggtttaaaactgggttgttttgagtgttacaggcttacagccgggcttctcagatgttaaaaatatgggcttgagaattagctgtagacaagctcaagcccattcgattataaaagttgttaaaaaagctcttaagaaagaaaacagaggcgctacggaaaaagttataagcaaaattgtaaggaagtcatataaagctattatcttattttattttgaaaattgattattgttatatgtttatatacatgataatattatcataccatttgtgcaggaaaaggtagggacaaaaaatagtaaatgatgcgaaagctcctgattcacgtttttcaatgttggtgacaactagtcaatatatactaaaatattttattttgtccgataccaaaacgcagaaccaaataatttggtatacttaccattttcaaaactgtccacgtttttctccctcgctttcaaactacaaagacactacttacattgggtagtttatataactaataacttgttctacttatcgaacgttcaagacttgatcaatattcttagggagatggaatttatgtattcagagttaacgagattcaaactcataaacactattttagatgtgattggtaaaactgatgaatcgttcacgtcaccaggttaatcattaatcagagctcgatttgatcttaaaaaaggcactgagtagactaactagttaactacattttgtacatacattttaataaattcatttaatatatgtaagattagttcacaagtcctaaattttttaaaaataacacttgtttggatctagtatcgataatttcaaagcaaagaatcaaacatgataacataaaaaattgcataagatatatatttaaattattaatatatttggatccatccctacgatgttccaatttttttattttccaatcactcacaggccttgagtttttttttttttttttcttgttaacaagccttacaattttccacaaattatgccacttttttataatgtaaataatctttcaatatgtatcgaaaactttatgcatctaataatttaagagagagagagcgaattttttttggtgtacatgtggtaaaaactctttttttttttttatatgtgcgtgattaacgtggttcagttatttcgtatataatatccctatctcttttattttattttattttaaatagcaataatttcgtatgaaatatcttttacatcaaatatctctataagcctcgtctttaaaaccagacacagaaactcctcactttcgaaaaaaacaagatcattacacaaaaatg

SEQ ID NO: 9354 - DNA, 3000 bp, Unknown
  misc_feature (1)..( 3000): cDNA_ID_3041475_gDNA_ID_1972097_Annot_ID_178635 3000 nt of promoter + ATG
taataagcaaacagactacactggatcccaacatagaccaagtatactcattcatgatgaataatagtcaactagaactggttgatgaccactcaactaacacatgttatcatttgacaccaaaacaaactcaccaggttgcataatagtcaactagaactggtttatcagagttcacaagcagatcctcaaatgagtcaaatgtctgcttcttggcttcaatctgaagtatgaacaagaatggtttgtcatttagttcaatctaaatcaagaagtagataaaggcactcactttaaatcaattccaaactctagagaaaatcagctatagaaactaaaataagaaaaatttcaaaataggaaagctatcatcagctctaccatcagaagaaagtttgaagcttgaattcaataattcatagggtaaaattaagtaagctagaattgaacaaaatataagctttggaaaaagatgtttaagcagagaaaggcgattacacgtcgaggagtgcatcgagtcgttgaagataaagatggaaactttaagtctccggttcgaacccgacgaaccggaaactgaaatttgacggccgagatagaacgagaagcgaaagcagaaacacctgacgattctttcgaattcagcgacggaaccgtagaagaagagagagaaattgacgccatgaaagaatcagaaaaaaacaaacgatctcttgattcggcgttggcggttggttaggttgatgatgacaaaaaaagttggacacttgtggaaaaaaaactcgaattgaccaaaaagagagaacgaactctgaaagaaaatgacacaaggtactagaaagacaatgatgatccactacggtcaagtacaccgtatcttttttgttataggcccacaaacatgttctaggcccacatgttataggcccgttcccaaacaccgatcactcttcaatttaactttttgctcacaatcttcaggctcaatcatatgacatgacagatctcattgtaaatgcaatcgcaaagggttatcattatcaactagtactataaagatagctgttacttcccgccaacgcaactgggacagttaaaaccgttgagggtaacaaaagacaaaactcacgactccgtttttgagtttcctgaagatggaagttacgaatatgttcttgtgggcctcttcaaagaaacgatatgaaatagcctaatttaaacaaaactagaaaagtgtggactagagagagactttagcaaaaactaaaaacagatgtatcaaaagaagctcacaactaaaaaagatggagcttgaattaggtctgaagatcactcggactaaagacgatgtttcttcctctacagattttcgggttgccagagattcttttggtcatcgttcactttctcgagaaaccaactctgttttcttcctcattcttcatctcaaaggttctattccctctcatatttattcacctttttttcttacctagcatagagattgagattgaaaaccaaatgcaggatttaagaaggatggtatcgatatcgagataaacaaagaagggaatctgattaagatcagcggaagaaaacaggttgaagagatggttttggtaaagtgggtggaatggaaaaaggaaacagaaataaaggaattcaaaaaagtgtttcggattccagatattgtaattcttgacaagatcaaagcgaggtttaatgaagaagatgggactttaactgttacaatgcctaagaaagttaagggaattaccggtctgaagatcgaggaagaggacgaagaagaggagatgaaagagccgatagtagaagagaaaacagaggagaaaacagaaccagaagaagaaatcaaagaagagacaaaacctgaggaagaaaacgaagaagcagaagagccacagagagaagaggaagaagaggttgttgaggaaggaacaagagatcatgaggggaaaaaagaagaagaaatcgaagataaaccaagaaagaagagaagaaaaaagtttcgtttaccatgttttgcaggatccactctgcttatgtctattattgttttcattattcaactgattcaatccagaaataaatgaaaccacactccttaggtttttaagatagggttcttgttggtttttaaggatagaacccactttcttattatctgttcttcttagccttgttctttaaaacaataaaagtcaacgtgtaatacaatcaaaatacaatcagtatctaaaccaaaaattagtaggagcgtatcagctaataaatggaaagtatttgacccgaaccgtgtataacggctagattatcaccgaacctaaggtttgtgtttgctctggactataacaaaccctaagtgaaaaggaaaaaaggaaacttgaatgtcaaacaaataaatttatatacctgcgtctcgcgtctcctctcaagttaaaaacacaattgctctgcatttttttcaattctcttcttcgatttctgtctgcttcgtttgcctctctgttctcttcttcttcctttttgagatttcattattcatgtgttgttgcatctgcttgttggattcaccctaatctttggtgtgattcgttggtctggcctaagaacgactcatatatacaacggctctctctgttcacttaaaaagcaacgaagaagacgagagagatcacacacacaagcctcacgtcttaatttgtttgcctgcgatgataagatctatcatccaccgtagaaacagagacagagagagagatagacgattcgaaggacatgttgccgggattttaggcttcgagagtcatgatgttggaggttctatccggcgatggaggtgtcgatagattgaggaggtggagcgatcagaggattttaggcttcgggagtcatgatggtggagcaatcatcggagattggcgatggagatggcgatagattgaggaggtggagcgtattttccgttaacggataaag

SEQ ID NO: 9355 - DNA, 3000 bp, Unknown
  misc_feature (1)..( 3000): cDNA_ID_3041495_gDNA_ID_1972097_Annot_ID_178624 3000 nt of promoter + ATG
tacagaagctttcacttctttacaataatgcttgctatgtagaatccattccaacacgcataccaccggaatcatgctcaatttcgaaatctaaagtgaaaatgaataagcaaaatcaaaacaacaatctttcaatcgaataaccgaaagagcaaatctccaagacaagttacctgatagaagccaacagagttgagcataagactaaagttcatagcagcgatagagatattagcaacaattgagaaccagagaagctcccaaagaggaacatgcttagaagctgatagtcccgttgcgtttgacaccataccaacaagagcagtgaatgcaaagtgaaatcccgttaacgttgtagctgtggaatatataaacaaagaaatcgtcagattcatgaagtgtgtaagctaatgggagatagatagatcagagtcagagagagagaggcataccaaagccaaaaccgaaaccagaggaagacatgagctgtttattagccatgatgattccaacggagctgattacattcatagcccatgcaccgacatcagacaccgccgatttcttctcgctctccggtttctccatttggatttgagaaaattgaacaccgacactatcagatctgaatctcgtgcaagcgaaaacgagatctgagaaatctcgattcgcttgcagattttgacagaatcaaacactgaaagagatgagatctggagaaaagtcgattcacgccgttcgtggaatcagcgaagaaagccaaaaagcgaaaaacacagacacacactcacgtatctctctctgtctctgctacttatgcttcactggttcttcactcgacgtagctgaatatattatcacaagcaagcttcttctcccaccattgatgctttccttggagttgttataaattcttttttaattctctgagatttcgaaaataatattatatatattaatggaatcattttaagtattaatttcattcattgacgcgtgtcgtttaccttatttgaccttcttctttcttcttttggtccacttgtttgttatttcaatatgagttctgtatagggatagttttgtcttttcgtgccgctggtaacgtcgtgcttttagttttcaaattaaattttaacttgcgagattattttattaaacgtttacttaagtgcttaaattaagccacaaggaactgataacagcgaattgttaacggtaatttataacggagtacgtacttactacttaatttcaaactatatatttaatttagacaggaaaatatcgcgatgtgtaactaatagtaccatttgattaaaatgtagaaatgtgttgttcattttcgaataatgcttgattttattataatcatatcgaaagtgaaaggaaataatcacaatttgccattggtcatagtcacaccgtcacactcaaagccaaacaatttcgaaactaaattattgagtttgtcctttgttcttccagctattctttacttgattacagtctcatttatatatacaaatgaaaaaaaaaaatcattacaacaacaaaatatcgtttttgttgtgtgtttgtatatcaagagttttggaaattgtactgtgtgttttatcgaatagttttagaaataatgatgggtctctgcaattattaatgctttgaagatgacaaaacctgtatatcttagcctgtgcctcaacacaaatagtaattgagaacacatgatctccaacacattgtcacaaaagagcttttgcatgtgctttcaacatcaattattttcttctaacaagcccaatttcacattagtttatgccaaaaccgaaaaaaagagagaatagttttacataatggcacacacattaaggggtttgaatggacatacatagaagaagccttggcttataaatcataacttatctttcgtgtattttcttggaaatatcaagtggagcttttgatgccataggatcgatgatcgcatcactgaaagaagatgaagaaaaacaagtaagcaccgacggaaaggaccgaacacttttgcaccaagaagatacatgttacaagacaaagagaccaacactgagatatcctgacttctccacgtgcatcatagctaggcgctgtgctataccagtataccacttagcactttaataggcctctcccgacacctgaacaagagaacttgcttagttgaaaaaagtacacaaaacaaaacgttataggccgacaagttttaggaattttataactgggctcataacataaacaaaattaaggcccaaatctgattctaacaaaaagaaaagagctctgtctctttcaaactgttgcaaagtggcttctgtagtttgttcctaaactagtcaagcaaggtgggctaacataaactcccaaaatggttggtttattacttctgtttgatgtgataatgccgcaattcaatgtgtattatgtctcttgaaatctttcatttgagtctcaattcacattcttttgattttatctttccttctttactatgttgcatatttcagagcatataattttttttttttgtcggtggtcaaagtttataaaatcaaaccaaataaaagaagtgattgaaatcatacgagaccccactggttatgttctgtataagcgccaatgaatcacaaagtcgaatcggaactgtagatgataggaaggaacaaagaaaggaatataggttaagttcaaagtggttaagctctctaatgtcgtcaatgaatacgtcatcatgaagaaataaataatttccaagtggatggacttggggaggtccacacatacgtcgtcaatgacgaccacgtcccttaaggcgaaataaacacttgccttcctaaattctctgatcaatcaatgtgtataaatatgcgcagatatatccattatcctccacaattcagggaaaatcttcaaagtgtttgcagagaaatctaaattcatcaacagttttttacaaaagaa

SEQ ID NO: 9356 - DNA, 3000 bp, Unknown
  misc_feature (1)..( 3000): cDNA_ID_2182102_gDNA_ID_1972097_Annot_ID_178623 3000 nt of promoter + ATG
attgacaatgccggggatttcttcgataccaagccgtcttggaggggtaaagagagcttcatcgatgccattagagcgaatttgaggcatcaatggcttatccgaacaagagataggagcttttccatttggctgaaacccgctattagaaacgcggccaacatgccagatctgacagaagaagataccacctttggcatgtacagcatcaacgattggcttccatgcctccacatgctctttagtccatatcccaggagtatcttgatatcttcaagatcaaatcacacacatgtggtaaggatcagatcaaaaacccacaaataaaaacgtaaactttaatcaaaaggaagggtttttgagttacccttgagctgtatctgaaactccagtggcttcagtgatgagaaaacctcctggagtcgttctctgagagtaatatatggcagcgtgaggctgaggaacgtttccgtacgatctctgtctcgtcaatggtgctagaacaaccctatgggaaagattgaatcttcccatcttatagggagtgagaagaggtacactctgttttgcttctccgttttccatttcttttgtaaaaaactgttgatgaatttagatttctctgcaaacactttgaagattttccctgaattgtggaggataatggatatatctgcgcatatttatacacattgattgatcagagaatttaggaaggcaagtgtttatttcgccttaagggacgtggtcgtcattgacgacgtatgtgtggacctccccaagtccatccacttggaaattatttatttcttcatgatgacgtattcattgacgacattagagagcttaaccactttgaacttaacctatattcctttctttgttccttcctatcatctacagttccgattcgactttgtgattcattggcgcttatacagaacataaccagtggggtctcgtatgatttcaatcacttcttttatttggtttgattttataaactttgaccaccgacaaaaaaaaaaaattatatgctctgaaatatgcaacatagtaaagaaggaaagataaaatcaaaagaatgtgaattgagactcaaatgaaagatttcaagagacataatacacattgaattgcggcattatcacatcaaacagaagtaataaaccaaccattttgggagtttatgttagcccaccttgcttgactagtttaggaacaaactacagaagccactttgcaacagtttgaaagagacagagctcttttctttttgttagaatcagatttgggccttaattttgtttatgttatgagcccagttataaaattcctaaaacttgtcggcctataacgttttgttttgtgtacttttttcaactaagcaagttctcttgttcaggtgtcgggagaggcctattaaagtgctaagtggtatactggtatagcacagcgcctagctatgatgcacgtggagaagtcaggatatctcagtgttggtctctttgtcttgtaacatgtatcttcttggtgcaaaagtgttcggtcctttccgtcggtgcttacttgtttttcttcatcttctttcagtgatgcgatcatcgatcctatggcatcaaaagctccacttgatatttccaagaaaatacacgaaagataagttatgatttataagccaaggcttcttctatgtatgtccattcaaaccccttaatgtgtgtgccattatgtaaaactattctctctttttttcggttttggcataaactaatgtgaaattgggcttgttagaagaaaataattgatgttgaaagcacatgcaaaagctcttttgtgacaatgtgttggagatcatgtgttctcaattactatttgtgttgaggcacaggctaagatatacaggttttgtcatcttcaaagcattaataattgcagagacccatcattatttctaaaactattcgataaaacacacagtacaatttccaaaactcttgatatacaaacacacaacaaaaacgatattttgttgttgtaatgatttttttttttcatttgtatatataaatgagactgtaatcaagtaaagaatagctggaagaacaaaggacaaactcaataatttagtttcgaaattgtttggctttgagtgtgacggtgtgactatgaccaatggcaaattgtgattatttcctttcactttcgatatgattataataaaatcaagcattattcgaaaatgaacaacacatttctacattttaatcaaatggtactattagttacacatcgcgatattttcctgtctaaattaaatatatagtttgaaattaagtagtaagtacgtactccgttataaattaccgttaacaattcgctgttatcagttccttgtggcttaatttaagcacttaagtaaacgtttaataaaataatctcgcaagttaaaatttaatttgaaaactaaaagcacgacgttaccagcggcacgaaaagacaaaactatccctatacagaactcatattgaaataacaaacaagtggaccaaaagaagaaagaagaaggtcaaataaggtaaacgacacgcgtcaatgaatgaaattaatacttaaaatgattccattaatatatataatattattttcgaaatctcagagaattaaaaaagaatttataacaactccaaggaaagcatcaatggtgggagaagaagcttgcttgtgataatatattcagctacgtcgagtgaagaaccagtgaagcataagtagcagagacagagagagatacgtgagtgtgtgtctgtgtttttcgctttttggctttcttcgctgattccacgaacggcgtgaatcgacttttctccagatctcatctctttcagtgtttgattctgtcaaaatctgcaagcgaatcgagatttctcagatctcgttttcgcttgcacgagattcagatctgatagtgtcggtgttcaattttctcaaatccaaatg

SEQ ID NO: 9357 - DNA, 3000 bp, Unknown
  misc_feature (1)..( 3000): cDNA_ID_2182011_gDNA_ID_1972104_Annot_ID_178657 3000 nt of promoter + ATG
attttagccacaagaaaatctaaaacaaagtgtctactgtcttggttaaaacttacaaagtcgagattgaaatctttagctgtgagaaaaggatagataatgaaccaaaacacaccatctgtgagcaatacagctcctgcacaagtctgcaaatccaaaaacatgttcagacttcagaaacagagaacgtaacatgttttgacacttaaaaatctcaggaagacttacttgaaaaagaatctgatgaatgtaacccaatgtagttgcaacctgacgtgtagacatgttttctctatcgtgtccgcttgaagatttaaacacattcgagttttcggcattcccgggaggtctatacgtcccttgctcttcatctactatactaactctgttttcaccattatcaggagacctaaatctgtatatggacaccaatgatccaagctgcaatacatcaagccgactttaggtttcgaaaaaccaaaatgtgtaaccactactaatctcaggtagatgtgaagtaccatgataaggtgaagaaaagccataccccaaagtaaattgtgaccaatgtgaaagtccatctgatatataagaaccaatcaaaactcatcagaacaagtgaaattgttatcaactttatgtaatcaagaaaatatttatggagactcactgtgtgtagaagatgaaaatgccggttccatcagcaatagcattaccagagataagtccaagaagaacaacaaaaccaaaaacacgaaaacctaacaaccaattcggatgaatctctttgacactagtattccaagattcatcatcatatacaactcctgtgagttgttctagctccaggctttgatcatcaccacgtttcttgcgttttattggtccttcatatctccaaatcagataagaagatagaaacagagacgttaagacaaagattgcacagacgaagaatctccagttaagccagtaacttggaatgtttgtctccgaagtcattgttggttgccaagtatgttcagttgaacctgtaataaaactcgacaaatcaattctgctaaacacattcttcaccatttctcaaaaaaaatctctataactttgtgaaaccaagtgatcttgattttaagttttaacacatagagtctaataaattcacgtcaagaaaagaaaaagtagaggcgagaaactcatgatgagacatcacgggttttgattttgttttttggttagcaataacaatggacaacgagagagagagagagagagagagataaaacttgaaacataaagagaggtatagcattcaaagcaagagacagattctttacttaacgagacaaagtaaaatcaagaaaagaaaaaaaagattagataagacaaaaaaaataaaaagatacctgtagtgatgctttgcttcaattcagtatcagattctgtgagcaagaacaatgagaatctttctcctctgtgattttatgatttggaaaatggaaaataatgaatttcgaatctgatgtttttattctacactccacacgtttatgtattttattcgtcaatacttgcaattaattagagccattcgattcagaagcagtcatcaaatcgaacggttaaaacgaaacggtcgaggaagccgaaaacagaggtaggcagaggtagaaccgtactacgagtctcgtagtagactagactttatcattctttaatgggcttaaggccccattttgtttacaaaagtgtaagcccatgtgtagggggatctgaaaccctagttcactttaaaccctcagaatcatttacatattagattaaaatttcctcacaggctagagagtagagagtgatccctgtgatcaagctatcgtcgacgttatattttctcctcaaagaacaagggcacacacgcttaaagcacaaaaaacaaatcagttgttttggaaaaaaatgacatcgacgtgttgaagctatcatcgacgtgtctattatgctatgaccttatgaaatacggaagtgtgtccagagactatcagtcatgtcactccaccgatggactctttatctttacacaacattgatatgtctaattcttttccaaattcctctcttccttttaggtcttatcaggtaaaagggcccgttagagatgtattgtatatcttatgagagttataaacgtacatcaaattttcattaaccatcacacgttgaacacttgagttaatctaacttggtttcgcctatgtggtaatgtcgaaactatagtaaataggtctatatatatgggtttaaattggtcaaaggaacttaaatgagaatcaactgaggagtaaacttaaatgggtaaaaacctcacatttttagtatatgtttacgtctagtcatctatccattctaaaactgtatatccattctgtaaaattatcacaaggaacacttttttttttttcttcaaagactttagttacgagtaaacaacctctctaaaaaaaaaattttgaacgtatcaaatcttcaactcaaggttggtacaacaattgacctatagtactatatatatatatatatatatttacatgcatgggacaacaactatatgtttgatttttcgttttccaaactatatatggcaccatgtttaaatgtcacaagttaaaaaaaatgtttaaatgtcacatgtttagctttatgcgtccttttctcagagttaatgggatcaatatgttgaccaggaaaatatgtgtagagtttttggagtaaagcaaagaagtgggagccttgtgctttaaggttagatgaatttgtattaagggcttgtcttcatctactttaaagccaagccaataaaatcgccttaatgatctgcttatatatatattcaaaccatattatcatctcattacaaagaaatcatttttgcataaaatctcatatcttaaactatacaatcacttaatctttgcttggagttctttttttcttaagcataaaatg

SEQ ID NO: 9358 - DNA, 3000 bp, Unknown
  misc_feature (1)..( 3000): cDNA_ID_3041521_gDNA_ID_1972104_Annot_ID_178674 3000 nt of promoter + ATG
ctggtcatgttgtaggtaccaaaagaagacagcgaagctaattcaggagatcacagcttctgcaaatgaagtagattgctcaaaaacgcttatcgtaacttgtcttatatgcaatgaattctttcgttaataactgctctgtgatcttcaaggtcgctcaagagacatactctttgatgagaaccgttcgtgtatatgggacagagaagcaagagtttaaaaggtgcgatctgtttccatgaaaaccattgacagtctcttttttctttatttatcttgtgaaaattttgcaatatcggccctatctgtttcaagactatttttggcagccaagttactttttgacatggattttcttcccttctgtggtggaaaggtacaatcactggcttcagagattggcggatataagtttgagacagagtgctgcatatggtatttggaactggagcttcaacactctataccatgcaactcaggtttctcaaatataacccctgttttgctttatttctctcttttgactgtttgtgggaaggatcaattaattttgtggttcttaaagatggtgatgctcatgctaagaatgtgacaagatccatcattcttttcttctcttatagattattgctgtcctggttggaggattgtctatcttagctggtcaaataacagcagagcagctgacaaagtttctgttgtatagtgagtggttaatctatgctacatggtgggtgggagataatttatcatctttgatgcaatcggttggagcaagtgaaaaggttttccaaatgatggatctcaagccaagtgatcaattcatatcaaaaggcaaggttcaaatttttggctaagagcactctgtcttagaaacatgttgaccatttatgagattgatgagagagtgagttaggttgttatcagtagatattactcttactatcaaaccccttccaggatgaaccacttaagagtatatgactttggacttcctacctggaggcttatagtgattgctacgctctaccatgtaatgtatttttatttatatactgttctgtaggaacgagactgcagagactgacaggacatatcgagtttgtagatgtgtcatttagctacccttcaagagatgaggtatgactgtaccgagtggaatctattttctgataatttttttgcttttgtgtgaatgtccttgaaccacagttttttgcttccaacgttttacaattgtgtgaatgtccttgaaccacagttttttgcttccaacgttttacaattgtgtgaatgtccttgaaccacagttttttgcttccaacgttttacaattgtgtgaatgttgcaaattaatggccaaatatatggttttgcatttgcatcattttacatttttgttgagtatattagaatttatgcacacacatcataaagagttttccagtcatgtttatagtatggggcactggggctcatatatcagtttttcataacaattatatcatatgtcaatctctcaggtagcggtggttcaaaacgtaaacatttccgtgcatcctggtgaagtggtagcaatcgtaagtaaatctcaaagtagttcaacaatgcaactgttttccttagaatttagcggaagtgatatgtgtgcttatttgttttgtttaggttggtctaagtggcagtggcaaaagtacactggttaatcttttgctgcaactctacgaaccaacaagtggtcaggtactgtaggttactcaaactcactgtagaataaccctttaaagtcttccttcttaatagctggctttttgaattccagattctactagatggggttcctttgaaagagttggatgtcaagtggcttaggcaaagaatcggatacgtggggcaggttctcctcgcttttcgtctttgtagaacaaataaactttgatgaatttcactatccctttctaaagctgtcacaatgaaacaggaaccaaagctcttccgcacagacatcagttcgaacatcaagtacggatgtgatcgtaatatatcgcaagaagatataatatcggctgcaaagcaagcctatgcacatgactttatcacagcacttccgaatggttacaacacaattgttgatgatgatctactcagtggagggcagaaacaacggattgccattgctcgtgccatccttagagatcctagaatcctcatcctcgatgaagccacaagtgcactcgatgcagagagcgaacacaatgttaaggtaacctctctattaccaaaaagacaaattacttggatgcaagaattcttaagccttttgtttttccagggcgtacttcgttctatcggaaacgactcagcaacaaagagaagcgtcatagtgatagcacacaggtatctttttcttgcactgatccaatcttttacatgttttgatcattgatttataacattctgttccttcacagactttctacaattcaagctgcggatagaatagtggctatggacagtggacgagtcgtcgaggtaagccactatcttacggttttgataaatacatagaaaccattgatggctttgattttgactgttatatttgtacacaaaacagatgggcagtcacaaagaacttttgagcaaagatggcttatacgcgagattgacgaagagacaaaacgatgccgtcttatgattgatcctacacatgctaaactgttcatgaaatagtcatgattatgtttttgaatggtcatgacgatatgtaatggcaaaattatgtaaagtgtaaccatagagaattcttattatttcacacaaatcgtgtcgttctagtatagttgacataaactgcctgccgtttctatatttcctgttaaagcacgaaaatttatagaaagtggaaaccactgaagacgacctgtagtttatcaattcgagaacaagcaagcaagcgatctcaaacgcaagagtcaaggactcaagaccttgctgcta

SEQ ID NO: 9359 - DNA, 2203 bp, Unknown
  misc_feature (1)..( 2203): cDNA_ID_2182079_gDNA_ID_1972104_Annot_ID_178675 3000 nt of promoter + ATG
ttcttccgcaaagctttcaccggatttcaactccgaaagcggcgaaattttataagaaaatggtagaaacaaaacaaaacaaccataagcacaagaaggattagaatcaacaccatcatcggaaaacggagaggtatagaggaagaagaaagactgaaagactaaaacccggttaaaaacagaatttcaattgcgctttttagttagttttaaaccggttacgtaaatcttaaaccatactaaaccaaattggttcttggtttataacaaaaaaaatatctgaaacgtacagttcaagaagagaggaaaaaaaatatctttattgagtttccacgtggctcatattcattggattttcataaaagaaagaaattgtgtactggtaacactaaaaattcccaaggacactctttcaccaatcacaaaaggaaaaaaaaaataaaaaaatctagcatcatcatcaacatcatgatgatcttttacatctattggactcacttttttgggctaatatatatgaaactgatcctcacgttattaaatataattccgagaattcaagacttctatattgttacaatgtttagagagattgtttcaattgttgatgaagtataattggttatgacttggacttctatgaacgtaacatccattgttacgtatagatctctctacgcaactaggacatgtttccggagttgaaggcgatggaggagaacgagagcgtgattttgacgaagaagatgacgtcgttgaaggtggaggagacgagtttgctgttgttctcgttgatttaagcggagaaagaaagacgtgaatcttaacttgcgctgttatagcgagatcgtattcctccataagattctttagatcctcgtcggatcttaccgttacaagcgcgtcaagatcatctgttggtaactgacatcggagactagtcaccgcaatcccgcaaatctcaccgagcttcttctttagctctgttaatattatcaaacagataaccggtgagtgtgctactagacggctacactaaccctagaattcgtagggtgataaaaaaaaaaaaaactgattaactaactaaccggtgaaggatatggcgcgagtgacggagaggacacgtgtatcgccgccttgataacggagcttgccgtcgggataacgtggggtgattctgccaccgtagctacaaaggaacttgacggttgttgtatttgggaccatatcgtttttttatgcttagttgaaaaggtcggagttggagaaggttgttgtatagtttgtttttcttaaagccaattaactaatgttcaatcgatatatatagagagagaggcttttccaagaatgcaaaggagtgtgtaaagcgtagatatgtataaaattatttattctctgttttttttgtgtgtcgtgtaatttaattacaaaaaagctccaatgaaaaataagattttgccgacgtaatttttttctttttggaatattctctcatatgaaaacaaaaaacaaaaagaaaatcataggactattttgacgcgtgttataaaatgagtggagtttgaaggacccatacgacactatttatgttaaccggtctcgctcgaccatcggcgatttttgattttactttataggcaaatatgcagacaagcttgattttacttaataggtaagcaatatgttcttgaacacaataatgtgatggtaaataaatgcacacatgtaatacaacaaataagattatgtttgtttgataaaagtactataatatagattcttcttctcttatatggttaaaatgatataattatcgtagttcagtaaaattctagatattttttcgtatttttcttttacacaaaaaaacataaatgggaaaacaaataatatattttgctatatttctttctcctgtcaaacaaaatatttgatattttctattgacgtaggcctctcgtcttgtgcaaccggtcccttgaaaagcccacaacgaccatgaacatttgcattgcaatatcaattttttttttcacattgcaatatcttaaacatcttgatatttgttttgataattgaggagatattattacatgatgccacatagataatccgatatataagaggaatcaatcgggaaataacatttgatgtttgtataatgataatccatgtttattttattacttgattaatg

SEQ ID NO: 9360 - DNA, 3000 bp, Unknown
  misc_feature (1)..( 3000): cDNA_ID_3034260_gDNA_ID_1972104_Annot_ID_178667 3000 nt of promoter + ATG
aataaagcccaatatacttcaggcccatataaagcccaaaatagtaaatctcaggccctttttgccataagaaaagcgacagtcacatttgcaggcattaatcatcatttgcatcatgatgatgtatcagtaataatgtgtatggtccgaacaaaaatgtaataatcacgccgctttgtgaaacaccttgttcaaaaaatgatgactaatcatagtccaatgctgaatcgtataaaatataaacattcgataatcatagtcgaatgccaaatcgtacagtagaaatataaatactaagttcttagctaactccaagaaattgaaataaaatttaacctcgtggaagaaaaagctgagcatgggacggctttagacagcatcattgctcgtacatcaaattgttgtatcctccttttgcttcaatattcctctttttcttcactttttcacattctttctctgtcttcttttagttaaaaagaaagtagactataatcgaacagattaaatgctagctatatccaattttcattatttatattcgttcacacagaaatggaaatggtgtagtggaatttatgatgaagattcggccatgttgaattatacatgcctagttttctggagtatgagaacgacaatatcatgttgcaaacactttatattttgatcagggaatttttgaatctgcattgattattggagttactcagtttgtttctctaaccttctgctcaaagctgaatcgtacgtatacatttacaaagttagagccaaacattacgtcaaaaactggtaagcataaaagctagtgtgaacagataattttgtactctcggattagtgatctactaatgcaaatatgtagtgattcatttttcagttagtggtcgcaataattctccctcatgagttatgattcagagattcatatataatagtagtataatacttgctcctatgagccaccaaagctattaccctttgatgccattctttttgttgacaggaatcaaattctcccgctttatagaagaccttttattcttacacattcttcattatttgaattaatttctttaacatttcttacattttctcattttgttcgatcatacgatggatattaaactaagatagaattgttatagaccacaatagctggtatatatggatcggattcttcatactttctatgctacaagtacgtctgtatgcgtctttatgtacgtattcatgtatacgtgcacgcatgcgtatggccccaaccattaaaccctttgggatcgatacataaattttgcatccgccaaataagctgtgtttagatatgaattcacaattcagataaagatggggaaaaactttatatcctttactactttgggttaaaaaacttaaagcgagttggatctaactgtattatccaaaataaacgagaattgtcttcttgaggttaattagctattatataacgtcatgttgtgccattgtgccaaactcagtcataattttatttttctctcaatcataagttctctctggtcaactctgcttcggtattgagtataattaatcaaaagccaaatagaaaacagtatggtacaagactcaaatctcaaaagagacaaaaatctatatgcatgccatagtgatttttgaaagaaatggaagagaaaaaaaaatgagaggggaaaagctagaggagagcgatgacccattaagattaaatggactaacaaacgaaacgatcatcaatgtgtaagtgtccctacgaggaccgcacccacttaattccccaaattcaatacctattgaccctcttttcttataatgacccacttataattattatcgtatattgttgtatattgtcgttacaagattgtgaaatgttttatattttctatacacgacgaataacctggtcaagctatatatcgagattcaagtaagtatatataatcgcatgcttggttaaatcagtcctccatttcgagagacaatatgattatactttaaaaaatagagactctcgaatgtcgacaatcaaatgtcacaactcgtactatgctattgtaatgtttttcaatcaataaacttggtttgttttccacaattttatatatagttttattaaatttatatcaccggttggtgttgagcctaacaaataatatgcattattaatagtctactactactagtttgtgatatattctttttccagcttggagagaagattaagcatattttggtctctgattaaagagattacgtaccgtaacctcaagacttctataattaaaagaaaaaaatcaccatatttgtttgttagaaactccaagagattccataacaaaaacatttcattattctacaagcaacattgtgaacatggaccataaatttaacttgtacagtactctacataaacggtaaaaaacaataaagcgcttggaaaaagagagtaacaccagaaagcaaagagctttgaagaaacccaaattcaaaggtactcaatttcatctgactagctctgaccccatttcttcaaaccaaagaatgatcacaccaaatccaaaatttcccctataaattacctatctcacataaatataaagtttacttctcttacctctctttcctctttttatcatttacttcataaactttctagatatctgcaaagcccttaatttgaattcatcactaacccacatgcccaaaactttagcaacacacaaccctaataaatttttgttggagggttcgatgagttaattcattctttattgtttttgatcttctgtgttttcccttaagaaagtgattatgtgtttaataggtttgttgggagatgtgtcagtgacatcaagaagacgaacaacaattcaaaaccgtattaaatgttgtctttttgatcactcaagaagaaaacaacaagacagcagatgttttcatcattcttcacaacaagtttcgttcaagtctgatccg

SEQ ID NO: 9361 - DNA, 3000 bp, Unknown
  misc_feature (1)..( 3000): cDNA_ID_3041537_gDNA_ID_1972104_Annot_ID_178663 3000 nt of promoter + ATG
caagaagcaaagaggtttgttccataaagaattagttaagatttatgttccagaaatagcttagttttcaagattagtcatagagtttgagtggttataatagtgaagtcttgatcttaacagatatttgtgtgtgtgtgtgtgtaatgtaatgtagagaagaagcaactagggtcattattcatgcttgcgaacaaatctaatctctgtttctcctatgagaatctcgagagggctaccgattacttcagcgacaaaaataagttaggacaaggaggatctggctctgtctataaggtaagttctgttcttattatacattttctagagtttcatgttggaatgttcctacttctcaattggttaactctttgccctttttgtggagtagggagttcttactaatggtaagactgttgcagtaaagagactgttcttcaacacaaagcaatgggtggatcatttcttcaacgaagttaatctaataagccaagtagaccacaagaaccttgttaagctcttgggatgcagcataactggaccagagagccttctggtctatgaatacattgcaaatcaaagcctccacgactatcttttcggtttgtttttgtcaatcctaaaccttttactacagttaccatgtcttgatggatcttttattgacttgttcttgttgctttgttttggttcagtaagaaaagatgttcaaccgttgaattgggcaaagagattcaagattatacttggtacagcagaaggaatggcgtatcttcacgaggagtcaaatcttagaatcatacatagagatattaagctgagtaatatccttttggaagatgattttactccaagaattgctgattttggattggctagattgttcccagaggacaagactcatatcagcactgccatcgccggtacactgtaaagtctcaaaacttatctttgtaactttaatatctctctctaccgtttcttgtgttgtttctgaagattcttacttgtggaaacagaggctacatggcaccagaatatgtagtacgaggaaaactaactgagaaagcagacgtttatagttttggagttcttatgattgaagttataaccggaaaacgtaacaatgccttcgtacaagacgctggttcgatcctacaatcggtaaactaactctctacaagtagttcaaacattttcttgattttagatcaaatcctttttcttgaatcttgaaaacatattttaggtatggagtctgtacagaacaagcaatgtggaagaggcagtggatccaatcttaggtgataacttcaacaagatagaagcgtcacggctacttcaaattgggcttctctgtgttcaagcagcgtttgatcagcggcctgcgatgtctgtggttgtgaaaatgatgaaagggagtttggagattcatacgccgacgcaaccaccgtttctgaatccaggaagtgtagtagagatgagaaagatgatgatgactcccacgacgaatcagtctaattcttcaggatcaaggagtgactacataaccgagggttcgagtttctttgaacctagatgaggttttagatcgtgttagatatatcagtatcctttcgtgtggattctgaatcatcttgtgtcatatgtacaaaaattgagatgccaattaatcgtgtgttagctaggaactgagggttacttatgtgccacgacaatgtcatagaagctaggaagtgaacaatgtagagcttacatgacggggacagattccggtttagcctcggttttgattgtagtgattcggtttacggttcagtagttttattttgtgtgttaattttgagtagctttgtatattagtaagcggtttttgtgtttgttctcgttttaactttacaaaaagagaaagagtaaatgtcatatttaaatagaaaaatgcaaccacaaatgcaaagaaattcgagtaaaaccaaataatgccataaggatatttacctaagaatcaaaatatgaaacatattaaatgtacacaagaaaaaaatcaaatcactaaaaattcactaaatttattaccgcaaagtttggatcatgatctcctaatttttgcacaagtggattcgaatcaaggactttttatcagtgtttttgttttctttcaaggaagccataggagactactagatagaaacacatatactacatatgtctttattatagccaactagatttaacatttttagaattgaatgtccaactacttctcatttttctttgcaattgatcttgaataaaactttgaccatggcaacatgtaaatggtattttgttatatatatttttattatttgtacaacttttattgtactataccaactaggcctactaaatcaacccaacaaattgacaaaaaaaaaatcaacccaacaaacctatttctttatttaaagtagtctaacgtcactttatccattttcttgaatgtcatcttactaaacactacgcatatgtgacgttttcttttttctttaactaatcagaaaattgaatttttcatgataccggtaaagagatttatccaattaaaccgaaccggctccacataagataagctctattaattattagtccactggtttttaggtttatgaaaacgacaaatatttgaatgaagacaacgacttcaacaacatgatcgagctggtttggtttccaagtgtgaattcaagactaagaagaaatccaacaatctccattatcaattttttttattaactttttgactaaaccagtagagagagagagagaaagacagcaaatttggttgactctaacaaaccaatatcatcaaagtcaagcagttgaaaattcttcaatttcatcatctccaattcttaatctctctgcttcttctttcttcacaacttgaaacagaacacaaaacccttgatgagggaataaaaaaaggagatctctttctcaatcaaacaaaacaaaatg

SEQ ID NO: 9362 - DNA, 3000 bp, Unknown
  misc_feature (1)..( 3000): cDNA_ID_2182034_gDNA_ID_1972104_Annot_ID_178665 3000 nt of promoter + ATG
atggcgtcattgcacgtatcaaagtccgtcaaggaggcactaagattgatgttaagactaaacccatcattttgtttgatgtttttcaacgccttttgtagattttcgagtgcactatcatagtttgagtagcaagttttgagccctcctccacttttccggctaatcttggcggcttctttggccttgatcgttcttttcatcagctctcttatggaaacctccgtcgctgcgttaacattcttttggcccttaaccactgatctgcacaacactttgaaatctgacacggagcatggatcgcgtccgcctcccataaccctctgagccattgctacaccgctttggctcgcggtcaggaggaggaggatcaccgcggtggcaaggtggagatttgtagacatttttatgtaaaattgcgtggtatttgaacaccggttgttgattatttgaacaaatagagggtggttgttatttataataatgcatacgctaaaagaaaaaatgggtaattttagtaagttcttttgaggaaaagagtttcaataaattgtcgccggtgaataattagagagacatatcaaatttagttccttggttaattaggcctaatgatgggttatttccttcttatttttatttttgctttgttctgaaaaaacgcaattataaatttccatttcattttgtggtttatgttttctgacaatgcttcgtaatggccctgccatggccgatgaatcaacttacaaaatggccttatttttattcccaattcatactaatttgggcttttatgtgttgacaatgtttttaatttagaccatttaagaaagatagtgcagaaggatctagtgcagcaattgtcaagtccagtttcttgtgggctggacaaataatgttttattctctttgtcctgaacaaaaaaaaaaagttttaagtaatcttcgttagtagttttcgttctaactcatgagactatggaaatgagtctcgtttggggttattgatgctaacatatgaatttattgttctagtttgatgtataaagattttgacaaattacactcacgacgagagtggcttgattatcgtttcattaaaaaattatttaattcaaaagagtaatagtggtggttatgggtggagaaggtgcgattagtggccagtgctcacacaactaaacataagtcaaagctttcatcattatataattgccaacaaattctaatatcttgaaagttgaaactaattaactaacgtgtagaacaagctcgagattattcgtttcgtcaatccgaagaaaaaaaatcttagaacgtcgcttaatggtagactcaaaatgcatcatttcgtcaataaacaacaagaagaaaaatacaacacaacatcgctatcacttcagaacatggtttagcttgtactgaaaagataagagtttaataatcttagaatgacatgacttcgaaatagatctcaatcaatgtaaggattttgtttttgcgataagatattaatgcaatgatatagtaatacaataagcatgggttggatatttcatatttggagttgacgctgactttgatagtcacgggttggtcgctttgcttctagacgtcgaggacccatcggtttctattattttcgtttttctaaataaaattcgccgaaaattatctggtaccaataatttcacaaatttatgtaaatttttaagacaattattttctaagatctatctgcctgattgaaaaataacgaaacaaaacactgtttcattagttcacaaaaacgtaattttcaaaaagtgatggttgattagtttgacaggaataaaactgtcattttcagaatgtacaagtaagtcaaaatatgcggcaaattcagataaaatggctgataaaagtaagattgtcgatggataattgtggtggagaaagaataaaaagaataattgaagactttgaagttgctttgatttagagacgaccttcacaatacggcagacgagaacttacgccattatccattacgttgccttgttttctcaaactattcctacaaaaaaacgtaaaagaggaaatatccggaaaattactccgaactttagaagattcttgcattgatcaaaatctgtttttaatttcatatcactcatgaatttgtttgtgttggactattcagagtttcagacagtgcaaattagtaaaatattcttactattacgacgtaagaagaaaaagacaaagaggctggccgacgatggctagatataatgaactttagaggttatatgtttatcgtttactggttttgatcagttcaaacactcgaaccgaatggttaatcgataaatatacaagtttattatgaactgaacggttaacggttactaaaatagactttaccgttagtgacttagctcaattccctaaatcgaaattcggaaaatctcggtctggttcgacattctctattctgtttaaagttccatgcctagtaaatacgaattgcaaattggcaactacccaacgattgtataacttatataaccgtaacagaaatccttgttttttctatgttccgcattgtgggtgacaaaacagaacatacaaaaaagtgacaaaagcaatgacgtcatgatgccccgtgcattaaaacagaacataactcccacacggcgtcgttttctgctttcaataccccaatgcgatcggtatctttcgttgaatcgtaagaagacaaaagtccactctttgacttctcttacaattggaaaaactctcaaactggaaaattttccaagttttcttcttttgttgacccaacaaccaaaatctaagaatttcaatttcaacttcccgatcgtgtctccttcttgattctcaatcacccaatccatttcaagagagaagaaaaagaaaacagagcaaagatcaaaaaccttacacaaatgctttcttgttcaatttcaaaagcttaaccactaaacccagatg

SEQ ID NO: 9363 - DNA, 1705 bp, Unknown
  misc_feature (1)..( 1705): cDNA_ID_2038322_gDNA_ID_1972105_Annot_ID_178687 3000 nt of promoter + ATG
gaattctacgcctgcaaaaccattgacaagcgcgtgctcatcgacgcattagatcgcgagtgtatagagacggagccgaggatcatggcgatgttaccgccgcatccgaatatcatcaggatcttcgatctctacgaaacagaggattctcttgcgatcgtcatggaattagtcgatccgccgatgacgatttacgatcggttaatctccgccggggggaggttatcagaatcagaatccgcctcatacgcgaaacagatcctcagtgcgcttgctcattgtcaccggtgcgacgtcgttcatcgggatgtgaaacctgacaacgtcttagtcgatctcgtaagcggcggtgttaagctctgtgatttcggatcagcggtgtggttaggcggagaaacggcggagggagttgtgggaacaccgtattacgtggcgccggaggtagtgatggggaggaagtacgacgagaaggttgatatatggagcgctggtgtagtgatatacacgatgctagctggagaaccgccgtttaacggtgagacggcggaagatatatttgaatcgatattgagagggaatttgaggtttccgccgaagaagtttgggtctgtatcatcggaagcgaaggatttgttgaggaaaatgatatgtcgtgatgtttctcggcgattttctgcagaggatgctcttcgtaagtcatcttttttttctcgattttttttttttttttgagtttgctcatcaatttgtaatggtgaattgcaggacattcatggatgatgaacgttggaaacctccaaagcaattagtcgaagcttttcagatatgtgattagagagtgtaattagagaagtcgtaatatagatgtgagtgtgtaattgtttgattcgaatagtcaaacgtagttgtgtgtttcagcaatcttcctacgttttgtcactagagaaagtatgttgaaaactttttgtaacgattcgccagattcagaataaaattgattttgagatcattgttgagagttaggtcaaaatctgaattcgattatttgctccccaagaaacaaaaagaaaagattactatggttggtaaatctgggccagtagaagggatctttcggaaattgggcctaactgatgaagtttagatattttgggctagatttgtcgaattttggggcccgtttcaggctaattatgatttgttcgagaaaaaaaaggtttcgaagtcaatgcaaaggcaaatggagttcaattattctccagacctggttttcacattaactaatactcaagtaattcgtctagactctaatgtatactagggtttttaaactaaaagggacatttcgtttttaaaaacagccgtggactgatttactaaataattcttttctatataaaaatatcttatagccaaaataaaatattattagtatatatgtgaaagaatatccaccaatgttaagaaacaaatctttttttaagtcaaaataaaatatggttggtatattgatatatggaagatacatcaatggtgagaaagagaaatgtcaaccttgaacctaaatgttctataaattcatcttttacttacaatccagaaaatcacaacatcttttttgaatagattttatagctgatacaacgagcaagagaaaatggccatcacaaagacttcagtgactcttttacttttaataataatg

SEQ ID NO: 9364 - DNA, 3000 bp, Unknown
  misc_feature (1)..( 3000): cDNA_ID_2035756_gDNA_ID_1972105_Annot_ID_178693 3000 nt of promoter + ATG
tggaaaacataaaagaaactgattatggatggaagtatcacatgctcgcagtcacagacatttttataccaatgggaagttattaatcttttaaaaaggcaaacaggttaatataaaaagtaagaaaacagcacacctggtcaatagcacaaggaatcaagcagcggagattgtccttgccagggaacaaatgtgggaatgagctaggaaaagatggaactgcctgcaaatatacggaaaacaattatacagtctatatgcagttagaatacacatagccacaccaacagaacaaacgacatacctgcacaggagggaaactgagtttcgcgataggatcttcaccggaaaagccaaagattcccatagcctagcaaagaaggagatatacaaatgaaaaccacaaacacaaagtagctatacaacatatcagccgcattgtgcaattcaaggagatagatagtaaagtcaccttattaagtgtaacgcacttgccaaccttcaccatatttttatagaaagcactacacacaaagtttttgcatatgatcagccaaatatactgtgatacatcaatcaaaaaaaaaaaaaaaaacgaaggacaatatatgatcttacaaatcttcgccaaaaaaaaaataaaaaattgagctacatgcatgtagactatatgtactaccaagagctcttcaagcaatattttctacaaagcaagagcggtgctagttatttccatagaagattcgaatgcgacttacccgccaacatagtcgaagtccgagaaaatgaaggtctttgttacatcgaatccacaagcaataatatctttcgcattttctctggcaagtctttgactttcctccaccgataagttcttccatatacttttttcatcatccgtgagctgtataacaaggggaaccttgaaagcttcttgcaagtatctgcaaaccatttcaagtataaagagcaagcacaatctaccaaatccgtaaacatggtaagacaatactagctccaggatctcacttacttggtaaacatgaaaggaatcaaatgccccaaatgcaatgcttctgatgaaggtcctcttccagtgtagagatagaacttgtctcctctctcataagcgtccaaaatctcattgaaatccctgttaaaacctcacaattaaaacaagcaagacgagaaatttctacacaattaattaaaacagtgaatgtctaaccggtgggcgaagaagacactacggcggaggaacacgtgtggttgacgagaagtcagtctctgaacacgatcaatcagtgactcgtcaagcctttgacatccaaatttgtcaataagcttgtcgtaatcgatcttcccgccgtctttggcggacacttcccatggattcaccacttgctccgaagattcagcctctctctcgtccttcttatccacctccatcgcgacggaaaacaaaaacctatacaaaaacagaagtcagattcaaaatcctattagcaaacaagctgaatagagctgaatgaaattgttatatccaagtacctacggttgttgccggtgataagacggccgtggatatacggcggtggttttgcgactggagatagtctttagactgacgaagaacaaaacgaggtttaagtcatatatttattactatttgggagtcagaatattttatttttgtcaattttgccgtcaagttttagatatacacattacccctttctctctggcccaaaattaaaacaattatcgtcatttatccctttacttttagagagaacaaatatccccctctcgttaattttttcaattgtatcactaatcaaagtctttgacgccatgattgcctttttcactagaagttcattcatcatctaaatgcaccggtccggtttattgaatatcttcttcgtctttctttctgatccgttaataatctttccatagtctataagatgttatcataatttcataaattttcataatccaatagttgattagtttatgcactaaaataggtgttaaaagattttagatatgaaaatcatgttttgtgaatttgagaaagaagaagaagggagaagtttttggagtgttgtttagtgatggaagaaaattctgatgatgtttataactaaacaagatatgtcaagagataaaaaaaaaagagtggtgagtgatgggacgtttgattctctcattggtcttttcatctctaaaggatgcttcggttagtcaatacaagacttgaagatgcattaaatctgaaaaggccggcctttgagtttttatggagttcattttgtgctagctacatttttcagtacttgaaatcccatccgtttatgcaatctcctagccaaaacagatcattgagttccaaacagttacaaagtctttttttcccctttgtttgatgctttgttgcttgtttaggaagaaagtgaatatgtggcctaaccggggtattggttagtgattaaaggcctttgttgaataccaatgttgacgaatgcaaagttgaaaaaggagttcaatctttttgttacacccccattgactttatcattttcttttaatcattcaaatcatggtttctttgaaattggaggatatgttaaatcaaccatgtactaaatgactagagaaaagtgaaaaactgagaaggtgagtgagtgatctttcgtttccctctgaaaaaattaaatttctgtttcctcgagaaataaaaacagataaaaaagggtaaaaagaagagatgctttaacacacataagtcaaaaacatcttaagtcaaatctagaagatctaacggttgagattctatctcatcatcttccttcttatcgattaatatataagtataaaataataaaaccctaaaagaaaacaaaaaaaaatgcaaaaagaaaaaatgaaaaaaaatccctaactctctctctctagaaattcttatttttgtgcgtatctctctaaaaaggaatg

SEQ ID NO: 9365 - DNA, 3000 bp, Unknown
  misc_feature (1)..( 3000): cDNA_ID_2035748_gDNA_ID_1972105_Annot_ID_178697 3000 nt of promoter + ATG
tctgttaagcatcgtgtacataaacatccatacataagtatcaagtataaaatgatagagatgggaaaaggatacgaagaagcaatggagcaattatcttcgtcatcaatatgcttcttgttctcgggttgcaatggcttcctcaccgcgagaagaggagcatcctgctgctaaaaaaaacattaagaaacgggtcaaaatcggatttaggcctcaatcatataccatctacaaagcgttattctcaaaaccaagatcttatgaattagttttacctttgaaactttagcatttccattacgggttttaggtgatttctgagctccaactctctcagcagatccaacatttggtgcattctcagaaagagacttctcctctgtgcattctttgacttcaaattcctcatcagtctcctctgcagctatcttaggagcaacatgaactctagcgcttgaaacgtcggcgtttcggtccataagcacctcaacaacttctcttcccattccactggacatatccaccaaccaaagacaaaacaaacagattctctattacacagattctcaaagacccatttcaatttgtaaaatctcagctttctctataccctagcgataacaaaatataatcttctaaaagttcacaactcttttttcatctgacatttcaaaattggaacgtaatgaacagagattggttcaaagttagaaacattcttgaatctgtagaaagggccaaagaagaacaattcaaaagtgaaaccaacacgcataaacaaccaaatgaagaaagagtcaaattttcaaaatttaaaaatccagatgggcaataaatagtaagaataacgaataaatttgaaaactttgagagcaatttttacagatagaacaaggatttaaggaagagcaggtacccaaaaaacagaagataaatgtttcaaccaaaatgcaaaacaaaaattgtttcttacaagtcttgtaggatataggaggaaggattcttgtgcagcaccacctctgtctcctctctccgatggcccgtgagaattttgcagacaattaaaatagaaatgaattgtctttttatccagaacaaacttgtctccctctctctttctctctctcaagaagagaaaaaaaggatttttttttttttttttttttttgggcggtgactattttggaatggtgtttgatttgtttaagctgttggttatttattgggactttgcatttttcaaatttaatatattatttttcaaatcggtttactttaattttgtttggattttattggcgcttttactacctcatgattcttcttcattttaaaaatcaggatttgaaaaattgattcaccttatatataatcttgcttagttttattttgaaatgtgtcaattaatttccaattagtttttgagtttaatgtatcaaaaaaatcacaataatcatttgttaagcagcagtatcttagaaggaaattcaaactcatcaataatcatcgtggtcattaaagttacaagacggatacgaatgtgaaaaatacctcatttaataataatcataaatacaccaatgtgacaagttacttctatttaataaccacctctcgactaacgtgataccagtatttaacccgtcacaggctttttgagttttatccaaatacgtaatcctattgagtatttttaaccttgaaggctgtagtagagtacgtatatcactttatggagtatagtgtaaaagagaactataagctttaaaaatgcttcatgacgagtttaaacatcaagagtgtaattttatatactttccctcgctactttgtttaaattttcgcagctttgttctagtattatttttcgaaatatggtttggcttgtgaacgcatctacatatacactacgtagaaaatttgaaagtataatagcatacaattgtaaaacagtttatacgttgacaaaaagaaaaaaaaaaacacaagaaatttcttctatatttgtttttttaatttcaaaaatttagttagatgaaaacatataatactaattggtagcctagaaacgtccaattccgaccgaatacaacttttgttattgaaatgagaacaaaacaatggtattcaattgaataacgtaggacccacgttgcttttggaataacgtaggacccacgtcgcaactcaaaaatcacaaaatcttcatctatcctttttggcggcaaaatttcttaacgaggataatcaaagaaaacaaaaggcaaatcggtcggttggtccaacaaatggtcccagagaaaaagatattgcctatgaaaaatggctaccaccttcaacgagattggtctcatgtattgtggtctgtggatattataatataccacacagtctacacacaatgaaaacgaagttaaaatctctctctacaatatatcataattttgtccataacactattatatgatatcaacatctaaaagttatataaatcaggattataatatcaaaaaaattatattattaaagtttggtttaaatttttttattaacttacatgatcaatgggatccaaaatcagtttacctctcacattgttttggtgctgaaaagaaatatatagatgggtttttaaaagaaacttaggcccatttaggttgcaaacaaaataactcaggcccatttagatttacaaaaggctcaaccactaaatttttatacctcacaagcatagtggtctctctccgtcattcgctctttactcggtcaacgaaccgtttgaagacgaacacgtgtcacgttttagtaggacttacgagaagcgcaacgagtgctatataaatgccgttaagcgtcgtaacggttttctaattccccgagagtaaccaacaacccaaagcgatcaaagaacttttcccgctagagagagagagagaagaagaagaagaagaaaagttacgcagagagactgaaagaagagtgatcgatcggagaaagatg

SEQ ID NO: 9366 - DNA, 3000 bp, Unknown
  misc_feature (1)..( 3000): cDNA_ID_2035731_gDNA_ID_1972105_Annot_ID_178703 3000 nt of promoter + ATG
cttcacaagtctggtggagttgtagccagggtcaaagaggtccgtaaaagatcaaggaactttaagattcaggtaaaattttcaatctcaaatcttttaatatcccttttttcatgcctttggaggtgtaactcagaactcaaaaactgaattttccaggaatatttttacggtttatcgaaagaactctctccgtatgccaatacatcgagtttcagtgatctgcaagtgttccgaattggtggtggaccacaagcgccaaaatcggctcttccagccgggtctacctcggtttcaaatccgttgcgggtgacgcctgtaaatatcgatgatcgggatctgctgcattctgttcttgctgtctcatacgcagaagaaccagaccagatcatctcaaggtaatctctaaaagttcttgctgtttccagaatcaaaggctttcgtgtatgttttcttcgtgattttgatatttctttctctctgttttttctttgatacagcaatgtttctgggtttgtgtatgtgacggaagttaatgtgcagaagaagaagataacgtatttagcaccatcgcctgggacattacctagcaagttgttggtcgctggatcattggcatggcttgagtcagtatgacttacttagagaagagaggagccatgttttttgcttgagagaatgatgcagcagctcgattatgtaacgttaattacaaatagcctttttcttctttatcaaatgcacaagtttttgagtttaaaagatcattattgcggaatagatggttggttgtaatttgatgttatgaagtgagcaaaaaataatgttgatttactagtgcgttagttctgtttgtttggttcagcatattcaagtgatgtgtgtagcatttttaaatttgataggtcgaacatatcttatgttattggatgatttcgaaatagtatatgataatgttcaaagtcacacatgtattattattggttattaattcaactaaattactatcacattttaagtcacttcaattgtattgttgtataagctctgtatttagaatcggatccgaagaatattagttggtctgtctaaccaagtcgcattaatcttatatgattctcctagaatagaaaagaatattttattcttatgctaattcaattgaaagataattaaaacggatatgttttgagttcaaaatgttaaaattgtcattcatttgcaatagacaaaacatatttagaaaattctaaatttacatgctacaagatcttctatatgctttaatagcctcatttttttttttaaccctgcacattaaatacagaaaatttcaatcatttgactgatgattagagatttatagatataagaagaaagtttcacttatcattgtgaatatgataaaacaagaataataaaaatatcgtataattaacaacaagaacaacaaacacaaaaaaaaaaacagaaagaaagaaaacaaaaaagagctagtcaacaatcgtgattcgtgatacaacgtgctagagagacgaccagatgagatagggcacgtgtcgaaatctataccgttacttttctaactccgtgctcggaattcgaaatcaacgggagacacgtgggttccacaatggacgttatttccatttcatgacaatcgagaaatagttaaataaaaaataaaaaatattttctaaaatgaatacaaaatcaattcgaattttgctttggaattagaatcatttttaaaacatatgaatatagtagtacaagaattttactgagtcaatgtccaattatcattaaagatatttgactctaatccattctctttctctaatttttctttaaagatattatagttaatcacatcatttactttaagagaaagatatccgaaaatcagaaaatgttaagatacattatctaatttcctttaattgatacggtttatgattttaatcaattttctatttgtacgaaaaacagtaggtataaagtaggtccactagtaggacccacctaagaaactcttttttaacagagggctctgttttttttttcttcctctcctctgaaactgcgacgaccacatctctgttctgtattccacttatgtttttgtgtttggttttattttccccagaaattgaataactttagcttttaagaataaaaaggaaaatttaaaattgaaatttggtctccttgagaagtgaataaatgaagaaaaaaaggaaataaaaaggggtttttggtaatatttaaaaattgtagaaatggtggtggtgggggaattttaagtaaaagcaagtctaaactcttccccacccacaaagcaaaagtcataacctttgacacttttttatctcaccatctctatctctctctctctctcacaaagaakcaaacaagacaaatctttctttctctttattttatcctaaaatttcctatctgatttcttcctcttgagctaaatttgttaccttctgggtattcaaaaagatctcattttttcttctagctctaaattttcagggagtttctttcttcttcttttgaagaccctttgtcatgagctaatttttatcctctgtgtgttgagaaagatctcattttttagctttaggattgagggagtttcgatttttacttagcacttttccttggaagtgatttggtggaactcatggtgattggtttcttcctagggttattagagattgagttctggatttttcacgcgccttggatttgatctaatgtactctcttttttcatgtcttaatctggtttagatttttattttgagatcttttgttatataggttgcaagttctgtattttgttaggctttttagtttctgtgttgattatgattctcttggtctaggagagatttgggtgttgttaactgtttgagtttgagaattgtgaaattaggttttttttttttggttctctgatctgaaacttgggtagaagaaaaacatg

SEQ ID NO: 9367 - DNA, 3000 bp, Unknown
  misc_feature (1)..( 3000): cDNA_ID_3041600_gDNA_ID_1972105_Annot_ID_178706 3000 nt of promoter + ATG
ggaaacacaaaccagtttcatcttttgcatcagcattgagtttcagttcttccaaaagatatctgcatatttcagtttgtccttctctcgcagcgaagtgaagcgctccacgtttgtttgcgtctttaatactctccacagttttcgtcaagtcttttccttcatcaagctgcttagcaacatctgcttggagaagtgataatcagtacacaaaacatataactgctcaaagaaaacagagaaacgaaaagtaaataaagcactcactcttaaggaattcgagatttccggtacaagctgcattcaggatttgctgaactttctccctcgctagagtaagaatccaaagatgaaacgaaaacaaaaattataattagagattcaaactaccaagtgtcaacttcaattctaatctacttataccaaattaaagaaaattttcaattagtatttgagtttctacagttctagtaatggccatagccgaaacattatagccaacgaaaatttcacaaaaggaagaagaaaaggcagcagaggaagaaaaaatcgaaacttcaccataagatcaattcagctaaagaaaactaagagagcccatcaaggaatctatagttcatacgcattcaaaagacagagatcgatacatcattctaaaatatagaaaagagcatacctgcaagagcagtagaagcatcaggagccatggcagatactaagcccttcgttcgtgaaacttggagtgggttttggatatcggagttagttccgttcgtcgataccggtgtttgtttgtgtctgtctgtctgattatcagaaatctgaaaaaaagcttttgccttttaatttttcagttggtcggagtcggaggcttctaggttttaagaagattccagaggtttttttttggttatcttttaataaatttgaatcttagaccctcatatatttaactattacaaaatacacccaataatacgttttgtaaaaaatacaccctgacttctcaaatctcttcattttcattctaacgttagatcaaaatgggcttattttcagtttaagaatcgattatctagaaaaaagttcattttattatccaatccaagatcatattgtaatctttttttttgtatacatcattacagcttatgaacaagaggtgtttttctttttctttctctcatcttgtgagttatatacagagccacaattttcatctctttttctccaaaattttctagttgttttttgtttctttcgaatcctaattgtaaaagattcgcttcttcctatctctcaaaagaaaatctgagtgcttataatcttcaataagactgcataacagaacatgcaactgcttgtgcccaatgtctcaacctctgcttcatttgttgaggatcgtcccctgccaaaaaagatcatattaaaccattagtttataaatgttattgcattcaaaacaaaataccaaaaacatgagtttagatacctgggcataagattttaacagaatctgaatcagttttctttggactacaaggtatactgtatgagaaagttgacgcagatgcactgctgctacggctgctgctaggtgaaggaagaggcgagagctgacgattcactgcaaagtaaagatcaagagctggtaatgtattacaaagcttttgtcctgcttcttcattgaaaccgaaacctagctcaatcgatccttttagctcgtttaaatcttcatccgttagattcgcctgtatacaaagattgtctgaagcgcccttatgaagcagcttcttttcttgaatcattatcatctgacgccttcttctttcccaagcaacgtctcttggtgtttcacacatagatagttgtttcgataaacgatgttttggtttctgtgaggccaccggcgttgtcgctgctgatctgacctcgggaagcgccggttttatgattggcaatgtaagaccttctcttcttctcaccattttttacttgatgtgtatataaagcagaaatgaccagaagctaatgtgttaggtggcttgtgaatgcaaattggggctctagtttatggttttactacctctttaagagactatgatcaaagcttaagggctttgaatcctgtggatttttttttatgaatgttcttagtgtgatggccgcgctcgaacatattacgcggccaacaaaaaaaggttattatgggtcgggttgatcagatgtctacttttatgctcttctctagttggatttttcccaacccgaccagataaactttgaagagactcttagtgctttaatggagaataacaaactagtttccaccattgatctatgtaatggataaaagtcaaaaagctattttcttccattgcttaaaatttgacgattgattcatccagatctttagggactttctttgtttagatccttgaccattctaagaaaagagtttcaaaacatgtcgtagtctatctctatcaagtcaaactttcaaaagtttgtaataatgttattgaaacaatatggtctaagagttctatatttagattacatgaattttcatgttgtagtcaaagaacaaaagtcttttcagtttctctaactatatgctaaacatagcttgttcgggtaatcctctccaccacgaatttttctaactaattttgtttctctttcagacagaacgacggaaaatgagaaaaacaccagtaacctcataattacaaacaaaaaaaaactagacaaaacgagaaaatagaaaagaaaaaagagtgtgtaccttgtttttttttttcttgcaaggtttttgcttcttgttcatccatgcaagtcctgactttctatggttaggttacagagacaataagaaataaacttctaattttgtccacaagcgtaaaagtgatcttaattcttacaaaaaagaaagcttttctctcctcattttttgtttaaggcaaagagtctctacccgttgatgtgtcagccatg

SEQ ID NO: 9368 - DNA, 3000 bp, Unknown
  misc_feature (1)..( 3000): cDNA_ID_3041594_gDNA_ID_1972105_Annot_ID_178708 3000 nt of promoter + ATG
taccaagttcttgtcaacccaccggagtcttggcttccagggatgtcctgaccaccaacattaagtctaaacattgactgaagattcgcagtcttggcatccattgtttggtctgtgaaaccaacaagagccgccgtgtcaaacaattccggcatctgaatcacctcgataccgtttataaaggcaaatgcgtctcggtatttatctgaaggggtaaacttgatgctcaaaacatctttgtcagtgggtgcaagagagtattctttaaccagataagcttgagtcaaagcttgacacgtaatcgcggcgctgaaattgctcagtaaggtaacatcgttagcttccacagtgaaatacgagttggaaatgttgagaccggtgtatgttgatgggtagaaatataaccgaagcaaatgtcttttatctcctttaatcgggatttcataagttgctggagctgtaaagattctggctgtcatataaggaactgttgagagaagtgaagggtcttgatatgtagccgttgcgtgaattgagtttccagtctttaaaaactttgtatctggttcccattttttcttatcttggtcagcagaagcttctgatgtcccgcagctcagagctaaatcttgtccgttagatctagttggaaaaaccaatagaaaggagagacatgtgaggaaaaagagaatccgagttttcccgctcatggctgacacatcaacgggtagagactctttgccttaaacaaaaaatgaggagagaaaagctttcttttttgtaagaattaagatcacttttacgcttgtggacaaaattagaagtttatttcttattgtctctgtaacctaaccatagaaagtcaggacttgcatggatgaacaagaagcaaaaaccttgcaagaaaaaaaaaaacaaggtacacactcttttttcttttctattttctcgttttgtctagtttttttttgtttgtaattatgaggttactggtgtttttctcattttccgtcgttctgtctgaaagagaaacaaaattagttagaaaaattcgtggtggagaggattacccgaacaagctatgtttagcatatagttagagaaactgaaaagacttttgttctttgactacaacatgaaaattcatgtaatctaaatatagaactcttagaccatattgtttcaataacattattacaaacttttgaaagtttgacttgatagagatagactacgacatgttttgaaactcttttcttagaatggtcaaggatctaaacaaagaaagtccctaaagatctggatgaatcaatcgtcaaattttaagcaatggaagaaaatagctttttgacttttatccattacatagatcaatggtggaaactagtttgttattctccattaaagcactaagagtctcttcaaagtttatctggtcgggttgggaaaaatccaactagagaagagcataaaagtagacatctgatcaacccgacccataataacctttttttgttggccgcgtaatatgttcgagcgcggccatcacactaagaacattcataaaaaaaaatccacaggattcaaagcccttaagctttgatcatagtctcttaaagaggtagtaaaaccataaactagagccccaatttgcattcacaagccacctaacacattagcttctggtcatttctgctttatatacacatcaagtaaaaaatggtgagaagaagagaaggtcttacattgccaatcataaaaccggcgcttcccgaggtcagatcagcagcgacaacgccggtggcctcacagaaaccaaaacatcgtttatcgaaacaactatctatgtgtgaaacaccaagagacgttgcttgggaaagaagaaggcgtcagatgataatgattcaagaaaagaagctgcttcataagggcgcttcagacaatctttgtatacaggcgaatctaacggatgaagatttaaacgagctaaaaggatcgattgagctaggtttcggtttcaatgaagaagcaggacaaaagctttgtaatacattaccagctcttgatctttactttgcagtgaatcgtcagctctcgcctcttccttcacctagcagcagccgtagcagcagtgcatctgcgtcaactttctcatacagtataccttgtagtccaaagaaaactgattcagattctgttaaaatcttatgcccaggtatctaaactcatgtttttggtattttgttttgaatgcaataacatttataaactaatggtttaatatgatcttttttggcaggggacgatcctcaacaaatgaagcagaggttgagacattgggcacaagcagttgcatgttctgttatgcagtcttattgaagattataagcactcagattttcttttgagagataggaagaagcgaatcttttacaattaggattcgaaagaaacaaaaaacaactagaaaattttggagaaaaagagatgaaaattgtggctctgtatataactcacaagatgagagaaagaaaaagaaaaacacctcttgttcataagctgtaatgatgtatacaaaaaaaaagattacaatatgatcttggattggataataaaatgaacttttttctagataatcgattcttaaactgaaaataagcccattttgatctaacgttagaatgaaaatgaagagatttgagaagtcagggtgtattttttacaaaacgtattattgggtgtattttgtaatagttaaatatatgagggtctaagattcaaatttattaaaagataaccaaaaaaaaacctctggaatcttcttaaaacctagaagcctccgactccgaccaactgaaaaattaaaaggcaaaagctttttttcagatttctgataatcagacagacagacacaaacaaacaccggtatcgacgaacggaactaactccgatatccaaaacccactccaagtttcacgaacgaagggcttagtatctgcc

SEQ ID NO: 9369 - DNA, 3000 bp, Unknown
  misc_feature (1)..( 3000): cDNA_ID_2990461_gDNA_ID_1972105_Annot_ID_178712 3000 nt of promoter + ATG
gaagcaatagtaatactgtaatagtgtaacgcatgtaggagtagcaaggccttctcacttgtccaactaatttatgttgggcggcaaataaagaaccagcatgaatttttatatatactttgaacccaataccaaaaagcccagcgatgtgttcattctaatagttgtctacaaccaattttgacacactattttggtgtatttataattattattagtttatgatatttgcatattattgatgtaaaaaaatttctgtaagaaaaaagtgctttgttttcacctccatgtactggaagaacatgaaacctaatatattgatatactatattagagtacatagaactctttgaccaaaaaaaaaagagtacatagaactcaaatattgttgactactttggctataaaactgttttgtattagtattactatgaccacaacatgcatatctaaaagctagtttgactactttggctaaaaaaggactatatctataatacatgtattactaaagaattctgtaggtacattttctaccggtcaattcaacatcctattgtaatttccttttaagtaaaagttgtataagactctttcacaattatttattcactataaataccacgaactgtaccattcttaccaacaaatatatatttctcccacacacataaataaacacaaatcatgagcaatatgaaaataacaaataggtttatgctagtggcaacattcatagcatgtgtgttcataagcagcatgaacatgacggttggaaaagtaattgggtatccagggttgaagcctgatcttccttgtgatcatcatcggtatccttctgcatgtgcaccctccgaacaaccagtgaatccttacagacggggatgtagtaaaatacatagatgtagacgcgattcaccccctgcaccaatttctagaaaaatgttaatacgaggtcaattaatttataataatgcatataatgcatatatccaatatccatgaataataaatttatgggtttggttgtgtttaagccatgttgttctctacatctacacatttaccttaatatttttcagcatgtattattgtattacgatatatacagtggtgaaatcttgttttatcattcagttttgttcgatttaagctccttcttattaatggtaaaataaaacaaatcagatcacatatattcatagcatttaaggacctagtgtgtcacacgtgtgaacctgtaatgtttgttatacacaacaagacaatgatttttgactgggcccagcccacacgagggtcctaacatctctcaacagggttggtgtttttgggcccaggtggacccttttatctcattctcctcctcctcctcacgtttatatgaaatttttcacctatataaatttaatcaattttatttatataaaattcttgacatgtagattataagattaagatgaagtcgttgtcaatttggaccttcaattttttatgtcagattcttccatcgtaatcatgcatgggggcatgaacatgatgatgtttagcaataaatgatgttgatgatcattatgctgttataattttattatatataatttgcatggagccatttatttatcaacgctattattattatgctcctttgtgaaaaaatactacattaccatattttagggtcgacgaaatgggcatgacatgtaccgccgcccataccacatatggttgaccatttactgttgagttagtcgtgtttggccctccccaccgaagattatataacccaatacacataagaattagttagcatttgcacctgcatagaaaaaaattagcactagattaaattattcccagcattatactatattataatcattgatcggaaggaatgtttcctaattacataattggtaatcatgtttaacgcacaattacttgaattaacatgaatccctaattatctattgacttcacaataatccatgaatttagagccaagacaaggccacaggggcacatgggaagtatagtacgaaaatgctatggcagaccaggacttttagttcgtttaaactttaaaatttatttgaattcaattagtatttgtcggcattttataatataagaaattgaaaatagtcttaaaaaaaggcaagcataggccaataggccttgtgaatggcggaccccataagaaggacaacgaacgaatcgaatccacgggaatcaaaacacatgtttgaagctgaccactttcgatttctttcccatctgtgggctccattatgtcttagctgtcattttttaattccattttcatataaaccatcaccaattaaataaaaataatctccgacaaaacactctttatttatatatttagtctttttcttcttttttttctttgctattatttttcatcaaattgatatttctgtttttgatattttttcaaaagactcgaatatcttttgccgtaaaaactgattaaagtactaaaaagaagaggtatacctttttatgcgagtggtaaaaatgattcatatttcaagtttgattagaatttattttgggtggataaattcgacacagaaaaggagagactgtgccaagttggcctttgcccactggcttggccgcaattattctcaggaaaatgacgccattcgtgacatcattctctcccgacaacactccttacggtccaaccaatcccagcatccacctggcaacatcacctccgttcaaataatcatcctcaatgatcaattccatatataattttataccacacacgatccaatatttagccctttgtttctctacacacatctcacatccccctatctctctctctcttcaaacgttttagttccccaaaaaaatatcaaaagaactaaaagaaaaaccctagaagccgaagaatctcctactcgttgtcgatcggatcacctaactaattactcgttgataatcattatatcgagaaatatg

SEQ ID NO: 9370 - DNA, 3000 bp, Unknown
  misc_feature (1)..( 3000): cDNA_ID_3041585_gDNA_ID_1972105_Annot_ID_178716 3000 nt of promoter + ATG
aatgaggcaattaaaagtttcgatttaaccccatgatcttaaaactagtgagaataagatagttaatcattttcatttttttcgaagaaatcaaattacttaacatacttaatcatttcatttcctatgtaagccacttagttccggaatggttggctcatgaagccaacattttcgaacgagtttaataaagtatgatgttttggagataaaaaaaaaaaaaaaaaatactttggatctacatgtgtgattgggtaatcgaggattggttggctaagcaaacgacaacattatataataaccaaaaagtggaatataattaaatttttaattatgttagccgaaagtgaaacggtatctaagtatgcgtgttatggactcactcaccattaaataatttaactgtgttaaccaaaataatttgaataaaatatccttcgcatcatcacacttttgcagtcttacagttcatggttcacatgctaacaccttccttaaagattaatgattttctattaaaaaaaaagttaataattttcttttggagtgtgagatataaaactttcgctacgaagaaaccctagagcaacaccttctttttctctctctctttagtagaacttcaagaaggttgacaattcgagctatgttaggcattgatgaaacttcgattaattttgttttttctgtatggcatttgaagacatatttcgtttggaattgaattatgttatgtttcgttatgttatagacttatagtaaaattgtgccggtttggtattaaaaaaatcgcaattttagtgacgtaactattatcataagattctttataaaaaagaaagctattagcaaaatattacagaataagccatgcaaaacgatgacgatcctcttgttacatgtgacttgaagctatttaaataacagtgtttggttttcgataatgtttgcatgtgacttgtaacttaagatatccgtgtcaacatggtgcatgaatataaccttagatgataattaataaatgtttctgtgtctaattttcaccttctaatcgtatatactagagaatggtgttgtatgtgtcagcatgcgttgtctttaggcgtggcaatattcaatttgtatccttctttttatctgtaattaataacacgggaccacaagttcatgttctcactttttcaactcccaaaatgctttctttgtttaacatactaaatacctacggtttatactaattatttttcaaaatgtaaatactcttttgatgtttacaattcaaaattcaaactgaagttctatattcatagatcataaagaaagttagaaattctacatttaacggtctgtgttaagtacttctacttactttttttaccatgggtgagaaagtgaaaagatatccataatgaaatggaaaaacatctaatacaaaaagtagaatgaaattgatttgtattggttaacaacctaacatatgtaaatgtagaatcatgacctattaagcttctctttttccttaattcataattttattctagatgaaaaccaagattatagacacgtgtatcttaataattgtgccttaattttctgaggatccaaacacagaaagtgttaattaaagagcttaaaattcacataagactgactagtaaacacaactacagtttaaagaaaagtactactatgtattataataattttcaaataatgatttgatcagtcacaaatcactctcttagctaggcttcttcataccatatatatatcattcttctctctccctcccactactcacacgataaacaagaagctaacacaaagcacacatatatatacacaaatccatgtgtatatgcaagtaaagatatatagtcgtcttcatgtctgtatgtataccatgtaccagtagcagttaagctgccagcatgatcttgtcttcctctcttaggtttcatatatagttaataaatattttatatatttcttgttcttacaagattatatgatcatagcttagagagagagagagactaggtcatgctggtagtttcacctgctaatgattgtagcatgaaggagaagaagaagaagaagaagacatacagtaaatactcctataatcctttacattcagaaagaggatctcatgaaaacagcagagattaattatattaagcaggtatgtgatcgctccgagatttcttattggtcttttaaatttgtttctttcatatcactttgtttttgaacattaaattcttttcattaactgatgtataacttgtgctagtgtgacaatcatgaattcaaattagaaatttaagctaggatcatcaagttattcggttaagattgaggagaatatataattaagaaacttaagaatgtgataagatttgtcagtgtgatgatccaatcaataagtttcaaaaacaaaattatattaaaaatcatactacttggttacaacttacaactggacagagagggcttgaattataggttataaaggaatattctattaccaaagacgtttttaatcttacatgttttaaaagacattaattagaaaatgtagattctttttctttcttttctttttttgattcaagagagtattcttcttctttttttgtgggccaaacttcaagagagtatctaaagcccaaaatctaaattttgagactagaaacgtcgccgtttatctcaacgtaatgttttgacctttttgacgttggaagacaaaagtcacggaagtacgaaagtacaaaattggactctatcctatcctcacaaatttgcattgagattacaataaaacgagtggtgttgctctgttctgttcttcccacttctactccaaaaaatcctaacttttcgcattatcttcggttttgcgtttcgattttttgtctgaaaatcccaattcgacactctgtttctgcccacaaaactatcttccatgaaaaatcgaaactttgtctacaaataatg

SEQ ID NO: 9371 - DNA, 3000 bp, Unknown
  misc_feature (1)..( 3000): cDNA_ID_2035703_gDNA_ID_1972105_Annot_ID_178715 3000 nt of promoter + ATG
taaagagtgttttgtcggagattatttttatttaattggtgatggtttatatgaaaatggaattaaaaaatgacagctaagacataatggagcccacagatgggaaagaaatcgaaagtggtcagcttcaaacatgtgttttgattcccgtggattcgattcgttcgttgtccttcttatggggtccgccattcacaaggcctattggcctatgcttgcctttttttaagactattttcaatttcttatattataaaatgccgacaaatactaattgaattcaaataaattttaaagtttaaacgaactaaaagtcctggtctgccatagcattttcgtactatacttcccatgtgcccctgtggccttgtcttggctctaaattcatggattattgtgaagtcaatagataattagggattcatgttaattcaagtaattgtgcgttaaacatgattaccaattatgtaattaggaaacattccttccgatcaatgattataatatagtataatgctgggaataatttaatctagtgctaatttttttctatgcaggtgcaaatgctaactaattcttatgtgtattgggttatataatcttcggtggggagggccaaacacgactaactcaacagtaaatggtcaaccatatgtggtatgggcggcggtacatgtcatgcccatttcgtcgaccctaaaatatggtaatgtagtattttttcacaaaggagcataataataatagcgttgataaataaatggctccatgcaaattatatataataaaattataacagcataatgatcatcaacatcatttattgctaaacatcatcatgttcatgcccccatgcatgattacgatggaagaatctgacataaaaaattgaaggtccaaattgacaacgacttcatcttaatcttataatctacatgtcaagaattttatataaataaaattgattaaatttatataggtgaaaaatttcatataaacgtgaggaggaggaggagaatgagataaaagggtccacctgggcccaaaaacaccaaccctgttgagagatgttaggaccctcgtgtgggctgggcccagtcaaaaatcattgtcttgttgtgtataacaaacattacaggttcacacgtgtgacacactaggtccttaaatgctatgaatatatgtgatctgatttgttttattttaccattaataagaaggagcttaaatcgaacaaaactgaatgataaaacaagatttcaccactgtatatatcgtaatacaataatacatgctgaaaaatattaaggtaaatgtgtagatgtagagaacaacatggcttaaacacaaccaaacccataaatttattattcatggatattggatatatgcattatatgcattattataaattaattgacctcgtattaacatttttctagaaattggtgcagggggtgaatcgcgtctacatctatgtattttactacatccccgtctgtaaggattcactggttgttcggagggtgcacatgcagaaggataccgatgatgatcacaaggaagatcaggcttcaaccctggatacccaattacttttccaaccgtcatgttcatgctgcttatgaacacacatgctatgaatgttgccactagcataaacctatttgttattttcatattgctcatgatttgtgtttatttatgtgtgtgggagaaatatatatttgttggtaagaatggtacagttcgtggtatttatagtgaataaataattgtgaaagagtcttatacaacttttacttaaaaggaaattacaataggatgttgaattgaccggtagaaaatgtacctacagaattctttagtaatacatgtattatagatatagtccttttttagccaaagtagtcaaactagcttttagatatgcatgttgtggtcatagtaatactaatacaaaacagttttatagccaaagtagtcaacaatatttgagttctatgtactcttttttttttggtcaaagagttctatgtactctaatatagtatatcaatatattaggtttcatgttcttccagtacatggaggtgaaaacaaagcacttttttcttacagaaatttttttacatcaataatatgcaaatatcataaactaataataattataaatacaccaaaatagtgtgtcaaaattggttgtagacaactattagaatgaacacatcgctgggctttttggtattgggttcaaagtatatataaaaattcatgctggttctttatttgccgcccaacataaattagttggacaagtgagaaggccttgctactcctacatgcgttacactattacagtattactattgcttcatagaaaaataaacctcgtaccaaaatctcaaataagtgtttcttgtggttccttatgaaaaattgttatacactattacagtattactattcaccgtttattgtcggaactcggaacaacgttttcaccgtccaattgttatacacactattcaccatatatacattaatacatcacacatcttctacttaagagtgtagtgtacattaatgataattttgtaattaacctttttaatgatggttaaaatgtctaattaataatttaatagtgacttacttgcttacgtggataaaagagagaccccacacaaaaattagattttgccgtctgttaaaaaaaaaggcttcttcagccgatttctccaaaaatcgtttttttttttttttttttcatcttccgttcaacgttttgcgttcgactcttccctgacccctttcaattttaaaccctttttctctgtctctcttgtccgaatcaaatccggttgctggaaaagggaagctttgtgcttttgtcgtcgtggtgggggaagcggaggataagaaccctaattttttacgaatcgtgagatctcctaagtttctgaatcgggtggtggcgattttgtttctttctccgcg

SEQ ID NO: 9372 - DNA, 3000 bp, Unknown
  misc_feature (1)..( 3000): cDNA_ID_1396989_gDNA_ID_1972105_Annot_ID_178720 3000 nt of promoter + ATG
catgtttatgtacattattcattaccattgaccaatataaaatcgttacagacgaatatttctaattaattatttataatttattcatctttattattttcgttataggttttgttaagttttttcgtcttacttcacacccacttataccatcgccttgtccatgaaacaatttatgagacctttagtagtttagggcaaaggcaaaccgcgtgagcatattaaattatagtaaccatgtcaacgtgaaatctatttttctttttataaaaggtcaccaaattatagagagatgttcaaatccactactttgtaccttagaaatgtgcaatcatattgcagggatgttcattgttcaatcccatcaacttgtggctatatcctcgtcttgtcttttcaccgtggtcgtattatagaattttgaaactaaagatatagatagaatagcactccttttcttatgtagtcattgtttgttttttatatcgattaatctttcattttcccaaaatgtactataactaaagaaagataacttgtttacattaccaacaataggaatgagactatttgtaactaacatgttaggtctttatctgagaaaattctgactttgacctctttagttctaccggttgctaaaagaaaattaattgacctacatagtttttgttttagaaacaaaaaattcttttaacctttagcaaaacaaaattccattgtgttgttgttaatggagtgatcagtgattcattaaaagatcggaacaaaagttctagtacaacaagagggcccaaaaagcccaagattagaatttaaagcccaacagttttaaaaataaaagataaaaaatttcggattgtccccgaagttattccttttgctgctcttgacttgaaagttataaaccctcacgattcatccttaaaccctaagcctaaagcagaaacgcagaagccctgataatggcggatccgatgaaccatagcaccgggcatcaacaacagcagaagtaccgtcagtacaatccttaccaacaagtcaatcttccgtaccgtaagctctacgaactcccaacttctcctgagtttctcttcgaagaagaagctacgaaaaaacgcttaacatggggagagaacctcaccttcttcaccggttggggttattgcactggatctgttctcggagccttcaagggtacaattgcggggatgcgagccgccgaacgaggcgaatccctaaagatccgaactaatcggattttgaactccggtggactcgttgcaagacgcggcgggaattgcttaggatccgtagggttgatgtttgctgctatggagagcggtgttacgtatatgagagacggagacgacggttcgttgacaactgtgatcgctggtttagccactggtgtgctttacagagctgcttctggacctagatccgctgtggttgccggagctgtcggaggagttgcggctttggctgcagttgctggaagacgcatcgtcaagcgattcgttccaatctaatgaaagtttctcaatctctcaaggttagggtttaagaactagtttaaaggaggggcttttagatagtgaatcattggtactggatttagggcttatgaattcaatttccactgtataaaagttgacatttttattgatctaattgctcaatccgactcaactttttgctgattttgtcgaattcacgaaattgaaatgatctcacataaaaactcaattgataattttacaaaggagaaaaatttgtcaatcaaagaagaagagaaagattgaacttttaacctcacttggtcataacttcaacgccattctttccagcgataatgacagaagtagccattccgagaaacagaccatgctccaccactccttgaaacttcccaatctctttagccgcagcgaatccatccttcaaaggagtcttaaaatacaaatcaataatgtaattactgttatcagtcacataaggcttgccatcaccatcaactctaagctttgattcacatccaaattccttgaagaggtcttgcaatctaatcaaattaaagttccagcagaattgaacaacttccaccggcatagctaatccacttccaccgagtcctgtaacgagtttggtatcatcagccacaacaataaacttgtcagccacagcttccaccattttctcacggagaagagcacctccacgacctttgactaaatcaagattcggatctacctcgtctgctccgtcaatagcgagatcgattctcggatgtgtatctaacccaacaagaggaatccctaacgaccgtgcttgttcctccgttcgtttcgacgttgggataccgacaatatcgtagagttcaccggaagagagtagtttcccgatctgatcaacagcgaaagctgcggtggatccggttccgagccctagaaccatcccaggtttaattgcctccacagctttctccgccgcgagcttcttcaaatcgtcctgtgaaagcgcgacggattgagccttgacggagaatgaaacggaggttcgaggagaagagccagtgctgcgtagggcaatagaaggagtgcgtagcgtaaggtgagaagaggaaacgaaggataaggaagccattggagagagaggattgagaatggttggagaagaaataaaatgaaatcgaaaggtttggtttttgacttttgagtggaagaggaaggtttagtggcaagttatagagttttgtagttggtttgagggtagtattggaatactagttttaaggttgttgtatttgggttggtgaagataataacctgctaaaccaatcagagtgttaaatatacgatgtcgtttttgtttctttgagaacagagttatataaaaaccttttttggtttggtttcgtggagagtctaattattttcttccactttctcgatctttgagatttctttcaaaggaagaaaaaaaaaaaaactcgcgatg

SEQ ID NO: 9373 - DNA, 3000 bp, Unknown
  misc_feature (1)..( 3000): cDNA_ID_3041592_gDNA_ID_1972105_Annot_ID_178710 3000 nt of promoter + ATG
aacgccttaagcaaaatgtttagctcttttaccataggtaaataaaaattgacaatatatctatctactaaaacatgatcctttttatcatatattgtttgaaatttgaaattttatttttcaggcaactatggaccacaaggaatgaaagatttcatgaatgagagtaaattgatcgatcttctaaacggatcagattatgttccaacatatgaagataaagatggcgactggatgcttgtaggagacgtaccgtgggagtgagtatttttatatctttaaatttatatatgaattattattataaatacgtctatacaaaatatttatttacatgttgtttggactattttaggatgtttgttgattcatgcaaacgtatacgaataatgaagggatcagaagcaatcggacttggttagtattgtttaatccaaaactggtggtgtaaaattatactatgaatctttgctaatactaattttctatatattgcagctccaagggcattagaaaagtgcaagaacagaagttgagttctcgacgacatttcgtgttcttacctaaaaaaggaagaaagcctgtttcgatcggttggatatctcgaaccgagaaagctaaaccggctcgaaactattgttccgagcaaggagtttgcttataatattaattaataataatattaatattgtggtgtattacattttaaaaaattaaatcgtttttgttatatgtattatatacatatattaatatgtatatttaattaggttgcatctatttccgttaaaaccaacttttgtttttacgcattatcgtgttgtctatatggtctgtgtccgtaaggcatcttaatgtgttactttgacgtaccaaattattacttacattatttcatttctcaacaatctttttttatccaacattttcaaccaccttaaattatacctttttgtttgtttattctttattttagtaacttttcaataagtggagctaaatgacatgagatggttaacaatcgtaaaaccaacaaacggaagattagtagtgcggatctttttgtatcaatgtaactcgaagaccaattattgtcgtgcgtatatataaggttggcctcaacaggatccaattggtgtttagtgtctatttctttcttttttaataaggttggcctggcctcaattattgtttttttttatttctaatattacatttatcaatttttggtgttttttcggtgaaacacaaatgaaaaaactttaaatagatcaaggtaatgtgggtggtggaaagggcaagagcatgtggataatgtagagttgttgggggacaatattttaatgaattccgagtaaattaataatgtctttaatatgtatgctccattattgatgctttacgctgtcatcgacatccattgcctcaacaaacaatggttgataatgatgatatttgttttatttattatttatctgattttttagtaaatttgatctagtttgtatccttggttgtcaaattcaccacatgtatttacttgtttgtagaatacttagttcaatataaattggctgattttgctctcgttgtgaattacaacttgtaacttaacaagtacaaaatgcacaaaagatggttctcaaaaaacagattcacaaaagatgattacaagaagatgaaagatacacaaaaataaacaagaagcacagcttcgtcccaacaataattaagtaatttggggggaaaaacattttgggccatggttaacactagggaaaaaaaattggggccttacattttctcataataatgggcttttcatcaattttcttaaatattaatgggcctttggcccgataacagctaccctatccatttggtccgggcactctagaatactctcttcgctcttctctttctctcgtgtactctgttttatccaacttataacaatttgaagcggacttgatatgggctcagtttcggtaaaccaaacccgtattgcccgttaagcccatagacaaacaattcaagttgactttgactgaagtcaacacttaaagatctgtaggctcgccagcccagtctctatactattttagatcaaagctgaaaattcatctcgtgtcaataaagaaaaattacgaggaagcggatagatttgcttttttacttacgcatcatagaagaaatttgttaaactgctaagtgagttttgagaaacaaaattttaaataatccaaaatggctaattcaatggaccgattatgttaactttgattagtcaatgatcgaaattcaatatttatccaaatgagagcgactcttatctactaggctgctattttctacaaacaaacaaaaacaatcacaattagccgcctctcctcattagtcattatctgtatcgcgatggggaagatacgcaatgcttagttataaaccgtccgatcagatgactttgaccagtgaccttccgttcaaagaatatcgacggttcttagacacatttttcaccggagtctcaccctcacaggtcatcttaatttctcgtaaaagagcatattacattgatattccaaattataccacttcataatttatttttattttccaaataaaattaatttattaaaacttcagcactccaattctgtagagaaattttaagaggagaaacccaattttcttttattttgtaacgaatctcttttaaaaaaatctaacaacagaattatatattttcattattctatcgaatccaacgaaatttcaatatacagatatctatatacaaatatttaacctacatgtgtgtatcatatggtttaagcacgttacctgtaacgtatgtaattaaatcaattgcgtagaatcacaagaaaaacattattatataattaactattgatcctataattttattattttcatatatatatagatatatagatagatgcattagaccaccaagaaaacaaagacttatcgatcatg

SEQ ID NO: 9374 - DNA, 3000 bp, Unknown
  misc_feature (1)..( 3000): cDNA_ID_3041596_gDNA_ID_1972105_Annot_ID_178707 3000 nt of promoter + ATG
ttggataacccaaagtctgaaactttggctacccagttctcatctacgaggatgttagttgttttaacgtctctgtgtataatcgtgtactttgctcctgtgtgaaggtaatgtaatcctcttgctgctccaatagctatctctagccttcgtttccaagttaattgtggtttctttgtgttgtatagatgctcacggagtgttccaaatgccatgtaatcgtatacgagacacatttctcctccctcgtcgcagtatcctatcaaggagactaagtgtttgtgtcttagtcttgagaggagttcgatttctgtctcgaattcgttgagtccttgttctgaatttgggtttgatttttttaccgctactttagttgtgccgtctataactcctttgtagactttaccaaaccctccaactccaatgacgttggaatcatcgaagttttgtgttccgtgtttgatttctggtaaagagaatctacggcataaacctgctgcgagattggataggtgacttccattgttgctcttccctgagatggttgatttggttcctgatgtggtagagtttccatatataggaagccaacttgatgtgtgagagtcgcctccttgatatccttgtttcttcttgtaggccgtgaaacacaaggcaccgattaaaaccgctaaaactcctccggccgaaccaatgatgaaagcgtgtctcttttcgttcttgaattcttttttaacctcttcctcagcttgcataggcgatggctcggggtttggacccgcaagatttttcatggtgtccatcttgaaaatctctaacccgttaagagatgaatcataatattccggttgaccaaaagttgatggagtcatctgaagtgtaatctcttcgcctccgttgttggcatcaacatatatcgcgtagtctttgtacatcgggattcctttctctcctgtccaccctattatatctgcaggagtagtatctgcctgcgctgttctgttattgatgtaaatgttgaaaaccttctggttgatcttggaaagctggaattcgcagaaatggagtctcaaaatgtaggtgaagttcttatcgatttggaacatccatgtaagattggatttgaggttgatatctccgtttgggccttgagatcttgcggttttgtatatatcggctggagctatagacaccggcatgttctggtagttgatcctaaaattgttgcttgcttgaagtgtaacaccaagacccgcactaaagatgtaaggtgcatcattataccaagttcttgtcaacccaccggagtcttggcttccagggatgtcctgaccaccaacattaagtctaaacattgactgaagattcgcagtcttggcatccattgtttggtctgtgaaaccaacaagagccgccgtgtcaaacaattccggcatctgaatcacctcgataccgtttataaaggcaaatgcgtctcggtatttatctgaaggggtaaacttgatgctcaaaacatctttgtcagtgggtgcaagagagtattctttaaccagataagcttgagtcaaagcttgacacgtaatcgcggcgctgaaattgctcagtaaggtaacatcgttagcttccacagtgaaatacgagttggaaatgttgagaccggtgtatgttgatgggtagaaatataaccgaagcaaatgtcttttatctcctttaatcgggatttcataagttgctggagctgtaaagattctggctgtcatataaggaactgttgagagaagtgaagggtcttgatatgtagccgttgcgtgaattgagtttccagtctttaaaaactttgtatctggttcccattttttcttatcttggtcagcagaagcttctgatgtcccgcagctcagagctaaatcttgtccgttagatctagttggaaaaaccaatagaaaggagagacatgtgaggaaaaagagaatccgagttttcccgctcatggctgacacatcaacgggtagagactctttgccttaaacaaaaaatgaggagagaaaagctttcttttttgtaagaattaagatcacttttacgcttgtggacaaaattagaagtttatttcttattgtctctgtaacctaaccatagaaagtcaggacttgcatggatgaacaagaagcaaaaaccttgcaagaaaaaaaaaaacaaggtacacactcttttttcttttctattttctcgttttgtctagtttttttttgtttgtaattatgaggttactggtgtttttctcattttccgtcgttctgtctgaaagagaaacaaaattagttagaaaaattcgtggtggagaggattacccgaacaagctatgtttagcatatagttagagaaactgaaaagacttttgttctttgactacaacatgaaaattcatgtaatctaaatatagaactcttagaccatattgtttcaataacattattacaaacttttgaaagtttgacttgatagagatagactacgacatgttttgaaactcttttcttagaatggtcaaggatctaaacaaagaaagtccctaaagatctggatgaatcaatcgtcaaattttaagcaatggaagaaaatagctttttgacttttatccattacatagatcaatggtggaaactagtttgttattctccattaaagcactaagagtctcttcaaagtttatctggtcgggttgggaaaaatccaactagagaagagcataaaagtagacatctgatcaacccgacccataataacctttttttgttggccgcgtaatatgttcgagcgcggccatcacactaagaacattcataaaaaaaaatccacaggattcaaagcccttaagctttgatcatagtctcttaaagaggtagtaaaaccataaactagagccccaatttgcattcacaagccacctaacacattagcttctggtcatttctgctttatatacacatcaagtaaaaa

SEQ ID NO: 9375 - DNA, 3000 bp, Unknown
  misc_feature (1)..( 3000): cDNA_ID_3041604_gDNA_ID_1972105_Annot_ID_178705 3000 nt of promoter + ATG
tgattcagatgccggaattgtttgacacggcggctcttgttggtttcacagaccaaacaatggatgccaagactgcgaatcttcagtcaatgtttagacttaatgttggtggtcaggacatccctggaagccaagactccggtgggttgacaagaacttggtataatgatgcaccttacatctttagtgcgggtcttggtgttacacttcaagcaagcaacaattttaggatcaactaccagaacatgccggtgtctatagctccagccgatatatacaaaaccgcaagatctcaaggcccaaacggagatatcaacctcaaatccaatcttacatggatgttccaaatcgataagaacttcacctacattttgagactccatttctgcgaattccagctttccaagatcaaccagaaggttttcaacatttacatcaataacagaacagcgcaggcagatactactcctgcagatataatagggtggacaggagagaaaggaatcccgatgtacaaagactacgcgatatatgttgatgccaacaacggaggcgaagagattacacttcagatgactccatcaacttttggtcaaccggaatattatgattcatctcttaacgggttagagattttcaagatggacaccatgaaaaatcttgcgggtccaaaccccgagccatcgcctatgcaagctgaggaagaggttaaaaaagaattcaagaacgaaaagagacacgctttcatcattggttcggccggaggagttttagcggttttaatcggtgccttgtgtttcacggcctacaagaagaaacaaggatatcaaggaggcgactctcacacatcaagttggcttcctatatatggaaactctaccacatcaggaaccaaatcaaccatctcagggaagagcaacaatggaagtcacctatccaatctcgcagcaggtttatgccgtagattctctttaccagaaatcaaacacggaacacaaaacttcgatgattccaacgtcattggagttggagggtttggtaaagtctacaaaggagttatagacggcacaactaaagtagcggtaaaaaaatcaaacccaaattcagaacaaggactcaacgaattcgagacagaaatcgaactcctctcaagactaagacacaaacacttagtctccttgataggatactgcgacgagggaggagaaatgtgtctcgtatacgattacatggcatttggaacactccgtgagcatctatacaacacaaagaaaccacaattaacttggaaacgaaggctagagatagctattggagcagcaagaggattacattaccttcacacaggagcaaagtacacgattatacacagagacgttaaaacaactaacatcctcgtagatgagaactgggtagccaaagtttcagactttgggttatccaaaactggacctaacatgaatggaggccatgtaacaaccgtcgtcaaaggaagcttcggttatttagatcctgaatacttcagaagacaacaactgactgagaaatcagacgtttactcattcggagttgttctgttcgaaatcttatgcgcaagaccagcgttaaacccgagtttgcctaaggaacaagtgagtctcggagactgggcaatgaattgcaaacgaaaagggaatttagaggatataatcgatccgaatctgaaagggaagatcaatgcagagtgtttgaagaaatttgcagacacggcggagaagtgtcttaacgatagtggattagaacggccgacaatgggagatgttttgtggaatctcgaattcgcacttcagcttcaagagactgctgacgggactcgtcatcggactccgaataatggaggaagctctgaggatctcggtagaggaggcatggcggttaacgtcgccggtagagatgatgtgagtgatctctcctcagaggacaataccgaaatattctctcagattgtaaatcccaaaggacgataaggtaatttcgcaatacgtatactaattttgtttttcttctcttaattttggtgttaaagtttttgtttttgtgttaattgcaggattagaaaaggaatctgggtaacaaaatttgaagatgatttcatttatattgagtggtatttttcaataaaaacatttgtaaaattatatccctttgtgatgttacatgtaatcaaaaatacattgtattaagattcgtagttagaatttttctatggtaaatttttgtattaagttatattttactgagtttattaagctagaaacaaattattatattaaccggaaaactgtatagtagaaaaatggaaaaggttgttcaggtcggttaacggctcaaaccgggattaattcgttttccaattttgccttaatcgaaaaaatggaaattacagcgatataaacctaaagtaaattgatttcgtaagtcgaattcactgtttctcctcaaacacacacacacgtttgcgaatctccgacgtccgtttctcctcgccgtagaatcgccgttcattctttcgccgccttcagtcttccctccattgaccctttttttggtaattcgtcttctttttgctctctcgttctctctttttcgatttctgggtacagaaatcgatggctctcgtttttctttctctgttgctgttctattactttctcttatatatatatgattgttactctagtgatgaattttgatacattggttgtttgaaattgatctctgttgtgcttttataattccggggtcaagattggctgtttaaatctagtaaagtttgcatttttcttttctgtttgcagagattaacttgattatacttttgtttttaagaagaagaagagcgattacaagcgcaagtgtgtataatgacttaaagagagctcctgttactccgagtgatagatagtctacaattatatcttactctgagtgaaagcaatggcgtacggtggtccgtccatg

SEQ ID NO: 9376 - DNA, 3000 bp, Unknown
  misc_feature (1)..( 3000): cDNA_ID_2035738_gDNA_ID_1972105_Annot_ID_178702 3000 nt of promoter + ATG
agaatgtttctaactttgaaccaatctctgttcattacgttccaattttgaaatgtcagatgaaaaaagagttgtgaacttttagaagattatattttgttatcgctagggtatagagaaagctgagattttacaaattgaaatgggtctttgagaatctgtgtaatagagaatctgtttgttttgtctttggttggtggatatgtccagtggaatgggaagagaagttgttgaggtgcttatggaccgaaacgccgacgtttcaagcgctagagttcatgttgctcctaagatagctgcagaggagactgatgaggaatttgaagtcaaagaatgcacagaggagaagtctctttctgagaatgcaccaaatgttggatctgctgagagagttggagctcagaaatcacctaaaacccgtaatggaaatgctaaagtttcaaaggtaaaactaattcataagatcttggttttgagaataacgctttgtagatggtatatgattgaggcctaaatccgattttgacccgtttcttaatgttttttttagcagcaggatgctcctcttctcgcggtgaggaagccattgcaacccgagaacaagaagcatattgatgacgaagataattgctccattgcttcttcgtatccttttcccatctctatcattttatacttgatacttatgtatggatgtttatgtacacgatgcttaacagaatcgatattgtttccttaacgttatttaccacagcgttgcaacttccatgaggatgggtaagtctggattgacttatggaagtgctccaacgtttaggagtgctcaacgtgctgagaaacgcaaggaggtaagtacatattctatctttctgcttccacatctcagttatagatcacataagctctttaaagccaacaaaaactcataatcagaaacataatctgcattaaacgtgtagaattcactctgttctgtatactgattggaatttattttgtggggtctgcttggctcagtattaccaaaagctcgaggagaaaaaccaagcgcttgaagctgagaggaacgagcttgaacagaggcaaaaggtaaagtacacatttccggtagatgcagtttttttacctgattctagattggttgtgaaacctcatagatttaaatggtttgcaggatgaacaagaagcagccttgaagcaacttagaaagaatctcaagttcaaggctaaacccgtccccaacttctactacgaggcacctcctgcgaaacctgagctcaagaaggtatccttcgaaccaaaactttatctttgttcagagctcagcattgttctacttatgtgccaaagtaacttatgttatgtttctttctagcttcctttgacacgtcccaagtcgccaaaactgatcctttctcggagaaaaagcttcagcgacgcagtcagctcgtcttcccgtgaagagattctgaagacagtctctaaccggaaccgacacagcactggaacagttcagaacaaagacgatgatcacaggaacaagaacaccaatgctgcgcacgacagccctcgtgtcagatcaggcaaaggtaaatccggattgaaaccagtgaacgagtcctcagaagaagcttgaaatttcaaaagatgatgctttgttggtctaacttgatcttgccggagaaaatgtaaaatcaaagactctttgtttttcggttatttccggtatacgtttggttcactatgtaactgtcttttttcgattttaagttttaacatgaaaaactttatgttgattgttgaacaactcctcctaatgttgaaatttgtaaatctgaatgctgttggatttaaatttagcagctaaggttattttcagaaataatctctaatcgaattatttacggactgaaaccggcatcaaacatttatcctaaaccgaaatagtcctaacaaacttctgataaaatccagagagcaaaccagtggaaagcaaaaccggcatcaaacatttaacctaaaccggtaaatcaaatatagaagctttaaaaaaccaaacctaaaccggctaaaatcgatagacctaaccaaccactagcagtttcccggccgccgcttgaatgatgaccactgcggtgcgttccaccgccataaatcggaatcggacgtaatcctcctcctctgctagaactccctcctccgcctctgctagaacttcctccaccgcctctgctagaactccctcctccgccgaaactgcgtccccctccgccgaaaccgcctccacctctgcctcctcctccgccgcctttcttaacaacgactgttaatttcggtaaattggcttcgattacgtcaccgtctggcttcaattctacttcttgaaacgggagatcatcatggtttggatcaacgaaggctaaacttgttgaagatcgcgagaccgcgtgagcaaagtggtgttgcagttgcaggtggagacagagaagaaggaataaaaacaaagatgctttcttcaaatccataattcgtttcgtttcgtttctttctttttctgtgtgacttacaatttatacaccgaattgtttataaccgcgtgactatatgactattctaatttgaatatctgaacgcgtattttaatatatccgactaattacaaaatatatcatgtttagataactattactatctgagacccattttcctgtcggcttctgagaaatatcaaagatggatttgtatacgtatataccaattttccataaacaatgctacaggtttcgttaaagaaacgaaatgttatcaatcatgcatgatttcatacttttgattatcatatagttttgttatgaaaatctttagtagattaaggaaatagaatttaaaaaaaaaaagagagggtaaaacagtaattttgtgttccgaaagtttaaaagataacagataatccgctcacactcgagcaaatttatcggagcctccctccaaaattcaaca

SEQ ID NO: 9377 - DNA, 3000 bp, Unknown
  misc_feature (1)..( 3000): cDNA_ID_3041628_gDNA_ID_1972105_Annot_ID_178688 3000 nt of promoter + ATG
gacaacgtcttagtcgatctcgtaagcggcggtgttaagctctgtgatttcggatcagcggtgtggttaggcggagaaacggcggagggagttgtgggaacaccgtattacgtggcgccggaggtagtgatggggaggaagtacgacgagaaggttgatatatggagcgctggtgtagtgatatacacgatgctagctggagaaccgccgtttaacggtgagacggcggaagatatatttgaatcgatattgagagggaatttgaggtttccgccgaagaagtttgggtctgtatcatcggaagcgaaggatttgttgaggaaaatgatatgtcgtgatgtttctcggcgattttctgcagaggatgctcttcgtaagtcatcttttttttctcgattttttttttttttttgagtttgctcatcaatttgtaatggtgaattgcaggacattcatggatgatgaacgttggaaacctccaaagcaattagtcgaagcttttcagatatgtgattagagagtgtaattagagaagtcgtaatatagatgtgagtgtgtaattgtttgattcgaatagtcaaacgtagttgtgtgtttcagcaatcttcctacgttttgtcactagagaaagtatgttgaaaactttttgtaacgattcgccagattcagaataaaattgattttgagatcattgttgagagttaggtcaaaatctgaattcgattatttgctccccaagaaacaaaaagaaaagattactatggttggtaaatctgggccagtagaagggatctttcggaaattgggcctaactgatgaagtttagatattttgggctagatttgtcgaattttggggcccgtttcaggctaattatgatttgttcgagaaaaaaaaggtttcgaagtcaatgcaaaggcaaatggagttcaattattctccagacctggttttcacattaactaatactcaagtaattcgtctagactctaatgtatactagggtttttaaactaaaagggacatttcgtttttaaaaacagccgtggactgatttactaaataattcttttctatataaaaatatcttatagccaaaataaaatattattagtatatatgtgaaagaatatccaccaatgttaagaaacaaatctttttttaagtcaaaataaaatatggttggtatattgatatatggaagatacatcaatggtgagaaagagaaatgtcaaccttgaacctaaatgttctataaattcatcttttacttacaatccagaaaatcacaacatcttttttgaatagattttatagctgatacaacgagcaagagaaaatggccatcacaaagacttcagtgactcttttacttttaataataatggctgcttcgttgtctaatttcagcgtcttggcttcaggtatgtttgaaataattctatgctgttaatttcttattaggtttcatcacttgaaagcaatgacattgatatgtatgtatgtacttaaatcatgcatatatatatatatatatatatatatagtcatatagatatgatattcatgttgtgagtttgtggacatgcagagatcaaacctacaggaagagttgataatcaatgcaaggagatgtgttcggcaacgtttggggacggtaaatgtgccgcagactgtaggaaggctggtttctcatccggacgatgtcttacttcttctcctttcggaaataaatgttgttgcacctagtgatagctagaaccaatctatatgactatatgagttttctcttgttgtattgccacatattataattgtactgcaatagaataaaataattttattgttatatttttctttaatcatcaaaagtaggagctacaattacaatgcacgagtcgattaacatactcttatgactctttaactactcaattattacgtacgagaagttttctaaaatttcaatactgaagtggtgatattgtttacacaacgcaatgtcaagttttttcataaaaaaataaaataatcataaaaatatatgtttgcttgtgtttaaacaatcctaaacattttgtaaaacttcagaataaaaatgattaatttcaaattatgattgtcagttaggtcgaaatcccaaatcgaccatacccttatcggattggactttagatcttttgttaacaatgacgtgcataaatgaattatgaaaagttgagttaataaggctttttttgttcctgctctaaaaagatggccaatattgccagtaaagaaaagaaaacaaaaagaagcaagcaaataagtgttaacattcatggcttaactatgatgaatattgatgattacttttctatatccaacataatgatacctgttacttacattcataaacaagtttgaaaaaatcgcctagagatgctagattagtttagttattgcaaggagagatgagccattgatgtatgggtgaaagctcgattcgattagtcaacgtagctgagaaagttaagttggaaacattattttgtaacgtttcggaacaaaaaggatcttttgggcctatctagcaaatttgtgggccgttctcaggctaattatggtttgcttataacttagttattcgcatcactcctacgatttgttctaggatctgtggtcaaccttggttttgaaacaaaaagggacattttgtatttcaaaatagccacggattgatttgttaaacaatacattttacaaaagaaaaaatcttttagtcccaaataaaatgttattagatacatgtggaagatccaccaaatccaatgttaaggaaaaaatctttttaaatcaaaataaaatattattaatatagaaagatccatcaacggtcttcttttctacaaccacaataacctaaaatgttgtataaataaagcttctacttacaatctacgaaaacacaacatttttttgaatagattttatagttaatacaacgaggaagacaaaata

SEQ ID NO: 9378 - DNA, 3000 bp, Unknown
  misc_feature (1)..( 3000): cDNA_ID_3041624_gDNA_ID_1972105_Annot_ID_178689 3000 nt of promoter + ATG
gaaatttagcaaataataatcatagtcaagagagaacataatataatgtccacaaactatatagctcactagtaacaagtagcaactgactggttttcatcatcataataaacatcattataatcttattgttaacttctgtaaattaaaaaccattttaacgcacgttaaaatcctgacctagcttgagcccaaccataagcttcttggccgctcatctgtcctcctccaccactgccaccattagaaacaagatttcccggcatattatacaccggaagtccttggttaccgtcgcctccaccagcaccgctgcttagtggcgaacctccgcctccgagctgccccggaaccactcctccgctgcctccaccaccgcctctctctgctgcctcttcctcctccaatggcaatctctcgtaagtcgcgttagagaacgtggcggcgatcagcatcaccggacctgctgccatcaatgggcccaccacgcttcctccaacaacctgaccttgaccaccggctaagtaaatcgttaaaccggtggaaccaggtggagccggtcctggcaagaaagaaccggttaaagaaagaatctcaaacctcccttgtaaagccaaaacagccgcaccaccaggagccgccgcaacggcagcggtcgagggttgacggagggtgacgttagccactgtgccatttccgctcaagatgcagatgccacgttgacgccgcctagcaaaagtagctagggtttcgatgacgtcagtcccactagcgatctccatgacatggctcttgagagcatttggagaatcgcgagtgacgaagatcggtggctttggtttgttcttggaaccagcaggacgtccacgtggacggcgcgtgggggcttctacggctccttcacgtggctcgtggtcgtctccactcaagttgtctctatcgtcgtcgttgttgttgttatcgacttcttggtgatggtgatgattattgtgacctgagtccatggccatgttcatggagatgtggagatctggtttctttaactgagaggaaccaggcggcgtcgtttcgaggccggataggttcacttgtcctgtccaccatggattcgccatgaaagccctagagaggttaattaattctgattaaatgtttcaagaagtgaaaccctaagaaatataagttaatttagatcaggaaaaggaagaaaaaaaactgaaaaacctagaagcggtgataagatttttcagatcttgattttttaacacttttacaagtttttgtgttgtgagaaacacaagacaaattgcaaaaggttaattaaaagaacacgacaaagaatgatactaagcaagaaagagaaaagatgtaatggaagctaacttataaaaataagtggaagcatatgtatatgtgatacacatacatgtatacgtatagtgtttataagaaataaaaatttaaaacaaatccctcaactcaaggcttgagagagtgacataattatatttaagacagaaaaaaagtcgtattacaaataggatacaatatgcatcgtacgttttcttgggaaaattttgatgacatattgttttgcagttttattgtcatttgacagaaaaatttgttaaaaattggctttaaatattaattggttaagataattttttaaaaacctgtcattttgtattttgtcttttttaagttagcgttataattgatgtgtagggtcgagcgccgaggttgaactaatggggcgcacgatcgttttcccatttcaatatttatatcgaaagttgaatcataaggttttttggaatataaaaaacaatataaaataatatctacgaagtgtttcattggatccaaatataaatatatttcacgaatctataacagccaaaatattaaacaatcacacatacaaaagatttataatttgctaattattgaaatgtttgaatacttgaaggaaattaaaattcacttaaaaatgaaagtcaaataagcctaagaataatacaattgctataaataaaatactagtatttacatacacgcatgcatcgtaagaaacttaattaggagattctatattgatggatcaaagcataattatttcaagtaattacttactagttgtagcaaaattaagtttgtttcatattaatgtcaaaatgaaccaataccatatctttccagccacctccttgtcatattatccattatccattgtctaaagtaaagtttaatcgtcttctaatgtaaactaaactacttcttagatatgtacatatgcatattatcctaaattattttgtccaaagaaaaacaaaattttaaaagtcgtttataatattttagtctttttactcttcttttttttctactcaacaactctcaactaaaacataatttatgtataaatatagctaaaacataacttattgattaatttaattgaggtagacaaaaagccaaagggtggttgaactcctcgggactacataacacacaataatgaaacaaaaagaattaattgtgttaaataaacgactgtaccgattatatgatttgttctctattcttttctataaattaactttcacaagtcttatctctttctccccttaatatatttgtgtacttagctaacacttgtagttcactctttcttaattgaaaggcatggagtatgtagttcaattgtgagagactgtaaagtatttgttttttcaaaacgaaaatattatcaatttgaaattgtgtatgatgtaatttgtatattttctttctgcagaagagagaaactcataaataatataaaaaaaatttacccattgtccaaaaaagtattttttagctccaaaactatttgggccgagaatctggggctttatttcataaaaggcccataagacgtacacacaaatccagtttcggctccgtcttccccacacgcgtgcgtgaccgtctccgtcgacgaactggagagagatg

SEQ ID NO: 9379 - DNA, 3000 bp, Unknown
  misc_feature (1)..( 3000): cDNA_ID_3044202_gDNA_ID_1972110_Annot_ID_178737 3000 nt of promoter + ATG
tttggtttgatgaaaaaaaaacagagtaaaacaaacctctggatgatatctgattccacctttcatgggacctcttgcattgtcgtgttgaactctgaatccaacaaaggatgctagagttccatcgtcttttggtatggtacattccacctgcaatagttggttagttccgttcaaatgatcttgaaccggatcggttctgcagatctgttatagatggaagaagaaaacagaggaaaacatcgaaccttgatctctctgaagggaatgagaagacttttctcgagctttgagtctaaaccaagaagcctagaagcaagcttgaagtttctgttggttgctgctaaagcattcatggctttcttctctcttctttattttgggtttatttgatcagagagtctgatatgaagacagttggaaaaatgtgagtcttgcttatgttattgcaagtttatttatatagagtgatacgtacacacttcgtgttatggaatatgagaatgaaaattttgttatttatatttataataaaagataatttatataaggaatatgaataatcatataagatgatacccataattgatcctgattttgagtattcagaatactatgtgtctgtttagcaaagttctcacacaaaaaaaatatatagattatagaaatagcccatgtcttcaccatgtgtataaactagatcagaataatggaatattcattaatgaaaaggaaatccgtagactaatcaagcagaataaatatattcttttcattacaaaaagatcagaataaaaataggaaaaatcaagatttcacaagattataaatattacatggatgaaagagatagctcgtaaaatttatcttattgtgtcacacactgtcattttattcattttaaatctagattaaaggaaaaaataacatttcgtattacctaattagtacccacctaataagcaaggaccaagatattgtttttcagaatttgtttttttttttaaataagaaaatatgatacaataatgatctagcaatagcatgcattggaccggatgactatactcgtgcatgaaaaatcatagtcaaattgtaatacgttaatgtgggacgataataatactttttttttgttttattatctacgattatatatatattaataatcatttacatatttgtgatatacgacccgaaatgaatcttgcatgtcataagatctttacgtgttattaacttattcaattctacttgcccctacacatataggcatagcgtatacacttttgtgagagggtgacaaaaaaaaacgtatacactttagtgagctagtgggaaaaaaacgtataaacttatcacacacatacaatattcagttttaattgaaaagattctacggatatatgtttttttagatactcaaatcagaatctttttggaattagaggaggacacgagaggatgcaacaaatcaagaaacatatagaattacaagattccaccatgaaagaatctttttggaaaagagattccccatgatttatgcttccactaatataattgatttattgtggatttccaccaagatttctttctctttcaatttccaaaagaagatatcaatttcgtaataacaacattgaccgtaaatagtgtttccaaatttgatctcaccctctttggtcaaaccaatatatagaaataataccccaataaagaatccggttcatggtaggcttggtagctaatgtcaaggatttagtatttttaaaacgttatgcattagctttctatcactttttaatacatgaaaaaaaaaaaaaaaaaaaaaaccaattggactttctcctaaaaggccattccctaataaacaacaaactacgaaaagctaaacatgtatttaaaatattaaagtgatagaaagctaatgcataacaattaaatgaagcaatttttttatattctttggtcaaaccaatatatatacagaaataataccccattaaagaatactgttcatggtagctaatgtcaaggatttagtatttttaaaacgttatgcattagctttctatcactttttaataaatgaaaaataataactcaaacaaatataaaaggccattccctctacgaaaagcaaaacatgtatttagaatattaaaaagtctaaaatcaaacctaaaattcaaaaatcaattaaaggccacaattgtcctataaaattatgggcttgaagcccaataatatctaagtgaaaaactaaacttaaatgctctctcaagggaccaagtctcattattaccatcacctccgagcgttctcttctctccatctgtctgccgctcctttaacgtcggttcccattttcttattcacaatgaccccaagaaactcgaggagatggaaaaaagcaaaaggtaaaacaaaaacaaaaaagctttcttcgagaaccagagcacattgattccaaggtaattactttctcaatgccatggaaaaggacccattttgttcccctttcctgtaatctaatcgtttcaatccgtgattatctctgtcagcttggaggaaatgacttagatttcataaatcgattcatgagttgtcagaaaggatttaaattttgttggtttgttcttatttcttctgtagctgctatgaatttttagatttagtttggctatgattctaaacctacgtctttatgaaagcacttacattttctagacacaagatcatagtgagttcatatgatgcggaaaagttattattctcttggtcttccagtttatatttatggaggaacatagtctcattaacaagcttgcattgttctgttccattggattgttataaaaatattcattggtcaattgagaaatcagtgtctaattttttttgaacgtgtctttgcagattgaatgctgtttctggtggattagtttctctgagttttggtgatagatcagattaacaggcagaattttgagaatg

SEQ ID NO: 9380 - DNA, 3000 bp, Unknown
  misc_feature (1)..( 3000): cDNA_ID_3041647_gDNA_ID_1972110_Annot_ID_178757 3000 nt of promoter + ATG
aaaacgattataagcatagatatgattcatttcaaatgaacatgctccacctataattctagctaggtgcaaaattgttgacatagacgaatcaaaagtcacacgtgtggttgcatgcacgttgactatataatcttccatgcttcttagtttattacaacgttttaattggttgattatatattttaatatttgaaggagacttttggagtttcttaactttgacaatcttagtataactacgtatgagaaactccatttcatacaaaccaaaccaaaaagtcacattttgatcaatttcttgccgagtgttttattcgagatgttttgaaagacttgccgtgtaacatgtatcctttacttacagttgcagtttttgtcataggtttccttctatgcgaactttttcataatcagtatatttaacgttgatgtcacattattcgactattaataaaactaatgaaactaatttaacaaaaaaaattaactacatatgcagtacaataaaaaactgttcataaatcttttaattcgttagcaatataaatagtgcacaaaaacttaaacaaaatcaactttttaaaacaattttttttttgtaaataattaaataataaaaaacagattgagtaattgacaaccatatatttttttctaaatagaagaaacttgtttttgaagtatcttttatacggtgaagggtgaactaaagttcaattattgttttaatctctctcttttttttttatcaaaaactattgttttgattgactgcacgattaccgaaatataaatagctggaaaagtaaataactgccacgtataaaaatgagaagaaatcaaaatcaagggtattttggcttagcgtgtggttagcgtgtgtgtgtgaatgccgatgtggcatgtcattttttttaagtagaaaaacttatctaaattatgtatgtataaataacataattctaggatatttaacttagtaaactgcgttttaaagaaaacgttaactagatcatgtgggtgtttatgattccacgtttgctcttctgagaagaaacaaattaaatgttttaatttggtttgcatcccagcaagaaacatatcaaattaagattagtttaatacttgcttcattagacaaaacacgttattacttataagttatactactaacattaatcaaaattattggtatttgattttgtcaacaaattattgttgatctttagcctttacacatttatttttatatatggatttgattcaaacttttgggttagttcttatctcatttaatccaatcagatctcggtttgtttttatgttttactttttgactcgatttattatttttcatgatttttttttgttctacatcacagcaaagatgagatacatatcttgttaagcatgatatatgtataactatgcagtatactttttgtttatgcatatacattaacaactgtgtaaaggattttatcattttaagttgttcttatccctttagtttatatttgagggaagaagaaaatcactttcatatgtttgatttctatttttgtacatactacctaatttcaccatttatgcatgataattgctatatatgctagaaaaacagggaaaattcaattaacctaacaaaattggaaaagttcataaatcagataaagcagcgagcatcgcattcaaaacaatacgttaggctgtgcgtactgttttattaattttaatttctttacaaaaattgaagataaataactcaaaaacaaaaaacagaagtgaatttacagtctcatgatcttattttacattatatatacgaatatgcattatgctatagttcttctattcaagttttctcgaaatttttcactcagaaaaaggatacaataaactaggactatagtatgatgattgcgtcatcagccgcatctgggcttacgtggatatggttaggacaaaagtaaaactaaccaatcagatgtcatcccagaggacacagctgtctcatttgggtccacttctctaacaaaacttcttcaattattcacacacaatacaatgacacatataaacaatttaaataatttattaaatattgaaacggaaattttgtgttcatacttaggttcttactatgttattgtattttttggaaaagcttgaggactatttctcataagtatataaattttttgtactcaaaatttcggattcaatccctagaaatacatttatcaaacaaatccaatttgagttttatttacaaatacaaatttgcaatttaatatgacatgggtctcagactttacaaaataataaagtctagatactacgaactcgttcgtaattagcaatatatatatatatatatatatatatttttccacttagcaatctttgttttgaatgtataaacaatgaagcctttacataaaaagtctaattagacataaataatgcatttaatattaggagaatatatagactacgtgcacaaaacgaccaaaattgagtaagatattaataagaaatatataaattatatattcaagtttctgttcataaaacatgcttgagtttcgatgacgatatttgctagtttctccataaagttctaataagttttttaaaaaggttcttttatttggttgaagatattaatactaactgattttatttactttttatccactacttgacactattttggatcttttcctccggtctactttacagaaaataatattctatatttttcataaatatttcaatctcaattttctttaaaaaattatacattcaagcactaaacgacagaactctacacaccataaattgccctcaaaacctgctctacgaaaaatttcaatctttggctcacttctttgtttatctcatagctcttcaccaaaaccaatattttctcctttgttgttctttcttttctatcaaaactttctacttaaaatatcattcctttaaacaatg

SEQ ID NO: 9381 - DNA, 3000 bp, Unknown
  misc_feature (1)..( 3000): cDNA_ID_2181846_gDNA_ID_1972110_Annot_ID_178749 3000 nt of promoter + ATG
ccactgatactcatctccagcttcttgttcactcggtaccttccccaacaagtggaaacctttcctatccactgataccatataagcatcctactcgccaaaaaaaaataacaccggtcaatgaccaaactaacatagagaatccgaaatccataactcatcatataagcttttattttacccttgcgtttatatcaagaaaatataaacagaaaagaatcaaagctcgtcttcttgattcgttcttattgattccatccacaagttttgtcgaccaagtccctgcgatttagaatccaatgcaaaaagcttaagaaataacaaaaccttatctatagtttggaaccaaatgtctttagtttcattacctaatggatctggttttgacagttccaaaaccttcaagtctatttctttcgtaccatttgggtcaataaacatacatgagctgagaagaaaaccagataatcactacttgatgaaaattcattatcttttgaaatcacaagatgatcttagtaatcggttctgtatcattgtccacttttaatgcttaagaatattaaatgaatgtaagtaagattaaataaacagtaagatatattcttcaattaagcttaaacagatatattagtttagtcaagcataaacagagatgcgtttgtgtcttaccttggaacgaacttatagataacgtatttttcctttgcatcattgatcagggctctaagactgtcacaccgggaggcatacatctgatcggaagaattcaaaatactacggacagaatttggggtatcgctaatcgctttcatctctgactgtatagcttcctcgacatatttcttcaccgcatcaaccttttatcaagaagacaagcatgatgaagataaataaagatgagaaagtcataactttttgctctaaattagaagttctccatggttcttacccttttctctttaacaggaacaatctctccagtaaaagcaaccctttctggaagctgcaaagaaagttagccccgtttgagtgagagagatacagactcaagaacctgtaatctagagaaaacagagaatcgagtgtaaaataaacacacaacaaacctttcctatagacttgaataaagctgcaaggggaccaggatacggatgggcaatagaaaaggatccacgttcatcaaacattatgttctgccaatattagagattcagaacttagcttttaaaacccctctctattaagcattataagcttaccattcaaaactaagtaacaaaaagaagaacgcaagcttacgacattgtgtggttcactttctggtacccagagatatggctttcctcttctcatcacatacttaatctttgaagtatgtattatactaagcaaaacagccaaaaacactcaaattcaatatacaattttccagagtcccatgatcgagaatgaatgaaatcaacgaataaaaaagcttatttcatagaagaatctgaaattacctagctttatcttcaggtttgacggtatttaggtacccttgccagttcgaaacgattacagtctgcacaaagagaagaaattagcaaaaaaaaattaaatcaaaacaaagaaagagattcagtttctggaaaaaaagattaagatgagagtaattactttgcatttctccgctaaggcagagagattcgccttgcttcctttcatcatcgcgctctatgctcgccaagtgttcgacgaaatgcctctttgatcgctactcaatgacagagacaatgttcggcgagcgaaggaagttaacggtatgtttaggaaacagctacaagggcccattagtgctgttaaaaatacccaatgatggctcagtagataaggcccattaatgaaaatcacagcttagtaatattgatgacatgttgacctaaagaaaattcaacatgatcatattgtgataataaatatccactgaatgtcatctaaccgcgtacgggattttttttttttttttttttttcatgtcgactccctaattccattgatattttattaaaagtttattttataataactagtaaatttcaaatttttgttctatgatttttctggttgatataatcagctttttattatatcgaaacgatcgaccaaccgggactaattatatgtcttttttaaatgaattaattggtgttttattagtgtgctatcaaatcaagaatatctatcgtcatgtattgtatttggatgtttctgatatttaattgcaatttaatttacgtacatgcaccatcagggttacttctccaaaatacgtttgtactttgtacgtactcgatcttgaaaaagataatcaacgttttctacttagacatactaaagctatgaaagcgatattaacctgcaattataaggtttctctattcgtacgtgtaaacttacacaatatagaatcaaaaacttgaagtgttgtgcaaaagattaaatttcatatatacttaaaatagaattatgttagctaacacttcgccaactatgttggttaggtctaaataaactataaatgcatggtatagatcatagtgttaataatactagtctatgtatatgttaaccaaattatatatttttaattaaaaactatagatattttaatggtcggtttctgtttcaaaggccggttttgactctgtttctccttcttcttccttctatagtctctcttacctatttgatctcctcttccttctttctttccttcactcagatttttgtcagcttaaacaaatcatttctattctttattcgaatcatcgagctacaacaaacaaacagaacacaaaacacaccaaaaaatatttatatatctcttacacttcttccaattcttctcccatcagattcttctttcaaactttaaaacttttccaagatttctttttttctaataccaagcacaaaattttcccggaaaaaacagaggaaaacaaaggaaaaatg

SEQ ID NO: 9382 - DNA, 3000 bp, Unknown
  misc_feature (1)..( 3000): cDNA_ID_2181850_gDNA_ID_1972110_Annot_ID_178750 3000 nt of promoter + ATG
cacttccatgttaccgtgattcaacgcgtttaaagaagctaaaagcgtgtcgaaactagcgtcgaagacgttcgtgtagataacgccgttatcgttaacggtgttttggccgtcaaagaaagcgtattcgaaaggaaagtcgctgcttaagtagagactgaggaaaggataaatgttgactgtgaaaggagctttgttctgtgcgaggaagttaacgatttgtgtcatttcttggataatgtcggaacggaatcttccggcggatgggacttgattgtccggaggagaattgtaaacgtcggcgtttaaaggaacggtggctttggtaaaatcaccaactccagcctcgtttaaagcggtttggatgttgaagagtgctgggtacgttaggtttatgaatgatccgttgtacgctgtcaagaacggttcgttccccactgcaacgtatctgcaaaattaaaataaaaaattaaatcatactttagttcctagttttaaaatttccaaataaatttattcttatgatttaatttcgataaataacggttatgatgcatcatacatgtatttttacgtttgtacctatgtaggaaatttcacatagtatggtatgcatctttgcaataaagaggaattgaaaaagaaagattccgacttttttttttgtttcagaatacgtttagatcattagcaataaatacttgacacacacatgacggtccatatttgagtaaagatgaaatatgggatataacatatgacggtccatacatgcgatatgcataaaccaaattcaaataattcactttcagaagtatgtatgtattatattatttaacaaaaatatcaaaacaaaaaaactaatgcatatagagataaatgaaatatgtggtgctcaacaaataacatgtcaagaactgatataataaaagaaaaataaatgattcaactataatagtcgtccaataatagcagttaaagaaaaatattgagttgtcaaacaattcaaaactcaaaaccaaacgtgtaaaggattggagcttacctcagtttgtctaatctagtgggctcaggactattatagacctcctaatccaactattattattgttttcaacattttattttctatcattttgtcatcatttttaatttttttgttcatacaaaataaaataataatacaaattcaaaaataatcaactgaaaataatgttctgtgaaattccaatattccaaaagggtctaatatctgatttccccttttcagatcactacccaatatctaaaaacttaagtagtcctaagaaacttcttaccttatgttaaataacaaaacaatgagtttcaaacttacttgatcttaacgccgttgttaaagttgaatctagagacgtttctttggacccaatctttagctctttgatagtttcccatcgctaggagcagatcattagggatagccaccatcacttcgacgccggagccggcgagagctcccatggtgtttgtgtcggcatcgaacaacttcactttctgtatattgttgtctttaagcatctccaccaccgtcttcggcggtaactgatgactcgccattgttccccagtttactcccaaaccagagacaccgccggagagaaaacatacggcggagatgatgataaagacaacggcagagttagttatagcactctgttttcgtcgataattcatttttcctttgttttcctctgttttttccgggaaaattttgtgcttggtattagaaaaaaagaaatcttggaaaagttttaaagtttgaaagaagaatctgatgggagaagaattggaagaagtgtaagagatatataaatattttttggtgtgttttgtgttctgtttgtttgttgtagctcgatgattcgaataaagaatagaaatgatttgtttaagctgacaaaaatctgagtgaaggaaagaaagaaggaagaggagatcaaataggtaagagagactatagaaggaagaagaaggagaaacagagtcaaaaccggcctttgaaacagaaaccgaccattaaaatatctatagtttttaattaaaaatatataatttggttaacatatacatagactagtattattaacactatgatctataccatgcatttatagtttatttagacctaaccaacatagttggcgaagtgttagctaacataattctattttaagtatatatgaaatttaatcttttgcacaacacttcaagtttttgattctatattgtgtaagtttacacgtacgaatagagaaaccttataattgcaggttaatatcgctttcatagctttagtatgtctaagtagaaaacgttgattatctttttcaagatcgagtacgtacaaagtacaaacgtattttggagaagtaaccctgatggtgcatgtacgtaaattaaattgcaattaaatatcagaaacatccaaatacaatacatgacgatagatattcttgatttgatagcacactaataaaacaccaattaattcatttaaaaaagacatataattagtcccggttggtcgatcgtttcgatataataaaaagctgattatatcaaccagaaaaatcatagaacaaaaatttgaaatttactagttattataaaataaacttttaataaaatatcaatggaattagggagtcgacatgaaaaaaaaaaaaaaaaaaaaaatcccgtacgcggttagatgacattcagtggatatttattatcacaatatgatcatgttgaattttctttaggtcaacatgtcatcaatattactaagctgtgattttcattaatgggccttatctactgagccatcattgggtatttttaacagcactaatgggcccttgtagctgtttcctaaacataccgttaacttccttcgctcgccgaacattgtctctgtcattgagtagcgatcaaagaggcatttcgtcgaacacttggcgagcatagagcgcg

SEQ ID NO: 9383 - DNA, 3000 bp, Unknown
  misc_feature (1)..( 3000): cDNA_ID_3041654_gDNA_ID_1972110_Annot_ID_178751 3000 nt of promoter + ATG
aaacccggtgcggttcgttttttctttttcttgtcggcggttcgctttttcttttttgtcggcccaatatgttttataaaagcccaaatgggcagatattcggtacagaagatggccaaaagttagcccactaattgcaaaacacaagataagagaacaaaacagagacacgttgcaacgtgggatattgagagaagaagaaggtttcggcggttcgctttttcaatttagagactttcaggcttttttttttggtcaattaaaaactctacgttcaggtggaaattgatgcaaaaaaaagtttataaacacatttttgcaaaaagttaaaagtttttgcttaaccaagttatatttggaatctttcttccccattttctatggagttaaaaaacataaagaaacgaacaaaatattgaaccgaaaaaacaaaaattaaacaaaccactcgcggctaaagacaatcaaactttaatgttacaacttacaacagaaaaatgatttctgccaaatgaagttgatttatataagtaagttttattttttgtttgtgatatagaaatatagaattatagatcataagtaactaacggtgaacaacaaagacattgatgttaacaaataatgaaacaagactagctataagtggaaagaaaacgaacctctcatatagtttttttttctttccgttgtctatttctttatttttttttcgggttaagatgaataacaaagattcttgacttgagaatgcgactcacctttttcattattattttcttctgagtttttgattctcatattctcattctgaagaatcatcactttcttctttcctttttaaaaatcaatataaattgatgagcaaaagaatgtaattccgtgggtattttttccggcgaatgtagcccacgtgtttaagtatgcttcctacgcgagagcttcgaagcatcattagcaaagttagtcgtaaacaagaacaagaatctgctaaatgaatgtacaaggaagaacattcagtctctatcactccctctctcactctatctctttcttttcacttacaacagtgacctttcgaatggttaaaagataaacaaacaaaaaaagagagggtaactattatcaagaactaagaactaattgtctctgtaatatttacaaaattaacagaaacttaggtaaaaaaattataaagtataaccttgagaaacattttacaatgatccctttcgattttactccaagaaataggccctgcaacaaaagtgcataaaagtgaaacaatatcaagaattgtctctaaattctgaaatcttgattggattatgaactacttcactctgtaaccatacaaaggcgctgtaataaaacagataatttggtaagaaggaaagaatgtttatgagaagagtgcgtttgatgagattcattcaagtagacttttaaagaacttgcaacacacaaaatggaaagcatattctcacccacatggagatgaaactattttggtaatatgctctcatacttttaactcaaagattatgataggttctttcttcccgaaaccgaataaagtgttttgagaaatcacaaccatgagagatcgcctaaaaagtttggttcggtataaaataaatgcaaagatatcattcaagagaacattatatttgttttttataccttatgaacaatagaccatatcaaagcactcattaagcaaatgtgggactcaaaaaactggatatattctcatttgcacatacagtagtaatagcctacacaagtacaacatttggcagaccttattctattgaagatgagatgccttgacagtagtatgcacgcataaactattcgacaactcgaaaactgaagacatcatcgaaatagttgcatgaaatatacagtgtgagaaagttgccaagcaatagatgcagtaatgtttcacttctataaatgaatgaaaatatagacacactcacatggaccggagagataattgttattagatgagacaggaaaggctacaaacataataaaacagaggcatggaggggccaaaggttttgtgctaatcaaagaatgttaagaaaaaatgggaccctccagtaattttatagtgtgtagagagaataagtactaaacttgttgaaggagggacagtatgaaaatattctttatcatctttcaaaagcaaaacaatatggttacaacaaaaaaactttcacttgtttgctatctcaaactaaaggcttctttgaaggactaggtcaaaagtgtatcatcatcttgcactccaaacatagcaaaataaacccctattaatatcatcaatatcagctgactaaaagtcttgatataaatcattagactcataatgtacctagagaccgaaaatgactccatgaataaggaagaaaaacaatccagacaactgaaaagcattgggaatattccaagagagatagaggttattagtgttgtgactatgaaaatatcaaagaataagaaaagttaggaaaaattgggggaataagatacttccctccgccagaatgagcatatgatgcattaattgtggatcaattctggtatctagttgggttgaaaagttgtagtccataggaatcaatacatagaaataaaataataatcatctacaaacaaaaacataacagttcaaacgattaggacacaagtaacaaaagcatcgattggaccagtttttcatattccataccttaattatcgttctctaatttgccccctttttctccattcaacttcctatataaagcaaagttgcaccaaaccaacctgagaaaaatataaagcacaagtaagcaaaagcagcaaaaacatcttccttagtttttggagtttactctcttggaacttctgagagaagcaaattagatttaaacttacagttgcacagactttatgtattaccaaaaccagcaccaaggaaagaacatcctctcatcttcaagaatg

SEQ ID NO: 9384 - DNA, 3000 bp, Unknown
  misc_feature (1)..( 3000): cDNA_ID_3037283_gDNA_ID_1972110_Annot_ID_178755 3000 nt of promoter + ATG
aaataattcataaaggaggagagagaataacataactaaaaataattaaaaaaacgtttatgtagagagaaattttgtagtaatcattgagaaactatttgcataagtgactgtttataattagataattgaaaaaataaaaaaataatttaattagaaaattaagttataataaaatattacaatttaactcgccaaaaatatacgaatttaatacaaatatataaatggagaaacttcggctacataaaaataagaacagtgtacttttaaattctataatctccacaacttgcggtccacattatttttttgtaatatcaatttttatttttatacagttttctattgatggacatatacaataataaaggtgatattggaacttgtttaggaagtcgatcggtaagaaaataaaaagtcggtcaataatatgaatagaccaaatcgtgattgcattagaaagcaggagttaattgtttttgaaaatgatgaattaagtcggtgagttgctgcaaatactattattgactgactttttctataatatcggaaatagtacaatttaggagtttaattgttaaaatacgtacatatgaataattaattatgttaatcttcttgcagaccaccagctcgaaccatatgtgagttttgaacatgatattagttcaaataataagggattcagtaactaaattaaattgaattttgattacgattatcagtgcgttcatctagtaaatcaaataatatgatattttggaaattactatccattattttttatatgtaaatacccagacaattggaatgtaatggacaatatagacaaatagacagttaagttagttggagtttaggcgtcatatcgttgaaactttttatatatagcacccagagaattttattctaattttttttaataattaccaactatctttattggcacaaaccccaactagtagtcatcatatccagaaaacccaacgtgtattttcgctcattaaatccccaacttttaatatactcccttcgataaatactgaatttatatttatcgtattgtttgttcagtttcataggcaatgagccaatgactcgaaagtcagataatttatgaattgtagaaattgttgataataggactaaatttttaaaaatctacagcggcagtttataattgacaatcatgtttttcatttgaaatatggacagtcatctgagaatatttttgtgttcaatcagcacaaatatacaaattttaatctataatttcaaaaattaaattaggacgctttgatttggtattttttcctagttaatctttgcaggcggtggtttctttgacctttttattaaacacatgattatgccgacattaataaaaaaaagagagaatatgttcttattacggtgaatttactcattgaaactatgacttcaaaaatataatattataataagttatagtatatatgttcttattacttatggtatatataaaagttaacattgatatttaactctgtttaaatataagtataatttgatcattgtgttttgacataatatttttctccattgatatgaattctaaaataataaacatatatttatttatataccaataataaaattgaagattacgtcacactaccaccaattggttgataatttacactattttattccttcagcttaactggtaaggttaagaaacacaccacaaatggttgctaaactcttagggtcgtttgataaatgtctaatcaagctacaaagtacgatcacatatataatttagattatatatattatccattaaaccacatccaaataaatatccgaactgagaactcattgaaccacacccataggcatagctatatgtactgcatatcaattttatgtgatcgattttatcatttactctcgtatataaaccttcatagaaacttaaaatttcaagtttaacaaaatgaacattaacatacaaattcttttgaggttttcattagggattcctttcagtaggataataaaattaaatagtaataaaattttaaaagggacatattttcaacaatatgggtccacataacacgaagaggagccaaaccttttaacacttttgagtggtatattttccttcaaacgttttttctgccatacgactctttattttctttccaaaagaggttattttcaaaaggtagatgaaggtcatgtggctatcgaacccatttttttctggtggttggctaaggaaccccataagatgactatactgacatagtcctatgtaatgtacaaggaaaaaataaactaaccctcatatggaacataaaattattcgacagacgtgtcaccctatggatctaaaatttaatggtaggatctaaaatctaaaatatgaaaatttgtggaaaattccataaccatcccaataaattaattgttacatatagcaatattttattaattaaaatacagtttttatttgacactaagaagaaaaataatatttagcttatcttgaattatatatataaattgcttattaccctgaatttcatacagatatgagatatcatttaagatatttttgagtgttttctaattgtggggctttttcaacaagtaaggaagttgcttagagcttacgtgtctcttctacatcaccaaaaaaataagaaaaaaacaaaacataaagaaaagaaacattattgttttttttagctcttatcttcctctatataaagacattttttttctaccttcacatacttttattttcatttcctttaactgcatagttcttcctcaaattgctcatacctttgcttctctttctttctttattcaacctcttatttcttcttcagcaccaacgtgtatctgcagtaaacacatatccatcgatcgatctcctcaaaaagttattgttttcttgaaggatttttcttgttcttgatcaagcatacatatatatagatg

SEQ ID NO: 9385 - DNA, 3000 bp, Unknown
  misc_feature (1)..( 3000): cDNA_ID_3041651_gDNA_ID_1972110_Annot_ID_178753 3000 nt of promoter + ATG
gtttcgtgtttcaagcttatgatcctcattgttgccttgttgatgttggcttttgtgtccgtgcaatcctactcctattgataatctacctggacttctttctgaatatgagattctttgttctgcttcactcaccattgttgaaagatatggattccctcttagaccttctgtccatgtgagctccattctttggaacaatggttcttccataatctctttctgctccgatgttgaatcaccaatatacgttcttagtcctaatctgttgttctctagcattttcgagtttttctgcgttccctcgcttgaggtcaggcaactttcaagagagcaatcaggtggatagtttgtttgcatctgttgtgagcataggttttgaagttcttttggttctaggaaactagagtttgggtactctgctgatactttagatactagttccgagagttgaactttggcagcttcgatcccagctgcaccgaggttctgtcttccaagagtctcttgtgctttctccaaaaccgattgcaggtacttcccttgagcctctatcctaagctgcaaatgtcgctgtacctggctcagtttaaatacgaatatgtaaactgaatgcttttatatttctacatactacaaacttatcctctaaacactgactgataattctaagtgctttatgaactgcaagaatctttaacgtgtttaattggagtaaagaacagtgttgtagaaatatgatacctcaagttgctcatgaagccttctttggacctctatttgcatttgcagtgcttcacctattggtgaattcctatgtgtgtaaacagatttggtcagtttgtgataagctaatacattagatggtatatagacaaatattcatatttatacttgtttggctgtggtccaatgcttaaattctcgctttgaatttcgtctgcatcaggagtcttttcttccatcatggtcattatacctattttgttgaagctgttgttagcttgtccgttgagattcttgctcagcctgtatttctggtagccaatattgtaaacttaataaccttttgtgaatgcaaaaaaagagagcttatttctgtttttgcagtttttcggatctgcaacaacatcagcaaaggtatatttaagtgttgaaatgatggcttacctgaagatgacttttgagatggtataaggtaaggcctggaatccccatgactttcatgattgtcttaggagtagcttctgcaacagaacagacaaaaagtatactatattaatatcaaaaaagcgtgctagtcattatataatcctcttgctaatgatataacactcactatctgctccaccgagttgattgactgcttcaatgaatctctcatgaagatctggagtccattttaggcgtggctttgcatcggttgataggataagtccagaatcacctggactattccctctaaggaatggatgcctttcagaagttatatgcattcttgaagatgagaggatgttctttccttggtgctggttttggtaatacataaagtctgtgcaactgtaagtttaaatctaatttgcttctctcagaagttccaagagagtaaactccaaaaactaaggaagatgtttttgctgcttttgcttacttgtgctttatatttttctcaggttggtttggtgcaactttgctttatataggaagttgaatggagaaaaagggggcaaattagagaacgataattaaggtatggaatatgaaaaactggtccaatcgatgcttttgttacttgtgtcctaatcgtttgaactgttatgtttttgtttgtagatgattattattttatttctatgtattgattcctatggactacaacttttcaacccaactagataccagaattgatccacaattaatgcatcatatgctcattctggcggagggaagtatcttattcccccaatttttcctaacttttcttattctttgatattttcatagtcacaacactaataacctctatctctcttggaatattcccaatgcttttcagttgtctggattgtttttcttccttattcatggagtcattttcggtctctaggtacattatgagtctaatgatttatatcaagacttttagtcagctgatattgatgatattaataggggtttattttgctatgtttggagtgcaagatgatgatacacttttgacctagtccttcaaagaagcctttagtttgagatagcaaacaagtgaaagtttttttgttgtaaccatattgttttgcttttgaaagatgataaagaatattttcatactgtccctccttcaacaagtttagtacttattctctctacacactataaaattactggagggtcccattttttcttaacattctttgattagcacaaaacctttggcccctccatgcctctgttttattatgtttgtagcctttcctgtctcatctaataacaattatctctccggtccatgtgagtgtgtctatattttcattcatttatagaagtgaaacattactgcatctattgcttggcaactttctcacactgtatatttcatgcaactatttcgatgatgtcttcagttttcgagttgtcgaatagtttatgcgtgcatactactgtcaaggcatctcatcttcaatagaataaggtctgccaaatgttgtacttgtgtaggctattactactgtatgtgcaaatgagaatatatccagttttttgagtcccacatttgcttaatgagtgctttgatatggtctattgttcataaggtataaaaaacaaatataatgttctcttgaatgatatctttgcatttattttataccgaaccaaactttttaggcgatctctcatggttgtgatttctcaaaacactttattcggtttcgggaagaaagaacctatcataatctttgagttaaaagtatgagagcatattaccaaaatagtttcatctcc

SEQ ID NO: 9386 - DNA, 3000 bp, Unknown
  misc_feature (1)..( 3000): cDNA_ID_2181832_gDNA_ID_1972110_Annot_ID_178745 3000 nt of promoter + ATG
gcaacacagtttgcagtgattcctgttcctttgagctcttttgcaagaatcttgaccatagtttccacagctgcctttgatgcggcataggcaccaaaccctggctttaaagatcgagtctgggaagatgtcagaagtatgatccgaccaccacctccttgttttagcctattggcagcttccttgctacacaggaacgctccttttgtgttgacactacactccattttaaaagaaacaaacagaggattattggaaacaagaatgaaggaactttagttggaaattagacatacaaatctcacgaacatggaacattggatgaaacaagaaacataagtcgattaattagccacaagaacacgagacatgttgcatttgactcataattagacatacaaatctaaagaacacggaacatataatttcatggttcatggagagtgaacaagaacacagattccactaaaatctcagttgaaatatactaaaggaatcagctttctaactcaaaatcatagaacatgtaacaattgatcaagaacttatacataatcatcaacctaactaattaacaaaaaaaagtttacttttccagtattgagcgggaagacaagaacccaatcaatgaagataaattctctaaaggaatcagctttctataacgaacccaatcaacgaacagtatcgagtatatacctgaacgtatgatcgaaatcttcgactgatgtgtctgcgatcgtagggtactttggatcgagaatcccagcagagttaaccagaatgtgaaccggcgcttcaaaggcactctccgccgcatcaaacattgatttaacctggcttggctcagagacattggcctgaaccacaatagctcttggtccctttccagtgatttcttccctaactggaaaatcattgatctccgacgcgacacgctcggcgtctgcggctttagaggtgtagttgataacaatcctcgcaccgagttcagctaagtggatcgctatcgctcggccaataccacgggaagagccggtgacaatggcgactcttccggcgagaggaagcggcggttgcgagattgatgaatgtgtagacataacgatttgaattcaatgagtcttagcagtgatgtgattggagtgaagaagataaattgggattggccctcattataagttcattcatattgttttacaaatcagcccctaactttatattttaacaaattgacccctacccgctccttgacagttttcctctttatatcttcatatttatagattaatgacccattcatttctccatttaacaatttaaaccgtattctttcctctttatatcttcatatttatagattaatgacccattcatttctccatttaacaatttaaaccgtattcttgattctttgtccagaaaagccttacatttcgaattggggaaatatccttcttttttcttttttgtggtttaaattatagatatatatttaaaagtttataaacaaaacaattttctttgtaacattataatctaagcttagattttttttttttttaaaccgattatttttgccgacacagttttattgttttgtcaattgattgtatttactgtagtcaaatatttgttcccaaattgaaaccaaggcattggatttggaccaaatttttggggtaaattatggaaataaagttcatttggcagtaagaatatgaatgcaatttgactactattttccataaaatttggtcgaattgtatctggacaatggacaataatagagattttaatcaaacaggattcgatgaattaaatatttttttttaatttaaagacaaattgatatatatatatatatatagttttaattaactatgagactaacatacaaactttaccggtttgtgtaaaaaacattcaaaacaaccccataactaaatcaactcccatgatctttattttgggtaaaagacctccaacgtatcctatttcttagctacattaaattcaaaaggttcagagaattaagaagctaatcaaaaccattctatcaaattactaataagcagtcgcttcactaaattagtttctacaaaccatttgcagtaataacaccaaggttctacttggttgaaatataaatgttggtaccatttcgataaatacaaaaaaaataaaggggtagatttgctttagacccaaaaataacggagacttaccctaaacccgcccatcacaccaaactctcaacattcaaaaacaaaaggttgaatcctttttttctctggttttcttcttcttcgcgtcgtatcgtaaaaagagaagaagcgcgattctctattggtatctggggactctcagattcttgggtcttcttgatttttgctgggaaagaagaattggtactttaattttgttgggtcaatcttcgctgtatcagacactggttctcttcgttactttgctattcatcaactttactcttttcagaattcgaaactctgtatttctcgattagggttatcttcaattcaattcgattaggattcgaatttcaaaaaaggaccattttcgtgtatttatcaatagttcaatacggagtatataatccctttttgtgttcgatgatatttatgttcacagatcaagatgttcattttttgttaaaaagatcagtttctgggaagtttaaagtcatcgatttcatcaattttctgcggaatttcataattcatccggagaatgatgttttcatttttttggttagttttttttggaattgattatggtacatttctcatatgaaaattggtgttgattgatttgttttccttattcggatatgatttagaatcatttagtatctcattatgaaaaagttactaggatacacactaatatatccgatactgttgtcatttattgtctagcttactgaattcatcattgtggctttttttgcttttcagaggaaccaggagggggagaatg

SEQ ID NO: 9387 - DNA, 3000 bp, Unknown
  misc_feature (1)..( 3000): cDNA_ID_2181828_gDNA_ID_1972110_Annot_ID_178744 3000 nt of promoter + ATG
tttcatctgcccaaccttctagggttttccttctcttaaagcttatcccttttttttgccttctctcgatatggctggagccgcttcttctgatcgtctcgtcactagcttccctcttctgggtacgttgcttttagctcaaagattaaaacttttttggcatcggaagttatcattttgtgctcatcttataacttgcgattgatttctacccttgggtttagggtttagcgactagtgttatcagtatctgtcgtaggttttctgtttctgataggattgattggtgtctagagttctctacaaacctctttatgggatgctagatgaaattttgtgtttttctgcaagttagtgtttttttatctgcttatgggttgaatttcaccagtaatttgccttgtttagactgtgcaattggagtttgaggctttgtcattttaaaatattaactgggctcttgtatataatcgctgcagatacagcagatttgtttcaggacttgtctttaggttcagatgcaaatgaagttcctatgaactttactaaggtacttaattactacttctttttgaaaatttaaagtttttggaacttaaattgtgttgtgtcgaaggatctttaactacaaactgttctgtggagaggtcttgctgctcatttaatgtgaatttgatatactgtgagttttttttttgttaactgactgttttctgagaagggttcttttcagcatccgtatggtcatgcaccttatggtgcatcttctcatggaagtgaaagaaggccaaacatgaatgctggcaatctgctaaatggtggagactcgattggttcatacccgtggggttacatcccagcaaactatccttctggtggctaccctgatccgaggtttggttatgaccgcaacagcaatcacagttccttttcacatctcatggtatgttggttacttcacatgacctctctgcctcttttctgtcttcatatagtcaagagaatgtgtgttttgttctcttcgtcatctctgctgggacttgggattttttttttgtctaattactggctacaactgttttatttaacagaatccacacagctcacaagaagtaccaagttttgaccaattgggatataatgatcatttgtattccaaccatggattgtatggactttacgggaatgtaattgactctggtcatgcatatggaacttttggttatgattcctggaaacttgggcgaggatggtatcccgttgatggttatagaaagaccagaagcttcaatcatgggcgtggttacagtgatgagaaagcagataggcttaatgagctatgtcgaggaccaaggagtagtgatttcaagaatccacaagttcttaactcttcaatgctagatgcaatgaagcaagacgtttcagcagtagatctccagcgctacaatggggagaatttccctgaatcatttgtgaaagcaaaattctttgtgatcaagtcatacagcgaagatgatgttcataactgtattaagtatggtgcatggtcgagcacaccaactggcaacaagaagttgaatgctgcatattatgaagccaaagaaaactcccaagaatgccctgtgtatcttctgttctcggtcagtatgaggttacttcacgtcttgtgcaatatcctttcagatttacattaagtaactcactgtaatcggttttatctacaggtgaatgcaagtgggcaatttgttggtcttgcggagatggtaggccctgttgatttcaacaagacaatggagtattggcagcaagataaatggattggttgtttccctgtgaagtggcatatcatcaaagacataccaaacagtctcttaagacacattaccctggcgaataacgagaacaagcctgtcactaatagcagagacactcaagaggtccgttgaacttcccctaaaccctttcttggacatgtttgaagcctaattgaattctaataaataatgattatggctgttagtcaggcttttaaactgtacggtgatggttttggtacaggtgaatctggagcatgggaccaagatcataaagatcttcaaggagtatatgagcaagacatgtatacttgatgattacaagttctatgagacaaggcagaagatcatcagagacaagaagatcaagcaaaagaaacaggtacaattccttaaaccctgctgcatctaaagcacattaaccacccctcttgatacagtctctgggattgtttcattttgattgttttgttatattaggcccttgatggagcttcgggggaaacaattaacttgagttgaaagatggaatcaatgcaaggaaagaagaagatgacttaattaaaagaacttagttttgaattatgttttttcttcagggttgggatttctaaaaacctaatacacatctttaatctgtgtgttttctctgcttatctaaacaaaacttacattgtcttttgttcctcttaaggggacgcacatctgataaaacaaaaactcaggctttccttcaaagttcatatcatgttattttcaagttatttctcttttagtccctaaactttcatataataagactctcatccgtaaatgtcaaaaatctcacattttggcccacatcaccataaaagttaaaacgacaccgtttagcacaaaaaccagaaggaatggtgttctctattcgtccctaaactttcatataatacaactttcacccctaaagatttaagatctcaatttttggcccccatccccttaaaatttaaaacgacaccgttgtgaactcccattttaaaacctcgaaagttttctagggcaatctcggccacttttactcacagaaaaccttctctctaaacttcttcgaaaatctcacagagcttcttcttcttcgcttttagggtttttgctctattgtttcgagtgacccaacttcgaagcttatagatcgttaccttagaaa

SEQ ID NO: 9388 - DNA, 3000 bp, Unknown
  misc_feature (1)..( 3000): cDNA_ID_3041693_gDNA_ID_1972111_Annot_ID_178769 3000 nt of promoter + ATG
tccgtatgatatcctccatctcgtttgggccaaagtaaagaaagtcttcaatctttacttgcggcaccaagggctcggttgcgtatagctagtcggacgtcccagctttgtcggccatcggagcaagggtccttcggacaagaggcagctcggtatcgtcgggcaaatccaattcccgagcaatgacagcagtggtatcctcccgagccgtgaaaggggttatctgcttagaggcgttcgaagacgatgcaccatcatcctccgaggatgtccaaaccatctttcgcttgcagatagggggaagatcgtacagatggttcgaatcgctggagtcgaaaagagaggcgctcggggttgtgggagatccagaattcattctcggctcagagacgtttgacgagacgaagaactacgagaaaaaaacaaatgctttaaccggcaaaatcaaaacttataaagaaacggcggagcttcaccggaaaaagggaaaacaataagaatatcaagatcagagaaaaggaggcaaaccttgatttttcttcttcaaaaacttcaaatgaggatttctcaaagggacggctctcaatatatagaactttgaagggcgcgtcgggtccgcaataaatgatgaaacgcgttagaagcgcgtgggctcggcagaaagagaaacgtctgcgtgatcctcgggaataagcaagaaacgtttccacttctcaagagagagtcggctgcatgtaacagggcgcctgaaacgcctcaggcatcactacagagttgtcccgagccggcccggaaacgcctcagatatcacttcaaagagccatcccgagctggcgttggaacgcctcggatatcaccacagagccgttcgagccaaccttgaaacaggtcgggcgtctttccaaagtcatcccgaagcagatctcgaaacgcctcggacaactttcactcggcttttgatgcatccaggagacgagtcgcccaaccacagccaaaggaccaacttgacctggctcgggagaaacttcgtatccgaggagaagacttagaaccgatgtaaaatcgaaacgttactcctggaaaacccggaagtgatactggaaaatctctaaggatattgccgaatatggaagatcccgcaaaattctctaaggataaagttaatctccatcaccgactcttagatatctggaaatcttccgagaatatcgagggaggcgatttgccaaagccctatataaagcacctccaaggacaaacaaagaggacacgcacaaaaacgctctcaacttcaggctataaaaaacgctctgactttgaaggctaaaacacttattttatatatttctaaacacttgtacgatcaaatcatcattatctcaataatataattaagaacaccgtctgcggtaatcagcaattctgttgttctttgagaatctcacagagatccgttctttgaaggaaccctgtagtgacccgcgtaaggacattggccataggcaagagtccaaattttcgaaagttgcccgaatgcatggccaattgaccttacgtgcccaaaagaccatagaataccaaagggcaagtttgggcaagaacgggcgtgccacgggcaaaactttgccccgctgggcgttgaccgaccgttgaccgcgccaaggacgcgtggctcggcaagaacgggcgtgccacgggtgaaagtttgccccaccgaatgttagtagcttggagccgaagtttaggtggccacgtgtcactcatccgtttgagtagcaaacgtgtcatcgcggttagatgacacgtggattggtgattcgcccatactcatgacacgtggacatgctgactcgccattccctggcctataaaagcccaactcgaccccatttgattggtgaagagaaattgagcgggagtgagaggctgccgagtttaaaccgttagttcgatccaagttaggggcccatagccgagaactctgcctgaatcgttagaagctttccgttggttactgagtgagttctggataatggtttaagtttcataatcatatcctcatgcattcttgattgatttcatgacttatatgaattatgtgaatggttatattagattgcatatgtgatctttagattcttatgctattgcttatggttgagaggttgtgctgagatattgatgattctatgtgttgatttaaccgtatgtctcataatatcttaaactttggggtcttggtacgtggtgcttgtggtaggaggcaaagaccataagcgtgccaagatcttgatatgtctggccttcgtagtgaaccgtgctattgtgaggtgttgtaacgttgttacttgattgccatgaagtgcgaataactcggagagacgggactagctaccctggcagagtgtctacacgacggtgtagcgtttggtagtgatgctccggttgcataccgttgtggttgtaacgcgggagatcacaggagtgcgtgtttggtgttgggtttgaaggcagcatatcaagccctatttaaaagatttaataaaactggagtcctaatgcattccatatttatgtagttgcttcggcaagctacctttcgttgccattctctgttgcgtgtttcatgttgggtatttgtgttggggtaaactaatgtttgttgcagggaatcccgagcgcactgagtaatcttagattactcatgattctacttgttttgcaggaaacccgtagtgggaaatagagggcgtggtggacattaggaaacccggagtagttttgtgccttttgtaaaacaagtatgtttctaatatgtatagtgcttttggcactaggccttggccatgaaacttataaatgtttggtaacatgttgtgtaatatttatacttatgaaataaatcgggttttcttgtacaaattgcgagtaatgactgataatgacttagtccgagtcggcacaaaatttaaatatcgcgagggttggcaagcctaaacg

SEQ ID NO: 9389 - DNA, 2086 bp, Unknown
  misc_feature (1)..( 2086): cDNA_ID_3041709_gDNA_ID_1972112_Annot_ID_178792 3000 nt of promoter + ATG
aatcattttttttattaattacatagctcatttgtaaatgtaaacacaatcgcgaacgcaaacaaataatcaaggtctaaagagaatttacctaatccaaacatgcttgttttctgaatagagacacggtcgacttttgaccttttgatatttcttaaagccagggtatcttcctgctttcctttaaactcgaggaattcccctaacacaattttgctacttttaagctccactctgcagcataatcaacttttaatgaaaactctttgaacagaactacttcatcaagggttcaagagatgagatgtatgaccaactcagacaatttttaaattgaacgtcaataaagatgagatgtatgacctatcccacgttggtgctgtgccaaggatgaaattaagtttttgatgcgaagattcctgcatctcttttccggtgctgaatgcgcctttaacccaaccagaaattttactttttgatactggttttagctgttgccaatcttcataggtaattacctcactcgggaatgcatgaattgtactgaaaaaaaacaaaaagaaaacatatatttatgcaccagtaggaaaataaagaatgtctttacagaccaagatagccacgcccatgcacgcactacaagatgtcctgtacttcaaattgattgcttttttgtctacctcttgcaagcaggaagatactgacggtagcaaggataacgataacataccgaaaacttggattgggaatgacaactttgcaagacacatttccttctagtaaagtaactcccctctgttcaagatatgattcaagaactgaagcttgtttcttgacctccgccagctgagaaaacacacatccattagtcataaacaagattgcatagatgcaagatgcaggtcaactttcctaagtcgataaaaatacaggagatttgatcaagagacttgaaatgaaacgtgtaagaacgatccaggagaaaagaaaggataaccaagcacattcgtataaataacaagaatattctgtttcataatctactcaagcgacaatcatactctctactttgccaaaacatatacacatttacaattcgatggagaccttacataaaatgaacatatccaattcactgtggtcgtgcaaagagaaaaaccctataagcctctagaagtaaatcatcagtgctattttctcacaatgacataattatgcaacaaggagatagcagcagagttccaatatatgtatcctttacaatctagaacagaaaattatagagaatcactcacaagcactaaaacgacactctaataacttggatgttcaaactataagcattgtgtgtaatcacaaagaatcaaacaaaacttacaggatcagggaaagtctcagtagtatgatgcttgccaccttcacaaacccagctaccatcactagttaccgtaacaatccccgatagattcttcacagaaatcactacaacatctcctttagtaacaagaacaacatcaatgtcttgtctagaagcagtgtcggcatctggaattcgaagtcctacataagcttttccaccataaagtttctcaagtctgcaataacaaatggaaatcagaatcaatttcagtggaaatcgagaatcgaaaaatggagtatggggaaaatcgggaacctgtgagcaacggagaagagagcagtggaatcggaagtttcgacgtcggagaattcgtcgtcgtagaagaaacggcggacgagtttgtagatgacgagaccgcagatgatttcaatccacatcgtttgcttcgtcttgttgttgaaatttgggaattggaggattgagagaaaagagacgattcttggaaattaagaaaaaagaaaaaaccccagctgaagtaaacgaacaacaaagatgctaaaaactaacacaaaaaagtcggttcaatcgagccataaaccacaaaactaaccggttttggtatccggtttaatttacaaaacagtcttcctcttcaataaaaacctaaaaccctaattattttcaatcagacttccactttcgaaacctctcaccgaagctacaatg

SEQ ID NO: 9390 - DNA, 3000 bp, Unknown
  misc_feature (1)..( 3000): cDNA_ID_2182204_gDNA_ID_1972112_Annot_ID_178797 3000 nt of promoter + ATG
atttacacattttaggatcctctacccaaagtcaactctctaacacatttttcttttcaccatgaatctttaaaatcaaagaagtaaatcactggtcaacctattatatttaacaagtgcattcactaatcatatctcatcgaataggtgtgttgattctgccacggtgaacaacctatctgtccatttttagtttggtgtttaatcttcagttgcagaaacaacacaaaagcaagagaacgatttgattaattaaaagctaactaccatcatcccccatgcctcaatacagggaaataaaaaaaggaaacacatcttccactgcgaattctgaaatgagacaagagagcgtacctgaaagatatttactgagctgttggttacccagtagacaagacttccctgaaaaagaaaagaaatatttttatttactgagctgtttttatgaaaaaagaaggtgtcacaaaaacagaaagagattgtacttacctgtggaatagcatagccaacaaaaaacagaggaacgcttaagatctccagatataacttgtaatactacaaacaaaaaaacaagtacaatcttcagattatggacgcatgaaatctaatattaataacaaaacagaaacatggacatgagtaacatcactaacaataccaatatatcttcatgctagaaaagaattagtactccaagcatacaacaaaattctgtaagacttaagtaaccaaggcagcagataagacttgttcaactcactctcatgagcagcccagtcaagccggtagtttgacgaattgtggatgtatcaaaagaaatctggaaaaagggttaaaagttagaagcatacatatataatactgtcacctgcaatttgaatactcaacggaaacaatactgcaaaaacaaataaattgtaagagtaacaagtataatatcgatcccatcaacatatattttaagctccaagtattcgcaagaacctgtatattaatgtaatggaaggtagcaattaaaattgggaagactggtccaaaagagccaccaggaagatcactcaagttctggaaccataagacaccaccctgcaaagataggaagcagctcagtctcagaggcaacagcaaggaaatatgacaggacagactcaggtcaaatatgctcgaggctcaccagttttcatagtatacaggtgttaaatttaattctacaactaaggtctagcttcaatataatagtccttaaaacgtcgaactagcctacccttgtcaacatagattgcagccatgtagactggtattattcatcaattgcaactagctaacttagatgcccagatatgctaactcgaccaacgaaacccccacgaggaaaggggaagagaagagtttgacttgatcccaaagaaggattctttcctcatcacaatcaagaaggtcaaaaaatacaagtcattcttatgcagtctcaacttacagaatcaaagccagggtgaccatctagtgacatcttccggatgctagccatcaacaagaaaaagcatgggagctgcagataacaatagccaaagggaaagtgagaatgaatgcaaacaagtgacctatttattaaatgtatcaacatagaaaaaaagactatatcatttatgaagaaagccaaggatcaagtgacatgaaagagtttcatataaggtagtaaacagatatacaagcatgtacgatatggatctttctgcaaaaaggtcaactctaatcgtaaaacaaagcaggactgctcttgtccagattttcacaaaatcttacagacaaaccagaatcacaaatcactcaatagaagatgttttttacctggacagataagtatgggaagaaccacaaaaaggaggggcacccaattgctcgactctctttaagaaaatgagaaaactggtcaatagatcctttcaacgttggagtctctgggatcggcataggcactgtgtaagaaatgaagaacattatgattggcttttaacttcatcaacaccatacaagaatatacagaaccaatcacatagtttgcacaaccatagagcgatgtctgtcaattattgtttcacatgtaaacgagttccatgactaacattgaaacaactaaacctagtagaaaggtcatgactttggtatcaataaagaaactgcaaattataaaaactacttataaagtagagaaataatactaacacttcggtagcagctctgaaatggtcttcaatttcttgagttgaagtatgagtaaaggcaataaagctaatctaacagcaacagtagaagatgcaataatcatccaccaaggcaatcctgtgaattcatgaaagccttcgaggaaatcaacgacggcgagaacaggtaaagaagaatcatcggtagggatgatttcttgagacccaattgggaattctggtccagaagagagtaatcggtggagaggagagaaacacgtcggagatggtgacggcgagggagagaagagaggaggagaatgggagatgaaggaggagggtttgaggtggtgggagaagaagagagaagataaacggtgacgagaggaggaggcgcgtaaacaactcctccacactgccattccagtttttttcttttgcctaaaacccagacagagacttcaacaagaggtttttgacttctgaagaactagtttgctttgattctgtaaggctgaaccaatcggttttggtctaaaccaaaccgaagtttgttaaatgtacagaaattattataaaaataaaccaaaattacaaacaaaaaatcgatatttaacccagtaaaccgaaattatcaaagaatattgaccgaacaaaattgttaaaacggttcaatccggaacaatttcctttaacccgaacaaactgaagttccggacagaacctaactgaactgtgaaacttccgattgtccacatattaaaaaaggataatagataattcattcaccacaggcatg

SEQ ID NO: 9391 - DNA, 3000 bp, Unknown
  misc_feature (1)..( 3000): cDNA_ID_3041697_gDNA_ID_1972112_Annot_ID_178798 3000 nt of promoter + ATG
tatgtcctttttctttatgcgtactcttatcttaccatgctggactagaactgtatcatcatcatctccaggttcttcaaccacagtacctaacttatctcccagtccagttacaagaactttttcaccagcttgtggtgagtagtcactgtattcttcttctaaggaatcaggatccataggacagcaagcttcaataatctctgcaactgcctcttcggttttcaggattaaggaattgtattgatcagcttgagtgatttctagttgactttcaaattcagccaccagtctctccatctttgacttagcagagtttagatcttcttgcaccttttgcgtttcttttttcagaagagccctctcacgtttatcaagatcatgcgactcatgctcaagcttcaggaaaaatcaagaacagaaacatacattacaagagattaataatatcaataaaacaacattcttaaatacctcgtggtaaaggttcattaagtctctatgaaaagctgcagtcttagttgcctgaagctttagtttatttctttcttccataagggactgaaagagtgagcctttccgctctacatcctgctcgggattcaatttctccgtccacttatgcgcattctctaatattcttttattgaaaccaatggacttagctactctcaatgcatttgatagaccagtacttccccagagtactcgaaatgtaggctgcaaagtttccatggagaactccattgcagcattttggaatcgaggttcattatccttcaagcgacttaagtcaccgtaatgtgttgatacaactgccacattaacacggtttttaatatactgtaggatgctagtagcaagtgcaaccccttctgaaggatcagttccactacatatttcgtctagtaagacaagtgaattttctgaagcaatgtcaagtatctgtcgtatccgtgagatgtggccactaaaggttgaaagactttgctccaaagactgcaataagaagtttataaaagaaaattctcgcaaatgtaaacctcgataagaagataatcaagacgttagtagctctattatcttgcaaggaattcataaggtaatacctgaggatctccaatgtcagccagaataagatcaaaccaaggcaaccttgggcagttcttagcaggcaaatacatcccggacttggacataagagacaataatcccaatgtctttaacaaagcggtctttcctcctgtgtttggacccgagatgacgactactttggcactgctttcaactttaatgtctactggcacagggaaaatgtctccaccatttgggctgcctaatactgaaccaagaagtagcgggtgctgcgcagaatcaatgtctacagctaagcccggtgtttttgtgtgttctgaagttacgttgggatagacaccattaatccaatttgcatgtgatgctcttgcaaaagcaatgtcaagttctaatattctatccaacaaatgcaatatctctctctgcgccatcaccacctcagatgtcaaaatgctcaaaatcgccatttcctcagctttctcggagttcgcatgtctcacttccatattattaagctccactgcctctttcggttctataaagcatgttgccctagagctactaacacttaaaacaacaccacctggaagtaaacttttgtgtgtagctctaatagctacacacatccttgatctcctctgcgttatcaaaggcttgttaatccccccagctagaaaaatcttagttgatattttcttcaaaagagaatccaaattctccatgtttctcctccgttcagatcttataatctctaaatcttcactagctctatcaagaatcatagtcatgttgcagtctatacaaaaactaatcttctgctgtaatgtatccttgaaatcacaaccctgtagtatatctacaagtggagtaaccctacaaaataacagaagcaaaagctagaaccataagcatctcaatagcaataagaacatctaataactataactgattcggtagcgtaccacggttcaatcatcttataaacaattcaagaagactaaaaaatttcaaaatgtctacattagaagcagaacacaaacctgttatcactaatggctgcttttcggagtttctgaaacgttgatgtagcagccgttaacgtgcttcgaacggtacagagttctctaacggtaagcaattgaccggacacagcacgctcaacgatatcagacaagtcttggatttcagaaagacctaatcctcgcgatttcatcatctccatagcagctaatgcagctgaggtctcgttaaggagattcctgctttcttccggcgagtttcccaccggaatttcggcgtttttggtggcggaaaggcccatggttgtggaagcgaacggagagagctgattgcagagggcacgccattcgaggacttctagagtttggttttcgactgactgtgagtcgtctgaggaggcggcgcgtataattaacggagaagcgacgcgtaatgatgacggtgaggcggcgcgtgaggatttgagatgaataggcgtcggtatgagttggagtggggaataagtgttcatgcctgtggtgaatgaattatctattatccttttttaatatgtggacaatcggaagtttcacagttcagttaggttctgtccggaacttcagtttgttcgggttaaaggaaattgttccggattgaaccgttttaacaattttgttcggtcaatattctttgataatttcggtttactgggttaaatatcgattttttgtttgtaattttggtttatttttataataatttctgtacatttaacaaacttcggtttggtttagaccaaaaccgattggttcagccttacagaatcaaagcaaactagttcttcagaagtcaaaaacctcttgttgaagtctctgtctgggttttaggcaaaagaaaaaaactgga

SEQ ID NO: 9392 - DNA, 3000 bp, Unknown
  misc_feature (1)..( 3000): cDNA_ID_2182186_gDNA_ID_1972112_Annot_ID_178793 3000 nt of promoter + ATG
tccatcgtttaaattatatatataatatatatttaagagtcagctatcatgcttaaatttcaggtttaatacaaatcatgatatcattcacacagttttcttatctatacccgaaccaaaagaatgttgctaaacttcaatttcagatccagttagtaaccaaaccagaatgatatattgatattagactatagtcatccaatctcagttcagaaaaaataaagtaaagcagatatagtaatcaaaatcctttttggagatatcgaaaatgtccatcaaaccaacaatttaaaaacaaaccaggccagctttgtagctttaggcccattcgaacacattaatttaatttattttatgttttgtgcaactcttaaaacttctctatataaatcctatctaaaccctagatctaatattaagtgcccaagaaatctcttaagtctctctcgttgtctcaggttggtcgattccttctctagatttccacttgtttagtctttcaagagaataaagcacaaaactttctataactctctgtgtcattttcaatatctgagaattctataaaaacggtcccttgtgtatcacatttagttcatgtaactcgatttttgtcggatcttttctgattatgggtatgttttgttttgctctctagcgttgcaacatattgtgtagagaaaatgggttcaaaggcatcagattctgcaatgttgaaaacttggagaaggaaccctccttcttcttctcttgtcagactctctcagcttgctaacgacaaatacgaatcccctcctttctcgtccggtggacacaactggtatgtgatctttttcttagctaaagttcacatctttcttcgccaaagttcacatatttcttcgctaaagtttacatctttcttcactaaagtttacatcatgaagtttacatatttcttcactaaagtttacatcatgaagtttacatctttcttagctaaagttcacatctttcttcactgcaacatatattactaagaaatattgccttttttgtaaaaatcaggagattggttgtttacccgaaaggaaacgaagctgacaatggaaggggctttgtttcaatgtatgtggaatgcctctcatcgacaacaccacccattgatgtgtttgtctatctcactttctttgtctttagcgaagaagagaagaggtacctctctattcaaggttcgtttcctcttacccttattatctatctctttctctgtatatatataagaatgaagctctaatatgtgttgatacatgttgacatgtagatgttgaagttaagaggttcaattcctcaaaaacggtttggggattgtcacaagttcttccggttgaaacactcaaagaccgtgcaaagggatttatcttgtcaagattgtttcacaacccgcctcttttggtgaagttctcccttttcacaaattctcttggagtattcgtgatttcgctctcctagaacagaatgattgcgtatccaaaacctttcacatgggagaaaaagattggtgagttttttttgttctgatagatattgttgtatgtgtgcaatagtggtaacttgctaacaagtggatggttatgtacttatgtttcaaaggactctaaagttgtatccaaagggggactctgaggcagatgacaagttatcccagcatttgcatttagctgacggggaaactttatccaagggtgagctgattttcgtgcgagtgaacctgcaggccgcgtggatccaatcaccttaaaggatggcgtaagtcaaaaactattgatgttacgatttcgcatgggataaattaggagctgatgacattttcaatagacgttcttaacttgtgatgtcaaatgtcttactcctttaacatacatttcttgtttttgtagttaaaggttggatcatgaactcgaacaaagagatgggtcttcctcaatccatgtctttcgataaaattgagggggcttacttggaccgtgaagggactttggaggtagagatcgaatgtgaaattgaaaactcccataaaaaccatcccttcttttaggatatctaccatgccatgtctactactctaaagtctaggactactctgttttatgcgtaaaattgaatgtgaagttaacgctctatctatgtatttatctaccatgcatgtctgactattgtatgtctgtatgacttttcatgcgtttattaatgatctttagttatttaatttttgcttttggtatatcattgtttttggttgattaaagttcatgaaatcttgttatgattgaacttttgcatttttcatctattaaggtaacaccaatgctataggacatattagagtgaattagagattcacttaaaaatcaaatgctacaggacatattagaagggtcaaaataaaaatttctatacaaaagactcgaatgggtttctatcgagtatttttcggatatgatcttcgggtcgtgtttttccaaggcctaaagcattttcgtcgatagtgaagaaccccctagacaaagaaatagttgggctttaaagatttcaaatctaattgggccaaattaactcgtgattgatatgtctaactcttctacacgtgtctttgtccaaaaaacaaaactcttatacacgtgtcgttatatcattggttgcgcttacgcagacgaatttctaagagagcttttcttcttcctcctccctcttcgttcgtgatttctcatttccttaacggaaagcttaaggctttaatcattatatctcttcttctacctatacacgactctgaattatcatcttctcctgctagctcctgatttcttctctcctgtaagttatttgattgaaacaatttctgggttatggattttgtagtttacattgatcattgatcaatgagattaaagttttggatttttataatgttctttcctcttttatgatcctattgttgaaggagcttgaaggacaatg

SEQ ID NO: 9393 - DNA, 3000 bp, Unknown
  misc_feature (1)..( 3000): cDNA_ID_3041701_gDNA_ID_1972112_Annot_ID_178795 3000 nt of promoter + ATG
aggcaactaagactgcagcttttcatagagacttaatgaacctttaccacgaggtatttaagaatgttgttttattgatattattaatctcttgtaatgtatgtttctgttcttgatttttcctgaagcttgagcatgagtcgcatgatcttgataaacgtgagagggctcttctgaaaaaagaaacgcaaaaggtgcaagaagatctaaactctgctaagtcaaagatggagagactggtggctgaatttgaaagtcaactagaaatcactcaagctgatcaatacaattccttaatcctgaaaaccgaagaggcagttgcagagattattgaagcttgctgtcctatggatcctgattccttagaagaagaatacagtgactactcaccacaagctggtgaaaaagttcttgtaactggactgggagataagttaggtactgtggttgaagaacctggagatgatgatgatacagttctagtccagcatggtaagataagagtacgcataaagaaaaaggacataaagccccttcctcgtagcacaagtagccaaacatccaatcgttctctacgttcgaagagacaggtatacatcattctctgacttaagacttttcaggtcccattcttgcagtatctcattatgaaacctaaccatattggtatgtcataataaatagtaataaagttgaaagtttatagtttatagtttataggctatttgaaaatttgtgattttgatagtaatatgttgatttgagttataacatcagttctttgtggtgcctgataattgcacagataaacatgaaagagctaggcagtgtgttgcaaatgcaaagcgaaccagtgcggattcaaacgtcaaagaacacattggatctaagaggaatgcgggcggaagaagcggttcaccagctagacatggccatctcgggaagagactcgggctcgatcctatttattattcatggaatgggggcaggcattataaaggagctagtgcttgagaggttaagaaagaacactcgtgtctcaaggtatgaacaggcaaatcctatgaaccatggatgtacagttgcttacattaaatgatatatctctcaaacacattctttgtaaatcttcttcaaagtgtggtccactaactagtttcgatcgtgaatcaacgttcaaatgtacaagaagttgtctaaagtatagttattgatattgtacagaaaaatatagtaattctacttttccacaaacttcatggctttcgaggataacacacggcacgagtccctggagaaccctcgtaggagttgtgcgaatacgattgtgttcttccctttcttgcacagctgtggctacaacacttcgttggtacttgcgaaactaattgaacacaaaaacagaggcttggtgtttagattttcaaaaaaaagggagtttggatacatatgtatagatgtataggaacgagagagaagagtaaaggagcactcaagacttgtgtttttactttttcctttgtcctatatttttacaatgaagcaaacgtaggtatatacagagaggaagcttccactttcaaaacttaacaaactttttcaaagttacaccaatagattatctcaaggaacttgcactttcacaacttgacaaaatctttcaaagttaacaacaatgaattatttcaaggaacaaaggaatccatttttcataacaaaagaaattaaacgatcataattattcggatatcttcaagtttggtggcggatgaaacgttacaagtggtattagagccgaaccgaaacgagtttggaccgtttcaatttttgaaaaattctattcgggttaaaattttcataactatgtttaaaaaaataaaaacactaccaatgtttttctttacaaattctttaagtttttcaaatatcatgtcttttaattaagtacaacatgtgaatttaaatgttacatactattttgaaaatttttatgaaactatctcgcatactattgatttcgcaaaaacgaatgatggttatgttatttcatttcttctaacaacgtgagtctatgactattttaagaaaaatctttctctctatatttgcttaatctttgtgtttcatttagctattccttaatattacctataaaactatttgatatagtagttatttttatatttttgttcgtataaaacaaaatattaaaatcataacatgcgacttagtgatgtgtcgattttgtataatattaatttatttcgtaaaagaaatttggtagcttgatatttatatacgcaatatatttaacagaatttcagttttaagaaattaaataaatacaaataaaaaatagacatgcaagagagtataaaggaaaatatgaaacctaccaaaccaaaacgaccctccgttcctcttctaacagccattccctctacctaccccaatttcttctccttgatctccctctccccacacatttatttcttcacttttgtcgtatttttattttatattatacaaaactcttctttcatcaccacctaaacacgcacatttctatatattatttacatatattcatttctaaaaactcaaagagagtataatcaaacaaacacattcacattcttctttcttctcaaaaaaaaaaaaaaaaaacacttgttcatttacatcaaaatgatcactgcagctctacacgaacctcagattcacaaaccaaccgatacatccgtcgtctccgatgatgtgcttcctcattctcctcctacgcctcgcattttccggtcaaagcttccggacattgacatccctaaccacctccctctccacacttactgcttcgaaaaactctcatctgtttccgacaagccttgtctcatcgttggctccaccgggaaaagctacacctacggcgaaacacacctaatctgtcggagagtcgcttccgggttatacaagttaggtatcagaaaaggtgacgtcatcatg

SEQ ID NO: 9394 - DNA, 481 bp, Unknown
  misc_feature (1)..( 481): cDNA_ID_2182260_gDNA_ID_1972113_Annot_ID_178802 3000 nt of promoter + ATG
gaattccaaaaatcagatctcttgcccaacggtgagttcttcttatctaactttccttttcattcacattgggttttggtggatccaattttcatcttcccttttaggttggaattttgagttttatcttcccatttctggattttgtttctctctagtctattccttcaaaaccaagaacccaactttgttttatattcaaaagttgtttgctttcatcgcgtttggtgttcatcttcatctgggtattctcaagaatcaatctttatactttacttttgcaaaaaatttatcctttatagttcttgttgttttgatgatgatgcttttgcttatggatctgatttggttccaatcgattcttagaattagatcggatcaacactcttcatcatctttttaagattgggattaggacaaattcttgattaattgagtttttttttttggaatgcaaatagtttgagattataataacatg

SEQ ID NO: 9395 - DNA, 3000 bp, Unknown
  misc_feature (1)..( 3000): cDNA_ID_3041746_gDNA_ID_1972113_Annot_ID_178819 3000 nt of promoter + ATG
gctgattcgataagatttccagcggctgaatggtgtttcggaattggaatggcaaatagaatccccgcctgacggtttagcttcatgtttgcatctggcaaaagtggttttatctcaaggtggtaagggatcaaagtgcataaatacgttttaaaagaggaaattttgagagaaagactacacttgcctattactctagcacagtcttcagggctatttacacgggaaggtgcctaaagaagtcaatatatccacatcagaactaaatatctatgcagaagcacctgattgagttcagtgataatgaacaattttgcaccttacagccacttttttctgtgaaaaatgctggaaactcatcgctcttgtatgcagcaacatacacttcttgagtttcctgcattgtcaacaaatagctgttgtgaaaacttaaactcttgattgttgactattaaatatgcctcggcaacagactatataccaaatattcaagagtctttggaatatcaagtattgatttaacgcctgctgatatcactgctattggagtcctcccaagtgcagtaagatcagatgatatgtccatcgctgcatcacaaacacaaattagcagcgcatgcagggtgaatattggcatcaacaccatcatctaaacagagtttctaatcatgtaactaatttttttttgtaagaaaggaataaaacggacatgaaacatacaatggttggcatgtctatggacaccacctatcccgcccgtcacaaaaacttggatgccaacctacaataaccaaaaatcctctgaaatgcaataaatgataccaaaactactaaagaaagatcctcctaggaacaaagccaattaccattgaagcgaaaaacaacgttgcagagactgtagttgcaccgtttcctcttgtagccacctgaaggaaaacatttaggcatatggaggagcaaaaagtccatgcattgattgatagaggtgtggaaatgtaaataacgtggttgtctctatataagaagctagttcagggtaggttgcttagattgatgcaatttgattttgtgaactaatgtaagagactgttcctacatgactgagtgtgtaaacaaatcttaaactggagaataaacaagtttgatgtttttcgattcactgatgaacataatgatggtgcaataagtagaaaaacaaccagaagtgactcacaacatttgctatgtcccttcccgctgtcttttggacactttttccgagagatgcaagacgttctagttcttcctcgctcagacctgtttactatatattagcatctacattctataggacgtagaagaagtctagtgcagttgatccttggcgaaaaaaatttataactctgatctaagatcttgaaaccaagttggttttaggatatgtaaacggccaaagttgactaggagattagtgttaacaggttcgataagtccaaatccaagaatctaaaacattatgatccaccagaaataactgacctatgcaaggtactccattaaggatagcaattgttgcagggattgctccattttctctcacaattgactccacctcttttgctgtttgcagattttgagggtaaggcatccctaaaaatagccagttaaagagaaacaagtgaaatcagaccaagatccaagaatataggcttatttaaaaaaataaaacaatgttcaataaaaaagtctacagaatgcaattcaaacaaatccgaataggacaaggaagaacaaaccatgggagataatggttgactcaagagcgacaacagcacgtccattagacaaggcttcagatacttggggagaaatcttgaccagactcctgagctgcttcaaaactagttgttaagagaaagtaaatcaagattggaaaaagtcttaaaacattggaaagtacagaaaccttgttgtttgcttcaagaggtgaaagatgattctggagattcgagattctagattgagctaaagaagaagccattctccctgaaagatagagttttttgaagtcatcagaaaagccaataaactactcaaaaaaatccagcttccaaattctcgatgacgaatcaaaacacgaccctaatgatcagaaatgacaaaattttcgagtcaaatacataagaagcatgaaaatttctgaatttacggtaacctaaaactaaaaacactacacagatgaattgtcttctggagcatcataaattcatgaatttagaacactgaaacctctaagaggatccgaaaagaacgccctttctgtgttctagtctaatcttactgccaaaacagtggaaaagtaaccaacaaagaactcgtttggtagagaattacccaaatccagttccgctcactaagtttatatgaagtttggcaacagaatctgaaagagatcggaaaactgaagtactgtatacaaggacaccgagaggcgagagggatctttgagaaagaaaaaaaaagattgttatgcatataaaccgggtttgaggaagcggttttttaaaaccagtacggttcatttttagggatcggttcggatgatttcggtattgtaacaaacgttggaagtgcgagatctaattgagcctcctatagtgtttgcgagcacatatccgtacacgaaggaccgatccgatctccgtcgccggcgatcatcgccgccatttgctcttgttcttcctcatttacgcgttctctctttcatactcgtgagcttcttcgattttgcttttagaccatttataattcttattgttcccgactgattgtagaacttttttgacacccaattaaatcggaactagggatctaatggttgcgtcgacttgatctctgtgacgtagaagctcttatatatggggctatgttctcattagtatgaagaaagtgtccctgatctttgttttgcagatttttcatttcgagtgatttttggttttatcatacaaattacaagcc

SEQ ID NO: 9396 - DNA, 3000 bp, Unknown
  misc_feature (1)..( 3000): cDNA_ID_4258619_gDNA_ID_1972113_Annot_ID_178816 3000 nt of promoter + ATG
tgtagtgtttttagttttaggttaccgtaaattcagaaattttcatgcttcttatgtatttgactcgaaaattttgtcatttctgatcattagggtcgtgttttgattcgtcatcgagaatttggaagctggatttttttgagtagtttattggcttttctgatgacttcaaaaaactctatctttcagggagaatggcttcttctttagctcaatctagaatctcgaatctccagaatcatctttcacctcttgaagcaaacaacaaggtttctgtactttccaatgttttaagactttttccaatcttgatttactttctcttaacaactagttttgaagcagctcaggagtctggtcaagatttctccccaagtatctgaagccttgtctaatggacgtgctgttgtcgctcttgagtcaaccattatctcccatggtttgttcttccttgtcctattcggatttgtttgaattgcattctgtagacttttttattgaacattgttttatttttttaaataagcctatattcttggatcttggtctgatttcacttgtttctctttaactggctatttttagggatgccttaccctcaaaatctgcaaacagcaaaagaggtggagtcaattgtgagagaaaatggagcaatccctgcaacaattgctatccttaatggagtaccttgcataggtcagttatttctggtggatcataatgttttagattcttggatttggacttatcgaacctgttaacactaatctcctagtcaactttggccgtttacatatcctaaaaccaacttggtttcaagatcttagatcagagttataaatttttttcgccaaggatcaactgcactagacttcttctacgtcctatagaatgtagatgctaatatatagtaaacaggtctgagcgaggaagaactagaacgtcttgcatctctcggaaaaagtgtccaaaagacagcgggaagggacatagcaaatgttgtgagtcacttctggttgtttttctacttattgcaccatcattatgttcatcagtgaatcgaaaaacatcaaacttgtttattctccagtttaagatttgtttacacactcagtcatgtaggaacagtctcttacattagttcacaaaatcaaattgcatcaatctaagcaacctaccctgaactagcttcttatatagagacaaccacgttatttacatttccacacctctatcaatcaatgcatggactttttgctcctccatatgcctaaatgttttccttcaggtggctacaagaggaaacggtgcaactacagtctctgcaacgttgtttttcgcttcaatggtaattggctttgttcctaggaggatctttctttagtagttttggtatcatttattgcatttcagaggatttttggttattgtaggttggcatccaagtttttgtgacgggcgggataggtggtgtccatagacatgccaaccattgtatgtttcatgtccgttttattcctttcttacaaaaaaaaattagttacatgattagaaactctgtttagatgatggtgttgatgccaatattcaccctgcatgcgctgctaatttgtgtttgtgatgcagcgatggacatatcatctgatcttactgcacttgggaggactccaatagcagtgatatcagcaggcgttaaatcaatacttgatattccaaagactcttgaatatttggtatatagtctgttgccgaggcatatttaatagtcaacaatcaagagtttaagttttcacaacagctatttgttgacaatgcaggaaactcaagaagtgtatgttgctgcatacaagagcgatgagtttccagcatttttcacagaaaaaagtggctgtaaggtgcaaaattgttcattatcactgaactcaatcaggtgcttctgcatagatatttagttctgatgtggatatattgacttctttaggcaccttcccgtgtaaatagccctgaagactgtgctagagtaataggcaagtgtagtctttctctcaaaatttcctcttttaaaacgtatttatgcactttgatcccttaccaccttgagataaaaccacttttgccagatgcaaacatgaagctaaaccgtcaggcggggattctatttgccattccaattccgaaacaccattcagccgctggaaatcttatcgaatcagcaacacagcgtgctcttacagaagcaaggttataagaagatgtctaatatctttcatacatgcttgcatcagaatactgcaagggctttgcttctttttcttatttcagggtttgaaatttaaatttggttttggccagggaacaaaacgttactggaaatgcagaaactccattcttacttgcacgggtaaatgagttaaccggaggcacatcacttgcagcaagtatccttctttagaggttcccttaatcattaatattccaccaaattactttaaatagttcagattttttcttatctgtatccaaaatccgaatcctttccgtggcttaacagtagcgtagcaatgtctcagcattgtaaaaccttgagttcctttacacatttccagacattgcgcttgtgaaaaacaatgcccttatcggttctcagattgcagtagccctttctcagctgatgtgagcttccttatcaatcccagactcaagctcaagcgcaagttattcaggttcatgattcaggacagatcaaagatgttttggattggtagttatcaatttatattggttatcaaagatttttctttagctaaagaaactcgttaacttattatcacatgttatatattagtcattagatttatatcatgtggtacccttaaagattaaactattgaaattttaatttatatcacaaaggatctcaaggaaagatctgatctcaaggatgtaataataaaattgttctgcttcatttaaccctctcttcagttttggacaacaatg

SEQ ID NO: 9397 - DNA, 1534 bp, Unknown
  misc_feature (1)..( 1534): cDNA_ID_2182351_gDNA_ID_1972113_Annot_ID_178829 3000 nt of promoter + ATG
ttctttcaatggcttttttttgtttctaatgggttctgaatttttgctagacaaaatattcgggatccaagattcattctgaaattcgatctaaaaataggttatccaaaatctttggatttagatattttgatttaaaaattaggatatccttattttatataaattgctcaaaaaatcaccaaaaaaaatattttaaatttgttgtgcaatattttaaatttaatccatttgaaaaatagttgataattaaatttgttttatgattaatttggatacaaactttttatttgttttatactattattttaattgtgagttatttatggtggatttgaatccgatattaacggatttggatctggatatgtcgtttctcatatatggtggatgtggattcaagatccatgtatcttaaaattccaggaaatattagtagtgtccaccttgattaatgtaaatgatatctcggaagctcaattttttttatgtcaattagtatttttgaaattataatttacttttatataagaaatttttagtgatatattacattcaaaaccaataagaaacagtactagtaaattttataacaatttttttttttgatttcatacccattttatggagtgagaattcacagtctaatttgtttaattatgttctcaatgatttttttcttttttttggtcaacaatcatccttaatatatatatatatatatatatgtgaagttgaaataatatgggccgagaggtttgggcctggttctgtttttttgttcctactattaatttaatttatttgttgagatttttcctcgttttttaaaaaaccgatgagagcgtatctatatttcttttttcatttttctctccgatcaaaacgccgccgttgcgtctctgattcttcctttgggtcaactgaggaaaaaacccttcctatgaagaacaacaattggcttcacactctctcttttctcaattttgcttcttacttctttccccggtactcactgattctccccaattttccttatttcgtcgtgcccttagggtttcttacatcgaaagtttggtttttgattatgttgtcccgccattgcatgacgttgttctgttttgttctgtcctaattgcttatttgggtttctgaataatcttcaattggagttttttttttgttcaagctgaagagtttcggtgatcgtcctctagagattgatgctaattttttcaaacattacaaagtttccaaagccaccgcccacttgaaacattcttttggtgattatgattgtttatatcgatttagcattactttacaataagcaagtgattctcttcataaagtatgtagctttactttgtttgatcctactcttttggtaatcttagtttcggatttgcctttctcgcaataacagagcgctttgtaaagttttgcgttttagatgattaacattcctttcttgcgtatttcaggctgattagaaacttgaccgcttgattctcttaaaggaggtcttgcgatg

SEQ ID NO: 9398 - DNA, 3000 bp, Unknown
  misc_feature (1)..( 3000): cDNA_ID_3041732_gDNA_ID_1972113_Annot_ID_178828 3000 nt of promoter + ATG
gagagaaatcgtctttgtgtgttaatccaatgagaaacttttaggataccacttttttatacgaaaaaaaacaagtaaggttgagctaaatgtgaaaatcccaatttctaggaattgcacttaactcttgttattgaattacttggtatcttccattacaaaacagacgggagagagtaaagtgtagattgttgatcaaatgctcgttgcatattatgctcatgattgtagttgccagatatcagtttttctagtagtagaagaaagctgttcatgaaaacaccactgatgctacgatcatcgggacatatatgcctatctccgtacctaagacttcactatatccgtctttggttgcagttggcaatatacattctcgttgcaggaattctgtgcatttacataaactatgactgtgatagacaaaggcaagagttcaggaggacaaacgggaaatgtttggtttggggaagggccccgtcaaaggtgtgatcataataagccccaactagcttagtgaacttagctatattccttttcagacctaaacattttgatgtgtatgaatctctcttggtctctcggtttgttgcagattgtggcgtcgtatactacaacatctggtgaaactaaaactagtcttctcttaacgtctggatggtgagactattctacattatacagttacaaccataaaagtagacgttgttcatcatcaatggctttgaatgtgcaggtggggattggctcgtcatttccattatgttcctgagatcttaagtgctttcttctggaccgtaccggctctcttcgataacgtaaaatactatccatctatttgctatattcgaagctcttcttgcaagttaaacgcacttaacatataaatcatctttgtttaaaccagttcttggcatacttctacgtcatatttctcacccttcttctctttgatcgagccaagagagacgatgaccgatgccgatcaaagtaagcaccaaatctaaatgatttattttacacatcctctttgatcttactctgatttgctgacaatattcgggttttgttttggtaaaaaggtatgggaaatattggaagctgtattgtgagaaagtcaaatacaggatcattccgggaatttattgattgtaacgaagtctgttgttctcattttctacttattacgttaattcgaacgttggaatcatcaaaagaccgtgccaaaacaaaaatgcaaattgatgcgatagacattcttttgctgatttgtatgctataggttttcaaatctctagctacacttatgtatttccctagattatcaaagttagcctgccgttttctaattttattatttgatattttgattatactgcttcttaatgcatcaaataagttgattcatccatctaatattttaactacatcaaatgaagtcttttataagtacaggcactaattgaacttgaaccctataaaatacatgaataatcacaaagaattgatagtgttctttcagtttttcaatcacaaagaactcaccgacattatcaagttgacttcacttttagacttaattggtgttctggaggatccacaaaactactattacacagttttcacaaaattgtgattctttattttttattttctttggtcaaactaacatttcattcaactttaaacgagagttgcctccacgtggagagtatacacaaaaagctacgaggacaaatgctcaaacaaaaagacataagaaggggagctcagaagctcaacccgagtagcagcatccaaagttgctaaaacagaaccatcatttacttctgaggcggtcttcgtaccaagctccttcagcaaaattgtgattctatgtttggatatcatgagatctaactacaaagtttttaataacaaaaacttaccattctctaatttgtagtcaaagctaaacaaatttcatactaaaacaattttactgtgttgttatggatgcatatttttctcactttatagtactattttactattgataagatgaaaaaaaagttgaggtacaatagtagtaaaatagcatcattctttttctgtagaatctctctggtcaatggtctttttagtttaaaaactgaataatgttctctctcacacagtaaaaaacaaagagagagagaaagaagagaagaagacaaaaatgtaggcattaaaaagaagaaaaagacaaagagaaaagtaatgaaaagacaatgaacatttaaagaagacagacaaatcccacacccaagcctcagcctcatctcttttattgttatttgtttttctaacaaaacaacaaaaacaaaagagatggtttttgggttttgttttgtctttgttagggcgtgtttggacgtttccttcttctcagaatcaatattttaccaaaacagctttctttttttctctttaacaatttttttgatgtagaaatatatagtcatgattccaaatccacctcatgccatgacaaaaacccataaaagtggaggttccaatctcgaatacagacatatatgttgtattcgtgtatgtatctattataagataattccaatttgtataatgccaaatgggttcattgaacttcttcttccttcataattaagtgttgctttttcttcttagttcctctaaatcaagaaaattctaggtgaaacttctcttatcttgactttatataaaataataactataaaaataatcaataagactaattcctacaagtcttacaaatttaaaagaaaatgaaaatgcaacattagctaatacacataatagtataagattgatggatgtattcttattcagttttatttataaatgcaacataagctaatacactctcattcagttttatttattaatgttacaccactttaagagcactcaaaatcaaaatacgtattcttatatgatattcattcatgtagtactagtacacataatagtataagatag

SEQ ID NO: 9399 - DNA, 3000 bp, Unknown
  misc_feature (1)..( 3000): cDNA_ID_3041736_gDNA_ID_1972113_Annot_ID_178827 3000 nt of promoter + ATG
tgtctcaatgagggtaagtgaaaaaacagataattgcaaaataattttgcagtagttatttcggtgactcattgttacttatgttaaactctttgggaaggttgatttggagtgctcggatggacggaccacagttgggttatttagtcataaaaaactatcagtgtgagtctccttaacatcccctatatacaacattaatacatatataaagctatgtatgagaaccgatacatgttgtgtttacagatccgttggagtttcgaccgcagcttttgttgcagcaatgcttgaaggaagcacacaaccaggggtttggtttccagaagaggtatttctctctagattccctaagagaccttcatttttaaaaatatttgatttatgatgaaatataatgtttaaattttgttctacagcctcaagggatcgcagtggaagcaagggaagttcttctcaaacgtgcatcacaaggaacattcaatttcatactgaacaagtgagccatttttgttcctcttattgcagatatcgattctttatttcctctattttagtttaataatgtatttgctttggtttcttctgatatataggccaccctggatggttgagaccgagccgaaggaggtggttttagggatatacgtatgagttcgactgaggaagaagaaacatagatgatcatcgatactttactttgtaaaccaatttacttctgatatgtatactcgaacagataaacatgttcatcagaagatatacaacttaaaaaaaaaaaaaaatcaaaaaaccacttggagatgacacaatcgttcgttgaagcaaccatataaatcaatgaagaatataatttacaggtgacatgaagagtaaagatccaacaagctcttttcttgtagtatatgttcaataaagtcccaacatttttagttccatcacatgactctgatcaagctcaggaacattcttgcagtcgcggtcttccactatatattcctgttgtgagtgacacgaaaacagtgatgtataccagaaaagtgattaccgtaaatcaagaacagaaaagctgcaagatatcagacctttgtgagttcttgtttggcgagaacatggtaatgccgctcgttgatcttttggccacatattatggcgatgaagaatccatatagcagtcctaccaagacaatggccaaaactgcaacaaaaaatagaccatcatgttcattatacgctcaagtggttcagcacaaagatgattctgattgactctaatcctggtgactgggctaatgtccatgagcctatagaaaacaaaaatagttgtaccagccaatgtgtagaacccataaggatgttcctcataaccaaacatttctcgtagttcttcaccgtagaacttgtaaactagtaaccccaagaatgctacaatctgttgatacgagaagcctttgttcattagtatataaatgcattcactaagagcatcaaatgtatcatccaatccgaattcatacaagggatctcctgtttcggtgttcaaatgcgataagaaaccaatagtttggtcataaactgctatgtggcaattatagctaaggatttgcattctcatgattgaattctagtatatagtaacattatagaagaaagtctataaacactaaactcaatcatgagaatgcaaatccttagctatatgaccaattttatagctaggaaacaacgaatttggtcataaaatgggagattgggagtcaagaagctagtaacatcatagaagaagaaagtgtattaaacactaaaatcaaaaaaaggaaacaagtcatgtaccatctggacagaaatgaagatgaaggcatgatctctagcaaccagcagctgaaatctcaatctcaaccaccatctatcagcaggcacattggctcggagtttgaaaaaggctctacactctgtacaatgcgaaaatgcaaaaccttcctgaaacatatattgcatagaaacaaaatacacttcataagctaagtaaaccattcattcaaaagaagaagaaactttctggaaacggtgacgataatataccttggtggagcgccaattatcgagacaagatctgtgaacgtgcttttgagtacctttacaattgcacggagcaatcagatcttcccctgcaatcaaagaacaaaccaagtcgtctcattgtatcctcactcaattgagttaaggaattgcttttattatacctccaacatcaaggcaaattcgacattgtggttgatctccagaaacaagaagtgtggtttcgtcatcatcagtctcagctatttctgaaacttgtccttcctccacaacacgatctcctctttccgctgctacgatttcgtttgaggatgttgattcgtcgaataaaatctgttcctttctatcatcatcatcatcactaggcactaattgcatctcttaaacatactaaaatttctggaaatgaaaaaaaactgagaaacgcaaaagaattcaacacagcatcagaaaactagatctaggtttcgccgggagttaccaaaaacattagaaaaaatcgatacttacacgaattcaaccaattctggagaattttcttccaaggcaagccattgcttgcgagttagaagaaattggtaaactatgactgcgaatcagagtgaagagaatttgattttgttagtctcgattcatcactatgtgttgaatacagagatgacgaagatcttttgagggttgagagagaagaagctaagaagattgggatcaatcaaaaacgatggcgaagaaaagtctcaagggtaaaattggaattagaaaaaacatgtggagagcacgtgacacgtgggatttatctgagtttcacagtagacctgtgaagttcatcgtcttcatcgttaacttcgcagactctgttgattagtcaacacagatcagaatctgaggctttggccgagacgagagaagcagaagaagaaa

SEQ ID NO: 9400 - DNA, 3000 bp, Unknown
  misc_feature (1)..( 3000): cDNA_ID_2182335_gDNA_ID_1972113_Annot_ID_178825 3000 nt of promoter + ATG
tttattttaaaattaataataagaaaacagaagagatttttttttcattttttctgatcaaaatacacaaaataatttgtttggttgttaatttttttgttgtcataatgttaggcctgggatttcggcattaaccgtttaaaccgaaccggacaaaccgaggatttcggttttcggttccgaaccgatttactgttataacccgatcggtggaattttaaattgatttcggttttcggatttttcggttcggttcatcaaaaccgatcggtttattcggttaaaaggggataccttataaaaaatagaaaccctagatctaccacttcatattttttgtttcctcctcacgaacctttctttgtcctcttctctaaccttttttatagtttttatcttcttcaatcttcttcttcttcattcttcttccttcttctccttgtgttccttcttcttctccaccattttctttcgtaggataccttctatcaagccgccacgacattaattctctccggcatcgactttagcggcagcaatttatttcatggatttctacatttcttctcgacaccgcgtcgcacagatccatcttctctgttacgttgttgttcttctttacacatcttctctgttacgttgttgttcttcttcacacatcaccgttgttttccttcacttcacagatccatcttcactttactccatccgtattaccgtcaccttaaaaaagtgaacaccgaaaacctagatctgggtggtggacttgagttgatctcaggggaaaaaaacatttgggcttttaaaatctaaaaacatatttaggatttgaataacttaagcccattatgcacaaaagttaagcccagaatgcataaattgacccacaacgatttggttaaccgattaaaaccgagaaaaaaaatattcggtgcaatttcggtgaataataaatcttattaaccgaaccgaaaaacccgagtaccgaaccgaaccgaaccgaacttttattctgttcaattcggcagaattttgtgtagccgaacaaaccggaaaaccgattaaaccgaaccgtttaacccgatttaaccgatctcccaggcctacataatgtagttaacttacgcttctttatcaacctaattatcttgaacatggccaataatagaaacaaaatgattaaacatatgacaaaaataaaattcataaaagagagaatttaaagttttgtcaataattggttccactctaaatattaacgatgtttttttttgtatggttaccaaacaatattgttttgcatttctaccctctatttgtataatattaccgtcgtgaccggtcgtctatatcttttactttaatcgcactttatttcaaggtcagttacaaataggagatcaccaaacgtaactaaatttaaattccaatcatttttaagaataaaataaagtagaaaagagtaatacaactagtttgacctttgaccgttcgatttattaagactctgctttgaattaaatttcaacggcgtgctctttttgccgttgggaatctctctctcatcacccaaacattaaataattagaagaattcttttaaccatcggaataatttaattagcaataataaaaccagtccatgatctaattattgataatgactcgtggctaaatctagtccaataaaccctactgtataggggttcaattgtaatattcacctttgttttgctcctttttgtaccatgccctacatttttagccaacttggcaatattatgtgcatttttttcacattggcattattattttctgccagccattattgcaatttttattatgtaacttaaattaatttatttcacataaaaacatcttaagtttaaccgttttatgaacagtatataaagaataaatgcaaacggtaaaaatctgaagtatataaattataaaccgttggaacatatatacttagacaaaaaaaatatacaagattactataaacgaaaaaaatttctataaattttttatttttagaaaatttaaatggaagattctatagttgttaaaaagtttgtaaatatatgagattattaaatactaaatagtattcgaatgtcctttggtgtatgaatgtggcgaacagcagcataaaagctggcaattttaattttacattatagttttttttttttaatatcaattttgtttgtttttaaaggaaaagaaatgtttaaattgttgggaaattaaaatatctacaaatggtgagggacaaatagcgtcagagcccatgaaaacgcacgttgcaatttaagaagaagaagcaataaccaaaaaaaaaaagttgaagaagaaaaaaaaatgaaaatgaaaaaattcgttcttccccagtttgacagctcgctgccactcaacagtaggacccataggtttcataatatttacaagtttgaccctagtaggggtctacttcgtcctccacctctataaccctagaggttctccgcgttttggtctctctctcagattgtggtcacgtgacttgacacgtcacctgcttacccttcgctgacgcaacgcctctctctttgcctttccagtttccaccattacaacgttttttctttttctcatcttatttaatttcgcatttaagtttatgattgattgcatttaattttaatcaaatttttatccacggtgttgaatagttacagatttgagctacatttatatttaaacacccgacttgtattgtctgatgtatataaaactcaagataagaataacaaacaatttacaaatgaatgaaaaacttgacgggccttatattatatttcctcttttggaaccacgatttataaggcccagatatttatttattaggcccagatataaagcccaactaagttatcccgttcaaattcttacacgtcatcatcgtctacgataaaactgcaaaaggagatgaggtgagtgaggggagggagagaga

SEQ ID NO: 9401 - DNA, 3000 bp, Unknown
  misc_feature (1)..( 3000): cDNA_ID_2182327_gDNA_ID_1972113_Annot_ID_178821 3000 nt of promoter + ATG
aaaacactcttcttttatccactcttattgttttaagtatccattcttcttgttctctacaacaaacccaataaacattcttctttcaccaaataaacactcttctttaacctaatacacactcttcattttacccaataaatactctttttcacaaactaataaaaatttctcacttaaggatttcacttaagaattccactattggacagtaaaaattataaagtttcaaccaaaaactctaaactctcatttactcaaaatttactattaaaaaattgtaaggagtccttaattaggactcctcaatggggatgctctaacaagtagtataatttagatacttgcaagtacaagtcaagtaacaaataattgaaaaaaaactaatactttatgaaatttatttttatattactatatgaaatttaaatatagtttcatatagtaatataaatatataaattattctaaaacgatttaaatcgttcagactacgactaaatgttttaaacgttatggcgaagggtcaccgaccgcgcttatcactttcttaaacaccgaaaaaatctcatagatatgcataatacaatgcaaggaagttcacctagttaatataataaatcaacgttaaaagaaggagctcgatcggtatagtaatattatgattgacggcttgacgctgaatcatgcaaatctctacctctttacaaggaatctatgactaattgactatgagactttctcattatttttaaaggtactttgcttgtctctctggactagtcaaattaaatcttgttatgtttttttttattagatccagaagatgtgaataaaacatttaagatgataatatatacaaaatgatcaatgtccaacaggatattacatattgttggatttaaatcaatctttgaacatacgtaaacacacttaaccgaccatcaaagctaccgaaaccagaagatcgatataccttgtgtatttatcttctccaacaatgtatatcttgttgtatatgactttctcaccgcaaacagcaactttcttctcttcgtcaatgtggaaacttagggaactcgaaaacaaacaaccatggggttttaaatccactgtctcaatctcattggtcacccttatatccatctttagtttctttgcactctgatataataaggagagatgttcttctctaacaactgagagagccttaatatcatttacttctgcagcttcttgatgaaagggcacacatagtagttgaaacctctctgttgaaaaaaacaaaactgagcaatgagtaaccatttcccttcaacgacttgccagtggatactaagtcgtcttcgggagagacgacatcaagaaactcctccataaattagagctaaaatcatagacttccaagcatatatctataaacctcaagattttgtagttatggcacaagtccttgttattgtaaccgagagcatagacctcgaatatcttgtcatgacgatttatcggttggatccatatggttttcttctagaatgggtcccaaaccacaatggtaggttcaaagaaactatcttaacaaaaatgtcctccaatggtaggttctcaagaaaaaaaaaatcaaatttttgcaagacaatatctttcaatacaaatacaagtattcatacaaccaaactcatacaagttttggtatctatcactttcattaaacttgtctcttgcatgctgcttctcttcttcttctcaatatcacttttcactaaacctaccactttccctaaatttgtgtttgacacactttcccggaaaaagatttctgcaaaaaaggtttcagcatcattgatagcatcgagctcctcctttggaatagcccttttctgtttattattctcagcagcatcatcatatcattgttatttgggattttcttctctttatgttcttctttcttttctgtttcaacttgatctactacatttgtattgcttttaaactacgttatctatcacacaataagaatgtcaaacccatcctaaatcaaaattctgattctctttggttgcatccattttatcttctttaggaaatggatggataactttatattaaatgacgtcgtttctttgcctcattttgggtcagaaaatgctaaagctgtaagcccattttatgttaatggactaatatgacatcgatttcactatgtaagatacgcaaagaaggcttagtcctagacatattccatagggcttttatatagattgcttaaaatatatattgcttcaaggttactgattcatcaatagttgaccctctcgtgcctcttcaattctaagtctaaaactctatacaccatatctgtcgagaggaaaaattggcaccatttatcaagacacctcggaatccgttcaccccaatacattatacatgttgacaaaaactatcatcgttgtataataaaatagtattggtgcaatgaaaatgatggtttaaatgaaaagaaatgtggcttcctgtaaatctatagaaactgtattggaatagttcaaaaacaacagtattttattaaaaataacaaatttaatagtacagtcttaagaagtattatgtaaagattaaagaaaattggtagcctaacaaatccgagttccattctcttttctagtatagtactagtttaaattgacgacaacagtgggccaaactaaactatagtggctgcgcttatagatcgagggcgaaaccgtcattttctggccttcaataattatgtgtgttgaaaatatatttattaagaggtgaaaaagagggaaaaaaacaaaaacgtcatcgttctcattggttaatatggataatgatctaaacatgtatttgctacttactgtaatatattaggatgtgctttaaagttttataaaacatcatcaattcatcagagtccctcatccatcttctcatcctccaacgcgagatcagacttcgacagagagtgcgatg

SEQ ID NO: 9402 - DNA, 3000 bp, Unknown
  misc_feature (1)..( 3000): cDNA_ID_2182279_gDNA_ID_1972113_Annot_ID_178806 3000 nt of promoter + ATG
ggcaattgataataaatctttgagaggtgtatggtggcaggcagattcttttcgtgtttgacccattagattagattttgtgttcggcgttaccctaaaattctagtatcttactttactttttctgccacaaacactattaaacgacctttgggtcctaaccaaacccacatatttgtttttactgttgtccaaaactaatttctttgaatcttttgttagatataaaacaaactttattagtgtataaatatataatgatagaacatttacgaaaaaataatgtgatgtaattgcagcgattatactagagataaatcatagaagattttttgttcaaaaaaaagtatgtagaacatttaagaaacaatatattagtaattaattgcagggatattgcaaacctttattattattaaatatttgggaaatttgagatttgattatttcattccacaattacgtggattaaaaatcataactttattttagtataagagactagaatttattctataatataatataccgtagatatataaaatttcacacaactctaactaaatcaaccaattcgacataaataataaatttggtaactgtaacaaagaggcatgagggtcgtgtgatgagatgggcaatgggagaagagtttgttttcatatcggtccatttgtcatctttgttggtgtcttaggattcaagactcatatgccttatatgtggaacttatacaaacacggtgtccccgcctcgacattgaatagcaagaattttatgcttcacaaagaatcaactaatatagtggaagcgacacacacagaagccaaaaaagacgacaaatgcaattaagatcaccattgaagacattaacaacaagcttgatcaattttgcagctgagaaaaatgaaaaaaaattgcaaccgacaagaatgagaagacttcatagaagactagtttcaaatcctaatatatgttttagacaagttgttttgatttgattgacttattttttatttgttaattttattagaattttggacctaaatattattggagcatcaatttgatttttagattaaaaaattaataataaataataaaaatgtattcataatatttacaaagtttaaaatatatcgataataataataacagtttttagaagttaggttttaactttcacccaaggaaacatttataaaaatataagtaacattataaaacactaatgaaaactacatttacgaatttgggaataaagcgagtgatgggtcaggtacaaaaaatagaattaatactgatatttgacacttacttgcagataagaaaattataatactttttatcttcattcgatactaaggtttcaaatatttttttgagacgtgtacgagtcggataacagatcaaatttggataacaaatatgcctaatcttaacttataattatatgtaataatttatctaaagatattgttttataaactgtaattcaaaagtgttaatattgattagaaaaccctttcacaaaaccaaaaaaagtgttaatattgattatcacttcgaatttgagaaagattgaatatttagtaaggaacgagatacagtttgttggctaataatgggcttggagccgtgggctattcacaagctcgggcctggctttttagatgtccagattaattaatatacaaaataatcccaagacaaacactactatggtcgtactcggtgaattcgtcatgtattatgttagacgaaagaaatatgatcatagaaatgatttcgattagcatcataatggaagtccaaaatcgtatatgatgaaaagagaaagatgatcgttgtaataaagcatgcaaaaggataatttaacataaagatcatggaaggagttaaattttgtcaacaattggaacattttcatttatgttctttcactaaaaccaaacgtaggtcatcctcactcatcacgttaaaaactgtggtagacaaatcaattcataaacatgtgagataagtaattgagcaccgttttgttatatggttccatatggtgtctataaaacatagccactaagtaatcaaccagatacaaacaaacgaatttatttcaaataattcacaattattaacaatttcaattaaaaatttgtaaatgataacatggtattcgattcgatcataagcattatttgagttaaacaatcatatgctcttaaatgttaaacttttttcaagtaaacttaagatatcccccgccggtgattcaaataagaaaatcaccgtacattcaaaaagagtgtatagctgttgtaatgactaatttagtgattaaaaagataatatggttatttaggaacagacaaacggcacgcgtggcgatgcttcaacggtggtctgaataaaacacatgggttagtgggtccccactccacagcctgtgttcaccttttgcttaaactatcttctaaatcaagtttgtgtttgtagttttgacacaaacaagttattcatgttttgttaataacattaactagatctagttaattaagactactattttgatttgaaagcaatcatactagtagttaattaagactagatctagttaatttagccatccaatcccgcaaaatttgtccaaatagtctcatttacattcatttttgtatgattgcattaaatgacttagtaaaatggcacacaattaactgtttatttggaaacaaaatataggcaattaacacttttctctgactaattgacattgacccttaattttatactccaaatattatctctcactaactccttcctatttagacaacaccttacacgcaaacaaaaaaattaacacaaacttataaatagcgtttcccatctcacttctattcaaagatcgcatcaccaatcgcagtcaaaagaaacgcaaacgcgatctctctctcttaaaaactctgattcattctctcccgcagcagcttttcctaatcg

SEQ ID NO: 9403 - DNA, 3000 bp, Unknown
  misc_feature (1)..( 3000): cDNA_ID_2182291_gDNA_ID_1972113_Annot_ID_178809 3000 nt of promoter + ATG
ttgaagttattgttcatgaagcttatggttcgcagattcttcattggaaccaatgggtcgaggtttagtttcccggtcaaacccattccctcaagttgtaatccccaaacgtaattgctacaaagaacaccaaaccaatttgctgtatttccttgacatggtgatgataatggatcccaactacgaaattctgaaccatttgctaatgtatctttgaatcgcaagagacaatctgcatctgaatccggcacaaccacctgagacattgccaccggacataacacgctgataaagatgatgatgaaaatgcaagaaggtagattcttcttcaaggccgtgttacacgcaagcgtaaacgggtcctcccaattgcgcattgcggttacacgcgcaatggaatcgatttgattgatgtgaaatctcttgttttcttctttttcttttttgtctttcgtgatcgccaagaaattgtgtgaacggaagagagaaaaacaaaacctaccaagaatagacaaagcaaagtatttaaatttgcaaaattgtgattatttttttttggatttgtggcatcttaagattattattaggtgagagagttctttggataaccattcaattatcttgttttaactttttaagttatatatacatgtaatcgttgttgtactgatttgtcatttgctttagttccaaccaaatttatttttctctctatatgagaattattttggtataactgattttaagaatcaggcataactggtggattgttctatatgatgatgataatatctgaaccaattaaacaagtaatgtgatataactcggtagagttttagagatttctgttttatcaccagttacccgttaaaaacaaacaaacaacatgttttataaattaatcgacaaatatggtcagtcaaactaggagtaaaacttagtagtctcttaattttcttttcaaaattctagtaatgaaattataaaggatgactttgttattcctaaattatgtgactgcgcacgattaagagttgttattttcggacagtgttactcgaggaaagacataaaaaagacaaaagacataaacaatgataaaattaaactttatggggagaaaatcaaatgtaaaaaaatgaagaaaaagaaaatggaaggtcaaaaagttgaatgctgaaattgttcttctgaaagaacgcggaattgggttaaagagctttaaagtgttggtgggccgacacgattggtcggcatgaaatcttaaggtgtgaacctttcaagtacacatttctgctgcttatgcagtgtccatactccaatttcggttcgtactggaaaacatactaaagtggatgtatatttgataacagtttttgtttttgtttttgaatactagtattatataaaagagatttttcctagtctactaatgtttcaatccaatccattgtagttatcaaactagttatttatgggtattcaaagctgataatatggtactgcggggtagtagtataatactaaataattacttacgaaattaataatgaaatgagtaattatagaatgaatgcatataattaagtgtttttttttcacaaaagaaagacgcctgaatttaataataaagtgtattaaatattaattcacatttgtcgtaaatacgtggattgtaaaagtgtatcaatcgtatgtatgtaccactggttaaacaaatgtatgatgcatcaatagtcaaactaaaaaactcgctgatctttgaacacgaagttgaaaaaaaagtcgaaaaaatctcactgatgtatgtaaaaagaaaatatgttggtaaataaaagaaaaaatgggaggataaaaaggcagggaataatcacaaacttttaggcctaaaaatgataagtgttggaccaacccatggcttgcacgtttggtctcatctcgttacttttgttttcgatctcatcgatgtctgcgtctgtgcggaccattttacccttgccttttattacttcactaaaagatgaacacacgaattatttagacatgcggcacacaattttattacggttaagtttacagttttaaggcgaaaatatatcgttatgctttatgctacattaattatgtatagtagtactccctacccaaaacaaagttacgtatagtactttgattggccatcgaggactcaaggtttactaaatagaaagtaaaacaaagagatgtttattgcattcgtcgtccacacatagaataatcaatcatcatcatgatttgttttacattcttaagttctcgtaattattcgtttcgtacgtttttttaattttattccaaagaatttaacattaatattttgaagaaccatgtgctactagcctactattatactcaattgacaacaacccattttattttgcttttgctcgtgtttcattcatttcgaacgattggatttacataaaatagtctatacacaaagacaaaacaaaatcgctttttttttttttttttttttcattttgtatactattattgtggaaaacgcaacatttatatatcatactattgatcttgcatggttccatgaattttctaggtaaaaaaagtgtgttaatagaacaaacaaaactgttaaaacatgttgaattacttaatgcaatttgactctggtaaaacatggtcagccacgacatttcaactactctcattaactcccaaatgtttcatcatttaatatatgaaaatcattatataatactcgtatgattcaattactcagataatagtgatgtaatgcatgacacttgtttttggaattttattttatttccagttatatattacagttgtttactcgtcagactaatattgactgttattagaaataaaggtacttaattcttattctttacgcgctacaaaataagcaacaatggcaaaaccgtaaaaatgagtagtcaaaggggtatttggttttagaaagagatgaggataaaa

SEQ ID NO: 9404 - DNA, 3000 bp, Unknown
  misc_feature (1)..( 3000): cDNA_ID_3041768_gDNA_ID_1972113_Annot_ID_178812 3000 nt of promoter + ATG
cagtcacttacatgttagaggtattgatctcttctcatcttcttattcgatttctcaagaatcgccacgcgtaactcttgatgaatatgtatacatagggagagattttgcatgaagactgtgaaggacacaaaggagtaataagagaaggaggattacaatggatgactgcaggaaaaggcattgttcattctgaaatgccttcttctaattccaatggcattactcacaacaagggcttgcagctttggatcaatctctcctcaagacaaaaactgtaagcttcttcgataagaaacatttgcggattaaccaattgacaatgagtggagtgatccatgttattttatatactagattaggtttcttcttacttgaaagtccgtgaattctcagagtggagccgagttatcaagagatagagagtaaagacatagcagaaacagagaaagatggtgtgagagttagagtcatagcaggagaatggaatggagttaagtcaaagatctgcacaagaacgccaacaatgtatttagacttcactctctcgccgggttctcgaatctctcaacccattccacttcactggaacgcgtttgtctatgttcttcaaggccatggtcactttggggattccaagttacaacattcagccgctgctgcgcaccacttgctggttctaggcctaggtggtgacatgttagaggcttggaacggttctgattccggtttgcctcttcggtttatccttgtggctggtgagcctataggtgaaccaatggttcagtttggtccttttgttatgaacacacaagaagagattgatgagaccattgacgactttgagaattttagaaatgggtttgaaaaagctagacattggaagtctcaagctgcttctgccttgggactgttctgaaatctttttgcctctagttataattttttgaatacttctttacctgttattgtaatgatctttccaaaattattagagaaaaattggagtgtgagatctctaatcatttcttagtaagactttatatcaaaatgtaagacgatactctttattcataaaattgaagtaaacattattttggaacattcaaagtattcagttcaagaaaatttggtgttgttgacttcaatctccaatgcttctacaaacttatcagcataaccacttaacaatccaggactaactaaagtctctttcaatttcttatgattcctcttcactaagttcccaatctcactatctatatccatcacagatttaacagtatctctcaagtcctctttcgagaaccatccggaatcttctctctgcactttcacagagacttcgagttcttcagtcaacaatcttgtgatgagaacttgatctgccaattgtggaataaacacaatctgacaatcactaaccaaagactcccacattgaaccaaagccacaatggttcacaaagcaacctactgatggatgagacaatatcaaaggttgttccaaccatccttcccaaacgattccatgctttttaacccgttcttcgaatccttttggtaacgcttcttgaaccgttggtgagccttttggcggcataaccgatattaaaaacggtagacccattagctccattcctaaacagaattcttgaaattgatccttctcgaaaaagaattgagtgccaaacgcacaaaacactaccgaccctggttcaaatccgtttaaccagtgattccatcggtcttctagaaatttaccactcttattttgcggttcagggagcattggaccggttaagagaagtttcttttgacattctttttcgatgaaaccgcatagcttaccttcaagttccacgcaggtccttatggaaacgacgtcacagttcttaaggcctttggtgatcagaccgaaaagctcatgggaattcgcaaagagagaacagacgttagcttcatgtccacgtaacgccactttggataaaggataatccggcggaggaaaccctaattcagccctaggtgcaagaaccatagctacacaagctgccgatatgatctggtaattgacactctttattccaaactcttctgccatttctggaacccaatgaacaaaatcgaaaaagattagatctggtttcaaagcacggacctttgcttcgatctgatcgcgtaagagatccatggcaacgaatatgggtttcttagttgagtttgggagatccgaggctgtctcggcgccaaaagggagaccatcgacaggagggagagtaagaggctcaaagacaatgctgtctgggaacagattgagaggttggagctgcttatgagctttcttggggaggaagaaagtgaccctatgacctttctcagctagtttgttggctaaatgaagatatggaatcatatgaccaaaaccaaaccatggatacataaaagcatgaaattttgatcccatttcttcaagagagccaaattgttgaccctttttttttctttactcaagttatagaagaatggttgcttttctttgtgtagttgatattaaaagaatgtgtcttaaatattaagtgggattatttaagctgtgtttaggtgctaattgcttgattgcatgtgccaccatgtgttgaatgtataaagcttgcaagttgcaacaacaaatctttaaaatatagatcagtgttttactgttaacttgcattataaattttactgttaacttgcattataaattttactgaaataatcaaatctcaatgctcaaaatccaattttaacagttggaataggaaatccacgtgtaatgattctattagttaatgataaaagccctatgctttggagtggggcatagtcatggagctaccggtgaagttgaacggagataaaaatataatctttttgtctgtcaagatcttaaattgacaatttgagagagcctgagagtagttttgttgggtacccagttgaaggaagtgagaatcagaaa

SEQ ID NO: 9405 - DNA, 3000 bp, Unknown
  misc_feature (1)..( 3000): cDNA_ID_4258623_gDNA_ID_1972113_Annot_ID_178813 3000 nt of promoter + ATG
cttctcgaaaaagaattgagtgccaaacgcacaaaacactaccgaccctggttcaaatccgtttaaccagtgattccatcggtcttctagaaatttaccactcttattttgcggttcagggagcattggaccggttaagagaagtttcttttgacattctttttcgatgaaaccgcatagcttaccttcaagttccacgcaggtccttatggaaacgacgtcacagttcttaaggcctttggtgatcagaccgaaaagctcatgggaattcgcaaagagagaacagacgttagcttcatgtccacgtaacgccactttggataaaggataatccggcggaggaaaccctaattcagccctaggtgcaagaaccatagctacacaagctgccgatatgatctggtaattgacactctttattccaaactcttctgccatttctggaacccaatgaacaaaatcgaaaaagattagatctggtttcaaagcacggacctttgcttcgatctgatcgcgtaagagatccatggcaacgaatatgggtttcttagttgagtttgggagatccgaggctgtctcggcgccaaaagggagaccatcgacaggagggagagtaagaggctcaaagacaatgctgtctgggaacagattgagaggttggagctgcttatgagctttcttggggaggaagaaagtgaccctatgacctttctcagctagtttgttggctaaatgaagatatggaatcatatgaccaaaaccaaaccatggatacataaaagcatgaaattttgatcccatttcttcaagagagccaaattgttgaccctttttttttctttactcaagttatagaagaatggttgcttttctttgtgtagttgatattaaaagaatgtgtcttaaatattaagtgggattatttaagctgtgtttaggtgctaattgcttgattgcatgtgccaccatgtgttgaatgtataaagcttgcaagttgcaacaacaaatctttaaaatatagatcagtgttttactgttaacttgcattataaattttactgttaacttgcattataaattttactgaaataatcaaatctcaatgctcaaaatccaattttaacagttggaataggaaatccacgtgtaatgattctattagttaatgataaaagccctatgctttggagtggggcatagtcatggagctaccggtgaagttgaacggagataaaaatataatctttttgtctgtcaagatcttaaattgacaatttgagagagcctgagagtagttttgttgggtacccagttgaaggaagtgagaatcagaaaatgggggtttcgatgttggattcctcatggagtttccgattatcctcgaagatgtctccttcaccaacacaaaaactcgctagctctttgacagaaagagatccaatttctctgaatttgaggtttgatcattccattagggcatattcagctcgagctctaaagtgcaggtctgttaagtctgaggattttgttgagagaagtagcccatttgaggtaacatactaaaatctctgcttcgaatctgagttagaatttcattaaattggttctcatttctagtctttgcaatagaatttcatgaacaagttcatcacagcagaaagagtttgactttgcttagatagccaagtccttagagaattagaaacacaagaacaagcgtaaattctgatatctcctgttaaagtcttggccttttttcttgttcaattgaatgaagaagtaaacttcactttatctttaatcttctttggagatttcggtttttaagtactgatagtttccccttgaaagaccatttcgatagaggttattctcaacttattctgttgaattctcattgtttgaaaggttaagaaagagcttgagatttgcttcgacctcgtacataggctcgggagaggcattgtgtacttaggttccgccagaatcccaccaaaccattcacattatctgcaagcacaagagttgagcagagaagtaagtaagacccttaacactccacaagagcttagtttagatatagatttctcagagttgtgtattttatcaggcagcaactctgttggactgtactacatggtctggtgctggaccagggcttatggatgctgtgactgaaggtgctttggaagctgagaaaccggtcggtggcatcaaaatagaaaaagaagccggtgaatggaccgcatcgaagtttcatccatatctccctcctcagaattaccatacttgcaggtaaacatagccacacaccattggttattacttactgtgcttgcacaagaatgagtgatccctaaaatgcaaaatccatgttaggtttttctcggcgagaaagcatggattagtagatgctgtgattagaaacaatgtatctgagaagacggcgataattgcacttccaggtggcattggcacgctcgatgagatgtttgagattttggcattgattcagctcgaaaggattggatctgcattgccggttccattcattgtgatgaattatgatgctttctattcaaagctgcttgaattcattgagacttgtgaaaacttgggaactgtttctaaaggagaagtttctgcactgtggaaggtatgcaacaacaactttgaagctttgacatacttagctgaattctatgacttgcctgacggttctgcaaagctggaaactgaacttagaaaaaccactcccactcgtggatgatgagtttcgtaatttttaactgtaagagatcatatttttgaccatgagcaaccaatttgaagctactcatgtggcacatgtagcatatagattcgtgtgtttgatacatacaccaatcagatttgttgttatcactttcaatcttatgtttcttctcttagcttctcgtgttatccttctacttcactgaacttatggtaatgggaatgttaaagctagtgaagacaaca

SEQ ID NO: 9406 - DNA, 3000 bp, Unknown
  misc_feature (1)..( 3000): cDNA_ID_2182283_gDNA_ID_1972113_Annot_ID_178807 3000 nt of promoter + ATG
aattataaatataaatatgtcaattaattttggacctaaatatccaaaacaactaaactattcaaaaaatatttgttatgtttgtcaaaatttagtaaaatatattcaaatataattaaatttattaaaacttaacaaatttaaaaaaaaatttgtttggacactcgctatctacataaaaatttcccgtttctttttttttgggtatttttagggtctgaaactttttccaaactgacccaaacccaactggatctgacccaaaccagaaccgaatatttagaattattctattaggtagtaaatcaatacccattaatcccaaacccgaacgggttctacccgaactcgaatgggttactcatatgcccaactctattctgtgatttaattatctaaaaactcccaaaaacacatatattttgctgattacttttaaaaaaaaaatttacatcctcttctgccaaaatcatcttataagacatcacaaaacctttgcaataataatttcatgaatgaataatcctaatttgaatataccaagaggttttgaaaggttttaactttttgataggtgtgtatgtgagaaggtacagacatcgtgatattaatctgcttatttataatttcaacttgtagtataccgtaggtaggcttatattttacttaaactaaaaacttttattgtaaagatgattataaatatatgatattattttatttgattttaaatgtacagtaaactgcgagttgtatatgttttgttgatattatttatattgtttagtgtttaaaattatacacttgtattttgattattaattttagagtttcacctgtagtataccatcttgtattaatatcgatttaaacccgtcaattctaggattttctagcttgtattaaaaattgaatcacatcatacacataaaaaaatctaatatgttttttttttaacacaaaaaatctaatatgttattaattattgtagtatataagattataaaattttaaaataatatgtatgaaattgaatataaatattcaaattgtgactcagtactcagtataaaattttcttaaatctatttttgacccgttataatattttttcatgtattgaacagtttatattcgtttttaaaaattcaaattatagcatatgcgaaaaaactctaattattgttttataacgatgatattattttttcgcaaaaatagaatcatataaagatgagaggtgtactataataattaataaaaaattaatatgataatttggatatcaaatctaattagttgattttaattggttacttttttggaaattaataatgtatttcgttttttaattaaatttaattaattaaattagtatttgactttttaatttttaaagagatgaattaatttactttttaaattttatttctaatggcatacctatgtaattacttacaaaaaataaggttatatttaaaatgtacttcccaaataatatagtagaatgtgctttagttggttgaatacataatacattacaacaaattggaaaaaattgtatgtacttttttttatttttctaatctatttaattaaccgagtttttttgtcttctttattccatctttttcaactgtagatcggtaatatcctctcccaaggtaatgaatagaaaacatgagttgtagagattatattgatgatgtcgtaccattgcatgtacattatagatatatgttaagtcaagaggagaagaaggaagagaaattattcgaatctcgaagatgtcttgataagatctcatgacacttcaggtacattacaaagctattcttggatacccaaagaaatttctcttcaaaatataatttgaaatctcaccatcgatttcacgaaacctgaatcatgtagacagagaggtctgtttttgggctcgattatgcataaaaataggactacatatcaaaggccaatatttttttggttaggatgaatctttgaggtggtgatgaaaatttatattaagagtatgagagcatttgttttctaaaccctaaaaataaacttatataaaacatttattagaatgtgatctgtattcatatctctcaatccgataagctattataatacaacgaatacaaatctgaaattctacactttattgacatgtacatctaatcatcggggtacctttatatatcacctaatcacaaccattcataaatatacaaattgtttccataaatatcaacctaattaaattgtaaatatatatttttaacaaaatatttgctgtagcacatggtctaaaacctcggttgatcaatttgatcattggattttcagattcgaagcctgacagcggaaaatattttgttaatatatccaaaaataaaaataaaaaaaaagactatagccttataagaaaaccaaagtactgtatataataagatatccaaatacaaattatcttcctctaaaacttaaatttacttttgtgttaggtatgagattttggcataattgaactcagcatatcaaattgaacctctataatatgggcttatgggaataagaaaaacttaaaaacccactttccctatcctgtttagtagaagtatatactaaaggcctaatatattcaggcccaactttatttgatttatctctctagaaaataactaagccgaagcaccacgcctctccgcaacccctctctctctctctctctctctctctctctctatcttctagctgctgcaaaactcttttgtaaatttcgttaatcgtcactctaaaaattcccccaaatttttacccgcgaaaaattaggttttgtgacgttttaatcttttaattttcttttcaaaattttgaagaacaaaaaaaaaaacctcagatcttccctctttctctcttctagggtttctctctcactcactcactgattcgtttctttcgcggctctctttctctcctctcgtgttgagaatg

SEQ ID NO: 9407 - DNA, 3000 bp, Unknown
  misc_feature (1)..( 3000): cDNA_ID_2182263_gDNA_ID_1972113_Annot_ID_178803 3000 nt of promoter + ATG
gaaaaaaccatgattctatccataaaattatagtataaataggcgggctttatgtggatcaccacataaactaatttcttcataaatactcacaattgactcaaaataattatgaaattattatttaaacaatgtcatttaataaaatagcatgtcatactaaaaaatataggagtaacatgtgattgttatgcaggtgacaatatatagtgactgttcatggttacgaaagtggtgatagaaaaaaattagtataagggaaatataccttattatataattagtatgatatattttaatttttcaaagttagtaattaatattatcatgaatagttatcaatcaaagattttaccatatgtcatgatttaaaggaatttagtcaacgttgatcaatcatctctatatttttaacgtgcctaatttaaaaccattttgaaatcattcgctaactttatgataaaataattttaattttagttttcatataagtatatcaaaagttattgctatttgatatacttttcattcaaataatttgagcaattgctatatgatatatttttcattcaaataattttttattcaataattttagtggtgaaggaaacaatacaacattaagaaaaaaaaattacttttgaaagataattattatattttattaaatttgattttagttataagaaaataaacccgtccatcggacgggtccttatctagttaattatataattggtaataagtaataacatatactagtgcgaaagtctagagtacgtggaaactagtcgagtgatagaacatggatcatggattagggtaaaaaaaaaaaaatacatggattagggttagaagcaaatgaaacaattaagaaaacaataaaatttaatgagacacatcaagaacaaggaatagcatgggaagtacccaaagatggcacatttaaagaggctgacccattaatcaactattgtttgcatgttcattatcatattaatacacaaatataaaaaataatatactataatcctcaattaaaagtttgatgggcaatccaacgtgcatagctttgttgatctattcaattttgtcgatctaatataaagtagatatttgtgtaataccacactaccacaatttttaaaatcatagtggtatataaattaagggtttactatatttattctagtctatccatttcaatgtatatatcattttaacataggcacacgaattatagtaaatttattttattttatatcctgaatatcaattacatatcgaacttaaattatatactatatcaatatttttttttttcttttttttgtttgaaatccaagaggttctgcgctgaagcccgtaatccctctaggccagaaaccacatcatgtaatattagtttcgtcccaaacatcactcgaaccggcccaagcatgtaatatactatatcaattttaataatacaaattagacatgttatttttaggatattgaatttttattacatgttttcagaattaaaaaaaaaacaatctaaaaagcatattgttaatattaattacctgaaattggatgcaataaaattttaggatatttgcggtttatcttttaagagagatcaatcggaactcgattgatataatgatatgtatgtgttagctgaaaacaatagtataaattacaagatattaaatcacataatacaattacaaaaattaatatacaaaagcttccaaactaattccatatatacattagaataaatttcttaaatgcattctcaaaatataccacactttttgtaatcatatatatataatatatctaaaaaaattcaaattttttttacaaaaaactatatctacaagcatattagatcggatcgaaaaatcttaaattttaaaaaaacaaatatttatctaaaaactccaaatatcatacttttttggagcgtaatatatttaatctcgaagttgattttaaatgttttttttatcaacagtttctaattaaaggtaaaaaaatcattttaaagcgatgttctttacatatatgattttaaatgttgataatatgtattgctgcgtaaggtaattgaaaagttacatctgcatgtttattactagacataagcttatttataaagaaaatcacctttgtatataagttttgttagaaagaaaacgagtgaaatatataagtcttgttagaaagaaaaagagtgaaatgtatatagatcatgtgtaggcaggctgatgaatccaatgagccgacatcttaacttaggataccctttcatgtcttcgtcgcctctttgtttgtttcctagtcaatacctttttctatatatacaatacaatagagattaaagaatcgagatctaaaaattgacttataaatcttatgcattgcatgttcatgattaacattttcttttctataatttttttaaaaaaatgataggttaacatcagacaatacaatatccattccactcttttgatatcctacatgctacaatcttttaattaacaaaaaaaaaacacgtacaccaataatttattgaaacatttttgtttttaaaatacattctttaatcatatattcccaacgtctctctgcaaacaacacgcaccaccaagctagagagctctctccctccccatgtagtttagggaaacgctccccacgcgctactacgcgcgtacacatccactctctaatgatacgacgtcgtcttggtcttataccgttgaccaatacacatgggttttacaaatatacgtattcatatactcatctctctctctctctcgtttcagtcacaagactctcacaacaaagcgattttttggcttcacgaactcaaagctatctctctccctctatctctgaggcacgcattttcgtctgtgattctcgagctcttttggggtttctccgagatttttggtcggttcttcacgttttgtttatggcggtgattacgtgatg

SEQ ID NO: 9408 - DNA, 3000 bp, Unknown
  misc_feature (1)..( 3000): cDNA_ID_1012357_gDNA_ID_1972118_Annot_ID_178841 3000 nt of promoter + ATG
agcgttcatttgctactttttcccgtaacttatccctccctccttaattggttattcctctctctcacatttaggaagactgtaggggtcaggtgaatgtagtaaaaattcaagatgatctaggatttaatagtactagatgagtacccacgctatgcgtgggtttgttgtgaaaattgttaagaaaaatttatattgattgttctttatgctaatttatatttactatttgtttattcttgtattgttaagaaaattagatccataatatgtagttacaatttttatggttagattcatttgtaactcgaaatatcaatttatatatttttgtgtataaaactgattatttataagattttaatattttttcacttcatgaatacatataacaacaataatgatattttgatacaattctgtgaaactatgttacttttgtggtttaaaattctcctaactcgtttataaatccttgttttatgtacttcaacaacattgtgatagactcatgattaaagtttggattgacatcaactgaaaaagatctgaagagtattcgtacaaaaaaataaaaagatagcaaaaattgtcatgggcgtgctcttaatattggtacttacttgacttttgttggcgaggtaagggaaccccatgttccttttggttcttctttattcaggaaataatgtggaatctttaagaatattggtgttttcggggatgtgcaagctaagttacatctgatttcgtccctctttataggattggctttccttcgggtggaaggcaaagattgttgaaatgcttggagaggctactggcatacttgcctcggtgatgcaagatacactgaaactttttagtttatggtccttatatttttattatgttttaaatatgacccataacttttgtaattacaactattgccccattatcctcgagcttaattaactaagactagtaaaatcatttgtgagccctttcgtaatcaaatttcagaccaggtttacccgaactccattatattatgcgaaccgtatttcagtgacaaaatgttgaaaagtttttctcatcgaatttcggggttgagggccttgtgttgaaatgatttggttgaagatttcggatgatgatctccataatcaattgtgggcttcaggtggatggacggagaagaccactgcgttatgggcttcgttgatttcaaattgggcgttttcgtgagattaggcccattgttgaatagtcagcttgattttgttgccttagtattttacaaaaattgttgactggtcagctgatactacattattcatcgaatgtttatgaatctattacgaatgaaccttgagagaaagatagtttgttatgaattcattccacattggtattacaatagattgattcgaacttatacttattatatctaataagtacatattagaagttaactaatagttagctaacttggaaggcgagtcatgtgacagtagcatatttttaatattgattaataacatgtttacaaagttaatagtctacttttattaatgtggcaagtacgtgaatgtgttcctaatcctaattattcgtaaatatatttaaattttattagttaaactaccttttaattaatcaaacaatacgaaactccatcaaacaactttatacaaaagaacgacacttacatcccaaattagacaaccatgttaaaaaatgctgtatgcaaatagctcattagaccatgatgaagagcaaaccaaacaaatacatattgttttaaaatcatttccatgtgtcatctgatgattcaacatgtcaataaggtcgaaacgtgaaatggagcaaactgattcttagacaacatccggaaacttaattattggtatgaagatcaaaatgtttctttggtttcgacgttataccattaatctttctgctaagtatctgacaacttgtgatacacgtcaagtatctcccaactgtgactaacttcttcttctttttttcttcttcataaaaacaactgattgttcttttgaggataaaagcatcaacgcctcattttacttacttacccgcaaattctaatctgcaaaaagataggaaatacatagtcatccatcctaatgtagttctaacttctatgtattaaagctttgtagagtttgatttgaatataattcacatgaaaattaacaaaaacatgtaaaacagtagtataaacaaaaccaaaataataacaaaaaacattaacgattaaacaaatcagataaagaccctcgctctctctacggtattaagcttgaagcattctttttaactattagtagtataatttaactcattattaactagagattaatgacagaatattgtaaaaccatcaattttgtttaaaatcattatttttttttaatctttagcctttccattatattgatcgacagatatggatattatagtacagttcttaaacgttaatcacagtaaaactggcagaaatttactgtattattacttcagttcgttgtagaacatgcctcaggaaaaaaaagcgcacataaatattgacccaaaacaaaagaaaagtaaaacgactttatatttctggagtgaattaaataaatagataaatacaggttgtgactttaaaaaaaaaaaaaaaaagttgagatgttgtcgctttaatctattcttccaatgcttccaaatccctcaaattgtcttttgtctcctttccttttcgtttttagggtttttttttcttagcacagctctctcttctcaatttccccaaatgaaataaattcctccgaaagtttatagatttcactctcccccgaactatacaaaattccctcaaaaggaaaaactaaaaagccgatcttggcttttttgtttctgagtgcatctcgatacttggaagcattctttggtgaggctgattcattctcatctgtgaaagtctttggcttttgaagcaatactatg

SEQ ID NO: 9409 - DNA, 3000 bp, Unknown
  misc_feature (1)..( 3000): cDNA_ID_3041798_gDNA_ID_1972118_Annot_ID_178853 3000 nt of promoter + ATG
atataagcacgagttcttccaaaaagagacaaaggagaataaatagtaggggaaaagaaacatttatcctctataaaaacagaaaccttttgtccttttatatctttaaccttcactcacaaaatcacaatcctcccttagtgttcttcttcttcaacatctttcttcctctacagaaggcaaaaaaaaaaaacgttttctttttctttcaagaaatcaagatcaaaagaattagggttttcgaatgggtaggtgtggaagaagcaacgacggagtaattggtggagtaagaccatacgtacgatctccggtgcctcgtctgagatggacgccggagcttcaccggagtttcgttcacgccgttgatttgctcggcggtcaatatagtcagtctatttaaccaatctcttttttttggtattttttttagatatctttaagttcggtttttgtagcttttacttgggcagttatataaaatcgcaatatataccaatattcattatcgccatagtccagtttttaaatgttttgtatttttgtgtttgaatgaaacagaagcaactccaaaacttgttctgaagataatggatgtcaagggactaaccatatcacacgtcaagagccatctccaggtcaaagaaaatgctaaaaaaatacttttttaatactatttattgtcttgtactgtttattcgtatacatcacactgctctttccacctttatcttttattaatttgaatatttttaaaacgttttttcattgttttgattatactgcagatgtataggggatccagaatcactcttcttggaaaaccaggtaatgagttctacatattttgttgtttatatgaggaggcatcaacgaattacactctcaaacgtcatagtttcaagattaggacatttcttttcatatacccaccattcacataaaatctgtaataatgcataaattgaaatctcactcccaccattgtcagaaatattcaaataatgtaaagtatttattaaaacaaggatagagagattaacaaaaaaaaatgaaaaagaatttggttatagacttataggtaaataagtgcttcttttaatttattgccaaaaacaaaaatactcctaccaaagagtgaagagaatattcatcatggtcataaattaattaatgtttttataatatattttttgggggacagaagagagttcttcaccatcttcaagaagaagaagaagacaagacaatgaagaagatcatcttcatgacaacttgtctgtacacgcaaggaatgattgtcttttgggttttcactcttttaactttaggtaaaaaaaaaaattatttccttggcaaaaaacggaaagggaatattaatttgtttctgacaagtgttttaattttattccagaaaataggtatgttatcatacagttttgtttgaatatgaattgtcgaatttaaagattttttttttttttttgggggagaagagagcagacttcagcgactgataatgatgacgatgactttcttaacatcatgaacatggagagaacgaagacatttgcaggcaatggcgagtccatcaaatttcagtctcatcactctctcgaggtattaaatatattcaattttatcatatggtttcataaatagccgttgcgaaaagttgatatcaataataaaaatatttaagactcagataaacactcactaaaccactgaacattgttatggtatgggtcaacactagggtagcatggggctcggtactgaaaattttcagatagagattttattgtcacaataaattcttaagtagtaagcactaatataattcattagtaaaataatttataatttggataaacaactaacccattgtatgggtaaaagagttgataaaatcattagtaaaataaaatcaccacctatatttgaaggagtacataattgttttgattaggttaattcattgattttagatatactataatctatagacaattagaattgttgaatccgttgattaatgtagaagaattagtagatttattacaaatactaatcttatgttctcacggacattctcaaatttatatattgaccaagaagagtataacctatagtctctaatttataagagcttattatgtctttggaatttaggctgagaacacgaagaacatttggaaaaacacatggcgagaaaacgaacacgaagaagaagaagagttatcgctgtctctgtcgttgaatcatcctcataaccatcaacaaagatggaaaagcaatgcttcatcatcactcagtgaaacaagcgaagcagtctcatcttcttctggtccattcatcttcagagattgttttgcttcttcgaagattgatcttaatcttaatctctccttttctctactccatagctgaagctttgttcagctttgttcctttgttctaaattttagcgtagtgaacatttagattgtttttaaaccaccttaaaagttcctaatcttttagttaggcctcttgatttgtgattgtgatgtttttttttttggctgtctacaatgtcacaattacatcggatttattaacaagactgaaaggttcaaaccatttgagcaaaaaagtaattcgactagttatgaactttattatttatgttggccttcttatgtaatcagatgttatgatatgttagagggagattagtacttgttggatgagaaattaatgttttatgcggagattagtctgtgctttaatatgaagtggaaaggaaaaggataccttcaaacgcagcgttttgatcctccttacacgcagcgttttgatcctccttacacgcagcgttttgtagtgggtgtataatttatggaacacattaaatttgtaaccgtttatgtttgcaaaaattgatgattaataatagaaattaaaattattgggcaaaatcctaacgttgatcgtaagtgacgatggtcggtggtgatg

SEQ ID NO: 9410 - DNA, 3000 bp, Unknown
  misc_feature (1)..( 3000): cDNA_ID_3041795_gDNA_ID_1972118_Annot_ID_178858 3000 nt of promoter + ATG
agtgttaatactttttcttacaatacatatatgatgaggtgtataaatacaaactatatgtcaatgagaaatgaattgatattgaccaatgtgtaaaacaaaaatggaacaaatgtaaactaggttttgaaatttgagtggggttaggtaatgggggactgaataatggctaaaggcgatgaaactatcatcatgatgtctttgttctaatgctgctcatgcatgttactcatggaagagagagaaagtggtactgtggtagatgcatgatatatcacttgattaattagtcgtgttatgtatataagtatattagtacaacaaatatatgaatttttgtttattttgtggtttgtatatctactacatgaatcataaattttcaatcatatatatgaatatgatgggtttaatatgcgtaacctacttatcgccaattgcaatattgtccttccacttagaattagctgatagtgaatatatatatatatacacttgaaaaacatgattaggacaaaaacgggtttagttgtttaactatcataaaacgtaaaaacaaatgtcgtttaaacctatcagtgctatatataatgatttatagttacaatttagataagtgaaatgcgaaactatgtaatcctatattcaaccatattctgcttaaaatacaaaattctacatagaatctatgtaatctgtattgatgtgaaacgtttaacataaatacaacgacgagatgcaccggtttggtaagatgggttatcaaagtcatgcatgttgacaaaataaatgaattcagagatacacataagagaggatttcaaatttgcagctttatctctgtatgtattattcttcaaagcaaaatttgctttctgatttggtgaacaacctgttcttctattattaggtacttttttccttagacttatatactttcatttcttctccatcgtggggtcatgtcatatcctgtcacgtttactccatcattacttaccttttatttcaatttttgttatttctaaggacgagataatatagcacaacgcaagcataattactaaacacgacttaaaacttgataagaaatttagagattatcattacttacctaagattcttgaagttaattggatcgaacaagtacacagtatgacttacttagcatttgttgacaacaaaaagagaaaataactttgcgtttgtattaatgggacaaaaaaatagattacttgtcaccgagtaagaatgctttttctcgattgtaatgcatatagccggcatacggattttcagtggggtcgagtgtaggcatgccggagggacccatttggaaatttagaaagattgcaaccgtatcatctgtgggtctcttctttaaattcgagtttgaatggtcccaaatatatatattggtcaaattttatgattgcaaatttgcatttacttggttttcttgacggttgtccctagaattgagaaataatgagttgatatttaatattttggaaaataattacacacgtatcggagttgtgatttagatataatatccaaaagtttcgcaagttttatggatcaaataacaacttttgtattcgatcatgtagtaagtttttttttgtttgttaatagtttccaactatatgtttattcaacaagactaccaattgtaagctaaccacattggtcatcatcgaactacttgtctcaaatttttaatgaaacgttatagatgttagttggtatttagaaatagttgattttgtaaaaccataaattatttattttcatacgtagcattgaaaacgttaccaatacgatatccaatatttagtatgtataattttcaaaatttcaaaccatatgactgatccatgatcgaatcctctttatatttttttcatgggtccgagtagatttttaatatctcatgttggagaatcctgagattattttaaacaagaaccatttacgacaaaaaacagaaccatttagtgggggtagattttaggtaagattttataataccatcaaccaaaagaattatgacggataaacaaactgctatcacttaattgaatcctcttgttaattatatatatagacagattaggagaattatgttattaccaaagctgtgctatatttgtctttgcatgtgttgttcattggacggttcacgatcgccgatcggtaatcatggtgaatcaaacggtgatgattgaagcacaggtttggcctcggtcggagattttgtctcttgctattatttggacccattgcttcttctttgtttttgctttattaataatctattcggaccacacacacaaaaaaaaagtcaagtccacacaacatactttaaccaaaaacacagatgcttcgatttaaaaagaatcgataagagagtgttgtcacggaccattcttctgcatagtccgagacatgtcgcgttgttttcccaagactttacgtagattgataagtttatggttcagtaaagtgtatgtattaagtgataaactaaagttttatgttttgatgtatgagtcgaaataatgttacaatttcttcatcagattcagctatgtaactttgcccaaaaataaaataaaaaaattcagctatgtataacacagattttataccagtatcttaaatatttattttccgatgaaatatatgtgtagttaattttcttaaaggtaatctaaatatctattactttttttgtcaacaccgtaattacatgaacgaaccaaattttcatctatccgaatgcatagcaaaccggattctggtttggttatgtaatccaattttaattagatcaaaccggattctggttatgtaaaccaataatttttcgattccgtcgaaattgttttacctgaaaggggatttggaaaaaccctctcactctcaggctcaagcgccggcgttcactctctaaccaaactcgatttcgtttctgggttgtgagattgagaaatg

SEQ ID NO: 9411 - DNA, 3000 bp, Unknown; identical to SEQ ID NO: 5537
  misc_feature (1)..( 3000): cDNA_ID_3077649_gDNA_ID_1972118_Annot_ID_178862 3000 nt of promoter + ATG

SEQ ID NO: 9412 - DNA, 3000 bp, Unknown; identical to SEQ ID NO: 5538
  misc_feature (1)..( 3000): cDNA_ID_2025342_gDNA_ID_1972118_Annot_ID_178863 3000 nt of promoter + ATG

SEQ ID NO: 9413 - DNA, 3000 bp, Unknown
  misc_feature (1)..( 3000): cDNA_ID_2182405_gDNA_ID_1972118_Annot_ID_178861 3000 nt of promoter + ATG
gcaggtgagacctacttctttattattatcacccatatttttttgaggcatatttattatttaatactattaacatataaatgatcaatacattagtgctgttttaatataaatagtaagttaattgaataatctttgtgaataattttcttatatttaaacagacgaatctccaaattcttccatcaatatatgttctgaagaaaaatcctcaatttcgtcgagaaactctttcgaaccatcctcgtccacgtcaagtaagcatattgtattttcttccgaagtagtgaattatatgggactttttcgtttttgtttatgcgtaattgtccacagtagctataattaaacaaatcaatcatgaaatttcacttttattcatttgcgttttgcgtttataaaatatttaatattaataaaattatgtgtttctaatcacatgcaaagcattttaaacacaaagtccgatcccgaataaacactgacgtaacacttgtgcattacagaaaagaatgactatgacgagaagaagagggtggtgtatccatttggagtggtaaaaccaggtggtcgagaagaagatataactctaaatgacattaataagaggattttaatgccatcggctaggccggttcgacatccggttggagactttgcatgtcgtccgtgtgtctctgcagatggaccgggtctatcaggcaaagccgtggttgcattcacgaagatacaaacattagggaggggcacaattactattataagaactaagggatgatatatcatatatgtaattaatattggctattagaggggggtcgttataatatgtactggagatgtttcaaaaagactaatcattggttgacatgttcaaacctattgttgtatataatgagaaatggtgtatattagtatacatgcttttccattttcttagaaatcttccttctaattatttagaaacctcttaaaaaagaatcaagataatagatatcttagaaacttactaaacaaattttcttaagaaatcaagattttgtatgtattgacaaaaaaaaaaagttctcttctttttttcgtttgatatattatgttttttgcatgttcgtgctttttgttctttaccctttttcccctagccaacccttttgttctttagtaaaagaaaaattcagtagacaccaaataaataaacgaagcgtgaagaagaataaataacaaagaaattaaagcaaaagagaagaatatgctgaaaagcaagaacaaacaaaagagaaagagagagtatttataagtaccttatcaggaaattctcaaagatggttatatgattttaggcaacaagctttcttatctatatgttcgaaatacttaaatgattattaattattaccatatagtcaatattcttaatgtatcatatcgaaaaatctaaagtggattttacttttaaaatttgaattgaaagaataaacaagtctataattagtaattttaaaattaccaagcttctactacaatttttgaattataacaagtacaatgaatcattttgtttcagcaaatttaaatttcgaattagaacaagtattgtctccaaattttattttatactaaaccaccaatgtataattagtttaaattaaatgaaactaaaatataatataatacctattttgtaagatcaatgtcattatgggcccgatggtaagcccaggtcgatttgcacacagtcaaatacatgacgtcatataacatatatgacgtttgtcagcattttctggtccgggacaaaagatcagcaatcactcgtactgtagtcagtactagtaatgtaatgctcaagtgtttagcatgtgggaaaaataaaacacattttcaggtggttagtgacgtggattggttaataattaacaatcgctagtgctctcttttttaaagatttcttgaaattaaatggaacaccttttttgtcaatcaaatggaacacctaactactaatttaccggtcctttccattatttttcatctccaaacgaccaagatcaacgtagcttttgaccttagtgggttgggtccatgttggtagaccatggttaaaaacttaaaattaagtaattaacaaagctgaataaacaacaatattttgaatttttttctttcctcattttttaaaatattgtttttgggggtgagaatagagtgtttttttctttaattaaatagatgaaatacaaaatcaaacatgtaaaactccataatattatgtaactttgacttgtaaataacatccaaatttgataaaacctaatttaaaatcaagtatttatcaaatttcagttcaagataaaatattgaattaacaccagatttaagccaacaattcaaaattttaacctaaaaacttacataatctttttttttccaaataaatttagattaaatatagtatgaatttaggatttttaaaaaaatattatgctattataataaaatatatctttctaatttatattcatgcatttgattccttatctgtatcaaccatatacaatcaaatataagtctctgttgttaacagaaaaaagaaaaagaaatgatttttttataaattaatataatgatgcagatcgttgacgaatcgaaaatagtcggtttaggcgtctagcaacttatatggaacaactttttaagcccaagtgaaaaagcccaataacaaacttgaatacagagtatatatatattctagggtgcggtttcttccctcgaagatcgatttccattgaatccgtcttgtacgcttttagatcacgatttgctccgtccctctcttcttctccacgtcacggcgattctcgcggcggtgctattccttatcggttgagatacggtatgtttcttaggtcaattatgctcaattttgattttcccaatgtcatcagaatctgatgctaatgtgttttttttttttgctcgctgcagaaaatgttcaattcg

SEQ ID NO: 9414 - DNA, 3000 bp, Unknown
  misc_feature (1)..( 3000): cDNA_ID_2182394_gDNA_ID_1972118_Annot_ID_178857 3000 nt of promoter + ATG
aggtaagattttataataccatcaaccaaaagaattatgacggataaacaaactgctatcacttaattgaatcctcttgttaattatatatatagacagattaggagaattatgttattaccaaagctgtgctatatttgtctttgcatgtgttgttcattggacggttcacgatcgccgatcggtaatcatggtgaatcaaacggtgatgattgaagcacaggtttggcctcggtcggagattttgtctcttgctattatttggacccattgcttcttctttgtttttgctttattaataatctattcggaccacacacacaaaaaaaaagtcaagtccacacaacatactttaaccaaaaacacagatgcttcgatttaaaaagaatcgataagagagtgttgtcacggaccattcttctgcatagtccgagacatgtcgcgttgttttcccaagactttacgtagattgataagtttatggttcagtaaagtgtatgtattaagtgataaactaaagttttatgttttgatgtatgagtcgaaataatgttacaatttcttcatcagattcagctatgtaactttgcccaaaaataaaataaaaaaattcagctatgtataacacagattttataccagtatcttaaatatttattttccgatgaaatatatgtgtagttaattttcttaaaggtaatctaaatatctattactttttttgtcaacaccgtaattacatgaacgaaccaaattttcatctatccgaatgcatagcaaaccggattctggtttggttatgtaatccaattttaattagatcaaaccggattctggttatgtaaaccaataatttttcgattccgtcgaaattgttttacctgaaaggggatttggaaaaaccctctcactctcaggctcaagcgccggcgttcactctctaaccaaactcgatttcgtttctgggttgtgagattgagaaatgccgagatcatctttgcggctactagctaagcctctcttggagagcaggcgagggttttgcacgagctctgataagatcgtagcttcggtgcttttcgagagattgcgcgttgtgatacccaaaccggatcctgccgtttacgctttccaggagttcaagtaagctctctcatcgctttgcttgtgttctgttttttctttggttgaggaatggtgagattttgagagaaaatggggggaaaagtatagttgtgtgattcaaagactgcttttttatgttgcggaatgaataagatttgagtcattgagcaccgaaattttgattttactctctggttcattttgattttgatcacgttttggtcttgattttgttgctctatggcagattcaattggcaacagcagtttcgtcgtagatatcccgatgagttcttagacattgctaagaacaggtaaaagtttctgtttttctcaatcttcttttgatatcatcatgtgtccaagcatataatctgctcgaaggtttcttctgcattcaactttgtgtcatccttgttagttattatgacaatagcaaagaatgttagattgggagtttttccgagtagctccgtgagttattgttgctcaattcttcagcagaattaccttgcctgaagtgaactatattagaagtgttacatgctcatagatatatagtgaaggttctgtataggtcagtttcatttttctccaagtgcggtgaagcttctatgaaaatttcatttcgtctttggttaatcttatgatacgtgaatacagagccaagggtgaataccaaatggactatgtacctgctcctagaattacagaggctgacaagaataacgataggaagtaagttgttggcacctcttaaagcttcctggcctgttgtatttctcttcggttgatgattgatagttacttttgggaaaatgctgctattataggtcattatatagagccctagacaaaaagttgtatcttctcatattcggcaagccatttggagctactagtgacaaacctgtttggcacttcccagagaaagtctatgattctgagccaactcttcgcaaggtgtttgtttgatttgatgcctctatttcaacacacaagaccataaaatttcattcatgtgcttattgttaatatgtaaattcggtatttgcagtgcgcggaatctgctttgaagtcagtcgtaggagacctcactcacacatactttgttggaaatgctccaatggctcacatggccatacaacctacagaagaaatgcctgatttgccatcttacaaggcaagaacgaacgttaacggggttttactagtattagtaatttcagaagctcaagatttctaaactgaattttgttgttgtgtagaggttcttcttcaaatgcagtgtagtagcagcatcgaaatacgacataagcaactgcgaggattttgtgtgggtaaccaaagacgagctcttggaattcttccctgagcaagctgaattcttcaacaagatgatcattagctgagccactcacaccacaaaaactcctattttcatcccttcttctccatcaatgtcatctctctggtattagacagtgtgagaaggtcaatgtaataaccaaacaaaaccatgtctctggttgtgacgtgaaggaaatttttgttgacagttgatctgaagtacgtagttgaatgtagttgtggcttctttctcaacctttttttatacatctctccgatagatattatattacgtatcttgataagaaatcacacactcgttgattcgagaacagcttgaaatatatattgagtattgaccgtcgtaattccaagcccactgggcttaaaacgaaatacccaacttgtaacccaaatctctaattttttccggtttaatttctaatttttaaaattaaaaatgttttttgtatagtgttaaaaaaaaggagcatttcaattagccctagcaggttttttgtctatg

SEQ ID NO: 9415 - DNA, 3000 bp, Unknown
  misc_feature (1)..( 3000): cDNA_ID_3041810_gDNA_ID_1972118_Annot_ID_178849 3000 nt of promoter + ATG
ttcctgaatcttctccgataacttcgtcttatatacatcgccacagaaatttcggttcctgttcgtgaattagcggtagggtttcatttgtatctccgcaacgaattttcctattgattggttcgtttggatctgagaggtattgatttcgatcgatctcaaaagggtagttgttcgtttgctcaatcgaacgagattgttattgttttctgctgtggaatagtatctggatctgtcagattaataggctagtttttacgattgagctatcggaaatgatttgatcttcatgtgtggttgatcatcgaagagtgtttcattgagactgttaatgaatattgctgtaagagaggaggaggagaatctgcttttaagcttctcgtcgtactcgtttctgggatttctcaggttctcaagtttggatttcaataagaaatctgcgtccaccgtaaaccctagatttagatgggataaggtgttctttcagataaaaggtgagaactttccgaatttaacttagttgaactgagatgggttcgtcacaaggctccacactctcggctgatgtgatgagccttgtggatacattgcctgtgcttgcaaaaacccttatcgctggaggagctgctggggcaattgctaagactgctgttgcacctttggaaaggatcaaaattctattgcaggtgattctccttggtcttgagcttattatgtttcaatggctctgactatatctaagttgtattcagattgcatctgttatgctgaaaattgggatattgatttggtgtttggtaggattttgaccatctattgatttgatactgtgctttcaataccagactagaacaaacgactttaagacccttggtgtgtcccagtcattaaagaaggtgttacaatttgatggtcctctcggattctataagtaagtatctagtggtttgactcttattttgcagcttagctctaccactttactaaattcttgtgatgtgcataactctcgcagaggaaatggggcgagtgttattcggattattccatatgccgcccttcattacatgacgtatgaagtttatcgtgactggattttggaaaaaaatcttcccttaggttctggtccaattgttgatcttgtggctggttcagctgcaggtggaacagcagttttgtgcacatatccccttgatttagctcgtactaagctagcttaccaggttggtgattttgaataccttgctctgatagaattttattgttgcttacttaactgacaaatgagcaatatctttttgtttctcctcttatgtgttgttatttgcattttaggtttctgacacaagacagagtctccgaggtggtgcgaatggattttaccgtcaacctacttattcaggcataaaagaggtgcttgcaatggcttataaagaagggggaccacgcgggctatatcgtggcataggtaaagctcataaaatttgcttgcattaatgttaaaagtgtatatcaaatcaatgtaggaagtctattcatcttagctataataaacggttggcatcaaagtaatatcaatcctataaagaatttcttagtctaatcttggttgatttagtttagttacaaattatcttaaactcttatctctgtgtgtgcacttttcctaatttggatttgaagatgattaacaaaggttggagctttcctgtgtctctgcagggccaacgctgatcgggatccttccttacgcggggcttaagttctacatatatgaggaattgaaaaggcatgttcctgaagagcatcaaaactctgttcgaatgcatctaccatgtggagctttagctggtttatttggccagaccatcacttacccattggacgttgttaggagacaaatgcaggtaaaaaaacaaacaaaccagaaacaagattcaaactatgcaccatttcagaactcagaacatattgggcgtttcgtgtgaccacaggtagagaatctgcaacctatgacgagtgaaggcaacaacaagcgttacaagaacacatttgatgggcttaacacgattgttcgaactcagggttggaaacagttgtttgctggtttaagcatcaactacattaaggtaaatcagatgaagaaacaatgaatccaatatctcagtctcggtttcacttttttcctctatgattcgtttaattgtctttatttgctagattgttccatcggttgcgattggattcacagtctatgagtcgatgaagtcatggatgcgaattccaccgcgcgagagatcaaagccagcatgagggtctttgttccttcactctcttatagaagacacagaagacagaagaaaacatgattgttagacagatttttttttccctacttcttttcattttcaaggccaatttgcccctaaaaatccttgatagtgataatattcttttgagaaattatgctaaaatttataaatctgtgatcaaatccaagcgaaagataaagttgatatctgttgttgtgcagcaaggatttggaaaatttccaattgacaattaagaaaaagtttcttagaataactcgaacttaaattgtagtattggagatttattaagtttgtaacaactttaatgatggacaatttcacatgcgtatgtgtaattgaaatgtcataaacaaccccacttcgtaacacgacctagggttataatcgtctttttgtgaacaaatccgaccgagagagagagagagatatatttttggcagtaagatcaaattttggcattggtaagttgttgttccttcttctcctcccgcaggattcgactcttcagttccttatttaatcatctcatcttctgggcaagtcctcttgttccttgctaaaatttctgggcttttttccctttgtttttcttcttagatcactctgataatttttcgttttttatttctcagaaattcgaggtttttatagggttgtggtcttagca

SEQ ID NO: 9416 - DNA, 3000 bp, Unknown
  misc_feature (1)..( 3000): cDNA_ID_2105933_gDNA_ID_1972118_Annot_ID_178842 3000 nt of promoter + ATG
tttcttgtagattctgcaacatatcttacttgatattccaagtcttgctttcttcactacatatgcgcttctggttctcttttgggcagagatttactaccaggtaaaccttgattctgtatatattttcaatttagtttttcctgcattgttgttgatatttactctatcttggcaggcacgtgctgtatcgactgatggactgaggccaagtttcttcacaattaatgcagttgtatacgtaattcaggtgaaactaactacctatttggcctttgtaatatctgagaaattttcaaagtttagagttaaccttgaacttggtggacctgtgggcctgagcttcttattgaatttccttacgatccatttgtgttgtgggttccttagctttaatctttcatttgaatgtattaatttcagattgctctttggttggttttgtggtggaagcctgttcaccttatggtaatcatttctaagatgttctttgcaggtatagtttgaagtatagatcattttacacagagattgatttttttaatgcactctatgtctcatctcttgtgaatgtatattgcaggtgtctcattgtttgcggcccttggctttttattatatggaggaaggtaagtatgttgcacttgcatatgctacacgatgatggtagcttagtttaaacgcttgttacctgctgccacatgttttcctgccacaaatgagttgatgatatcatttggaaaactaggattcctgccctccactggttgctagctagacaagatcctttttgtaccatatcaggatttatcatatatcatttctgttatgaaggaagtttctcatgaagtcgccttgatttatcgtctttgatgattatttctttgcaggcttttcctgatgctgcaacgatttccagtagagtctaaagggcggcgcaagaagctacaagaggtgaaccttgaatattaaaccaaagttaccccgatctttaaattccgtttcttggatccttaccccctttatgtgttgtacgaattgcaggttggctacgtgacaaccatatgctttacatgtttcctcatcagatgtatcatggtaaagatatacacatcatactattgataccattagaccatatcttgttgattgaattctctgtgttggtggatctccgaaaccacagctaaccagatctttcatatcatcttctgttaatggtctagatgtgctttgatgcgtttgacgatgcagcagatcttgatgtcttagatcatccaatcctaaacttcatatattacttggtaagctttccattcacctcttcagctaccatatatgtgcatgtgtatatagacacactatgtgaatcttagaatctaaatatgaagcttcttttaaaaatctctaaacaaaaagtgtgttctgtttacttacagttggtggagatattgccatcgtctctggtcctctttatcctaagaaagcttccgccaaaacgcggtatcacacagtaccatcaaatccaatgaacatgttcagagaatcgaaacactgaggtaacctttactggatgatactataacagagaaaaacataagaaacagctgaaaaaggggtcaaaagataaactgtctttctttttttttggttaaaaccggaagttaatattgtgtaggtaccggtaaaccgaggggttcatgtttctttcatagacaaaagtgtaaattgtaaggggtttcagaacaatggattgtgatttctctctaactaattcaatgcggttgattagtataagtctctcttgtttatactgattcaaagtagtttggtgtgagaatgatagaatcatagttactgagatatccagcttctggttctgacttctgagacggaagaacaattggtattttgatgatatattatggacattggcttgttgtcagttcatacgaagtagttttttaagaaatgcaaatagtcatttgttgactggttggtcttttctctaccggtcttttccacttggttaattgaaagttaggtgatatctgcacgtactaatttcggttattattaattaattacaatcggtattttatgatttttcttcattttgtctgccatgagaatttatgtaaacaaaattttgttcaattctaaatgaagtctgcttaatcgttaaagagagaaaactctaaaagagagctgatacaatacaatacatgtctattagatgaattttgttgtaatatgaatttaaattagagacaacagaaaccgtgaatctcgacttaaaattgtgggattgtttgtttggtcacggaattgtaagaaaatacaaatgtggaagacgtcttcctcttttaatttttttgtcgtctatactctacaacactcagagacaccatcggatcatagaaaacaaaattgtcatttatgaagccacgtcatgtagatcccactataaaagtgacgtgatttcttcttcttcttctcttttgtgtgatctttctacggctaatagtcttcacacgtgtaaaataatcagcagatatttattattactcaacatagaagtggttttgaagtcggactgttgtgaaatagaataacaaattcaaaatttgtagttaataattagtggattaaaaaagtctgacgcgtacgcaaatatcatattttaaaaagattaatgacgcgccaagtcgttatctaactcatctaaacggttacagctgtttcttagcctttctgttttctctgcatgaaccctattccaataaaaaaggtgagatttttttgcatattttgccatagaaggacactttgagagtccttctgatgaaaatatggccaaggactcacttcttcctttattcccacttcagggctcgcttttcacctatttaaaccatcattttcctttctccattttgccgtcatcacccaacaacaaaaccctagttttggtttctctggatctgaagaatctccatg

SEQ ID NO: 9417 - DNA, 3000 bp, Unknown
  misc_feature (1)..( 3000): cDNA_ID_3041814_gDNA_ID_1972118_Annot_ID_178848 3000 nt of promoter + ATG
taatagggacattgcaagtcctctagttactaaataatcactctttttatttttcacaatatatagctcaattccaattttatttgctaaaaaataccacatcgataaaaatttgtccaccaaccaaattcataacgtgtttcaaacgaatcattcactcgttctgagaccaatatatataattagctactaaattaaattaaaaactattttttgtttggttaatgtgttatattttgactttctaattatatgttcgtcaactattcctttcaaactaatcgcacaaaataattgttcgttatattcttcagatccgaacttcaacctgtattattataagaataaactatttaagcgcttactaatgatgttcttgtttttcttctcaaacttttaggttatctgtttttataagttaacaatttgacaattgaccaaaatacaaagtcagagcccaacaattaatttattttaatccaaatattctctagctaacatatgatagatctaacatattttaaattacagtctccaaccttgaacagcgacaccgcgtgaaaactctcatgcacgtatattatataaacccctagggtttgtaacattcaacatcaatctcaaataattcatcaacgagaaaagattaattcttactaccaaaagaaagaagataaattactattttgttttacgtacgaaatatataccaagtgagatctacaaatatggagagattttcactaaggtttgtgctaatgatggtgagcatcatcctcacgtcatcgatttgtcaagcacaactttctccaacattctacgatcaatcgtgtcggaatgctctttcgaagatcagatcctccgttagaacggccatcgctcgtgagagaagaatggccgcgtctctaatccgcatgcacttccatgactgttttgttcatgtaagtttttattcttctaaatactaattccacatttttaaaaaaccttacccaatcatttaataatagttttgtgtatgtttaggggtgtgacgcgtcgatattgctcgagggaacatcaacgatagagagtgaacgagatgcattgccaaacttcaaatcagtaagaggttttgaagtcatagataaagccaaatccgaagtcgagaaagtttgtcccggcattgtttcttgcgctgatatcatagcggttgcggcaagagacgcttctgaatacgtatgtttgtgattatatatgaatatacccaatatcctttatatatataaaccatgcatatgtataacaactctccaaccaatacttaggtgggaggtccaaaatgggcagtgaaagtcggaagacgagattcgacagctgcgttcaaggctctagcaaatagtggtgaactcccgggatttaaagatacccttgatcaactctcaggtcttttcagcaagaaaggtcttaacacaagagaccttgttgctctttcaggtaggtccaagaatcatatttgtatatacattaagttttttttttgatgactccttaaatgtgtgaatagctatgctaattgcatcactagtaataacaatgtactagacaaatttataatttctaatttatattctttgtcacgataactattcaggagcacacaccataggacaatctcaatgcttcttgttccgggacaggctttacgagaactcaagcgacatcgacgcaggatttgccagcacacgcaaacgtcgatgcccaaccgtgggaggtgatggtaatctggcagcattggatctagtaacacctaattctttcgacaacaattactacaaaaacttaatgcaaaagaaaggactattagtaaccgatcaagttttgttcgggtccggtgcatcaactgacggcattgtgtcggaatatagcaagaaccggtcaaaattcgcggcagatttcgcaacagccatgatcaagatgggtaatatagaacctctcactggctctaatggagaaatcagaaagatatgcagctttgttaattaatacatgcatgcgataatgcattttatattgtttgttaaatttattcgttgatctctttgttgtaatgttttgtgattcttactaccaaattgtgtattatttgtttttaatatttgaataaatgccaattagttttatgattatatagtcatattttttgataattcaatccaagttacaattgctggttcaatgtggtttgggctaaaccaaccaccgaatctgtatggttttatttttagagttccaccatatattgggtgcaccatgccacatggaattcttacctaaaaaggtatctctgtttcttcaagcctgtgaaaatgcgcgaccaatgagtaaacagagcatgtgaccgaattttcgaatcgagaaaaccatcgtcttccttatttctacgtattttacggcgagcctctagtcgctcatcgtcagccccataaatttcctgaatcttctccgataacttcgtcttatatacatcgccacagaaatttcggttcctgttcgtgaattagcggtagggtttcatttgtatctccgcaacgaattttcctattgattggttcgtttggatctgagaggtattgatttcgatcgatctcaaaagggtagttgttcgtttgctcaatcgaacgagattgttattgttttctgctgtggaatagtatctggatctgtcagattaataggctagtttttacgattgagctatcggaaatgatttgatcttcatgtgtggttgatcatcgaagagtgtttcattgagactgttaatgaatattgctgtaagagaggaggaggagaatctgcttttaagcttctcgtcgtactcgtttctgggatttctcaggttctcaagtttggatttcaataagaaatctgcgtccaccgtaaaccctagatttagatgggataaggtgttctttcagataaaaggtgagaactttccgaatttaacttagttgaactgag

SEQ ID NO: 9418 - DNA, 3000 bp, Unknown
  misc_feature (1)..( 3000): cDNA_ID_2182365_gDNA_ID_1972118_Annot_ID_178847 3000 nt of promoter + ATG
aatcttaatttgtacattatagatattcgttttcaacaaaagagtgtttgttcggggtatttgattatttcgctttctattttcaactcttgcaattacttgacatttgcattaacgaaaaaactgaaataataaagtatccgaatttggtttagattttgttgaagctggcctacgttgaccaaaccataacttaataattaaaaccgttacgcttacgcggaattttgaaaattgacttttgacttttataaaatagtcagaaagaatctttcgtaaggataatgtgatgtaacattgtccataccgtaaccactagccacaagtgcttcttaacttgttcgttgctttcctatttaggtaagcttcttagtttgtttcagtaaataattaaaaaaattaagttccatttacatttacacctttgaatccttttattttttcaattccattccattttcttaaattctcatcaggatctttcagatgaaaacgatatagaacaaatatctaaaatatcattatgttatgattatatcttgatttctgtttgactattgttttacccatctcccaaaaaaatgcatatattaattcaaatgtttactgaatctcgcggacaactaatcaataggctcaaagacgacaacgtcgacaagcaccatttgatttacaaataaagttcgttttgtaagctttgtatcaatatctatatttgatacgagggagtgaattttattctctgcaaaatatatgtatatttctttttttttgttaaagaaaatatatgtatatgtcttacgtactaagagttatcatgaaggtattttaatttcagcccaacttaagtttgaatgtgtggatatatagcaatacaaataattattgacaagtaaaattaacctcagacgacggtaaaaacaaaaaaacaaaaaagataaaaaggaaccaatttgcctgaagttcatgttgatgatatcgtttttttctcagtgcgtagtagtgagttttcttcattttttctaaagaattatataaacgaatatattaatatttcaatttgaccggtaatcttaatcaatatataaacacacgtcatttggtgtgaatttctaatggaggacagcttttagtctaattagatcatgtaagacagttccatacatgcactgatctagtaacatattcgaacatagttgaattgaccttttcatcaaaggaaaatgaaacttactaaacacatatatatactcacccatatgggcagacgacctagtttgaagaagagctagatgaaaatgacacccctaaaataggaaagtaaatatatataatttttttttgacaaaaatgtttgaaaacatatttggtttagtacgtacgaccccgttaagtattatggtttggacttcgaaatctccattatgttatgctttggtcacgatatcaaaaaaaaatattattattataataaatctaggcctgccatcatatggattaatagatattagccaattcatatgcatacatgtatatattatgtaccatgatactttttcttttttggttgatatgctactattatatttttttcgtagttgagcggtgtctacccataaacataactgtttcaaactatttgtaaattgtaatcataaaacttcgaaattctataggcgagatgttagaagattttgttaaatattatagaagaaattctcttagctaatttttcccttttttcgaactgtggaactatttgaatgctcatctagttgtatatatgctaaaagatgggggttttccaatcgttcgaacataaatacataatgaatcaccacgtactaaaatcaactaaggaaacaaatgaaattacaggtatttttgtgcgtaaatcatttaagagatgaatgattcgaatttcgattcttagggaaaaacacaactactaccgtactacgtatgagatgcaaaacactacaaaaaaggttaaacacgactacgcacaataatgactgtccatagcgatatgccgatacatcgaaattcctaacaaatttatcattattataaatcaaactactgacgaatcaaatttgaggagtggattaataaataacttttaatgttatcggtgttagcccgcaaagactggattatgcgattttttttttaaaggaaagaaaagcgacagtacatagctagcttcatatatgatcgccattgaccatgcattgttttctttcatatatatctctaagaattgtcatcgtaatagggacattgcaagtcctctagttactaaataatcactctttttatttttcacaatatatagctcaattccaattttatttgctaaaaaataccacatcgataaaaatttgtccaccaaccaaattcataacgtgtttcaaacgaatcattcactcgttctgagaccaatatatataattagctactaaattaaattaaaaactattttttgtttggttaatgtgttatattttgactttctaattatatgttcgtcaactattcctttcaaactaatcgcacaaaataattgttcgttatattcttcagatccgaacttcaacctgtattattataagaataaactatttaagcgcttactaatgatgttcttgtttttcttctcaaacttttaggttatctgtttttataagttaacaatttgacaattgaccaaaatacaaagtcagagcccaacaattaatttattttaatccaaatattctctagctaacatatgatagatctaacatattttaaattacagtctccaaccttgaacagcgacaccgcgtgaaaactctcatgcacgtatattatataaacccctagggtttgtaacattcaacatcaatctcaaataattcatcaacgagaaaagattaattcttactaccaaaagaaagaagataaattactattttgttttacgtacgaaatatataccaagtgagatctacaaat

SEQ ID NO: 9419 - DNA, 3000 bp, Unknown
  misc_feature (1)..( 3000): cDNA_ID_2182439_gDNA_ID_1972119_Annot_ID_178875 3000 nt of promoter + ATG
atcacacataattctctaaaatcctgaacaaaaaaatgttttcaaacgtcaaaagttgtttattaattcatatagttttttttttcttgtttttgttgtttcatcatctgcaagatttagtacggagattacaaaaagtgaaatcaacagtatctgcacacatacagaagccaataccaatgcttcattgtgctttgagttcctgaactcatcccctgaaattgcatcactggatttctatggccttaccaaatatatacttacttataattctcgaaaaacttcagatatgctgaaacaattccaggcactcgtaagaagcacaacggatcccaacgctaaaggttcctaccatgtatgtgcagaaatgttcgacaaagctactgattgttttgatgacgccttcacaactttggcatccaaggactatatcactttagaacaaagggttgtttgtacgtttgacatgggggatgggtgtaaagaagagctgttaactttcactcctagcccacaactcttcaaagatgtttctattgtcaaaaatctttcttctatggttttggtgattctagattattatctgaaaaaataaataaaagttattttagttttggtatagtgtgttttaattatataattagaatgactatatattaccattggagaatatctatggttttggttatatatttttacagccgttagatcttcaaaccgatcaatctaacggttcttaacaatatccaattctcataagaaaagagtacaaaaataaaaagagtcgctgtcactataccgtaccgtacagagtcaattgaagaaaccgagagagagagtgagcggaatcatgacttctccgggaaaatctccgagatccgaccggaaatcaccgacggttgtcaccgtccagccgtcttctcccagattcccgatcagcacacctactgctggagctcaacgtaagatcgggatcgctgtcgatctaagcgacgagagtgcgtacgcagttcaatgggctgttcagaactatctccgatcaggtgacgccgttgttctccttcatgttcaaccgacgagtgtactttacggcgccgattggggcgctatggatttgtcgccgcagtgggatccaaataacgaagagtcgcagaggaagcttgaggacgatttcgacattgtcactaataagaaagcgagcgacgttgctcagcctttggttgaggcggatattccgtttaagatccatatcgtcaaggatcacgatatgaaggagaggctttgtttggaggtggagaggttagggctaagtactttgattatgggtagtagaggatttggtgctacgaagaggagtagtaaagggagattagggagtgtcagtgattactcagttcaccattgtgcttgtccggtggttgttgttagatttcctgatgataaggatggagaagatgagaaatccggcgacagtggtggggagaatctgatggacagtgataaacttcatacagtgcctgaggtggctgaagaagagggagataaggatgagtaccatgatgcttcggataagcagtagcagcaaggttgactttgaatgcatgtcagtttcaatttacttaggaatattatatacaatcagtaatactctgctcggatcaagctttgacctttagaatgattggatattaggaagatccactaagatgctattttattcctgatgcttgaggtgtgtatgtttgaacatttgcgcatatcattgctttagttgtattcagtaatctcttgatgttaatgaccaataacttacatatgcatctattgatatgctagagatttgctgtttgtgagtacttttttttgtctcagtgatgtctggatatgtcaagttatttcttcaaaagttggatcaatcaatgatgtcttatctgtgatcactgatcttgtgcaggctttcatgttgcagaaggagacctccctaaggagacttagaaagaaaagaaagcgttcctttgcccttggtttgtgttcttgagtgtgcttaattgtgttgtttttggggtttggggtattctagatctcttttgtaagtattctcttgtttcttggttttgttttaaactctatggaatttgggatgagtggattcgatgtcttttgtttgtctttgaaaaagcagtgaaaagaatttcagtggtcttgtatatctctgcagttgaatagttggtacaaaataacatctttgacggttccaaataatatatcttgtcagtaatgaccattaaataaactttaccatgaaatggctatgcttgcatctttcagaaccattacatttgtcttgtcctgtttctgacttttctcttgactgtgtggaagttcataagatcaatggtaccgatgtgtctttgtttgtatctttgggaaaaagactgataatggttccgaagtttcactgtttgtacagtctcaaataagttctattttgtctctctgcagtttagttttccccatagaaagcatctctgatggtttcaaatgtaggcatcattaacattttcaccacattgtccctattctcaagcagcgaactctcttcctatgatcaacgtccactatctattcccaactttgaagagttaagagacatttacctaaggaatcggtaaatccttgtttgcatttgtcgatttcatgagctcctgttgcctgttgttgcgcgacctggtttcaaaacggcttccaagttcgatttcaagtttgcaaaatgtgaagttgtctctgatagtgactccttgcatgcccctatctcacacatgctcgtaaggccccatcacactttccaattatttctgagcggaaaagtcaagtgtggtgcctctgccagtggcaattaaatgtaaccaccaaacattagatgacataaagttatttcaagtcttaggattaaatcaacccttaaagctctacgtttctctcaaagttgctgagaagatg

SEQ ID NO: 9420 - DNA, 3000 bp, Unknown
  misc_feature (1)..( 3000): cDNA_ID_3041880_gDNA_ID_1972119_Annot_ID_178883 3000 nt of promoter + ATG
caaggtcgttaagaagtgtattcctcttctttataatctaagaagactataggtatcaatttatagtaatacttgttatatagaaaattatgtgtttaaagcgtatgcaaacttatttgtataaagtttacaaatacctaatgaaaagaaaagttagcctcattatacaggggattacatggttagcttcatttcttctctacataacccgacttttatcaaccactaaccaaccatattaataatgatctcataaaaatctttaaatcaacttagaaagtgctcaccataggtttgtttttcttaacttaccaaggagccgacaaaattgtctcaaactcaaactccacatcttcaagctctacattgagatcttttgcacatgactccatctgacatatctttttccaggctgcatctttctgttctttttctgcttccttttgttcttttagagcagcttcttgcctctgcagctcgataatcttgtgtttcacctcaagaatcttttgttccatgtcatcaaactcttgtttagccttgctaaattcatttgtcatctccttgtcaaaaccttttagttcctccattatatatagttgtctatctttgagtgctaacagcttgtcgatccgtgataatggagttgtaacattgaagccatgtttctcgagctccgaaaatgaatctttaaggctatttagttggcttacaggaacgtcggcttcaagatctttaaatttctccagtaacccaaaataagtcaccatcatacctattgcatacccttcacggaaatcttgcttagtctcaaacaatgggctgaaatgaagactgtgtgatacacttttgaagacctccagtgattcataagtcttccagaccggtgacttctttgcaaaaggcaaaaccattattgtgtgttttgcatggttttcctcagcattagaagcagaattcttcaccacattgggggtccgatccgaggataacactggacagatgaacgcatacacaacacaatgagaaaataaaggcttatctaccagtaatagtacaatgagaccattgcaagcgggtcctacattccagaatgtgcaatgagagttaagacataccagtcttattgatgtatgaattgagctttagacctcctcttttcctctttcgagtataatatttgatcttaggctcctcaggcatctgtgcatagaagtgttaaaccaaaaggagagccatctcaaagataaataacaatcataaacaataccttctctcgagttgactcatttccaaagccattcttcattggcacaggggatacctttccttgggttttgttctttgttgcagttacccccagggttataggtaaaccagattcttttttctggaaaacaaagaccatagaacaatttcagggcgtagaaaacaaacaaggttataaaagaatccactagcagggttatgaccatataccacatcatcagccatctcatttcccggtggttcctttgtctgcacatttctgttgccgtctaaagaagtttctttctggcgttttggctgaaaatggaaataacataacaacacttcaattaatcctcaaagatgtcacactaattaaaccaaaccaacacaatgttgcctgcaactagtgatacaatttacctttgttcttttatgccaaactccatcttcccactccattggaggcctaatatcagagtgattaaattgcgatgcctcctttgttgccccgaaacttaccatgtaccttccctcaaagacaattcccctgaccacaccttgacgccattcaaaaccactaaacgcctctacatgatccagcaattcatactttccaacagataaaggaggctgcataggccttagtcttagggaatcaacaattaaatttttcgattcccggcagctataggacttattccagtacttgacaagaaacctcttgtccttctccaactccttaatgacaattaccggaatccaagcacaatcaaatctcaattccaccattgtcccgcaactaaaaacagacttgaccaattccttcaaagacaaaaaacaaacatacaacaacggataaagttaacaactttttcatgcaaaggcgaaacgatttcaaaaaaaactcatcataccttattatcaggtcggatccatttgaagccggtccaatcaagatgaaccctcaatttctttttctcaaactgaataatgtctggtgggcaatcgaagtaaaccaaaaacttctcatcctccattgtttttaccaccacaccagtccaccacccatctttgagataagcgtcgaccatcaagccttctacaaaaacgacgccgtcgttcacatcctccgacgggacaggacgaatgaacctctgatcgacgaattccgttaaaggagccaaacggtgttcattgagctgcgtcaagtaacgaactttaagcttattgtgtcctgatttcgttggattatcttccagaatcgctctgtaataagacccttttaactcttcttcttcagaaaaaacttctactttgtcgtcttttctaatgaatatcatctgctccatctcaaaaacccttgaatgaaaactaataacggctcatttttgctctgctaaccctaaatctaaaaaaagacttttctgctgaaacccgaaaaccatagatatgattatatgaaggagactttttgcaaccaaaacacagtgctactgtgtctgtgcttagtgtcgatattcacgatacacatcggggaaagtgtgttttctttttttctttcccaatttacttttctttttttttggcgcttgaaattatgagaaaatgatttaagaaattatcaggcccaaactatctaatgggcctaattaaaaacggtgtcgtttcataggatcctcatcacgaagcaggtaagtaaaaatatatcttatcttctccaaaactctctcttcgatttcagcaattgca

SEQ ID NO: 9421 - DNA, 3000 bp, Unknown
  misc_feature (1)..( 3000): cDNA_ID_2182459_gDNA_ID_1972119_Annot_ID_178882 3000 nt of promoter + ATG
tttccataggttgcaacaacatcgtagccaccaccgtacggcgtgggatcgtattcatcgaattccggctcgttgaagtcaagagcagaggctacagagcaatagatactaaactgaggaggagattcgtaggttgtatagagattcggatcatagaacaagtgtttaggctcagacatggtagaaacagagtaagcaacatatgcagaggttgtctcagactcggatccattccagttataacaattataactcattggatcatcataaccagagtaagcaacatattcagattcagattcagattcattccagttgtaataattataactcattggttcgaaaccaagctgctgctgctgttgattgtaatgataatgattttgatcgtagagattattaacctgattgtaatcgtaaggactctggtaattctcatagaagttggccatttgagagagcttgaaggatgatcttgaaagtctttctctgcggttgatgagagaaaacgattcagctgagcagtgatctgtcgattaaactaatttggaatgtttggttccaagtccgtgagagagtagtgtattatttccatgtgatgtgttgataaggtagggacgactgatgtagatggtgagttggtgacgagtgtgtgaccctacaattgttttgtcttgtctgaaattggtgttgagaaaacgtggggaaaaagcagtggttgacaaagaatcaaaccaaaccaaaaccgaacattacctaaataaacaaatggttcaagttgaatttcatcctaacataacaatagctattgttcaaggtgtgatgatacagtatcatcatttggtactagacgattttacacacgacttcaacaagctaagtgctaaccaaaagatcaaaacttgcaaacactccattatcttattatagtttaagaggaatcagaggctgctggttcttgtcttggtttcctctgttcaggaggtggaggaccgtctctttttctttcgtatctcttactttgatacttagtgttattgcgctgctttggttggtatgttgggtatgtgcacgggataatctctccattgatgtacttgtcgcctaaacccgagaaagaacgattcaattatcagaacatggatactgggagagagagagatcctagaaagtttaaaatcaggctttgatgggttacctccatagtctttgttcttgacatctatgtaggagtcaggcaagacccagagaactccaggcaaacctgtgaaaataatgaaaagacagaacgatcagtatcttgaaggttttcgacgaactttcaataaggggactaaggctcttcttgctcactaactaacccttgaacttctcagatgtttcttcgtcgatggtgcattggaatccagtatatgtcgtggtactgaatgcatacatgttcttcttcgcctcttccatgctggaaaatagacacaagtacatataataagcaaacacgatgaactggttatgctggaaaatggacacaagtacattaattggttatcacatcagcaggatagtgtaaaccggaatcaaagttctctaaaatagagagtagcaccaaataaactaaagttttagtcattagttgtgtaacacaaactcgttccctgccataccaagaaatttctagtcaggagtcccaatctaatgctctgcacaattgtacactccttttacatacattactagcttacactgtccacatcaagtttttaacaaacagaaaccatgcacaatcacctacaatttatacatagcttgaagaaaatatgcaaaaatagatgcttctattcttccccctaatttcattcataattacgctaaagagcacaaagttttagatatcaaatcagacaccaatgttttgtgttcaatatgcagcaatgttcaataagtttgcacatatcaagagacgaaaaacaagtcagctaaagattacacctgatattaagaacaaattctggaactaggtcaacttcagagcaaatttaaagctgaaagctttactcagctcactaaacccttaccctaaagtatcatcaaaaaccctaatctaacaaaaaaccaaatcttcctatacgcaacattggattcaatcaaaggacaagtccattagcaacacaagtaaatgtcgtctattagttaactaattcaacaacgaagagaatcaataagaaagcgaaaacgaacctgccaagaacagtagcaagagtgttaaggtaagtatcaatcatctgatccctacttggcgctggatctttaggaaactccattacaatgagccaatgattgtaatcgcaaccaggaagcataatcgtctctctctgctcattgctattgctccgtttcgacgagtaatccgaatccaccgtcgcagctttcacaatcgccactcgacgccgagacccagcggtggagatgttccggagcagaggagtccatgaatcgccaacgcggataccagagagtgtagagaaacgattcaggtggcttacggggagaagagttttgaggagaagcgaggaagaagaagttgttgtgaaggaagccattgcaattgctgaaatcgaagagagagttttggagaagataagatatatttttacttacctgcttcgtgatgaggatcctatgaaacgacaccgtttttaattaggcccattagatagtttgggcctgataatttcttaaatcattttctcataatttcaagcgccaaaaaaaaagaaaagtaaattgggaaagaaaaaaagaaaacacactttccccgatgtgtatcgtgaatatcgacactaagcacagacacagtagcactgtgttttggttgcaaaaagtctccttcatataatcatatctatggttttcgggtttcagcagaaaagtctttttttagatttagggttagcagagcaaaaatgagccgttattagttttcattcaagggtttttgagatg

SEQ ID NO: 9422 - DNA, 3000 bp, Unknown
  misc_feature (1)..( 3000): cDNA_ID_3041849_gDNA_ID_1972119_Annot_ID_178903 3000 nt of promoter + ATG
gcggcagcaccggagaacagcaatacaagatacgttatatacgtaaagaaaggggtttacaaagaaactattgacataggaaagaaaaagaagaacttaatgcttgttggtgatggcaaagacgcaacgatcataaccggtagtttgaatgtcattgatggatccaccaccttcagatcagccactgttggtaatataacatttttctttcatttgtgtcttttaagttattacattcttgtatccgaagaacttaaaatattgctttgaaaacatgtacagctgccaatggagacgggtttatggcacaagacatatggttccaaaacactgcagggccggcaaagcaccaggctgtggctctacgagtgagtgctgatcaaactgttataaatcgttgtcgcatagatgcgtatcaagacacgctctacactcacacgttgagacaattctaccgcgacagctacatcaccggtaccgtagatttcatcttcggaaactctgctgtggtattccagaactgcgacatcgtggcacgaaatcctggagctgggcaaaagaacatgttaacggctcaaggacgggaggatcagaaccagaacaccgccatttcgatccaaaaatgtaagataacggctagttcggatcttgctcctgtaaaaggatctgtgaaaacgttccttggtcgaccgtggaagttgtactcaagaacagtgatcatgcagtctttcattgacaaccacattgacccggctggttggttcccatgggatggtgagtttgcgctctccacattgtattatggagagtatgcaaataccggtcctggagcggatacgagtaagagagtgaattggaagggatttaaagttattaaagactcaaaagaggccgaacaattcactgtggcgaagcttattcaaggaggattatggttgaaacccactggagttactttccaagagtggctttgattttaatgtctacttgttcttgtactttgtgttgtgttacctctgttttagtttgatgtattttttctggtttgttttgtatgacttacccaataaataacatgctctgtttcgcaagtattaggttaataatgtttaatacaataaatttagtgatgtggcatataatattttgaataactttaatactaattaattgaatttttttaatatataatcatactgccactcatcagttataacaccatcattctacccaaaaaaaaaattataacaccatcaattttttttttttttatgggattattatatgtactagatgacccaaactttgagaatattttcatgaataatataaattttttaagttgattacattatttatcaaaaacagtagttaccaaaaataatagtttcatattaaattttacacgttggtcatataggggatttttgcgtactgcattctgcattgcatgtcaacacagtgtatcagcatgtgatataattttactataagtagagcattcaccagtcgtgaattttcggaatatatattgatgataacgtcggttgttaaatgacacaaaaataatgacgtcggtttgagaaccgtcgttacatcgtccgacgcaaattatattggcttcagttaatcaaatgacggtaagttttacgtcattataatttgcatcggtttaatgagtttagcgacggttttcaattttgacgcaaaagtcaaaagctcatgctttgtatcacttctacaaccgacgcatatccactgtatttattttctatttttttccgttttctattatttctgtatttctcaatacaataaaaattcaaactaaccaaaattcagaaaaaaacagtatattatatataaaatcaattgccgcccaaaaataataatctgttttacaatgaatataactgaacaattatacatatatctagcaaatctatctcttggcatttctaaagtaataatctccattgaagagctacaactttgtgtttgctaaaactttttcacctggaacaaaatgagtgtaatgggagatttaaaaatcaacatatgcatacaaaaatattccagaaagaagagagagataataaggacaacaaattttgagtcacatcatatttgttgtgatgggctccatcccattgataaataccttaatcaaccgattgtcagctgaattcctcatgctaatacctaactatacaatattataattgccatatactagaaaactagcagattacacaacaatatagaaaagacacaaacataagaaagaagcctatgcgacaattactacagatagagtgtatcttttcgggtaaacattgtaacgtagtgaaagttgagagtgaattgcctaacaaccgatagaatgaaccaaaaagaaaaaaaagaacatcttttctaacgcccaaaaaaaaaaacctagagttttttttatttattaggtacatattgtcttttctagtactaaaacaataatggctaagtctcatcctcacacgcaagagattaaggttgagaatatattgtattgttgttagcataaactaaaatggatgaaaccaatttctatcaaatacatattttttttagccatttagagtacattggaaaacaagtatttcaactaaattactctaagacaatttttcttcaatcttttatgagataaaaattttggaccacttttcttttctgttctttgtggataataaaaccaaacttcactgaattatagcttcaattcacattgtactgaatttttagattgatctcaaaataaagttttttttctaaatattatcttttatcgaatacaattaattaaagggtaaattgattaagttgctttgctttgtatataagaccaccatcgctccatcctctttcatcagttaagataatatatattcagtaattaagagagaagaaataaacacaaaaatgttggttaaagttttctcttttttcatccttatgataaca

SEQ ID NO: 9423 - DNA, 3000 bp, Unknown
  misc_feature (1)..( 3000): cDNA_ID_2182510_gDNA_ID_1972119_Annot_ID_178901 3000 nt of promoter + ATG
atgataaaagtagtgttttaatcattgaaaattcaactaaattgagaaaagtgcatctagaatttttattttctttcttactttagtggacatatccctttggaaattgaatactataaaagaatgaccctagtggcccggacaataacaaagttagaaaacaagaaaattataattaatttacacttgtagatcgtatactataatttacactagcagacagtcacaaacgtcgaggacaataaactatcactaaaaactaaaaagtaaataaaattaaggagaaaacaaaaataaaataaaatattctgcatatttttatcaataatagcaaatcacacagtacgagtcaaatggatcagacaagtgatctcaaactcgggaagaaaatttagcaaaaaaaaaaactcgggaagaaaaattgataggagacaaatataactaaaataaaataaagacaaatcaaaattttaaagtattttctttaacatttacaaaaataatcgaagtttaaggattttatagtttctatcatatgtagacgcacaagtgaaagaaaaaaaaaaaaaaaaaaaacgcacaagtggtatcatccattgttcttcgcaatcgaatctccaatattttatttttattgtttcttaattcttaaaaatgggtcgggttccgggccgactccatctactccaaaaccacatgttaaaaccgtgccaccactcagagctattgtagatctcttttaactttttcataacacttgtagaaaaataggaaacgaatctggtttaaaatgttttttttttttggataaatcttctttatatgttatttaaggttaattacaaaataagaataaaacttttcgttgtatttagaaaaactgagtagacatggctatataactagttatcgtcatctgaccattttttttttttggctaattattatgtaacaaataacaatataggaagttcttacttaacgatcaatatggctaaaagataattgaataagctaaagtcgttggttgatctgatgaaatggttatttcctataaattctattgttacgaaaacgttttagaaagaagaaccgtttaaaagttatcaatcaataaagcaattaatcgaaacagttaaagaagacgattagagaaagtgactgaaagcactgcaagatggcaaatctagacaacgttctttatcatattttttttttttggattaaatatgttgaattggtgaaaaaatgcacatgtttttatcagtcatcgttttccgcgcatctctaacattttcttcattggtttttttaacagaaaataaaataaataaagccaattccgtgtactacatataagaccacatcttttaccaagccaccactccaacccattgcatgtctctttaacctttagttaacattcttactatagaaaatttcgaactgattaagtcacagaaagtttcaaaatgattatacttaatcagttttaatttcattttaagttaataatatatatattacgataaggataaggtttaaaaaaaaaaaacagagtaggtatagataaatcagataatgactgataccacttgttatttttcattgtagctatagtcaaacgatatatttttgtgttacttttttgttgtcagttatctttactggctaattattacgatgtaagtaaaaataggtatagccgagttcatacttataagtcaatatttctaaaagatagtttgaaaagatcgatgagctaaattctttagtttaactgtttaataaaaagtcattggttggttgcgttcaatgtaatggttatttctttcgaaatcaatttttggtttattcagaaagcatatgtaacgtatatattttataaaagacattacgtgaatatttttataaaacaaaaagccattattaagatgatattacgttacttatttaattcaaacgtgaaaagtacaaacttttttaccgcgtgtttattgtcaatttttgccacataatttagctatctagcaaatttatatatatatttttttttatcaccatcaccaaatattaatggtggtattttttaataataattgatatacatctttggtggttgtcagagatgaaaaacgccagtgatagaaatctatagttgtcgtcgttagtgtgtcgagcgtcaatggatcggatcagatgtaatgaatttcaaacaactgaataagatagctagcactttatattttagaaaacaaaatagtttaggtgtagactcttttttttatattaaaaattgttttgccactgacttaatagaacaccaatttgtcgtttttcttttttcttatatagacggaatcccgtgaattcgtgaaaacacgtatatttgttctttttaataaatgtggataacttttaacagattgatggggaacatggtctttgttaattcagtatctcgtaaatttggtcatgtagttatcaaaaaaaaaatttggtcatgtgtacgttttattatatgaatagtattgcgatttcaatctgttaacgttatctatcaaatattatatttcaagaatgtaaagtttcacacatacgtcatttggtttacatgattttaatcaaataatttttttaaatttttttttagtaattaaaatttacgataaaaaagaattgtcgtcataatataaataaaaattggatatgctaatttggttatatgagtgcttctctatatttttaattcgagtgctgggcaaaacaagagtcaacatgttcatttaatttgcttttaaaaaaaagacaagcacattgttttacattaatttatagagtatttggtgcaatgataatgaaaaagcatgtgcaaagaaaaggaaatcatagcacttcctcatgtactccactcactagcgttttctataaaatgtcatgatttgcggtagtgaaaggccaacacaaagaatcattttacctctaaagccaaagaccaac

SEQ ID NO: 9424 - DNA, 3000 bp, Unknown
  misc_feature (1)..( 3000): cDNA_ID_3041861_gDNA_ID_1972119_Annot_ID_178898 3000 nt of promoter + ATG
ccatagtcaaaatttccaaaataaaattgattttcttagcaaaaccaaacagtagtaatattaacatgagctctcttaagtaattaaattctagggtgtgaaggaattagatgcttaactttaaacaaagctggaagaaaagaacaaagagagaatcttttcacttttaagaaggtttcttgtgggtcaagtattgcatacaatctttttccaaaccttcacacatagtaaagcaacgattatttggtagagtactctttctcaatggatgcaaagcaacaccataagcattataagtcttcgagcaatcattcctctagttagcacaaattcgtgaatcctaaactgcaattattgaatctttaaactataaacttggctatatgcatgttcaagtattgaaagccaaaacactaactaatcagttccacaatcttgaaaaactaaccttacgtgaagatcactcatccccgccaactcgatggccaatatgggtaaatttcataaccagtcttccaattatccaagtaaacaactttcctcacagcccaaaacgatatagacagagccaaaagcatagccatcctttgctcatcgagtttcttgactcgtacaactacattagtaacaaacgccaaaagcaatccaacaacagtatacaaaaaccctacaaagaaaccttctgctccaagctgcatctctgattcttctataaagaaaacaaacttacttgaatcttcataatctttgatatacattggcatttctctaatgatgttatgcattgtccccgagacgctgaagaagtagacgaaaaccgcgccaactaaccagattctatggtcatggagaagtgtttctccttttagaatcttcttgatgagaatcggagtcgagattatgattatagcaacgatgattccgatttgtgtctttgatatgagtggtggtcgttggattgaacaaacggtgagttttgtttgacgttcgacgaactctgccattgattcggctaatccagtgaaatctccaccgtccatttgatctgattctgttaaattctctgtcgtggggctaacgagggaaatgtgtggtagtgactcgacggcgaagcggcggaaagaagcctcggagtgagttgattcgatctcgcagaagaagagctttgtgccgttagattcattgttgttgttggtgatgaaagtggcggagacgagtctgaattcgcggcggaactctggaagacgtagctggctattgccgtggagatgaacggcgtcgaagaagatgatgagtgagtaaggtctaggagtggatacggaggttatgaatttggaaacgtcgtcgttgttgaaggagatcacgcctgattcggcggttgatcggagggagactagttcgtttttgagatctgaatctgattttggattcgctagggtaaataaaaacacaattaagatgaagaaacgatatgagagattcgtttgaatcaccatttttagatcactctctgattggatttgaagaagaaaggagatagagagatctggaattgccgggaaatactggagaagtgaagaactgttcaaaattctaggtgtttataggtttgattgaaccttcttgatgagttagagggtttagttttaaagaagggaaaaaaaggaaaagaaattgacagctgtgggatttgaacccacgccctttcggaccagagcctaaatctggcgccttagaccactcggccaaactgtcttgttgtatgatatgtgaaacttaaacattctataattaacaataaaattgatgatcacttctggtttctcttattaggaccgacatgccgacaagttgagattcttttacaggaaacatatgagaaaccacttagtaatacaaaaaagagagactcatacatggattagagagtttacataaaactagaccatgcatatttatttcatcgctcgtaaatcatttaaatggtattattaatgtataagaaatcatttttgtcattatcataatcttaatactactctattatagtctaaagtaacaaggtcgagttgcatatacttgtggtattatataaacctcagtctacaatcttagatctgaaacattcatatccatacaaaaaatagtaattatgtaaaaatgtaagaataccggattatgcaagagacaatccaataaactaatctttgtcaacctaataatttagtaactccaggtgtattatttccctgctttcttattcataacgtgcttgtttcacgtgccttgtcttgggctaacaaaatatgagagaggcaaggcaaactctttcttttgttgaacaaaatattatgttccgaagcatgttcgcctatattatttgggttttgttagacatattcccatatcagatttactaagtgaagattaaccaaagaattaaagtacagagttaaataatgtttttggttttgcttttacatgaacatttctatggatcccacttccacttggtggcagcctggagatccaattctccatgttctgctgttgttttctatatttcctatagtacccttgctagctcatcaatatggttcaaatgacctatctcagcaacttaatgaataaaccggtcggcttttaattagctaaaccgtgtgtattataaccaaacagtttacacttgattaacataaaaatcattgagttttactgttagttttctttaattaaactttttcatttaccctttttgctttcttttacaaattatcgtaaacatcattattacatgaaaatcttagaaaaaaaaccgtatcaaaagtctaaacgcaatagcatattaaaagaattattaatggtcaaaacagtcatttccccggtctttataataaaagcaagaaagctctatactcttctcactcacggaacaagtgtagattgcattacctctctctctctctctcttcgaaatattcgaagtagagacaaccaatg

SEQ ID NO: 9425 - DNA, 3000 bp, Unknown
  misc_feature (1)..( 3000): cDNA_ID_2182487_gDNA_ID_1972119_Annot_ID_178890 3000 nt of promoter + ATG
cccggtcgttgttcagagagatttgatgttgttggctctgacatctgcggtttcggagttcttgcttgtcaaaaatgtcatgagagagtcagagatcttgacgcgtttgaagcacattacctctctaaccactctggtaagacttgaattagatgaactttttcattgacttttagccaatgttgtgaggagaatttgatttgttttttcttttttgcagtcgttagactcttagcaggagatttctcaagaacaactgtggaactaatctgcaacacaggctattctcacaagctaggcaaaatgaaagggaacaacatttcagcgatctttaaaatccagaacttgcagagagttgttgcagactttgaagattacagagagctcgtgaaaataagagcaaacaagctttcaaagaagcactctcgttgtatggctgatggcaacgagtttcttgggttccacggtacaactctttcttgcactctcggtttcagtaacagctcttcaaacctctgtttctcggatcactgtgaagtttgtcatattctaagacatggtttcagtcctaaaacaagaccagatgggataaaaggagttctcacagcatcaactagctctacagctcttgaatctatcgaaaccgatcaaggaagaaatagaggttcattgatagctgttgtgctatgtagagtgattgcagggagggttcataaacctatgcagacgtttgaaaattctttagggttttctgagtttgattcactagctttgaaagttggacaaaattcaagaattgaagagctttacctgttgagtacaaaagctttgttaccttgctttgtgataatcttcaagccatgaaacaagcccgtatatgcaaaatttattctttaggtttttgtatagttttctcatcttcttttttcttgcaaaatttggtgggcctgtaataggttaaaaatgttgggctttccccaaaattgaaagatggaaaacttgctggacaagtctatgcccagcctctatatttaaagggtgaagaagactgtaactgttagtgctaccattttcttcaattagggtttctttgactagctcttcgctaagaacactcatgtctcctctgcttctgagccggccttcagtgttctccctccggaaacctctgtttgtaagatactattctcttctctccccaatcacactttgttctttttttttttttttgatgatgttttgctgatgtgagatcactacaattatactcagagacgccctagtgttgggtgcttgtcatctcgacgctgaaccttgcggattgggtatgggaaaactcatgattgcaattagtagtgataattcgatgtgggttttggagaagaaggcccctgtggagttggtggaaggaggaaagggaattgtaggagcatcccatgggtgggtagctactttgaaagacggagtagtgtgtctccaagatgatctaaacccaagcacatcgaattcagacccgaaacgcatctcattgcctagtctagtaactctacctcattgccaaacccaagttgtcaccaacatggccatgtcttgctcatctcctgaggaaaatgactgtgttgtggctataagtcttaggaccacaactcagcttatgttgacccgctcaaagtaaccctgagtggatcaacatcgagattcagaactcaagcttcttctcttcccctgtcatgttttccaagagagttgagatgttctgcataccttcttctggaggtcacgttactggatcgtgggatctccacaaacacaagttgcagagggtgcgatttcgaaaccttgctaagttgacaaagaaggaatggaagcttttggattcgtgtagcaggagcgaacatttggtggagtcagcagaaaatgaaactttcttggttaagtggtacaggaagaaaagcaaagatttgaagagaatgatgacaacaaaggctgtaatggtgttcaagcttgacaaagaaggaaatgctaaaaaaaaaaaaaaaaaaaaaaaaaaaaaaaaaagaaggaaatgctgtttacactcgagacattggagatctctgcattttcctctcaaaatctgaatctttctgtgtctctgcaactagtagctacaaatccgttccttccctagtccgtaaccacgtctatgtccaggcttacgacgagtatggattcatggatatcgccaagccttttgacgattcctgggtcattcctgcctcacctgatgcgaacccgaatcctttctatattccacctcaaactatagaatatactttatctacgatgcacccggatctatgaattttttactttgtcgtctcccgttactagttttcgtacccgtttcaatgctacttagtcaggtagttctagtagcaatatatgtattattgttccaattaataaattcaactcgcttaaaaactaaaactcaactaaacatttttctataatacttttgtctaatcctagcaatacacactccatttactaatatatacattacctataaactgtgttgtatactaataccccatattcaccagaagacttatagagcatttcagtttggttccgtgtataccacatcatcagccgaatcaacaagtgtaaaaatccacgtgtgcatcagactgccacgtaatcaatcgtaaatagttgatttcaatagggatagtttcgtattttaattctttttaaggggcaaaaaaaacatttttccgtccattgaggaagcaaaggttttcgatattaataaaatccgagagagagagagaggaagaaggagagaatctgaagaagctgaaccagacgaaccataaaccgaggcgagagaggagagagcgagggaggtgatctcttaccacctcttcgtctccggcggcgagaaattcagtttcaatcggagaagagaggaaaaacaaagcgatacgcgagagaaaaagttgtgcaacgatg

SEQ ID NO: 9426 - DNA, 3000 bp, Unknown
  misc_feature (1)..( 3000): cDNA_ID_2182483_gDNA_ID_1972119_Annot_ID_178889 3000 nt of promoter + ATG
tatatgaaaaatggaggaagccatgccatgaaagaacgtcgatgcattcaaaatgagatttgaaattcctaattaaagttaagaccagttgtattagtgttatgcagagtagtatattattctacttggattaattcacagtaaagaagagatatacataattcaaaggcttattgttatttcaaagcaaaacatgaagaggtcacccagttaagaagagatacataataaattcagaggcttataacatgaaaaggtattcgacaatagatgaaatgaaaagagaagacaaagagtacataagaaagcgcgcacacacagacacagacacagaccaaattaatagttaatcattcacttgggagggcgagtagcgtgaactatcccgttttcctttaacagcttagtctccaacttcacgagagacacgaaagcaggccaattctcggtacgattgtgcatttggtcgcagtttgggtctactttcttcaagtaggagtgagcagcagctatgccgatagtgttaccaatgatatccacaaagagtgcaacctcagaggtagagaaactcatctcctttctatgcatccacataaagatctaacaacaaccaaaaaaacaaactttcataaatcctaacacaatgatctctaactagaaaagaaatagagcgatgaatacaaaagttagatagatgagaaagatacctggagagcatctacatgtttgccttccatgtaagctgctttgccgagctgacgagatccgcctgggtgacgggaacacccttcttctcttcctccgcgatgatgaattctaaggtctctcgggtaagagacctcagcttcttgaaaataccactctttgcattctcagcatcacaagaggaagcagaagaagaagctccgttgatctgcctgttccctttgttctcagcagaagaagaaaacggagccgttctcgcgatcttaatctcagcagaagaagaagaaaacggagccattgttctcgtaagcgtagagatcttcatctctcttttccatagatgaagagaacctgatgataccattcggcgcaaggccaacattttccaaaccctaattttgataaccctaattctctaatatataaaacaatcaagttgccttgttaaaatcaggatatgatctctcttatattagtaggttacttacacaattacctacatctttgtcgatttgtcagtttgacttatgaatcagtctactagattgtaaaaataaataaaacgatgaaatgtctataatacccctaactctacacacgtgtgaactttttgaatagtactggacccgggtcaaccacacacagtagacacgagccttcttcttcttctctaagcgagtgaagtaagcttaccagtggcagtgagtgagctcttaccagtgtttagggtcttctgcaattttccttgttttgatcgggagcttgatcaagactactgatgctgagatttacgaaaattgccaacggtctctatgttcccggtgacagtgaagctctttacgcttccaagtttcaagactccactgctactttgacttcgcctatctcgctggtacaaggtctgtggaggttacagtatgggtgataaccttttccttctgcgaggaaagcattgtctcggcttttacttttgttcataacttgtggatattggatagtaaagcctaccactaatggcataacattcaggatgcttcttggtgtgctatgatttgttataagcgaatcactctcgttggctaaacactttgagaaaatgactcttaaaatgctctcttgggctatactggaaacttgctgtgttcagtggatcttcaggtccttgttgacaaccattaacaagcttaaggtaagaataaagaaaccaacaatactttcagtcctttgatgatttataattccataacagactaagggcagtgcatatagatatctttcgtactcatctgctttttctggtctccatcacaaaagccaactaggtaatcatatcaatctctctttaccgtttactcgaccttttccaatcaggtgcttctggtgtgtctactactatcagttttaggtctttgtatacctgatcttatctgctactgaggcttgtaaaagtgattaaaactgtgacatttactctaagagaagtaacctgtttgatgcatttccctaatataccggtgtggaaaagtgtaggtatctgtactcagctgaaatggtggacgattttgaagaagatgaactctcattgactgaaagcgggttgaagagtgaagatggcgttattatcgagatgaatgtctcctggatgcttttattatcatgtttgggaatttaccaagggagaggtatcagaatctatcttagaaggttacatttagctcaagcttgcatcaacatctttacttagagctctacgggttttagtgtgtttgaagtttcttaactcctagtataattagaatcttctgcagcagactttagagttttgggatgtagagctaaccagagtcggtttgtttaaactagaatctttttatgtagcagacttgttcagtacctgaataccagttttaaattaccgtcagatgttgatcttgttggtaataatggagaaacggaagaataattagacgaaacaaactctttaagaacgtatctttcagttttccatcacaaattttcttacaagctacaaaaatcgaactatatataactgaaccgaatttaaaccggagggagggtttgactttggtcaatcacatttccaatgataccgtcgtttggtttggggaagcctcgtcgtacaaatacgacgtcgtttaaggaaagccctccttaaccccagttataagctcaaagttgtacttgacctttttaaagaagcacgaaacgaaaaaccctaaaattcccaagcagagaaagagagacagagcaagtacagatttcaactagctcaag

SEQ ID NO: 9427 - DNA, 3000 bp, Unknown
  misc_feature (1)..( 3000): cDNA_ID_3041888_gDNA_ID_1972119_Annot_ID_178877 3000 nt of promoter + ATG
aatgaactctgttgtgtgttgttagggttgagatgatgacattgttgaggcaataactggaggcgaatgcagctcgagaaaagcttttccttcggaatagccgcctatacatagagtgtctcctcgaccatgccagataccatcatgaacattgttcatctccagagttttagattcctgcatcacatcacatcacaagcaaaatgaaccaaaaggacataacggatgtaacttgtttgcaagagaatgatctgtgaataacacacacctgagttaatgtacagaatggacatacgagatggtggataaaatcgtccaagaaactatcagtaccctatcaaaagtaagagtatccaaaagtcatgatgcagaaaagaagacaaataacattcttaacacactccatagaaaagaaacaaaaaaacaaggaatgtgcttactctaatattaaacttccttcttatcaacatacggaagaaacccaagtaggatccaatcaaaagaacgaaagcaatagccagatagagaaagcagtgcctcttagttacagcaaaagcaacaacattgaataagaaaccggcaataagaatcatatgaacagcaccctgacacatacaaaatacagttaaagtcagtatctttcaatgattgcaacacaagaacgaaggtaaacaaaaggccagagatcaactgtattaagaggatattatacctgaagaaagcaagaaccaaaaccagtccttgtcatgtttttcccgaatctgtagcatggacagctgaaacaagataaacaaaaaaaagtctcttgctttataatcacatatagaactcaattgctctaattacagtaaattatatgaatttcaatttctggagaacaaaaaaaaaatgcttttggaattaaagaatgatatgagaagagaaaacccaataccaagcagattcgatacagagatgacgatcttcaaagcaatccataacatcgccttcccaaagccgtaaaacgccaccgccataatcatcctccgtcgcatcttctccctccgagctctcaagcttcctccatttcccctgagtctgaagcgcaaccgttgagcaaagcaaatcgaaatccaacacagaaattccttcaagttccgttaacctctccctctcctccaccgctcctccgccttcatcggctctaatgtcggcgattacgacggctcctcctcctcctccaccctcgagtttatccaaatccgccattgatgagagatttaattagggcttttctctttgatgatatcttctcccaaaggactttgtaccttttttggtgaacgccttttgatactcttttatttatttatttgttttcttaaagttgttgttttttttaaagcgttagtgatttggcgggtaattaattattcataaacacagctaaaaactgtcattattaacggtacagctgttgccacgtaagatattcgtctagtggaaagagtgattgatgtttattcttatccaatatgctcaattataaatacgtatcaattcttatatttagattttataattttctgaaaaagcaagttttattttttaattgtcacatgtaaatatggtaagaggtgtgaatcaaaaataccgaattaataacgtttctaaagacagataatttggctaatttaaggctccagactacgtatattgtttgtttaaattgcaactttagtttataggtaagtttttaatttagcaattactatgagtttatagtcgcatctacctccattaatactgtgttttccgttttaagatagtttgttaaatttggtaacaagatactgagatggagttgaatagctccctaatctctccttctgcgttccatagtctagcttcttcttcgagtgctctgtggcatatagctttcactttacaaaatcagagtagctttggaattagggatttttaactcaatttcaatcgatagaaaaccctaaaagtcaggaaatatttttgaatgaattatcaagtgtttccggtactatttaattaagtgagatttactcccacctctatagccgttagatcttaagcccatccatctaaccacacacaaaaagaggactatagtgtaagtgcataataaatatggacaagaatatttataattctctgattggataagaaatacgatttgattggcaacatatgttagagatagaggtatcaaaaaaattgagaaccaagtttatttttacataattcattgaaaatgttggttacctttttgtaaaaagctccataacatcatctacattgttcttttgtcaattataacttttgtttgtttcttatttatgcaattaactacattgttgacttataatttatgtttatttatgcaatttattatttatatatatatgttgatcctggcactgcagtgagcgtgactatatatagatcagtggtccacctaacctcaggtcaatgaataatgaatttcattagtcatttatacatttgaccaaaaaagaaaaagtcatttatacgtacatttcttattctaacatcatacaaagccataaaatgctgagaacatgtacttcaatatacttacatatatgttaagtgtaacaacacaaacatttggtttcgtgtctggtttaatatttattgttaattaatattgtattatctatatgcgttcacactcatatgaggaaattttgtcgtcatggaccattcaatcatgacaattataggatggacaattataggatgtattccttattcgtgcatgcatgcagagatatatagacgttccactagcgtttaaacttggtatatataatctgtataaactatatgtatgagaagtaattataagactcaaaagtcataacaaaattaagttctactctgcaacatctcattctctcttcttcagttacacttcctcggctgatttttattttcgagagatagagaattagagacctaatg

SEQ ID NO: 9428 - DNA, 3000 bp, Unknown
  misc_feature (1)..( 3000): cDNA_ID_2182451_gDNA_ID_1972119_Annot_ID_178879 3000 nt of promoter + ATG
ccaccttcatcgggtgatgttactacatgtatgcagatggaagtgaatgattgatcaagtgatgtttgctacaacggctttacaattatatcatcagtttggaatcatattctttagattaggaccaaacgcaaacacaatgtgaaatcaattcccatgaagattcaggcattgcgccaagttcattaatcagatctgacaaaacctaacaagtaacaacagccttcttttcattgatacaaatttggattggttccagaaatttcatgagagaaactgcagcctgcctaaaagttagacaattcatgttgatgctgcagcaagttaagccgccttatcctccagagccttgagttcttgcctccattcttccaacttagagaatttctctaactgctctgggtttaggtctcgggaagcagtcttctgctgttgagcttctgtgagtcggatctgcaaatgttaacagaatgaagcaattacacaaccgctagactgcagatttctgctatacctcaaacacaattttgctgtaaactgaagaaaattgattgaaaaccatttggaacatacgctgttacggcttaccagccacaattaggaatctagacggtggagattatatcttcaaagccaaaggttctcgaatgtcttattttaattaaagcaactgagaaagatggaaatcttactttcttcttaagtgcgcggattcttttctctacgtcttctcctgtggttcctggattaggtgctcccccacatacatcattatttgacgaaacgtccaaagcctccatttcagaagccaatacattcaccgattgggatccattactagctgatccatcctcagagctgttagctttttctgcagtagcctgcagaggtgataattagaaagcatgttccattaaccgaagaccaagctagtagcatatgaattgagttgaaacacatacctgtaatcgcttctcttttttacgttcgttcctcttagcagctttagtctttggtttaggagctggatcaggttcataacctggaggcccttgtgaggccatctccttcttcatctattacaaatgaaatacaaattagaaaaaagatatgttctatctacatttttgcccttattcaaaccaagatagaagagcaaaaatttggtaacaatttctgttgagcactcgaacaaagaacataagggtggtacaaataatgaaagcaggctatccacaaccagtactgactactgagaaaaatcaaatttaaacgattcatttccacgagaaacaatgagtccaagaacagaatagagtgttgagggaataaggattccataccagagaacctttggactgatatttgacaacttcatcttctggagtatatccaggtcgaatccgaatgggtttccggagagtaccatcaggtctacgtgtgggctccagaatcctctcaccttctttaagatttttgctcagttccgccattcgctttccttgttctccgcttctgcttcccatctgagtccttcaacttttcaatcacccttgtcacttctcttgttcctcagctatcaagtatactgttttctgtatcaaatttacagggttcattaaacaattcatggagttaaacatttagacaggaaaaggaatctagttttggtttaacggtgagttacaacagtttgttagaagaagctaaatgcacaacagtgtagttcacacattataaagctttctaaactctgaaacatgtaagctcgtgtatcaagaatgagtatacaagttatagcagatattcaaaagatcacacaactcagtagcaaacatctgatcaacaattcaaattcaacttaaaaattgtttagtgagctgtaagcattagcaaccacaaaagaaattcgccatatcaaacaccacttcctataaccacacaacaatcagttatttcaaaaccatgcaatacaaagtcccagctcatttttctgttttcttatcatcaaagtataaacctttggtgatagaattcctttggctgcatttaataacctcacaagcaaaatcttcattacagatcctaaaaccaaacataaccaaaaagacaaactttccagattccagtttcaatcaaccttaaagctcaattcaatttcctctaatttcgtctcgttgctgttaacaaaaaccgagaacacaccaaatttagttaacctattttttttgccggcggccagagctccctacacctcggccaatcatacagagatatgagagagaggaaagagaagaaaaaaaaagaaagctgacctacggagatggtggctattctccgtcgccggagagcccaaatccggtgaaacgaaaccggtaaatattggatggaaaagatgtttttatgtcgaccgtgacctgacaccctaaggaatgggatcgagacagcttaatgtggtttaactatgttttgtgtattctgtttcttcttctttctaaagtataaaattaaaaagatatgtggaccaatcaaaatcaaaattagacaagttaataaatacttagggagacaaaataaaaaactttggaatgaacattttaattttgacgacaagctgtcttttagaccgacattaaggctttttatgttcacatcattccttggtttgacaatgtcacacgtcgactaaatcaagcgttaagcccacgagatatcaatttcctttttttgggcctgtctctctctccgaacgaaatcactgacctgacctgatctctctctctcttcctccgtctcttctccgtatcggctttaggtcttctccgggaagaaagcttcgaacccaattaacgccggacggtagactgtgaccgactagtccccaaaagctcaagtcaatgagaaaatgctcctcaattttaacgttttagagatccatacccaacaagccctgttttcgcatattctttccgttggtttctcaccatcttcgtcgctatg

SEQ ID NO: 9429 - DNA, 3000 bp, Unknown
  misc_feature (1)..( 3000): cDNA_ID_1034523_gDNA_ID_1972119_Annot_ID_178880 3000 nt of promoter + ATG
cccgatgtgagccaatctagtcttaatccattcatgtccttccattccatcaacataacgtgccacactttctccatgctcatatgtctccaccaaaacagcaggatgtacaagaggatacacaggtttagggaaagagacatccttccatctacggaagttatatatgaaccgactcaaatgtgaagcttccctcgcgagatcaacttgagacaacatgaagacaccaaactgttgcacactctcgtccaatctcaaccatttcaaagctggaattaaagtcgatatctttgccaccaaattaattatcacaaaatctctcctaatcgattcaccaacacccggatgtctaactttaaccgcaaccagcgaagacttggacttttgtcctggatactgaaaccttaaagaagctctatgtacttgggcaatactcccagatgccactggcacctcatcaaactcctcaaatatctcagaaagtttacgaccaaatgccttctcgatagttttcttagtgtaggcgaagctatgctcaggagcattactgtgaagctttgagagctgtgaacacaaatccttggggaatagatcaggtcgcgtggctgcccattgaccccatttgataaaagcaggacctgctctttccagagttcgatggaccatctcaagccatattttcctaaaacgaggcccacatgattccacaaccagccccatcagaatagtaggagtaaacaaacaagctatataaaaagccctcccaatcaagataaaaccctctataaccgaaaacaataacgaagacagaaagataggaccattcttagcccttgtatagagagatttatctgaagcatagtgatttatccccgaaccaggagctctttgtgcccatgctacttgtccacaagtgacagcaacgatcccaggtattaacaagtgcgaacgggtaagagacaagctaaacgcctgagcaatggtactaatacgctcagaatacttataatgaagccttctccaagcaatttgggcatgatgactaactacatttcttgcaggggcagtagtataacttcgagacagatgattacttaaaaaacttcctttgagatctctaaaggcaaaagtacaatacacattactcggaatcctaccagatgaagagtaagttctgagctgaggcgaccttagagcagctgtaaaagcagttctatagcttccccattgagacactctatctttctggttcgagacaagagattgtgtttgctttccaacgattttagagatcaaaactctgcaataacaacaacaaatcaatgatgagaaagtaagcaataagcagctaagagagtatacagaaggatccgatcaacattaagacgtatgaaccattgaaactcgtaaatgtcgaaactttacagataaaatgagtctccgaggaaatgggaaacaaaaatccgatcagaaatcatgaaagacccacgaaagtggttaagcccgtttgattaaacaaaccttgacatagcgacgaagatggtgagaaaccaacggaaagaatatgcgaaaacagggcttgttgggtatggatctctaaaacgttaaaattgaggagcattttctcattgacttgagcttttggggactagtcggtcacagtctaccgtccggcgttaattgggttcgaagctttcttcccggagaagacctaaagccgatacggagaagagacggaggaagagagagagagatcaggtcaggtcagtgatttcgttcggagagagagacaggcccaaaaaaaggaaattgatatctcgtgggcttaacgcttgatttagtcgacgtgtgacattgtcaaaccaaggaatgatgtgaacataaaaagccttaatgtcggtctaaaagacagcttgtcgtcaaaattaaaatgttcattccaaagttttttattttgtctccctaagtatttattaacttgtctaattttgattttgattggtccacatatctttttaattttatactttagaaagaagaagaaacagaatacacaaaacatagttaaaccacattaagctgtctcgatcccattccttagggtgtcaggtcacggtcgacataaaaacatcttttccatccaatatttaccggtttcgtttcaccggatttgggctctccggcgacggagaatagccaccatctccgtaggtcagctttctttttttttcttctctttcctctctctcatatctctgtatgattggccgaggtgtagggagctctggccgccggcaaaaaaaataggttaactaaatttggtgtgttctcggtttttgttaacagcaacgagacgaaattagaggaaattgaattgagctttaaggttgattgaaactggaatctggaaagtttgtctttttggttatgtttggttttaggatctgtaatgaagattttgcttgtgaggttattaaatgcagccaaaggaattctatcaccaaaggtttatactttgatgataagaaaacagaaaaatgagctgggactttgtattgcatggttttgaaataactgattgttgtgtggttataggaagtggtgtttgatatggcgaatttcttttgtggttgctaatgcttacagctcactaaacaatttttaagttgaatttgaattgttgatcagatgtttgctactgagttgtgtgatcttttgaatatctgctataacttgtatactcattcttgatacacgagcttacatgtttcagagtttagaaagctttataatgtgtgaactacactgttgtgcatttagcttcttctaacaaactgttgtaactcaccgttaaaccaaaactagattccttttcctgtctaaatgtttaactccatgaattgtttaatgaaccctgtaaatttgatacagaaaacagtatacttgatagctgaggaacaagagaagtgacaagggtgattgaaaagttgaaggactcag

SEQ ID NO: 9430 - DNA, 3000 bp, Unknown
  misc_feature (1)..( 3000): cDNA_ID_3041884_gDNA_ID_1972119_Annot_ID_178881 3000 nt of promoter + ATG
tatactttgatgataagaaaacagaaaaatgagctgggactttgtattgcatggttttgaaataactgattgttgtgtggttataggaagtggtgtttgatatggcgaatttcttttgtggttgctaatgcttacagctcactaaacaatttttaagttgaatttgaattgttgatcagatgtttgctactgagttgtgtgatcttttgaatatctgctataacttgtatactcattcttgatacacgagcttacatgtttcagagtttagaaagctttataatgtgtgaactacactgttgtgcatttagcttcttctaacaaactgttgtaactcaccgttaaaccaaaactagattccttttcctgtctaaatgtttaactccatgaattgtttaatgaaccctgtaaatttgatacagaaaacagtatacttgatagctgaggaacaagagaagtgacaagggtgattgaaaagttgaaggactcagatgggaagcagaagcggagaacaaggaaagcgaatggcggaactgagcaaaaatcttaaagaaggtgagaggattctggagcccacacgtagacctgatggtactctccggaaacccattcggattcgacctggatatactccagaagatgaagttgtcaaatatcagtccaaaggttctctggtatggaatccttattccctcaacactctattctgttcttggactcattgtttctcgtggaaatgaatcgtttaaatttgatttttctcagtagtcagtactggttgtggatagcctgctttcattatttgtaccacccttatgttctttgttcgagtgctcaacagaaattgttaccaaatttttgctcttctatcttggtttgaataagggcaaaaatgtagatagaacatatcttttttctaatttgtatttcatttgtaatagatgaagaaggagatggcctcacaagggcctccaggttatgaacctgatccagctcctaaaccaaagactaaagctgctaagaggaacgaacgtaaaaaagagaagcgattacaggtatgtgtttcaactcaattcatatgctactagcttggtcttcggttaatggaacatgctttctaattatcacctctgcaggctactgcagaaaaagctaacagctctgaggatggatcagctagtaatggatcccaatcggtgaatgtattggcttctgaaatggaggctttggacgtttcgtcaaataatgatgtatgtgggggagcacctaatccaggaaccacaggagaagacgtagagaaaagaatccgcgcacttaagaagaaagtaagatttccatctttctcagttgctttaattaaaataagacattcgagaacctttggctttgaagatataatctccaccgtctagattcctaattgtggctggtaagccgtaacagcgtatgttccaaatggttttcaatcaattttcttcagtttacagcaaaattgtgtttgaggtatagcagaaatctgcagtctagcggttgtgtaattgcttcattctgttaacatttgcagatccgactcacagaagctcaacagcagaagactgcttcccgagacctaaacccagagcagttagagaaattctctaagttggaagaatggaggcaagaactcaaggctctggaggataaggcggcttaacttgctgcagcatcaacatgaattgtctaacttttaggcaggctgcagtttctctcatgaaatttctggaaccaatccaaatttgtatcaatgaaaagaaggctgttgttacttgttaggttttgtcagatctgattaatgaacttggcgcaatgcctgaatcttcatgggaattgatttcacattgtgtttgcgtttggtcctaatctaaagaatatgattccaaactgatgatataattgtaaagccgttgtagcaaacatcacttgatcaatcattcacttccatctgcatacatgtagtaacatcacccgatgaaggtggagtgcatgctgaaacggtgtagagttcgatcctaaagcttttgtgagttcatgaagatgtctacgtatttgtagacccaacgacataggtacatatacatacacatgtagtcatatctatgattctgcttacatatattatgtaactcttttctgtcttatgctctaagagaacatctctaccattaaagtacatgtcaatacagaccttaaaatgttaaccatttgtatgcttcctgtttcagatttatttaataaacatgcttcatctggaaagaggaagcccatggtgttatgcttaattatggataccgtttctcattttgctaattggaagttgcatttactgactttaatcagtcattgtcaactttatattcacctgatatgatatgcaagtgtctctagctcgaatagttaatatatatctaggagtagtggttaaaatgtctcatagagtcaattattataaatctttctgcattatgcttatggagcttgcttttactgagtccttatcaacttaatcttcactggggtggtaactgtttcacggtccaatagttggtcttaaagtgactattgtttctaagtttcagttctctgtaaatttgtgtataaaataggtctttatattacataatttgcttgtcattttgtatataagtacttatttattattgtaggcaaattgtggtggcgtggaccatttcctgcagtgaaagaggcaatgattgaatggacaaggaagaaaggtttcacagtgttggtaaccttattagttcgtgtcatgttctaagtcacatgaatcagttttttcttacaacttttgaaagttcaacctttgagaaaaatccggaacaggttgtgactgatttcgatgtcagcagttaatgttgttagttgaggtaagccccacttggcttttaacaagaaacatcatttatattgtttcatcaaactatgatcagaaataatcagaga

SEQ ID NO: 9431 - DNA, 3000 bp, Unknown
  misc_feature (1)..( 3000): cDNA_ID_1379075_gDNA_ID_1972119_Annot_ID_178878 3000 nt of promoter + ATG
tgcatgaatcatgatgacaaactgatggaaacaaataatcagctggaaggaaatgatgaggcaaacgactcagggttcagatctagctaccaaaatcacatgtcaatacacatgatcatctaagtaaattttcacaagtgtcttttcaaacagttgaatgagtatgcaaaagatgatgagataacatgtaaagttattgtggtagctgaattagttccagtttatgattagacacatcatcagaaacattattgataaagaggaaaatgacttaccaagtgttgcggagtcgaaagtcttgatgccatcaacgccgttcaaatcgccgctgaggaccgtcaagtctctgccgtcgccaacgagggttaagttagttttcttcttcccgatacgaataacttccttgtataacccttctttgatgtagatgacaaaaggcttcacaccattctctggagctgctgcaaccgcttcattcaccgtggtgaagttgccgctgccatccttggcgacaatcaagtcggctttatccttcaatgcctgcaaattatgtttaagagaaaaaaaaatgaaatagttaataaaacatatgaaagtcaacaataaacatatgaaacatatgaaagtcaacaataaacaacaattcaaagataaaaaaaaaaaaagaacgaatcggagttttaggcttcagatatttgaggtattatctcaaaagacaaatatataataaaacaggaaaattaggtttttacagtgaaacaaactctgtaagaacatggttcgtcggaagtgacaacccaaagctcagatctgatggataaagttaaataacttgttcatatttcaacaatggtgatatttgttttgctaacacaaaaaaattgaagcttttctgctaattagagaaagttggggattatttctttaacaacaaaaaaaagttggggattattttgatcatttcccattgttgatttgttgtccataagtttttcattttctaatcgatttctgttttcaaagctggaactttattagttataaacgctagagagcctaaaagttggattcgcggatacaaaacaaaaaaaaatcgattagcggacacacaaacaaaataaaggttttcctagttacctgatcgggcgtggagatcaaacttgctggaggagccaccgttgccccaagaaacagtgaggctattacgagaaaactcaatactaagagctgcatggtactggtcatcgccattaggtctctaattctctatctctcgaaaataaaaatcagccgaggaagtgtaactgaagaagagagaatgagatgttgcagagtagaacttaattttgttatgacttttgagtcttataattacttctcatacatatagtttatacagattatatataccaagtttaaacgctagtggaacgtctatatatctctgcatgcatgcacgaataaggaatacatcctataattgtccatcctataattgtcatgattgaatggtccatgacgacaaaatttcctcatatgagtgtgaacgcatatagataatacaatattaattaacaataaatattaaaccagacacgaaaccaaatgtttgtgttgttacacttaacatatatgtaagtatattgaagtacatgttctcagcattttatggctttgtatgatgttagaataagaaatgtacgtataaatgactttttcttttttggtcaaatgtataaatgactaatgaaattcattattcattgacctgaggttaggtggaccactgatctatatatagtcacgctcactgcagtgccaggatcaacatatatatataaataataaattgcataaataaacataaattataagtcaacaatgtagttaattgcataaataagaaacaaacaaaagttataattgacaaaagaacaatgtagatgatgttatggagctttttacaaaaaggtaaccaacattttcaatgaattatgtaaaaataaacttggttctcaatttttttgatacctctatctctaacatatgttgccaatcaaatcgtatttcttatccaatcagagaattataaatattcttgtccatatttattatgcacttacactatagtcctctttttgtgtgtggttagatggatgggcttaagatctaacggctatagaggtgggagtaaatctcacttaattaaatagtaccggaaacacttgataattcattcaaaaatatttcctgacttttagggttttctatcgattgaaattgagttaaaaatccctaattccaaagctactctgattttgtaaagtgaaagctatatgccacagagcactcgaagaagaagctagactatggaacgcagaaggagagattagggagctattcaactccatctcagtatcttgttaccaaatttaacaaactatcttaaaacggaaaacacagtattaatggaggtagatgcgactataaactcatagtaattgctaaattaaaaacttacctataaactaaagttgcaatttaaacaaacaatatacgtagtctggagccttaaattagccaaattatctgtctttagaaacgttattaattcggtatttttgattcacacctcttaccatatttacatgtgacaattaaaaaataaaacttgctttttcagaaaattataaaatctaaatataagaattgatacgtatttataattgagcatattggataagaataaacatcaatcactctttccactagacgaatatcttacgtggcaacagctgtaccgttaataatgacagtttttagctgtgtttatgaataattaattacccgccaaatcactaacgctttaaaaaaaacaacaactttaagaaaacaaataaataaataaaagagtatcaaaaggcgttcaccaaaaaaggtacaaagtcctttgggagaagatatcatcaaagagaaaagccctaattaaatctctcatca

SEQ ID NO: 9432 - DNA, 3000 bp, Unknown
  misc_feature (1)..( 3000): cDNA_ID_3041892_gDNA_ID_1972119_Annot_ID_178876 3000 nt of promoter + ATG
aggaagttattcgtatcgggaagaagaaaactaacttaaccctcgttggcgacggcagagacttgacggtcctcagcggcgatttgaacggcgttgatggcatcaagactttcgactccgcaacacttggtaagtcattttcctctttatcaataatgtttctgatgatgtgtctaatcataaactggaactaattcagctaccacaataactttacatgttatctcatcatcttttgcatactcattcaactgtttgaaaagacacttgtgaaaatttacttagatgatcatgtgtattgacatgtgattttggtagctagatctgaaccctgagtcgtttgcctcatcatttccttccagctgattatttgtttccatcagtttgtcatcatgattcatgcattatgtcataacatagaatctctcctcgcagaagtcagaaccaatagcttgtctaagtaactgttgaatcctatcctatcattatgcaagaacactcttgttggtcttgtctaacacctttgttgtctatccaagctttgctgtaaccaattgtctttgataaatatcccgaaagctcacctgaacatagtactacttcttgtgttagtgtgaacatgtcactgaacaacccaaaacaaaagtcacctcaacacataaagtcctttccttgaactatgcttgttgatacaacaacctgccattatctcaaatgtttcatgagccttttgttctgattaatgtacaaagattaagaacccttactgctgttctccatacagaacaccctctgtataagtaaacctgctacttacatagccaaccagcaaactcaacatccattatcctttgtcatgatctggttgaaagagaaactaccttacaacctgtttttataactagaaccctctgatgaacatgagactgcagactttccctcaaacttgaaaccttcagagagttttagaattccctgtttaaacagcctgcaagaaacgtattttagaatcacaaaaccttaaaaccatagaatcattactcctaaagcgtccctagacctgagaattccgttccaacaactcatttatctgatgaaaattgttcctttaccaaatcagattgatttttgattctgcctaactttcgtgaatcagaaatcaactcgtcgcccagtgagaactactccaccttacccatcttaagcaccctgtttttcttccgtcccagaatcttcttcttccacctgtcttcagttttcacacttcttcccttttccgttgtcaaaaatcgccgaacctgacacaattttgatcaataatcccggaaattaccggcggttccttttggagacgtttggattctgccactcttgaacctccatgactttgtactctgttgaaacgttttatcaatcttatcgttttatcttaatgatgttgttcattaatcttatcgggtttttttattatacaaagtaattctatattaatgatgttgagatctgtgtgcagctgtagatgagagtggatttatggctcaagatttgtgtattcggaacacagctgggccagagaagcggcaggccgtggctctccgtattagcactgatatgacgatcatttatcgttgcaggatcgacgcgtatcaagacaccctttatgcatattcgggtagacaattctaccgagattgttatattacgggaaccgtcgatttcattttcggacgggcagctgcggtatttcaatattgccaaatcgaggcacgtaaaccggggataggacaaaccaacatcttgactgctcaatctcgcgaggaagatactgcaacttcgggattttcgttccagaaatgcaacatcagtgcaagttctgacctcactccaattaaaggaactgtaaagacgtttctgggacgtccgtggcgtgcattctcgagagtagtattcatggagtcgtttatagacgatgtcatcgatcgagcgggttggactccatgaaacataactgatattggaaccctatcgaccttgtactatggtgaatacaaaaatacgggtccaggagcagatacaagtaaaagagtcggttggaaaggatatcacacaatcacccttaatgaagctacaagttttacagtggaaaaacttctacagggacatttgtggattaacgctagtatagttccattcgaattaggactttgattattttatgttgtttattaactagattataattgtgctggtgcaacacagatcaaattttagttttaaatatttattaaagttggattgttgtctattttatagtgcaactttaatcattttatacataatactaatctttatttgttatgtagagatgtgtgttcaatttttttagtttagtttagtttaggaaaaattctttgaaatgtcttttttacagtaccccttttcaattctacccttttctatttactattttcatttatactctatttaaattttttaataaccattttacccttatttgtaaattgatttaggttaacaaaatgaaatattaatattttttgcctaaaatattccaaaataaaatttcccgccaattttttttttcaaaaacatttttcccgtcaaaaaaaaaattctaaaacatttttcctgtaaaatttttttttttggcgggaaatagatttacaaggaattttaaaagggttttaaaatattttaaaagatttacaagagattttaaaagggtttaagagaattacaagagattttaaaagggttttaaaagatttacaagagattttaaagggctttaaaagacttacaagagttttttaatgatttttaaagggtttaaaagtgttttaaaaaatttacaagggattttaaaagggttttaaaagatgtacaagagtatttaacagattttaaaagaagttataagaaaaccttttaaaaaatcttgtaaatttttttaaaatcttttgtaaaagttcacaaatg

SEQ ID NO: 9433 - DNA, 1482 bp, Unknown
  misc_feature (1)..( 1482): cDNA_ID_2053370_gDNA_ID_1972120_Annot_ID_178919 3000 nt of promoter + ATG
gaattcttcacataagtaccatgtttggatcgacaaaaacaacaagggaatttttttgttataccatgataattatgttgatcatttgtaataggctagataaaattaaagatacctttaaatgataatgtaacaattccatgtttaattaataggtgtccatatttattatccgaattacactatacaggtcacatatgctaagacaatttggtgtcaaaaacgaagaatctaagattattcaacaagctatcattattccttaccgatataaaagactttgaactattttttggccgtaaagctgacatatttcaccggagatgtcgttcaattatacacttgaccaagtcttattctaataacaaaaataataattatacacgtgaccaattctagattgaactttctaaccaattctacatgaatcgttcaccgaataaaaacaaaaacataaaattaaacctcgcaaaattgagtcttggagcctttgctaatttcttgaatactaaaagcagatcactgttgatctacatataattatttatttctgttgttcgttatttatccataaccaaaccatgattagaactaaatcagttctgtggatgcggtaaaacaatctcttcgtcgaatgaccccaaccaaatattcaaatgtacacttgctaaaacccggttcattggtagtccggtttggttcgtagtatttgagtcaatttcatatccctagatgttatgcagaattttgccacctagaccgaacagagcgttttcaaaacttggaaaggaaaaaacacaaagcatttagaacatgatggaacacatgttagccgcaaagaagtaaaagaagaaaaccttcattttgtcttctttccttgttttgcaaaatcgtccaaaggaataacttgtgtatatttatctgtttttgggtataaaagatatatatatatatatcgcctagtcgtcgctgcttgttgttgtcaaggcacacatgtttattctttatttttgtcaaatatttgaatcaagatcagctactattctaagaaactggctatttctaaaataacactcacgaattagccattatttataaaatggtaacggtatattcgagattccagtccatacatgttattaataaagaaagattggatctccatataaaaaatagctgtctcttacattgtagcactagctaaagatctttcaatactacgtacctagtcatacaattctttgaatatggttttaaattgtatgtgaatattattaagtgagaatagtatcgacataacaagtatgaaatcttttatttctatatattttatttaacaacctataacaaacatttcacttcaaattctcactatatgtagtccatcatcaactactttcttttcgcatatctttgaagtttttggttttactaaactaactctatcataaaaggagaaagctttaaatttaaccagaaatg

SEQ ID NO: 9434 - DNA, 3000 bp, Unknown
  misc_feature (1)..( 3000): cDNA_ID_3041908_gDNA_ID_1972120_Annot_ID_178926 3000 nt of promoter + ATG
caaataaaccatgacaaaaattcgtatagccggtataggtattattgatacaatagccaacaaccaaaagaaattaaacaattaattagaaacgtacagtattgaaattaatttaatctcctctgtttcgtatatcatccgacaacacattgtagtttacgttgttagattatcaaattccccattttaattttattggaatatttgtttagtaactaccaagatgatcaacgcttcatgtgataaaattcttgtcacaatatatacgtatctatttttttatttattttttgaataatttgaagaatcagaaatactcctacatagccaacagctttttggctgtcaagaagaggactctgtcgaatcacatatatgtgtgttcatcacatgatattttactattgcagaatagtaaatgaatgattaaccacataatttattattattctaaaaatccaggatgaaatttaaataatacagtatagtattagtcaatttgctctgttatgacaaaacaagtatacttagattttttctcattacagcatttgaagttagcattcttttgtatttattttttaattggactaggttttacttgacagagaaatggtgtaaaactattagcacacaaagcttttcctgaatcccaaagatggtttatgctgatccgtgcatgcttgatgattgcaaatgtatatatcaacaaatgtctcaatatttttcagttttaattaacttggtttattaattagctggtcataattgaaaattagcaacatataacagtataacactaatccgagaaccatctatttttctatttgatttttgtggcttgatcatcaaatactcaaatattctaaaaaaatcacaatatatatatatatatatatatatatatatatatatatatcttttttttttttttttttttttttcgtttttgtaatttctggatcaaatttgttatatatcaaaaccagatccaactaccaaactgttgttttttttcatccaaacataaataattggtaaagtactatagtgatatgtacgattttataataaatttccgttaagaactatccatcattacaaaaatcatcaaattacattttcgttttttttttactaatcttaatcatcaaatccatttaatatgtagtattactcaattccaaaatattatctcacggttaccatatgcagcacaatatatattgccgatcaaagtctttagctatttgatatactagtatactactaaaaagaaacaaatgatcattcacaattcacaaacaatgccgacagctcgtgaagaaagaaaagaaaaacaatgccgacaacgttttgtgtcaaaaatttcattatagttagtgtattatacaaatatgagaaaaaaataaaaaatatgaggacctaaagaaacaagcttcggttactttctgttttctgtttcttctctttcctttaatagtagtctgtttttttttcttgaataataaatgaaatttcatctagaatggattcgacataaaatataaaatagtaaaaatgagataaataatcaaatactaataaataataattggaggagttgtgaatacaaaagcaatgcccgtgaagtagtgcatgtgagtactaaaagagatgttataatcagtgccccattgacaacatatagacccactcacgagtctctttcgttttatataatattcttctatatatatcactatattatttagtattttataaatcaaattcttaagaaaattataatgagacggataatttatcagcatttttttgttttttttcttgaatcaaattttgagattttgatatccacttcttcttttggttaaagattttggttgtccacatggaatctgaatagctaatatgtaatgttgcgaccagtttacaaactacatatgaaatgaataatgcaaaaaaatctaattcagtgatttgcattattcatttcatagtgatttgaattaatcattctgttttgcttgtttttgctagtaatttagtttactagaattcagtaaatattcaccacactgctacagtaaatatgaaaatcatacgacactctaaagtctctactcatgccaatacgacagatccaacacatgcaagtattacatacacacatgcttgtacccatctatatccacattaaacaaaaagcaagatccgaaaactgaatatacacctcattttaagtatccccacttcatggtgttcctatacaacagtcattggcacatacatgtgtttatctatgtaattatgtgaagtcttggcaaccaaattagatgagcttttaaccaacctttagtttccacgtggtatacattcagtgtatcatcacccctgactcatttacttactcagttactccacaattcaggttttggctgattcgggtaagacttttacacattggtaaaaaacctctactataaaaaaagagatacctctgctttgttttacttttcacatattagtacccgtaagctaagctccaaatactaattcacgagtgatcactttacatcactgtcaatatcagcattatttaacaaaatttctactaaaatcaaacattatggtcttattatcatatatggataacttgtacaaagcctagatttattcgtttgtatagtaatctattaatttatttagaataagttacttatcaacaaaaataaaggacaccattgattcaatttcgttttctatcttttaagaataaaattccatttcgaaaacccgtgagcctctctacattcttggactacttccttgtataaatctcaccaaaaaaccttctctttcttcaaccgaaaccagaaaacaaagaaaccaaagtctctttagtttcttcaaccaccacaacactcttcgtttagacaacaaaaaatgataatgagaagaagtctaagtctgagaagcatcacgatgatgatattaatg

SEQ ID NO: 9435 - DNA, 3000 bp, Unknown
  misc_feature (1)..( 3000): cDNA_ID_2182578_gDNA_ID_1972120_Annot_ID_178931 3000 nt of promoter + ATG
tcttgcaataatttctcgtaggaccgacaaaaaaaaatgaatttaagttttaaatttggttggttcaaaacttaatatcaatttttatggtttagaagaagaattatagctgccaaaagtattttgtccggtaattactaattactctttgtaatctcatttaacttgcccgtttaaataaacagacaaaattaaagaaccctaattaaagtttggcagaacctatgtcccagaaagtaagaaaaaaacaaagtaaactgagaagtcatagtcaaaagacaagttagttccaaccaaaataaaataaaatgtgatatcaagttgaaaaagtgacggatagagaatctatcctttggatcctctcctctatttttagcccttcacttggatctctcttggataactcattaaatgacactatccaatataaccacatgtgtatctgcgtatgtatatgcatgtgtatttatatttagaagcttcctagttttgtctaagaaaatatcttcttgttttgttcctttcagcgctataactcataattctcttccaaagttcttggatttgttccccaaatcaactggagatctaagaagaagaagaagaagagcgaagatcaaaggataaggaagaagagaggaaaatgtgtactcatgctgatgaatcacaacacaacaatctcccttgtctccattgccaaccacattcttacattcgcatggtacataactacatatatacacatactgtatatagtttatacgttttgtatttgatgtaacaatcctcacaactagtggttgattttgttaggttcaacatatgatagagagatgcattctactccgtatgacgcgggacgaatgcgtcaaggcgttagaccaccacgcaagcattctaccactcgttacactcactggttagtctttacaacgttacacatataacctctatatgattcctcaaaactgttcgaaagcttcgttaactaaaaggaattaataatgatatttagacatatgtttcgattttgcttcgtacgtcaaattatataattatatggaacaattgaagaaattgattattgttttcttggatcatgtatgttcatcattatatattcgacataacttatattgttgagttcacaacagtttttcaacgtaactagttaatttatgcagttttcagctatatattaggctttgcaagtgtgctacaaaaaaaattacatgatatttttcccccccccgcagtttggagaggacttcaaagagaaaacaaggacttctttgaaacgtatgggcatttcgtctctcctaggcccttcttaagtaagagattgtgggatcaaatgtcctcttctaattgttaacaaatttcaattaattcctcagtcaacatataaaccacacatcaagtatgttgttatatagttcattttgatgagagttatgttttctttatcaggcggatatgttcgaagatcgccgaggtttgcgaaaaggatataatgaagacttggtttaggctcgtagctagatatataggagaaaaagcttgaactttatatatacctaggcatatgtattacatattcctatgatgaaatactcatgcttattatctgtggtccttttgatgtcataaggttcccctataagattaagcagataagattgattttcgtgtgtaaactagttttaaggttgcttatttagataattagatgcagtctgtttattgaaaaccctcgattataagaggctttacgatttatatatagcaaatgtgtaaaatatattttttaactaaaccatgacgagcgcttactaatttgagtaaatagactgcatctaaataagcaaccttaaaaatatgacactaagactaaaaccaatcccgccggcatagaaaacgaccaatctggttcgaattctgaatactaatttgaatctaaactaaaacactttatttccttttacgaaagaataagtgcaactgacgatcattcagttagttgtttataatgtatatttttaagttccaaacgaggctggctaggtgtataaatgtaaaaaaaaaaaaaaaaaaatggtgacaaaagataggcaaagatttgcatatgaaaagatgttggaaatttggttatttcctttgacaaattttttttttggatattttatttcaaagatctacacgatttcatgagtaggaaataagagttggatatttgagcatattcctcctaaaaacataatgcagcaacaaatgttttaacaaagtgacattaaagtccggttatctccggtttaagaaaagtgaaagacggaattgatttgcgctcacacctgttcggttcttttttttttgtcacaccaacagaaatacagaggtacacacatatcctaaaccgaacaaaaccggggttgtaaaaattaattgcgatttgtggcgattccgtttagatcggataaaaaatctgcacgacaaaattttccatcttcctcctcttcctctgccaacttataatcccgtcaaagatctttccttttttcttcttctggtttctttgtggtttcctggaggctctcagcatcttcgagtcgttgcgaggatgcgttagaagagagtctcctctcaatcttcgaatctccaagtaatctttctgtattttaggattcacctctctttttgttctgtttgctcgatacaatgaaattttgaaaaacttcgttaatttatgaaaattgaaatggattctatatcgcaagttcttgttccaattatatttgtccgttagtgcaaaaaggtcttacctttttcgccatcttacagtcttgtgaataattcaaattctaaaactttttgagattcttacagagacattttgtcactctttgcaacagaacagtgtgagaatgggtgaccaatatgtttcttagtggtgatgttctcttttgctttgttggtggaatcttaggactgtattgactggcc

SEQ ID NO: 9436 - DNA, 3000 bp, Unknown
  misc_feature (1)..( 3000): cDNA_ID_3041896_gDNA_ID_1972120_Annot_ID_178933 3000 nt of promoter + ATG
atgcaacggcacataaataataaaaaaatctccctagagtgaacagttgtgtattcagctaatacgagcaactgtgtttttgaaataaataaaagtaataactagaaaaggtcaaggcccaaaataataagtccagcgaaatagttaaacgcaagtcctttcataaatttgtttgttaaggaaaacgaaattgttgaactatcgtttcagaagtcatttcacaaaagttctattaaaacgatgtggccttcaagaataataaaaaccacattatacgttgcatatcatttctattttataatttaaaatatatataattatcatcaagtttctttttaatgccattgactttgtacgatctctccagtccattgtactactttttcatgcatttttggaattttaaaaaactatatacagtatatagcaataatataagatactgaaaaagccattggaagataaataaataaccagagtgcatagacatgaaaaatgtggaaacatacaaggaacgcacaattgcataaagaaagaacaacgtagcatgcacttgtggagtgagcatttgtttcttccagtagaaatttctaaaatgttcctttcttttgttaaataagtttctaaaacaaatgtattcttttttttcgttaagggtatatattgctgattttaatgtttcctctactttgaccaaaaaacatgcagaaattttgctataatcggcgttgcgtataatccgtttactaaaagtctaaaactcattttgacatttaagagcatctctattggtgataaatggagatgtcttcctagttttttaatatttaattaaagacacaaatgaagaaagagaaacgaaaatgtctttaaccaaacattgaagacatctttgaagaccctcttgaactatgtgtaatattctgattggttctaatttttttagtttaatatttaatgactaaaattaattaaaagcatatcagatgaagttgtgcaatgaggatgatcttaaatagatacacttgcatgaaagggcaaaactgtcattcacaacaaacatgagaatctaccacctttatttcccacgaatgcgatgatgcagcaccaaacttttaaggactaaactgaatatttttttagaagaaaagaagaaagtgggaaactttgagttgaactatgactaggaccaatcatagaatgtgatattattatctaatagttatctccccactttcagaaaaataatcagcctccttctatctacacatctctctctatatattagcttctttagatagagatttcacccacaaatctctaaattcaaaaccttgaaccaaataattcataaaaaaaatcttcaagggaatgaaaccggcagaaaaaatgcagacaaagccatttaaggaagagacagaggaacctcagtttggaaaatctccccaacagtttgtttagcttggccatgagaagcaaggaggagacaaaacggcaagtcatatatcggcatcaggctcgtgtttttcgagttctattgatttgattttggtggtatagtggatcttgaaatgtttaagattcagttgctaccgaaagaatcatctttaaataatagtatgtacaatgggaagaaaattatattttagatcgtcttcatgtgtgttttctttccggtttttgggaattaaattggactatgtttgctcatgtgtctattattaagtttcatgtgtgatgtgtctaatgtctatgtttgtgaatttataataaaaaatattagaaatctgtttttcatttcctcgtgtatctgaaaatcttgaccgtccataaactgtttgttctatggaaattttatattagtgccaatttaccatcacccaatcatttatatatgacatcaaagcttcaacggagagcaagaatacatcagcagtgcatattttaatgcaagaactaattttccattgtaaaacatatatttggtgtgaaagagaagctcaaatattaaagttgacaatgtaccggactaaaaccaattaaagtcaaattttatctgtgccactgaaaaaattgatagtacaaaaaaatataagtattgctattagtcggactaaactatgcatgtatatataagttatagataatacataaatttttatataaaatatgcatgtaagtatttttactgatcaattatagatgtatatatatagaattttatattatatatatatatatgttggtgtgtgtatttggattgttattttcttttgagtctgtgaaaaaaaatatttcgtttgagtcttctctaattgaatataaaattgaaattgtgtacttgaaatgagatatattttttatcaaaagtaaattgaatatctaatttttctatctaaactttttgttattagtatctgtcattatcaattttttccattattttaagatcttttctataaaatttgatatgtacagtttaaagatggtcagattaaccattaatagaaaatccagttaattattaccctttaaaaaaaaaaaaaatcagccagcttataagttaaaatattaccaacaaaaaagcatagtatatacatattttctatttcttacttctttttcaatcaaattactctgtccatattttttacctttccgattttttttttcttttttttttccaatttattacctttccgatgaaaataggatttcttaccaattgtttatttgataaaaaaactttgtttccggcataagtagttttagaggaaaagtctttacatgtttattcatgaattttcttagtaatataaataattcagtattaaaaagaaaacacgtcgagacatgaaactctgttaagattcaaattagatcctaattaatacctcttccataagtttccttgaacttcctcttctatatacatgccttctcatttctagtctccctcgaaccaactcttctttctctccatatccaaaagtgaaaatg

SEQ ID NO: 9437 - DNA, 3000 bp, Unknown
  misc_feature (1)..( 3000): cDNA_ID_3046607_gDNA_ID_1972120_Annot_ID_178939 3000 nt of promoter + ATG
attttaatcaaaatatactgggctcaaatctaatttaaataagcccaataatatgttcatttgggccccaatagaaccacaattataccaaactaaactttgaagacagattattgggcttgggaatttgggcccaaatgaatatttttaatctgagcagagagcgactatggaaatataaattccgtacagcacgcttttcaaatttcattcgtaacagaaagacaacgaagaaaaaagaaaatttcgaaaaggagaaaaatatctttggaagatggcgggatctctaacagcatcaaaccgccgtagaaacgcggaggattcttcagaaatttaccggtggacgatcggttttgctcggtttgttcactatccatcttctccttctccgcatccagttctgaaacctctcggaaagagagagcagtatcattcgccccacggaacctggctgtcggcgtcttcttcgacggtttctctccacattgtcgacgaattgaaccgatccgatgtgattctatccgtcaaactcggccagaaagtccttgtgagttggatttttactctctctctctctctctttattatatatagttctatagatcggatgtttaggttggtgtttcgcgatggtttaagcttaatcaaattttgaaatcgggatctatacatttttgattaaacgtcatggtgtttaattgttcaatatctacaggaagaacactacatttcaaagctgaacttcacatggcctcagatgtcatgcgtttctgggtttccatctcgtggtagtcgagcgattttcgttacctatatggattctgctaaccaggcaagctcttaacacttgaatctcttttggattttatggaattaagatataaataagcttactatttacttactagtgatgaatttgatttactgttcatgagttagttgatacttcagatttgtgattgaaatcatgtggtttgtttgtgcttgttgttgttctccagatccagaaatttgctttaaggttttccacttgtgatgcagcgttggagtttgtggaagctcttaaggttagctattattgcaaagagtttccttattatatgttgatcagatggagacgatgtttcattaaccttgaattcagttttataagctattttcttcaaatcttgagccaaggattcctgtttttttctgtttgcaggagaagattaagggtttaaaggaagcttcgactcagaaccagaaaaataaaactaggtgtgatgtttctttccagtcagattacaacccttcagatgcgattatccccaggttagatcacattagagtgttgtgaatttgtactagttctctagtcaaaaatttagatattgtaaattcctttttgcagagccactcagaaagagccaaatatggttagacctcttaatagttatgttcctgaaatgctaccaagaattgtgtatgaagctcagtaccagaaaagtgaaactaggtccgaggtttctttccagtcagattacaacccttcaattgagattttccccaggttagatcacatttacagtgttgtgaatttatacaagtgcttgagccaaccatttagacatggtaaattcttctctgcagagccactgaggaagagccaaatatggttagattttttgatagttctgttcctgaagtgctaccaagacctgagtatgaagctggacaagccttatacccatcacaatccacgctaaatcaaatcccaagtcttcctccgagtttcacaaccttactctctggctgcttccccgactccactctaggtacatttttcattgtatctttacttatttggagtttgagacatatcaccctctttcacacatttcctctctattgaacctactactatagatgcaggccaaacaactgtgaagcagaatcctgatctaaagtcgcagatactggtacagtataaacaaacccgagtttcttttctctttcaacacatcaatacaattcaaatgatatctccaactttttgtttttggcagaagtacatggaagattcttcatttcaaggtgaacattctccccattacacacacacacaaacaatattgacccatatagattccaacttcacattcaagcttcaaacttcacttaataagtctttctaacaagtggttttctcgttatccagatatgctgcagaaagtagagagaattatcgacgaaattggaggtaactggattacctgatttatcataaacatatttactaggtatcaatcttattatccattttgagtcttttgttcatatattgcttaaaacaattgagattaaaaggagcaaaccaacattggtggaggacaaatgtagtttgtattttattttgtttcaactgcggacaaatgtatcaatttgctctattttcgtccaacaattagccgagaagatttttgatttgccttgagtttcaccttatggtgaaagcatgtgtttattagcttccacaatactcatatattatacgaagattttcttagattttgctatattacatttccttttcatttttgataaaaatgatatgaaaatttcgactgcctgcaatgatctgtaaacaggggaggtaggaatgagaccataatttttgaagtcacaatggttttggaaactaaattcaagaacttcctgttttgattttagggaatatgtttaataatttgcaaacagtgaaattcgagaacttccagtttcgaatttagagaatatggttataaactagatatatccgaaatgaatcgaaaataagatatttggaaatcaaccgaaatttctagctgtatattctctcgagtgaggtctttcctaattaaaatttctctatatccatatataaatagtatatactgattaagttttgtattacaaactagaacaattctacaaaacaagaaaaaaactcataacaaagtcctttgagacagccaaaac

SEQ ID NO: 9438 - DNA, 3000 bp, Unknown
  misc_feature (1)..( 3000): cDNA_ID_3041932_gDNA_ID_1972120_Annot_ID_178936 3000 nt of promoter + ATG
gtgaaaccaaatcttttgaatctttttaacaaaaaaaaaaagaaaaaaaaaatctttgaatattataaactatgaaaatgatatcaaagtcatgaatagtttatggatgcatgtcttcgaaacaaaattacaaaatacatgaagtcgattcttataggattaatgttgatttgtttgacccgttgatattcattagaaatttaacgattttattctaattaatattatatatatgacatattaagaggtatagcacatatgtatatttttatataaaaaaaagtaattttgtttttaagatgatatatagacatatgttatttttttaacgtataatacaccttggtacaattttagaactaaaaaatttaaaattttaagttatatatatatatatattgttactttggttttgttttcaaaattgtataattatatttcgattgttaattatatgatttcatccgtagtatatataattccatattaatatcaactcaaacgcgtcctaccgtataaccccgtcatgtgaaattaaacatcattttgttatttttctaaaatttaaatatttatggtattgaaattaaaatatatatatatatatatatatattgatccaaactttataattgtattttaattgttatatataggatttcacccgtaatatatattgtctcatattaatatatatatatatattttaataaagtataactttttaaaagttttaaattttttgatatttaacttttaagaaactttaaatatttataatattttgaaatttttaaagattcagttctttaaaatagagattcagagtaaaccggataacatttttatttttggatgcctgataaatcaaacttccagttcattgttattcaaaattattttggttctttttataataagactctaaagcattgcccaatttcttaagtaatgtgggatctttcacacttacttttttctttatacatagagtaatatatgtctgtttacaaaaatttgaattacatcatatgcagaaaaaatctaatattttataaactatatatattttatataaaatcaaataaattagatataagaacaacaaaaagtgaaagaaaaagcatatatttatatttaatgtagatagagaaattttagaaaattcgtaattaattgattgtagttcaataatgataagatttaattaaggatttagacacatatttgttttagatagattttgtagaggctaaatatgtaatatagaaaagagttaatttaagtatttaatgcaaactaacaaattataaatttttagtaatagaatatttggttgaaatataactggtaaggacctaaatgttattagtaaatagttaagggatttttgaccaaaaagtctatcaaaaatgtatatgtagatataaaaatcatagaaaactctttaatgtataataacactatgacaatgccgcccattaacaaactcacggaaaaaaaaaaaactacttttctctattttctctcagtattgcttgcttcaagcatatttgtacttagtgtaaatacacgcccattaacaaacgtgaaccataatcttatccggtgaaatacatacgccaccaaatataataatatatcatgtggtcaaatcctgcaaaaaaactcatcaaagatattttgtgtattgtaaaatgattctatagtagtactaattaataggtaatatatactgttaactaatgtggacaattgtaaaacgacgacatagtcattgaaaacgaaatggagtatatctaatctggctgagagaagagttgatatgaaaagagagagcccgtgaacggatatacaaaatgagttttaaatgagaatagggaacccgaggaaacgcgtgacctaagctacgtaaattataaaaataacttatttttatattcatagggtgtgtttttatttacacaaatatatatagtatttgtatcaacttctatgtattaaatataaagagataaaaataccctttagatgcaagtaataaatggagtaacgagatggaaagagtcgttgagattcacacttcagttggcggtcctatttttgactttctaattatcaccggtcaacatattttgtagagattccatcgccgatgctcaagttttttgcaccctgtgaaaacatatatagaggtttttggtcggtgtttgccggcaacgacaaatatgtgatttcttagtttcttcaacaataaactcgtgtttgcctcttatctagctagaatgacctttgtttagtagttttctgaattgcagtttccctaaaccattatcttagtgcacatacataaattatggtgcaatatcattttggtaacgttactatttgttagatatttatttaacagaaaatgtcataatccttaaacacaaattcttatttaaatatgtaaacgttttctaaaacttatggcttcttctgatttattggatctaatatattggagcagccttttgtttaccattggaatactcaagctaagaataatattgttagcttgaaattttctacattctaatgtattctagtttcaactttcaactaacacatcatctttccacatagtaggcgcgtataccttcccaattttgtccctttaaaccggaaactaaccgaatttccctatccacattctaactaaaccgagacaaaccgtttcatttcgagcaagtcttgaacaaattagtttcagagtgctgctattcgtttttggtattcggacaaattaaacttgaaccgatggttagctacttagccaattaaaccgaaactatccaacatcttcataacgtgtctcatttgacagataggggcatttacgtcatttcggagtctccgccacatgtcagatttgttttataaacgaaaaaaattcggtatatttaatttgaagatatccgccggaaaattcgtaaatttgacccttcgtcttcggaa

SEQ ID NO: 9439 - DNA, 3000 bp, Unknown
  misc_feature (1)..( 3000): cDNA_ID_2169255_gDNA_ID_1972120_Annot_ID_178946 3000 nt of promoter + ATG
acagaagatgaacacgcttgaatcactagtgaaatacgcgagaggtctgaaacgaatggtgataaggattctccggatgaagagcaatcacagcagtgcagatgatttctgcgatgatatctgcaagttccggcacatgaacgagcatcttgttcatatagaatgaaataattttttgctgctaatcttattttcagccatttgatttctgtttctctttctggtcgctgagcatttcttatattgaactcttgagtaattgttgtttcctgattcatggttatgatgaacttatgacaattgttttttaaacgaaaaattatggacacatttcttaattagctttcttgttttcttaatctacattaataatatactagtagtgatctagcagaatataattacagtttatgataaagtttgtttttggagtatacttatgtatcaaagaagtattgtcctatgcttaaaaaagataaaagaagataatctccttaaaacaagataaacctcagattgcattacattaaaataaaacgagaaaacgcaaaacgcgcaccaccaacaatttcaaaaccaaaaaaacttgtctatatataacgtgattaactcctgcattgaaaaatgacctggtgataatttcttctcaattcaaatacataaataaatatcaataaaatggcgggccgcgacacattccagctgcgttttgcagcagtcgcggcatccgccgccgtattgatctttctcatggctggtcaagtcgcggagtcgcgtatgatcaatatctgctctcacaccgcgtatccatctttgtgccgacctctggtgaaacgtgtcacgagccctagaaaagccacgcaccgaaccatccaagctttggaggctaagacgaaactagctctagccgaaacagctaggttcaaaaacggtaaccaagcggtcagcacgtgttacgagacattgggcgacgcggtttacaatttggcaagcgcgagaaagagcataaggaaacgtgatgtgccggcgatgaacacgtatctaactgcggctgtgtctgattacggtgcatgtgtggacgggttcattgaaacacaacaggttaatgcgatccaaaatgcagtggttgacttgagaaaaattagcagcaattgcttggcgttgtctacattgattagatgatcgatttaagagaacaattgatttaatttttctcaaaacaaaaactaattaattgaagaaataaaaaatctcaagcaattaaaatttgggtttctttttgttgtttttgttttgagagagatgtttgttgttgatccatcattcgtatgtaacgccactgggtgtaactaattatatttgaatttcgtgtaattaataatcgctagtagattttttcatattcaacaatttgccgatagaaatgttttccattctcctttcttgaacccactttactttttcactatcaacaataagattaagttttgaccgaaaaataaaacaataagtgacaaagacaaacacaaactatagtaatgcacaactttttgttttgttaactactatcactaattcattattgatatggatatcattatgatgtttttagaaagtatatgtgtgattatgttttacttttcccaggatccataacaaaaaaatatctttgagaaaataatttggctatatcatatattggataaaaatattgccatttaaaatggtcttttaactctttttcttaaaatctgtatgtatattatagtttgatatgatcataaaagcattcaataatttttctttcatgcaaaactgatagatcttgctcaatgatcatgtttcaatgtctttaagtgttttaagaaagtgagaattgctttgatttggattgaaaaatattggaccataataaacacacataacattatacaaaattatcctttgcttctatatttaacatacattttgttttccacaatgtgtaaaactctctatagaagaaacaccacacaaaaacaccaaataaggtttagctaggatataattgacatgattgaacaagtgggcttgggatatatatcactacaagaatagaaagataaacaaaaatatcttctgcaattcgtggtttgtgaacacaagagaaaaaaaaaaaaaaacatgtcgaccaataaaaaaaagatacaagagaacgaagcataaaaatatcaaaacaaaaagacaaaaacaggaaaatagaaaaaagaaagaaaaattaaaaaaagctaaaatcaacggtgagaagattctgtatataataagaaaatatcacccaaataaaaaaaaaaggtggagtccacagataccgtccatcaacgtatcactgggctctctttctccgtgccgttcctcctacgtgctcgaataacgatgtgccacgtggtggaatcgaaggataaagtgtcgttttttacttcgattacacgtgagtgtatgtatgtgtgagtgagtgaagaagaacaaagagcgaagaaaccccccagcactcacttcatccataagatcattcaaattctgggatcttctctctttctctcattgtattcagtttcttcgtctcggttcgatcatcaggtatctttttcaattgaattttaccttcaatttcgattgctttcggtgtttttgttatttgattcaaattgcaaattttcttttgatagatattttcgttttgactataaaagacgattcttttcttcttagtgtatattgcacatgttccattcgcagaatgaagtaactgtttctctacaaagtgaaaataaaataaaaataacaagtgtggttctcttgtctaactctgtcagattcttctttttgagacaaatagtataacttgttccttttttttctcatctattgcaaaagcttcattgttttccttattatcttattatataatctctactttacttaacagatccggcaagtttgattcagtgacaagaaagcatg

SEQ ID NO: 9440 - DNA, 3000 bp, Unknown
  misc_feature (1)..( 3000): cDNA_ID_2169259_gDNA_ID_1972120_Annot_ID_178944 3000 nt of promoter + ATG
gagatgccattgagaaactctatggaactgcacaggacattgaaggtgtgatcagagacgggaagctctatgtcgtccagacacgaccacaagtgtgatcaaattctctgaccacttcttaatgtgtacgttacgttttctgtccagtaaactccttatttgctctataagcaaagagtataatacagcataagcatatagtggattacaaaatgtgtagtacaaagacatttggcattaccattaagatataaataaaaaaactgtttattggagttggaagtttctccagcttttgcttcttgaagttgagtgcaactgaaaactgcttgtcgtttcactggtcgagcgatatgactacttagtgtttggcttttgtgaattagtgactcaactgtattcccaattcaaattagggtctaaattgtaataaaatatagataatgtttccttttttcctgaataattttcttttaagctttgacacacgaccgcaattgaaggcgattctttttttgtttctagattaagttagctgccaaatgatacatgccatgccgcttcatccacctctttctttgatcttttctacatttcttcacaattttttagtttgtactaatttaatatttgtattggaatctcgcgaatggccttctctaaagccaaccaccaccacatcagtagttcagttaatagatatgcatatctacggacatttaaagctcacaaaatcaaatgtgtgtatgtttgtagatatcacaatgattcataaaaattacacaaccagtttgaccatatgatccaacaatgcaataatgcaaaatcacacaaccagcttgacctcaccatatgattcacaaccgatctcgtattcatagtatggcgtatatatgcatgcacaataaaaaattatcatatacgtgaaaaattgtgctatccacgataaatatatcgcaatgagtttgttttgacatttacgcaaaagtaaactaggattagaatgtataatcgattttggtgctcaatgcttaactaacaagtttaaggttgtttaattttttcttctctcttaagaatccactaatggtggaaatgtggaaggaagaatatggatttttttataatatgattaggatcttgaacctcacaagttatgcaacatatattatagatgctgaatctcaatttttgaaggtttacattgcatattatttacaagccatgacgacaagtatcaaatttatgtttgccacatattaaatttttaacatgcccatgtccaaatggttgtaactatgaagcagaaaacaatatacataccaataccatttgtaaatactagcatataactctgtacgtattcaaattacattatttctgttcttatcctgtataggttttaaatattgaaaaatataccatgcataatcaagggataggtaatgataattggtgggaataaattaaggatggcatgcatggatgggtccccaacataagcactcgagcatgcattgctaatactcagcctcgcgtgccaacactcccatgtccctaacacaaactacttagtaaattaaaatgatctaatctattatttacaattaattagtactaaactttgttatactcttccactaccacagttatactcttcacgtagttgttcatttatatgtatatttttcaagtagaagttaaaatcttatgaagatataatgctctcgaaaaaatgttgtaaaagaaaaagaaaaaagagagagagtagctgacagaaggaacatatagggaagagagtaaagagaaaaagcgaacttcaagaatcaacaataagaaaaagtaaattatttgcaaattcctctttttgtctcttaaaagatacaaaaaatgtttttttttttaaacacacagagaatgcaaactaacacaagataaaacaagaagaagaaacacagaattttgactgtcattatcataagaaacatagcaaccacaagactttcctttatatttggctatatacatttattcaaacaaacataatatgtttcaggctttgtattgctaattgggaacatttcccctcccccaactttttttttctcttttgaccaacttagcttatattaatttgatttcacttataactacatgttgcatacaatttttgcatattcttatctgctaataagtaaaactatgtgatagtcaagatagcatcaaacctacgggtccaaactaaggtttcaggtctaatattaggtatgggatccatctacactttttgttttttttactgagatagaatttacttattagcagatttcattttaggataaattccgataccaggtaaaatacaaacacaatttgaaaaggaatgattattgtttttaaagagattattcattaacacatgagacatttagactaaacaattactccacctctgttttagctagccatatctatataataggttctaataggtgatttaaggaggaagtgtgcatactcatattcttaagccatggaccaacaaagaaagagagaaaagcattgtagttagattttgcttagtcactttatgtcagtggtcttttatgattttgtcatttttatttcatttttggttcctctgtattcttggaggttaaaaaaaaaggaaaggcatgaatgatttcatcactatccaagccaagtacttataaaacacatataaacatttagactattactttaagacaccataattccataaaccccttttgaaactttctctcgtctctctctctctctttcttgttagcataaggccccaagaagacataagagtgttttcatgattctttatttgggttttgttatgaaaaaatttagcttctatagctttggaaatggtgagagcttgagaggattataaaaatcaagggtttttgtcttcttttgctcacttgctcattctttaatatcgagaaaacgttttgggctttgatg

SEQ ID NO: 9441 - DNA, 3000 bp, Unknown
  misc_feature (1)..( 3000): cDNA_ID_1809380_gDNA_ID_1972120_Annot_ID_178941 3000 nt of promoter + ATG
gacttaaaactaaacaagctcgttgttggaaagaaaaagaatttcccaacgctaaggagctttgtttcgccaattgtccccctcttgaataatttttatggattctgtcatttcgaagcagatttttttaaaaaacgttgataaatctaaatatgtatgttgcatattcgatttaaggttttttatgacatttatttcgattttagtggattcctttacattaatgttacgatattcttattttctataatttaaattcactgaatatcaaccaattacatttctaaataaaaatatatattttataggtgttagataatccaattacagttgccaccaaaaaatatggaatttaaaactaaattacaagtatatgatatttaatttggatggggtttgttaggaaaagataaaataatttgcatagttttagtttttgagtcaaccaaatggatcaatagattaattgagaaaaagaaaagaaaaaagaaatcaatcataatgttttcgaattttttggaaagcttatacgatggaatcggagacgatgacgccgccgacgacgacgaagacaacaacaacgacgagaaaaccccgaaagcctcaacggaaagacacgatttctcgagaaacgccgttcgtttgtcaccggaagaggaggctcaagcgcgtggggttaaagatgatttgacggaacttggtcataccctcacgcgtcaatttcgtggtgtggctaactttctcgctccgttacctgatggatcttcttcttcttcctccgatctatcgaaccatcccaggtttaaccaatctcggtcttcagatcctggattgaatcaatcgcgttcttcagatcgggacgaatcgtgtgttggaagtgatacgccggagactggaattaggtttaggagctgggatttagaagaaaaattggcagaaggcaatgatccggaggatgaggaagaagaagaagaggaaacagatgaagaagaagaagaagaagaagagatcgctgcggttgctcttacagacgaagtgctagcatttgcgaggaacatagcaatgcatccagaaacttggttggattttcctcttgatcctgacgaagatcttgatggtaacgtatacattgagtcaagtctttcgctattagtcttcattgatttgacttataggcatatcaaaagtttgattatttcaacttttatctaatgtagatttggaaatgagtgatgctcaaagaggtcatgctttagctattgagcgtcttgctccgaggttagctgcattgagaatagagctttgtccatgtcatatgagtgttggttacttctggaaagtctattttgttcttcttctttcaaggctcaataaacacgatgctcatcttttgtcttctccacaggttaaaaaaacctgaatctcaatctcttcttgagtcaaaatgattctttgttgttgctgttgtttattcaacaaaatccttttgcttttgcaggtgatggaagctagagcattgtggatgaaagagcttcagaatcagacacattcttcaaaagaaagtagagatatgattcttgaggaagaagatattacaccatcaacttctaattactacaaccatgctcctcctgagtttctttctccaagaatatatgcttttgaacctccttcgattatgtatcgcgattttgaacacgggtttgaaaacgctcagttcatcgataaagctgttattgaggaaaaaccaatccagaagaacgacaaaaatagtgcaagccttagccaaacatctaaagatgttgttgatgatgatgatgatgattggccagaagaagaagattctgctaattcttgggctccaatgtttacagtgaatgaggatgatgtttctttcagtgatcttgaaggagacgacgatataagtagcttagcactcaagtctaagattacatcaaagggcacagaccaaaaaggaacatgaaacatcatctggcttgttgctttgccctgcctcacgagatcgaatcaatagaattgaacataagtactgtgtgctgagtcaaatcgtggaagtcttttgggtgagtttgattgttttgtggatttatgatgtttgctctcaaagagaaggaagaaagaaagaaaaaggttttgattgaaacatgtacagaagatttactttgacactgcaatttcattgtaatgttctctctcgccaaatgtaatgaaatattgaaaagcactatttcattcgcgtggaacttaaaagaaattgatagagaatggcgcaagtgaattcaagtgtaacaaactgttagaatcattattggattggaaaatcatatgggattttattgcttatgttgaggatttgtatgtatgaaaatgggaacaaccaggaggagctatcatcaattaacaaaataactcctatgacttaactaaaaaacaaatctatgttgaaatgtataacatttgtcaaaatgctagtactttgttaataattaaggggtgttattggtttgtgatttatatagagttttagtgatttaaaaatattatatagaatctgatgttattcaattcaaattttcattttttttttttaatttggtattattagtttaagatttataaaaattaatctaaaatcttcgtaagtaagattgcttccctaatacagagaaagaaagaaaaaccaagtaagattggtaatacgatgtcgtttcgcagaataatgcaaagctgaacccaatttaataagctgcacttttctttctttctcgagtctcccgtcgttttttatgtcagaaccaattcgtcaggtcgtgaataagtgactttatcgacgaaccaccactcagctgcagcaaatgatcgtttagctccggcgaagcgtaaaattcttcagatctctctggaattaataatccgtctgtttgatcgatctgattcggcaaatccttgagaaaacaaggagggaagaagaagaagaac

SEQ ID NO: 9442 - DNA, 3000 bp, Unknown
  misc_feature (1)..( 3000): cDNA_ID_3041900_gDNA_ID_1972120_Annot_ID_178932 3000 nt of promoter + ATG
tgttccaattatatttgtccgttagtgcaaaaaggtcttacctttttcgccatcttacagtcttgtgaataattcaaattctaaaactttttgagattcttacagagacattttgtcactctttgcaacagaacagtgtgagaatgggtgaccaatatgtttcttagtggtgatgttctcttttgctttgttggtggaatcttaggactgtattgactggccatggctgctgataccacagcttcaagttactggttgaattggagggtcctcctctgtgcattaatcctcttagctccaatagtattagcagctgttctcatttggaaatatgaaggcaagagaagaagacaacgcgagagccagcgagaattaccagggacattgttccaagatgaagcttggaccacatgttttaaaagaatccaccctctttggttgcttgcctttagggtattctcgtttgttgcaatgttgactttactcatttccaatgttgtgcgcgatggagctggcatattctacttctatactcagtgagttttaatcattatacttccttctcacatttctgaatccttgaaatgaatgaaaaagatctaaactttttttctgaaacaggtggacatttactcttgtcacactctactttggggtacatctcttggaaattccgttgttgaggttactaccttagttttagatactaaatctgtgatactttttttcttcgtagtatgcttcggtgttatctgtttatggatgctgcatctataataaagaagctagtggaaacatggagagttatacaagtataggtgatacggaacaaggcacttatagaccaccaatcgctcttgatggggagggaaatacgtcaaaagcttccaatagaccttcagaagcacccgcccgaaaaacagcggggttttgggtttatatctttcagatccttttccaagtaagtgtcttattttcccctaagttatcttgttgagagtgaagactgtacaatgccatctcaaagcttcaaaaggacttacaaagttttctgttgggatagacttgtgcaggtgctgttgtgctaacagatattgtattttgggcgataatctacccgtttactaaaggttacaagctgagttttgtaagttctggctctaataccgtttgagttccattctttagaaagatttggatttctttgatatgatcacttttttttctggcagtctctatactaaaagtcgacaatgaatatatttattccttacatgtgttattttgactgcagctcgatgtttgtatgcattctctcaacgctgtttttctccttggtgacacaagcctcaattccttggtaagttttcaaaactgaagtctgcggatacacaatctcctgccttttttattagaatctaatggcaatcttctttcttccttatccagcgattcccactgttccggattgcttactttgtactttggagctgtattttcgtggcttaccaatggataatccatgccgtcaagaacttatggtacacacttgttctgttttcttatcttcatagaggcataagtttccatcattttgaccccagatattaactcattgtactgatcaagtactatgactttctgattgcgccaaatggcccactcaaaatcttcttaacaaacagagccgcagtgtctttacgagttttaagggatcttgttatacatgttttgcaggtggccataccaatttcttgatctttcgtcaccatacgcacccttatggtatgattataactcttcacacttactatgatatcaaagtttccaataaaaatcaaatttaacaataaaaaagagacaattgttgtgatcttttactaatgtttctgcaggtacttgggagtggctgtgatgcatataccatgctttgcggtcttcgctttggtcataaagctgaagaattacttgctgcagcagcgtcacaactcgtgatagttttggtctccccgaattcaagtttcatcttctatttatgagattctttgttcacgagagaataccacacatggaggaaacaatggttcatggtcatggtcaaagtcaaagtcaaagtcattcagaaagtttgagaaagtcaaaccctcttgttgagtaagagactatccagaagaaagaagagtaatctccaacactacaacacattaatttaggtcttgtttagtttgtttatgattaaacaagtctcctcaataatgaagtgtcataaataagttatacaatcccttgttgtaaagatgcaaccaaataagtaatgagaaattaataaatatttttcttttaaaaacaaaatttggttatatgtgacacaaatggaatggttgaagttgaaacgttcattttcaagttaggtggcatactctaaaattgaatgaacaattgaacatccaccagcttttttcagagatgcgtagctgcaaagtcttgctaatgtttgttaaataaatcctagtatgtagaaaaataatccaaattctaatgcaattatttgctaaatcctacaaaagtatatactataaagatttgagaaagaaataaacattaaattatgtgcatatgtaaaatgattgttggttataatactaaataataaagtttataacaatattttacaaatttggaagttgcaactataaatggtaaattcggtccttaagattagaagacaaagaagagtcgtgttggtgagctaactacccaacctgtgaagctacccccattctctctcaacggtaaagatccgccattttcaccgatctctgtttcttctcgtttggatctttggaaattttagagtttgttcgttctctctcgtatctcattttggaattgaatcgttagtggatttgatcgggaaatgagtgttttcgcgttcgattagtgtttatcagtctctggatctgtgattttgattttgttttctccagttttcgttttgaa

SEQ ID NO: 9443 - DNA, 3000 bp, Unknown
  misc_feature (1)..( 3000): cDNA_ID_1383941_gDNA_ID_1972120_Annot_ID_178930 3000 nt of promoter + ATG
catgcgacggtaacggagaaggtatcaacgagaacgtgtccgccgtgatctcagtcaatgttttggtgtgataatagaaaaaggagccgtttatttgcgagtgggatccacgcgcctggtcgttgggcaaatatggcgggtaagttttggcggggaaataaagaagaagaagccttatagagtagttaccgtgactttctcgaaacgtggaccagaccaaaccgtcgcacgccagatttgtcggaaggtaattatagtttacttacttggaaaacttttgcactaataaaattaaatcgtgtaaaaatttgttaacattcgtaaaataggaatattaatttatccaaatgaaaaagagggaatataatttttgaaaaagaaaaagcaaaaggttttctagtggttgcaaccacacagacgcaatcaatttattattatgtgtactatagttttcttttgtaacgttacacgatatccaattaatatttagttgaggatttgttatgcttatagcttttgactatgtccattgtccagtgcataacctttgcttttctttcaagttgttaacagcgattctctaggctgaaaaaaccctctaatttgcttactaatttcaatattgacggtctactagtatattagtatgtaagatccgttgaaaattatgtaacaaagaaattgaacctgaaccaccaaaattaaatgttttgtatgattggttgtgagattttcggctaaactgatcgattcagcttgacaagtctgaaaagtagaagccactcatgcaggttttgatatgtttcttgaagggtgttgacgtaaagaaaataaaccatggatgtttggtatatgtaagaagtatattttgtcttcattttaatggaagaattgatctttcctatattcataggagccacctttttggtacgagtttgagtttcttgttttatgagcccatgtgttgatcgtccaattcttgttgtatgaaaagaagttggtgtcggtcaattaaatctgagagactttacagaaatgtgtgtttcgtctagctccaggccggaactattcttgcatagtggaagaaacaaatcctcgtattattaagtctccttgttcccgttattaataagtttcatgtggtatatatcatctcaatattattagaacaatagtataatataactaagaaaatctttccatatgttttatcttgatttgttcagttgttcatattcatgaagattgtatactccactttttatccttgtgatggtagtgtccattttgcctctcaaatatttgaatctctgcttctcacgatttgaatgggtactgtaattttgatttgatgcatgaagatcaaaagctctatattttctcttgattcagtctaataatgctgcatgcaggcaaatactgatgctactcatgtggatagtaagatttttattaattatagcggtcttaactagtttttgaaatgtatcactttaatgtttttttacagttttggaataaaatccaaaattgaaagaacaactaatagcagcaaaccactaacgtgatttagtgatgctgcgtaagtaaattattctttggtaatctcattgtttgcttttagtaccctaaccatatctaaaaccacttggttgttcaagatgtggacgatcatgatgactcattcttgacatgtcttaacgattacttttgtccacaaccacaaaacaaaatccttatattgatattaaaaaataacattggcaacttcatttgaaatctcaattaggcaatgatgcaaaaccaaattgtatttgttaaagaaactttatttttgtataacatttgagagcagttactgtaattgcacaagagttgagacctggtaggtcgacttaagggccattcaagtcacacacagactcgcaagtcacaagaaccacaccctaatcttctaaatttgcggagagcctcatagtttaactttcaagttgcctctatacacaaaactttgtcgtgtattgatgattcaagtggcatttggttggccacataattcaaaaggtatataccggggaccagtcacttttgtgatatgtttgaaggcagatattcatcggggtttggcactctattccaaacaaccggtctgaggaaattatatgtcttatagaaaacgtagttagataagatgtaataggtttatgtcttttcacgtcatatttttagtattcgatttaacataacattttacaatgacaataaatattaatttttaaatttaataaatttataccagatgctattatatgtaaccaaatcacccaattcggtttggtttagactactgtcagttttcttgcaataatttctcgtaggaccgacaaaaaaaaatgaatttaagttttaaatttggttggttcaaaacttaatatcaatttttatggtttagaagaagaattatagctgccaaaagtattttgtccggtaattactaattactctttgtaatctcatttaacttgcccgtttaaataaacagacaaaattaaagaaccctaattaaagtttggcagaacctatgtcccagaaagtaagaaaaaaacaaagtaaactgagaagtcatagtcaaaagacaagttagttccaaccaaaataaaataaaatgtgatatcaagttgaaaaagtgacggatagagaatctatcctttggatcctctcctctatttttagcccttcacttggatctctcttggataactcattaaatgacactatccaatataaccacatgtgtatctgcgtatgtatatgcatgtgtatttatatttagaagcttcctagttttgtctaagaaaatatcttcttgttttgttcctttcagcgctataactcataattctcttccaaagttcttggatttgttccccaaatcaactggagatctaagaagaagaagaagaagagcgaagatcaaaggataaggaagaagagaggaaa

SEQ ID NO: 9444 - DNA, 3000 bp, Unknown
  misc_feature (1)..( 3000): cDNA_ID_2182561_gDNA_ID_1972120_Annot_ID_178924 3000 nt of promoter + ATG
agatatctgtttctgtaaagtcacgtaactttttaatgtattatatatcaaatgttaaaatgcgccaaaaaacaaaagacaaacgaatataaagtgacaacagaaataacagattacaaatgggaccacaattcacaagccttgataacaattactacagagtttctctgtagactaatggtgattagtggttttaacttttaagattagttaatgaaataattaacagagtttcataacggttgcaggcgtttgaagcggcttgggtagcagcttgcaaaatcgaagcatcagtgatgcttgtaccgcctgaatacacttaccttgttggaccgatctcattctctggtccttattgtcaagctaacattgtgttccaggtgagaattgatctcttttatatagaagtgtatcactttggtgaaaatattctaagctttgttgtgaattatgcagcttgatggtacgattatagctccaacggattcaaagacatggggaaaagggttaatgtggtggattgattttacaaagctgaaaggaattaaagtacaagggaaaggtgttattgatggaagaggctctggttggtggcaacaagattctcctttcattgatagtgataccaaactcatcgtccctttgaacaattctgctaaccaaaaccctcctatgccggtaagttcatcgtcttcttcttcactgtctcattcacaacacaatattcatctaagaccaaactctgttttgtttttacatatgacagatcagaagtgagcttgatgagagaatgccaagcattaaaccaacggtgagaaatagatattggcactgtgagattgtaagcattagtttgtttactgatttttgtttctgttaggcattgagattctctgggagttttggtgtggaagtgacgggtataacgatacaaaacagtcctcagtgtcacctcaaattcgacgactgcgtaggggttgtggtgcatgacatagccgtttcttcacctggtgacagtccaaacactgatggaattcacctccagaacaccaaagatgtcctcattcacagcactactctcgcttgcggtaatatgatctccaatcttaaatcctgaatctttaaaaaatctcaattcttaaatctagaaaccttgaattatgcaggagatgactgtatctcgatccaaacgggttgctcgaacgtgtttgtgcacaatgtgaactgtggaccgggtcacgggatcagcattggtagtctcggcaaagagggtacaaaagcctgcgtctcgaacataacagtacgagacgtagctatgcacaacacaatgacaggtgtccgaatcaagacatggcaaggaggagtaggatcagtgaaagggataatcttctcaaacattcagctcaaccaagtacaaattccaataacgataaaccaattctactgtgaccatagcaaatgcaagaaccaaacatcagcagtagcagtggaaggagtgacttacgagaggataaaaggaacttataccgtgaaaccggtgcatttcgcttgtagcgataacttcccgtgtgtagatgtgcagttatcgtcgatagagcttaaaccggttcaagaaaagtatcgaatgtatgatgcttattgctggcagacatttggtgagctcaacactcctactcttcctcccattgattgtttgaagattgggaagcccccgagaaacaaagttcagtccgatcacgatgtgtgttaacggatttttcgcaagtaaaaagatgtagattcatgtatatcatctttctttagcctataaaacctacttcatacgaatttacggtttagatattaaaaatgatgtctcttgctacttaaaatgcctcactttattaaccagcaccaccaaccaagtgatgatcaatacagcatttattattttgaatgggctagagttttttcatgcaactggttacacagaggttgttgtatctttgcttcgtgacctgagtagtgagtgttaaagatgagtcaatgttagttcataaattgaagagttgttacatcttgttccactaagcatgagatctttatttccatacttgttgatggatttatttcatattaaatgtataacggctgagatggtgaggccacagagaggtgagaagagtgtctgttacaaggaacaaaagcaaccaaaaaagtttatacttgttctctgactttcttcatatcaaaatttgcatagaatcatatatgatagtgtttactaaatggatgcaaaatgacagaatccaacaaaatcacatagcttggaggggatgatatgaagtcaaatgaaagatttgattgatggtcatgaattacaatatacaaatttgaggggttaatttgaaacaaaatgtataactttagggtactttttatatactatacaaaaataggagggtgctagtgaaactttcacattcagaaatcacaaagtagtagaagaagtttcttcatatttcaatcacaaaatcgtctttgtgctgctgattggaagcttctctctctctcggtttagatccctttcaattctccaaaggtaagctccaaaactttccagatcgtcttacattctttcggatattctggatctgcattcgaattccattaaaattcccttgatgaactgatccgaacaagtatctgagtttttttttgtgatctgagtttttcgttagatcgctcgccattgtcgtcgaatgatcgtgtatcttggggtgtagattttgctttgtttcctgatctcttattatgtggattcaaaggatcatgaaatgttggatttttcgattgtcgtgttagtagatgcatttgatgtaaacattgctaaaaggagcaattttagcgaacagtgtgaaaaaaatgttgtaagtttttgctaagaagaagagtgattcaattgtttaatggtgtgtggatctcttgacattttcaggatcaacagttaaaaggaaaatg

SEQ ID NO: 9445 - DNA, 3000 bp, Unknown; identical to SEQ ID NO: 5564
  misc_feature (1)..( 3000): cDNA_ID_3041922_gDNA_ID_1972120_Annot_ID_178920 3000 nt of promoter + ATG

SEQ ID NO: 9446 - DNA, 3000 bp, Unknown; identical to SEQ ID NO: 5562
  misc_feature (1)..( 3000): cDNA_ID_3077660_gDNA_ID_1972120_Annot_ID_178922 3000 nt of promoter + ATG

SEQ ID NO: 9447 - DNA, 3000 bp, Unknown; identical to SEQ ID NO: 5563
  misc_feature (1)..( 3000): cDNA_ID_3077668_gDNA_ID_1972120_Annot_ID_178921 3000 nt of promoter + ATG

SEQ ID NO: 9448 - DNA, 3000 bp, Unknown
  misc_feature (1)..( 3000): cDNA_ID_2182776_gDNA_ID_1972121_Annot_ID_178964 3000 nt of promoter + ATG
ataacaaattgtatcacttgaattattctaaaatcccataataaaatgttatagtgtggtagatttaaagtacaaacaattgtttcttgttatgtagttagaaactagattttagcctgaggtacaccatagaaccatatatatatatatatatttaaatgaaaaattaatttgtttagtagattaaaaatagattttttggtttgtattttctaaatgtacaactgttgagtgatgtctttttgttgttaaaaccaaacagaaggaattggggaaactaactagaaactacaactagaggtttggttaactaagtactttttagtatcttttgctttttccttaaatcatggagtaggaagcttgtctacaaaaggtgatgtcttgtagtaggtaaggtgtaggcgtgtgggtgtaacagagaatgtttgttgctttctctatgagtgtgtgtaagaagaaaaacagagctatgtgttcttgtaatgacgtttgaatgataacaagtttaaagaagaattttagctactcaatgttttcttttctcaaataaacatcaaatatctataaaaaaaaaacaagtcttatatatgtatattattaagtatacaattactatgtttgaattttatcatttaaaaatataggaacaataacatacatttcattaatttaaaatctagattatatctacatacatttcaacaataacatacatttcattgttttgttaattttgtgtttaagatgatataattgtattttgattgtcatatctaagatttcacccgttgtatactgtttcgtattaatatcgactcacacctgtcataccatctaatttgttcagtgaaattaaacattattttttatttttttttgttttaatgatactttattttaaaagatatataatttaaatccaaatgacttagaccatctccaatggttaagaaccaattgcatcttaaaaattattaaaattaaaattttggaacatgacacataactgtttttgtcactcataataaactcttagctaagaagcaaatcttagtttttaatctgttttgatttatttttgggtattatcactctgtatacatagaagattacaaaattaagtgtcagaaaaagctactgttgagccttttctctccatcatgaaaatactcttatacccctatatcatatttgctcttgacgttaaatatgttgttaccttttaataataatgttatcatctttccataattataaaatctttgaaatcaaatcgttggttcaatagctggtaatttgtttatatcgtcaactatattattaacaggttaaataggtttgtaccctaagttttttcatccatatatcaaaacctcatccatattttgctaacaatattatcctgataatacgttatctgctaactattttgatgcatgtattttttctacatgattattcagtcgcaagtcaacttttttgctcttcatgctaaatattttgttactttttaataataatgttatcgtcttcgcatatatatatatatgtctttgaaatctaaacattggttcaatacatgaaaatttgtttatatcgtcaaatatattattaacatattaagttggtttgtactccatgtcatttcatccattcatcaaactccatccatattttactaacgatattatctcgataatgcgttatctgctaactatcctgatttttatcatatctctttatagggatatatttgttatatagattttagttgaaaaaattaccaaaataaatggtcttcatgtatagattcttaattatttgatggtgcatgtatagatttttaactcaccctttattttttaaaatttaattctaagatattagtctaagatagacctaagatgcatcatttgaggtgttcttagattcttggttatttgtagactacacaataatattttgagttatcgtagttgtgcctatttcgataagtctcttgttcgattgttgttctgaaatggtttagatcacgatgttgaaactttgattatgttggtgtctcttttaaaaactgtttgtgtctttatatttgtcttttcttctgcaaataattgtgttgagaggtaaatttgttcttactttcggattggttggtttctcattatcaattttatggtgatcgtacatgaatgtagcattattattagggtcaaaccggtacgatccggttcgggtttagacagtcaaattatataacaaaccaaactgaaaaaaaagcacaaagaagagaaataaggtttaagatctacaaatgatgaagaacatttgagattctgactttttacgatccaaatttttaaaatttatgggttctgataaaaaatatttcaatggcaaaacatggtatggaaagatagattttgaaatgatatggaaaaacaaaaaacaagtgaagttggtgattttgttgttctatcctgaaaaagtctatccatctcttgttctcatcctttctgaggaagtcaaattaaaaactgtatgaaggaagcgaaaccgtatggagcggtagtgctttgggatgtcatgcatatagaattttatagagagagagagttaaagatacttcattcttgcctaatagacggacgtgtgtgtgtctctctctttgtcttagtttagctttttgaccagatttaacatttttgtggtcacaaagctcttgttgagaaaaatattatatcaagataacgaagtaacccaactcgtcgaagttcatactgtaattaccggcccaggcccataatattattgtaaaaagtaaaaacattggggttttcagttcaatatacttttgcctgcactcaatctcatagaaacataatactacgaggaccaaattgtaaattagagaaggaagccgaaaggtcagtggaaaagtactacttgtctttgtttaacttccacagaattgacatcattttatgattttcagac

SEQ ID NO: 9449 - DNA, 3000 bp, Unknown
  misc_feature (1)..( 3000): cDNA_ID_2110032_gDNA_ID_1972121_Annot_ID_178982 3000 nt of promoter + ATG
ttttagtatgatattgtcctctttgggtctacatgttcaagccctcaagaatttgttattgggttacttcccaaaatgcctcatactagttggagttggacttgacttatatattagaaactctttttcttaacttccgatgtgggacctttggtttatacccaacaatcaaaatacgaattagttacgaattataaagtataaaaacgtaattaaactcagatgaatgaaaatccccaaactcagctttcctcttacggaaataaacgaattttcatgtaactaccacattgctcgatgtttattttgatcgcgtacaagggaaaaaataaaaatttgaaaaatgggggatttgaagtatttttccaatcccttattttactcgtctaataaataagaaatgtttcgctttatcccttaaatgtttacataaatctattgatatttagtgatttgagtatcagcattcagcattattgataactaaagtgggaaaaatgctcataccaaattacaaatgtggtaaaataaagaatttgtgttcttgctctaccgaattaaagaaaataaaaattattattctttaaacaagagaattttgctgcataagaccaaggaaattgtgtccgcgtgtaagaattgttgatcttacgtggtttgtctccagtcgattttaaggttttgccttgatcctagtgtttcttgctctctccgattagttggtgaggtgtgttggtagttgtatttggtttttggtcgcgttggattcttgctttcctccctgtcggtttgctattggtttgtcgtcggtgtgaggtttctccggacttattggtgcttttggtatttacaggttctatagggatgctttgtgaaagtctctcatgcctttgttcaattctagtgcttagattgttttttctccattaattttgtatcttctttcgatttctgtctctatatttggttttaatcagttttgctatattttggagtttagtttccctcttttgggcaaatgtttcagggttattgtgagaaaaaacaaagaaacagtgattattttgacggagatcgagagagagttaggagaaatattaaaaacaatcggagaaagccgaaaagaacgacgagatattgttttctttttcctaaattattctttaagaaaaagggcgtgacggggacgatatcactgagcaatcaaaggggtgatttataaatctaagtgacggcgatttagttgtttgataagttctttgattgctgatttggaagattttcttttaaagttaatccacatggcaaaaatattattattagaagaagataaaatattcattaatttttatagattttctgatatttttagctaaaacaattctaaatttatataatatttacgagtttaaaaaaagcatttacatacataacttaattatcaaggaaaaatattaatagttagagatatcaatgttacaaagttatcagaacgcacaaaaatatacagaaagaaggtcaatatgataaatcaaattcagaaaacgtaataacaaaaaatatccaattaaaataactaaattaatatgaggttaggtagcaaacgtctaaattacaacacaagtaaatttttagccattatggattaatgactattgataaaaaaaaaagtaaaaaaaataagtagaatagaatgaaagtagtgcttggtacattattatgattttttatttagtgaatgttttcagaaaaatttatttaagagtaagattaatggagaatttaacacaacaatttttttttgacttttttttcaattagtttgctagttttttaatttaattaatgtagaatgacacatatcattatttttatgataatatgtcactcatatgagtgtttgacaattttcatatatataatttcaactaataataatttagattaaaaaaaaacaaggaattcaatgccaagaatatcatataaaatatataggaaaagtattaaatttggttgacttttcattttagtcacaaacttttattaatcaacccgatttagactcgtcataaaatattttgatgaaacgcattaacgaggttaactatgtgttacttattatcagttatctccataatcaatctgctgataaatcaacacaatttattttaaaaattttagtcaacaaaaatactgatttaaagtatctaaaggaaaagttaatgtcttttcaaccaaattatttgttaaaaaatacatattttctaaaataatatgttttgctaataaataaaaagcaatttaaaccgaccgaatgatatttacttttgtactaatttggtttctattttcatcataaaccaaattttaataaaaaaaaattttttaaaaaaaacctatgaaacaataacgccggattggaaatagtgtttttttttgggatttttttaaattaacaatttgctctaatttctttatttaaaaaacgcagaaaaaaataataagataaaaagaaaagtgagcacgtagttgtcatttgcagatattatcatttgccaattttcttgtaaattcacctctttccttcgtctatctatcctcccttccgcaacattgtaagaacaccaaatcccctctcatttccaattttttgtatatcttcttgtttcatatttagatcatccaatctctaagaatgttaaaggtcaaattttaaaatttttttgtcggtttttttttcctctccggtgtcggaatccgacaacgtaaggatgattcacataggtttttaatttttgatatgaaaagagattcttctcgtgattggcccatttgttttgttttcaacaatgttcacgttttgatcgcaaatttaatttgatttccatgataaaaattggaactttcttatgttgtgatcatttacaacaatttgtgcgtgatgggttgttctcaatgtaggattttgtttgatgatcgttgggttttgaaagaagagca

SEQ ID NO: 9450 - DNA, 3000 bp, Unknown; identical to SEQ ID NO: 9320
  misc_feature (1)..( 3000): cDNA_ID_2035097_gDNA_ID_1972121_Annot_ID_178988 3000 nt of promoter + ATG

SEQ ID NO: 9451 - DNA, 3000 bp, Unknown; identical to SEQ ID NO: 9306
  misc_feature (1)..( 3000): cDNA_ID_2035053_gDNA_ID_1972121_Annot_ID_178999 3000 nt of promoter + ATG

SEQ ID NO: 9452 - DNA, 3000 bp, Unknown; identical to SEQ ID NO: 9307
  misc_feature (1)..( 3000): cDNA_ID_1396277_gDNA_ID_1972121_Annot_ID_179001 3000 nt of promoter + ATG

SEQ ID NO: 9453 - DNA, 3000 bp, Unknown; identical to SEQ ID NO: 9308
  misc_feature (1)..( 3000): cDNA_ID_2035028_gDNA_ID_1972121_Annot_ID_179004 3000 nt of promoter + ATG

SEQ ID NO: 9454 - DNA, 3000 bp, Unknown
  misc_feature (1)..( 3000): cDNA_ID_3041184_gDNA_ID_1972121_Annot_ID_179012 3000 nt of promoter + ATG
gatcttgctgctgctggtatccaaaatttatcagatttggtaacatcaaactcctcaagaattctttcctttcttggtttctttaaaaaaaatcatcaagaatatgtttcttgattcattctttttttctacaactttcccactctttaaacattatttagcttcatgatttttctacgcagagtgatgatgattccaagaatcaaatgctaagaaagaaagagttgttgcttcaaaacatagaccatgcagtgaatctattcctcatctacgttttgacattatccatttttcctggattcttatacgaaaacacgggacaacacggactaggtgattggtatgcacttatcctagtagcgacatacaatttttgggatttgttcgggaggtacgcaccgctggtgaaatggctgaagcttgagaatagaaaggccctaacgattgcggtcttgacccgttatttcctcgttccggcattctatttcactgcaaaatatggtgataaaggatggatgattatgctcgtttctattttgggattaactactggacatctcactgtttgcattatgactatagcccctaacgggtacaaggtaatctatctactctccctatgctgttaaccaaattaatttgaatatatctagaaacttagattagttcatatttagaaaacaaaacacattatctttacaatttttttgtgttataccctttgcttttacgatttgaaaatataacacaagttttttttgacatataaatacaaacactataataaacaaacgacctctaccttcatatttaatctgattttgtattttgtgaagggtccggagaagaatgcattagggaatttgctggtggtttttattttaggaggagcagttgtaggaatttctttgggttggttatggcttattggcaagaaatatgctttctgagttctcatcattttgtgcaattaattccgatgaatctgactctttatggcaaaaaatgagaagcttggtgcctcgctcgaacctaactgtttattcatgaaaaaagaagaagaagagaatactaacacgtaaaactttcgaaagcttgaagtgatgaattcttatttcgatgcttcaccaaattataaaatttcactttttcaactccacaatttgctgtatctattttagttaatattttagacccatttgatcattttattaactattttctaaaatcttatatggtgttatttaaccatagatttttatagaaactaaatcctaacagtctacttttgtttgatcactgattataattttatgcattaaagtttagcattgttccatcagatatttgtaaaacaaaattaatagcaaaataaagtcattcatttaagctagtaacggacggttttcttcgagagaaaaccagtccggagtagaagagcttacatgggaaaacatagaacctcgtgctcttttcttcttagcaagacaatcagcagagacattgtttaagtatgtaataaaagataaagaaaaacgagaaaaactaggctttgaagcattaaaatcttttcactccgaagaaaaagcggactactcatcaggagtgttcaaaagttgtgtcgactccttactatctgtctataaaataatgtcgaaaatggataaaaatataagaaatcgtattgcccataagagagcctcaacagatatttgtaaattatatttaagagttttaaaatttggtcttattaaccaagtgttcatggccaagtgctttcgtcatgttggtccagactagagaacacttcttttaatcatgaaaacttaactcattgtttcctttatgtaaacattttaaagtggcaaaagttttttcttaggtatctacaaatattgagaactagtttcggttacgatccaaaaaagaagtaggtgttatttagttaagattttaaatattttgctaaaataagatttcaggcattttcgtgtaatttacaaatacaaaatgtagtgtgtaatttagacccatatttcctttcaaactaaccgatcaaaacattgatcacaaaatccttgtgtgcaactaattccccaaaaaagaagaggagaatactaacacgtaataatcaatttgaggtgaagtgtttatttatttattttgctaaatatttgaggtgaagtgttattttgataaatgcttcacttatcctttttcttttttacaacaaaattagttcatccatttaaattagaaacggatgattttttttaggagaaaaccagttcataataaaagattttatatgaaaaaaagataaaactttgtgctttttctttttcggcgaggcaattaataccaatattgtttaaacgtaaaataaaaagataaagaaaaacgataaaagttaggttttaaaatattaaaattttataattctagaaatgtccaaaaactaagtcaactacttcaaatgcttcacttatccaacttcaccgattctcatcgagtctatttcatacatagtttttattttcatttattacgtttagaccgatctcacagatatgtggatatttaatgattaaggattttaaagaaagttttgctttcatactatatcgtcaacaagttgtctaaaaataggaacataaaaaaagctttcacactttgaattctttaaattctataatcttttctttttctttttgagtcttactttatcctttcatatttgctgtcacaccttgaaaaggtctattattttactcgctcatctcctctttttaagaatcttgttttgaatcttcatgaaagctttgctcgttaaaaaatcaacaaactcgttgactctgcaaaaccctcatgtgctaagtttcaagtaagtatctctagctcctttatttgctccccagcaaaaaaaaaggaacatagcatcatcttgtgtttgatccaattcttgaatcttgaaaacaggtttatgttcttttgagctca

SEQ ID NO: 9455 - DNA, 3000 bp, Unknown; identical to SEQ ID NO: 9317
  misc_feature (1)..( 3000): cDNA_ID_2182840_gDNA_ID_1972121_Annot_ID_179003 3000 nt of promoter + ATG

SEQ ID NO: 9456 - DNA, 3000 bp, Unknown; identical to SEQ ID NO: 9318
  misc_feature (1)..( 3000): cDNA_ID_2035049_gDNA_ID_1972121_Annot_ID_179000 3000 nt of promoter + ATG

SEQ ID NO: 9457 - DNA, 3000 bp, Unknown; identical to SEQ ID NO: 9305
  misc_feature (1)..( 3000): cDNA_ID_3041196_gDNA_ID_1972121_Annot_ID_178990 3000 nt of promoter + ATG

SEQ ID NO: 9458 - DNA, 3000 bp, Unknown
  misc_feature (1)..( 3000): cDNA_ID_3088384_gDNA_ID_1972121_Annot_ID_178987 3000 nt of promoter + ATG
atgtaacaagaatgatacacaaaacattctttgaataagttcgctatgaagaagggaacttatccggtcctagatcatcagttcatacaaacctccatagagttcaacatcttaaacaagaatatcctgatctgaagaatgtggaggctttagtcccttggatacttgggaggctgtggaagaacagaaacgagctggtgcttaaagggagggaatttggaaccaatgaggtattagtaaggacacaagaagatgcagatgagtggattagaaggaaagaggctcagaatgtaaggaaagcaccaaccacaacaccgtcgggacagacgagaaacatgggaagctccaccacaatcttgggttaagtgcaactttgatggggcatggccaacagaaggattaaaatgtggcttagggtgggtgcttcgcgatcatacagggaaggtgttatggttaggtgcaagagctgtggtaaaagtaagaagcgtgctggaagtagaagtggaggctcttagatgggctgtgctgtcattatcccgattcaattataggaagatcatttttgaggtggattctcagcaacttgtgtctttggttacatgaaagttatgcttgtcaagtctcaatccaattatccaagacataaagtatctacttagcaagtttgaggattttatgcttgtgcatacaagccgagaaggaaatggagtggcagatagaatagctaaggaatctctttcttttgagaattatgatctaaagttgtattctattgtaccaatttgggttaaaagctctgttgagctagactgtgtatccataaatgggtgaatggaaagtttgttgttgagccaaaaaaaaaaaaaaaaaaatcatcagttcatcatattggtagtcttgtttgataagttctgctttttttaccttccagttttgccatttgatgttgcaatgagatttcttttgctaatgttttaaaataacaaagttgttgctgctagtgtttccaagttgtgtttgctgaaattagggtttgtaacttataagagaagcttgatcgctgctttcgactaaagggaattcaataacaacaagtttacttgaagaaaaatattaaaacctagaagaaaagagttacacctacaaataggataaaatccacataaatttctgttactaaatgtatcatagttttgtttcttctatgtatctacatatactcaaaaatttcaaagcattgtgacttaagggccagaagaaaacttgaagaaagattaaaacctattagcaaagagttaaagatccacataactttctgttgctgaatgtatcatagtttttggtttcttctgtgtcatatatacagactttctacagaactttttgagcacaaagcattgtgactttagagccacgagtaaaagacgaggcaaaatgtgtatcacgtccactaaccatataaactgtttcggctggaagaacacggttccactcgaatgactgatcttcgttcaatactctctctttctttctgtccacaaagaaatatccttcgtgaggcattcttatatgacccctccgaccactttcaaccaactcggttctcagtattttcacttgatccgtcgagttcacatccacctcaataaatctcttcagacctttacactcacttgaagctgccaccacatatactttaatcttcttcttcgggtcagtgatctctttgactgagtttgacgctggagattgctccatttgaggcacttgaaccgtcacagacgaatcttgaatcttactggtctcttggataacacgtctgggaacaatcacaattgtatccaagggtttaacactgttacactcgtatgactgatcttcgttcaatacttgattattgtgcgtaaagatgtacccttcttgagccagtttcataagacctctcagtgttttcacctcatccgtaactttcacttgcaccagaatattcgttgggacttcattcataccaggatatggcgacacatatactagcatctgccggactcttttttttccgttagtgatctttttgactaagtttgactgtggaaattgcttcgttggaggcacttgatcgttgttgttcttactcgcaaacttcacagacgaatcttgaatgttaacggtctctttgactgagtttgacggtggagattcctctgtttgatgcgcatcttgaatcttactgatgtcttgggttgtctcaggccgataactgtaaatctttctgatctcttcctctgtcaaaggccaatcttgctccgcaaagtactcttcaactgaaatccacggtgctggaggagattgctctgtttgcgggatttgatcgtcgttgttgtgaatagggttcacgtcaggagagacttcgagttggatttgagaatcgtggaagatctggcattggtcgaggttaagatcttctcgaagaataaaaatgccgtcgacgataagggtttgtttcgaaactgggacacgttgagacttctcgatcttctgtttgaccactaacaatgtatctgtgcgttccacttcaatctcgaacgatgaaccacccagaatctcgaccacaaacttcatgactctatcaatggtgtttcaagatcaatggagactaatgaagaagagagtcaagaaacagagagagcgagagagaaagtgattgttttgtaaagatagttcacgatagaatttggttttaatatcattcattcacatatcaaatgaaccgcatttgggcttgacccatttttattgggttacgtggctcttaagtcaatgaaagcctcacataaaatcatcagtatctatgctacagtatattcttacttatattatccaacggtaatgttataaaaagattgattaaaactatctagatccgacccattaaaccgtaaatctacaaatccgacccattaaagattcttgccggagacgaaaggtattccgattgaggag

SEQ ID NO: 9459 - DNA, 3000 bp, Unknown
  misc_feature (1)..( 3000): cDNA_ID_2182795_gDNA_ID_1972121_Annot_ID_178971 3000 nt of promoter + ATG
ttccaaatcgagtttcctgccatgtcgatttcacaaaacacgatcagttttgagattagcaatcacacagacaagaggacaaagatagaaaaaaagaagagggaagagaacataagagatgatcacatacctgtccaacaccggcaatcagaaatttacccgattttgcaaaagccaaagagttgacaaatccagtctgtaagatcaaacaaggcattgcaaggattattacttggtgaagtgaaatgcattaatcacagtcacaaacaacagattcatcagacaacactaaggaatataactagtgaacgaaaatttaccagtggaagctcgtacaaaggtcgaattgcattagtttcaacagcccacaaacgcacaaaaccattaccagctccagatgcagcaagatcactgcctctactagtagcaactgcattgacccaagaatttgctgaacagttattgttgactggttcatgatcaccgttttctgttaagcaaataaataagaattagatatttcagagcatcagtagctgcaacgaaacaaaagtgttttataactatatactgcaatgtcaagatccaactgcaacagagatgaaatggggaggatctaaattaggtttcacctaagattccattggtggtaatcccatcaggtatatcttgatgtgcattcttgaaaacgaacaccggtttcttttttaacatgccccaaagagcaacagttccattatccgaaccagacaggtactcattatcactgatgaaacagcagctctcaagagacgatgcaggagctcgatagatcatacgggtgctctcaggcacctataatcatataacaagacttacaaatacagaataataatagaaaccttatgatgatatcttccaacagtgtttacatggaggatagaactattaccttatgatacagcatggttctatctcttccaaccgtaagtgcacgctccttcctcagtgcatcaatggctagaatttcaccctggtgtccatgattttcagttataaatgctttatcttctacgttccacaccttcacagttctatcaaatgaaccagaatagagttctgaagttccgtatctgaaacatagacaagaaactgtgttccggtgacctggaaaggcctgtagacacataattgtaatacctgagcgcaagacttgatgaagaacaaataaaaaaaacactaaacaaaaaccaaatttattatcattacctggacatgctctcgggtacgaacatcccaaatatgaacatgacggtcaactcctccagtggccaaataacgaccatcagagctaacagctaaagcaagagattctctactgtgatttttgttacgaggctccctcaatttcatcccatgcgacttgagaatttcatcacttggccatatgtatttgtcagttttaccagaagatacatcccaatgcataatagtaccatcttttgaagctgaaaatcctctagaatcgtcatccgataaagctaccgacacaacagatcgtcggtgcttgacaataacactaaacccatcagtacttagtggctcctgaaccctgaatcattgaaaaactttaatcaatactactatcaaccaatcttcaaagatatcaaattgacctaagaaatgtacaaaatcactaagtttcttcacaattaaaccagctccctaaaacactaactacccacaaaccctaaattaccaacaatctcaaacctaaactatctaatttgaatacattgaggtactaaatttcttccttacctcgatgcaataagtcttcgaatcctaccactatcctcctgctgcttctgcatcaaactcttcttaatagtctcatcgtcatcttcatcatcatcatcatcattatccgcttcctcacgctctctcctcatcgcttccctccttctattcagcatctcctccgccaatctcttccgcttctctcccgccgtctcatcagcaaactcatcttcatcctccacttccccatcaactcttctcccatcttcatctccgccagtaaatccgttctcttccgcatcagagtccacagactcgatatcgtcgtcatcgtaactgacttttctccgtttcttcggctcttcctcaaaaaatggatccctttcattcgaaccctttttacctcctctcttaaagcttcctcctttcttcttctcgttgttgtacttcattcttctctctctcactccctcttagggtttaacgattttacactttgactcgtctaggtttagcctcagggtttagtggcgacggaagaagctggaaaacgattttgtttatttggtcggaaagtttacaactttaaaccttccactaggttttcttcaggaatcgggtctaccgggttgacccggactaaccaagcccatgacttacctggtctatggtttgagcccattaactatttcgttcttttaaagcagaaacttgggcctttaatttgtagagccgaagactaaccggaccgtcaatttaagtttggttcaatccgatttctgaatttttggttctgatttctgaagagtagtacgtaaaccgaattgggagattctcttatttcagtaacagtttaatacagtttttgtttagtgttttcaatttcggtattttttacaaactcgaatcggatgattccggtttaataaaatcaaatgagttcggtttagctgaatttaaaactgtttttaatcttatagtataccgaaccggaccatccatctaatttcaattgtctaccaaaaccgaccgaccagtctttgtcgaaagttgtctttcttcttccttgttcgattttcgcctcctttggcttttcattctctctctaacttctctatgttaaaattccgaaagctcgattcagaaatctagaagcttcctcgagggccctcgcgtagaaagtcgaactcaaattccctggagacaaagaagaggaagatg

SEQ ID NO: 9460 - DNA, 3000 bp, Unknown
  misc_feature (1)..( 3000): cDNA_ID_2182799_gDNA_ID_1972121_Annot_ID_178972 3000 nt of promoter + ATG
actccacaagagttctttctaatgtgaactctggaaagacttatgcatgcccagataacaaagttaaatgcatgtacaaaattcttcgtagcacaggcatgttaagatatttgcaatacctgatatagtactgcaatagtgggctttgcacatccaaacagaaacttgatatccagaacctgcaattcctcaagcctgaaatttagacaccacactcagtacatcatcattcagttttaaatatccccagaaaaatcatatcgtagtgattctagaggaatgagtatattgaggattaaacagtttatttacgaaagaatctgatgcctggaaacaaatgcacactagaattaaagagtacctgatattaaaagcttccttgagctgtcccttattatcaaatggaataacctaaaagaaaaaccaaggaaatagaacgcatcatcatacatgtataaacagatagattagtggaagttcagtaacatgatatatttaagtaaacaagcacatctgtcaaagtttttatagaaggtaacattataccttgaacaagccgtcatacagatggagtccaattaatctacaatctggatcaattataccaatctacaaagcaattgtcaaatcagaggtaagctacatgcccaccaaacccttaatgacaacgcatattttttgatgaaggaaagtaaatatataagcactctgaaatgcacagtcaagacgacgatattcaatacctgaccattgtctgttggccggcctatacgatcagaaacatcccccattgctctgaaaaaagtcaaaacatcatacagaatcagctgtaaagtagaaaatggtcatctgatatattgcttccaataataaccagtaagatgcaacaattacgccagcaccatacatgattttttccatgctttggatatacagcaatgtatcaattttgtgaaaggtgagaacctataatcaaactctcataaaaaatgcttaatcagaaataggttatagatcagattttgtaaagcaggaatatgctgtaaacagctatctaaaacaggcaagttggtaccatgcactaatctgtacataggtgacgagtgtaatacatttatttctaacaaaaaaatgataagataacggcgaacatgatcatgaactaaaagaaaaatagcacaactggttggttaacatcaactggatgcatggaaaaaaatttatcttttggaagctataccttgtaataagctcagaggactcaggatcccattgaagaacacagaatttgtatctctcagttgcaatgaacaaaaagtcttgcgcttcgccctacaaaagacggtggacaatactatcaacattttaactcattattaagaccatgacaaaagaacacaataagagatatatactcacatggggtcggaacaactccagagtagcgattcttccatatataggaacgtccaacataggctgcaatataggaacatccagcagattcttatattactaacaaaacaaagcatgacaacaaagtttttgaactttatactctaatgtacatggaacttaatccatataagcttgacagaatagagatgtatgtacctgaagtccttgtggggtaagcaaatggatctcgattcgagtacatttcctgagaacagatcaacactgctgtcaaactaatctactaatggatctgatagatgttacaatttaaggggacaatgctaaatcggataaatgagataactttcaaacaaatttacagtactgatagctaacgataattgaaaatcctccatatcaaaaaaggcacgatcttcaaatgtaatttagttcaggaagtaaaagccataccaaaaaaaacacaattctttgtcacagtttcaaaaaatccacctcatcaaagaacccagaggcattaaaatccttatagtcatctcccaaactgaaattgaactacaattttgtttgcaaagtgggtaaatttatgaaaattaactcgtgatgggaaattcattgaaaaccctaaacccaaatcaacagctgcaattcaaaaggggactaattgacaaacaaaaattgataacaaatagaggtagggggagagtttcgtacgcgacaatgagattgagctcttgaggacttgtgaagttgccaacgcacgagtgagtgacactggtcggtttgtgagccgtaacaacgtagttccatgagctcatcttcctcttctttgtctccagggaatttgagttcgactttctacgcgagggccctcgaggaagcttctagatttctgaatcgagctttcggaattttaacatagagaagttagagagagaatgaaaagccaaaggaggcgaaaatcgaacaaggaagaagaaagacaactttcgacaaagactggtcggtcggttttggtagacaattgaaattagatggatggtccggttcggtatactataagattaaaaacagttttaaattcagctaaaccgaactcatttgattttattaaaccggaatcatccgattcgagtttgtaaaaaataccgaaattgaaaacactaaacaaaaactgtattaaactgttactgaaataagagaatctcccaattcggtttacgtactactcttcagaaatcagaaccaaaaattcagaaatcggattgaaccaaacttaaattgacggtccggttagtcttcggctctacaaattaaaggcccaagtttctgctttaaaagaacgaaatagttaatgggctcaaaccatagaccaggtaagtcatgggcttggttagtccgggtcaacccggtagacccgattcctgaagaaaacctagtggaaggtttaaagttgtaaactttccgaccaaataaacaaaatcgttttccagcttcttccgtcgccactaaaccctgaggctaaacctagacgagtcaaagtgtaaaatcgttaaaccctaagagggagtgagagagagaaga

SEQ ID NO: 9461 - DNA, 1204 bp, Unknown
  misc_feature (1)..( 1204): cDNA_ID_2182627_gDNA_ID_1972122_Annot_ID_179023 3000 nt of promoter + ATG
aagcttgtcagtgttgtatccacggataatctcgcaatttttatcaaaagtttgatcatcacaaaattttggtaatcagtctcctttgattttacttgttgaaatgaaaacatgcaacaaacagtttatgagagtattgttgattcaagtaaatcagttttgaataaaactgtactcagattattgctgctaaagtatatgattcatgaaatctgaaattttgaattagttcagtgtttaggctcaatatcaaatattcgttttcgccatttgctcattcattgtgaagatcaaggagagaaacatttggcctgcttgaaacatcacatcaaaatttgaaaaccaacaaaattgaaaagattatgatgtccaagaccaagaccaaaatgaattttggtcaaacatgagtcaaacatgattttttttctttttctttttctttcatcaatgtgtttttagtcgttatctttaatattgctttttcctaactctccttctattggcgcatttattttttctgaatcctaattcattttttttttgttcttaaattaattccaatttccaagtcctcttcatctttattgctttttttattccctaactcttgttttattggcatagaaattttcttcggatcctcctcactgtctctctatactccactcttcatcaagcgttgggtcatcgccgtcttccctttccttccctctctaacgtaagctccagatttcttctattctctgttttctcattgaaatccctagtaatgattttctctattctctgggcatttcgtgcttcaatgcctttactcacttcttctttaagaaaatattttggatttctctatgttccttatcatgcatgcgacatgcgtgaatctcttagctgagttttgtaaatgctgtatcaatttcgtctcttttgctttctctagtttattttttccttaagttcttccctagggtttctcttgctctgaagatttccatactatcgactcagtttgctagaaattgagtctcttttgggctttaaactttgctgcatgaactatctgatgtgacagactcattttaactctaaaaagtttttcgatttcttagagattctatttagcttgtttggtgaatgcatcatcctcttggttgctatttttcatttgttatcattcttttctccaggtaaagcaggtaggatg

SEQ ID NO: 9462 - DNA, 3000 bp, Unknown
  misc_feature (1)..( 3000): cDNA_ID_3042012_gDNA_ID_1972122_Annot_ID_179041 3000 nt of promoter + ATG
tcttgcacaacaaagccctgtttaacaagtatatacatagtttcagacatgtttagaacaatgaaagcacaagaatcttggtaatagccgtgtttttacctgttgggcaaagtagaccaagaggaagcaggggcagcttcagaatccgaaaactcccacactttcaacgaacttgaatgctctgaatcaacactagtccaagttttcattccgaaactactcttatcaacctcactgttcttctgcatacacgcttgcagtgatgactgcttcagagctgttcgaccaccagttgagaaagatttgaaatttgtaacttccgttggaaacccagagttacccttcatcgattgagacttcaaagctcgatctagtttccgagtttccacagaggtagagactttctccggcgacacattctccttatcctctcccttttgagtggataaagaccctgtaattgtgtccacatttcccttattttcctccaacaaatcattcacttttctcgaaccagccatgttttttttccctttctggatggattgctttcaagtatcaagtttagaactttctgggagctaagtttatatctttatagattttgaagacatgaatctagaaacaggtgtttgacaatggtactgagttgaaagtaacgtttttataaagtcccacagtgtttccatttgaatttgaatagccattggggattgtgcgagcacagaaccaaagacacagatggacttttcttttcttgtcttaaacacaaaggttttttagatgtctgcgtttggtttttgccctttttctactttctacggacccaacggtcaatacacgatagtgggattttgattaatattttgtcgttttcctttgtcgggaaactgaaaggttgatgattggattgaggtttagcgggaactgtgtttcaaacactcaaacacttaaagtatcaacaacctgccgttttttatatttatcaacgtcatgccgttttatcttcgtgagtcatccaaaaccgataagccagagcctcaaaccatcgagtggctgttaaaccatactgttcaaattagtccaaccaaaaccatgagaggccacaacatcgtcgaagcccattattatcaccatggctaaagccagtagtactctgtttgctgtttcctgctccgcttcagctcgtttctctttcctccgacgctctgaatctcttaaaccctcagtttcaagagcgagattcgccgttccaatggctatggccgccgcgtcagctgccaccgctaaaaaactagcgcctgctgtgattgtgggtggcggaagagtcggaagggcgttacaggaaatgggtaatggcgaggatttgttggtgaagagaggagaagcagttccggttgattttgaaggacccattttggtttgtacaagaaatgatgatctcgatgctgttcttgaagctactcctcagtctagatggaaaggtagaaactttcataggccctaagaatcattagtgagccaaattgttagatgttttagggcgtttgatcatcgcagagcacaattcaaatgatcagattatcaaattttgattgtttcttcagtttatgacttggtatagtaaaaacgttgtgtgtaattaatcagatttggtcttcttccaaaatggaatgatggagccgtggtttgagagcaaaggtttgggtgatacagaccaagtgttggcctattttgctgtgtcaaagctcggcgagcctcccgtggatggaaagactgacactaacccagaaggtcttactgctgcttatggaaaatgggcttcagagatagctgcaagattgcaatctggtggcctctcttgcaaggttacaagaagcaaatctttgttttatgataacgcagaagctgcatggatatactaaatgtgttcttttgtcggtgtttctgtggttaggtacttgacaaagaagcttttcagaagcaaatgttggagaaactcatttggatttgtgcatttatgcttgttggagctcgtcatccaggtgcaagtgttggcacggtggagaaagaatacagagatgaagtaccgaaattccattcctcgtttcgttttagcattcaaaatcgttgtttagtgctaattacttatacattcaggtgtcgagactcatccaagaacttgcagcagctgctgccgcggaaaaaggactaacctttgaagagaacatggtggaaagactatgtgcttattcacgagctgtttctcatttcccaactgctgttaaagaagtacatatatcacttttatcatccttgatctctctctttcaatgcatgtgcatgtgcatcagtatctgtttcacaactagttttctgattattgcagtttaaatggaggaatggttggttttattcactctcagagaaggcgattgcggaagggcaaccggatccgtgtcccctccataccgaatggctgaaagagcttaaagtgatatagagccagtctttctaaattgtgagtatctggattaagtatcattcttacatattttaagtagatgatctgaaactagtgtcaactgtgtacacgcctgagaagtgaaaaaaagatgtaattttttaataaagaaagagaatcagttcacgctttgtaaaatgtccagacttttatatgtgtaaacttgtgcattttcaagaatcaaaacttttctgcttctagactcccatcaattagggaagactagaatcttcaataataaacaaattatgacagatacctatgtagactctttggaatcatcaatagttgacaaagtaagaggcaggatcgtccacgcttgtttgaattttcagcctttgcaggcaaggtggtccaagtaggcaactgtggtttcttcggttagttactatataacacataattctatattagctttagctttagcttcacataacataactcagttttctacaaagaaaaaaaaacagagcata

SEQ ID NO: 9463 - DNA, 3000 bp, Unknown
  misc_feature (1)..( 3000): cDNA_ID_4283152_gDNA_ID_1972122_Annot_ID_179040 3000 nt of promoter + ATG
ctcttgaagtcgtcacctttagtggcagaggaggtaatcggaccatcgacgccacctgagattgctccgcctcgtcggagcttcccggaagatatccagacgtatttcgggtgtcaaaactccggcaagttaacggcggaggaagatgatgttatcttcggtgatttagattctttccttacgcctgatttctacagcgagttaaatgattgctaaagtgttgttcttctgataagttttgttttttagttgttcagaatctcggttgtgaaaatcaacattgacacatcgattattctttcttgtgacaatcttatataataaagtttgaatctttttaacagttgtccactttcagtttcctctgatggtgaatttgatttgagaggtactgaggtagtttgtgaaactcagatagaggaattgtttatgtagaaaagtaaggtatacagatgatgatcattggagggatgttcagagattgaactcgtccgtttattaatgatcaaacagtacaacaaagcttggaatcaatagaagccaagcaaatgcagaatgcttggtagcctgagaatggatacctgcaaacagataaagcaaaagacttttagatgataaagcctttaatcctaagcttataagtatgtttatgtttggctcattctggtttgagcaagtagtacctgaagtcgattacatatcttgctttgtcaactctccccatttgaagaattgtctgccttggagtctcctgcttataccaaattacacaatgtttaggattcttgagattggtttttgatcaaagctttaaagttgtggaaatgcaccgtgagtgttagctgaaagttcttcaccgagctctgtattctcagtcctgttcttcctctgtctctgaagtctaactcatgctgcttggagatctaaagaaaggggaagacacaatgaatttcatgctttacaaaatcaacaatgatgcccggtgagacttactttgttgtaatgtggtatccttgagcatagcttctgaattttttccttattctcaagccaatcaagcggtagtttactagcttgttgaacctataaggagatacatacatacgtgtattaacagttttatgttttcggaatgcaagattgatggagagaagtttaagattaggcatttacctgcttattgttgtttttctgcattggctgctgctttggtagcaaagttctcattcttctgtagctccctgtccaagttgttatggtgggtgtgaatctgcagaagccaacagatgcataagcaaacccaaaactaaggcagaggcaaattcatcaaaaaacacggcattcaaaatcctcaacgcttacattacaaccgaaagaagcggcttcaccattttacctacagaaccaactcgaactccctgcaatggaatcaaaagaccagaaacattcatactcgatttccaacctataagcagaaccaacaccgttacattgagcttgaatttctgaccttgtcccatatgtagtacttggaacccaagagattagccgtcatggaaccgacataactttcatccgaactgcacagcaatcccttaacattctgtgccaccctaaatatagatttcccattacgtcggctatggtaagcaactgctaacttccggtctttacgcccccgaccttcctgagatatcagaaacattgatatcactacatctcaattctcactcagcatcatggtaaatcgaatatctatatacttacatgtgtataaagtgaatatacagatccgtggctcaagccttcaggtgattgttctttcacaatcagacaagtgcatcttcccacatccaaaggtagtgtcttgcacaacaaagccctgtttaacaagtatatacatagtttcagacatgtttagaacaatgaaagcacaagaatcttggtaatagccgtgtttttacctgttgggcaaagtagaccaagaggaagcaggggcagcttcagaatccgaaaactcccacactttcaacgaacttgaatgctctgaatcaacactagtccaagttttcattccgaaactactcttatcaacctcactgttcttctgcatacacgcttgcagtgatgactgcttcagagctgttcgaccaccagttgagaaagatttgaaatttgtaacttccgttggaaacccagagttacccttcatcgattgagacttcaaagctcgatctagtttccgagtttccacagaggtagagactttctccggcgacacattctccttatcctctcccttttgagtggataaagaccctgtaattgtgtccacatttcccttattttcctccaacaaatcattcacttttctcgaaccagccatgttttttttccctttctggatggattgctttcaagtatcaagtttagaactttctgggagctaagtttatatctttatagattttgaagacatgaatctagaaacaggtgtttgacaatggtactgagttgaaagtaacgtttttataaagtcccacagtgtttccatttgaatttgaatagccattggggattgtgcgagcacagaaccaaagacacagatggacttttcttttcttgtcttaaacacaaaggttttttagatgtctgcgtttggtttttgccctttttctactttctacggacccaacggtcaatacacgatagtgggattttgattaatattttgtcgttttcctttgtcgggaaactgaaaggttgatgattggattgaggtttagcgggaactgtgtttcaaacactcaaacacttaaagtatcaacaacctgccgttttttatatttatcaacgtcatgccgttttatcttcgtgagtcatccaaaaccgataagccagagcctcaaaccatcgagtggctgttaaaccatactgttcaaattagtccaaccaaaaccatgagaggccacaacatcgtcgaagcccattattatcacc

SEQ ID NO: 9464 - DNA, 3000 bp, Unknown
  misc_feature (1)..( 3000): cDNA_ID_2109039_gDNA_ID_1972122_Annot_ID_179050 3000 nt of promoter + ATG
ctgacaagagcgatgtttatagtttcggggttgtcctggtagagctcataactggagaaaaaccgttgtcccgaattcgttctgaggaaggaagggggttggcaactcatttcctcgaggccatgaaagaaaacagagtgattgacatcattgatattcggatcaaagaagaaagcaagcttgaccaactgatggcagtggcgaaactcgctcgaaagtgtcttagccggaaagggattaaaagaccaaacatgagagaggcttcactcgagctggagaggatccgttcatcacctgaagatttagaggcccatattgaaaatgatgatgaagaggaccaagtcatggagatcagcagagaatgattctggaagcgtgtacaagaatatttcagcctttatgtaatgtatatggtgacaagaaaatcaataagatcactcggcagcaagtcatccatctttagccacaaagtgtatttgaaattcgaagttaacatgtacttttgaaaatgaagtgtggacttttggtgtgacttgaatgtattatttgatgactggaaaaacttacttgtctaggagtcaacgatgtgtcagaaaatgtttgacttcaagcattatggtttcagtttcagagtctcgacctgtgtaggtagtagaagttatatcccgctgctatcatcattccgctggtaagaattcccaaatatacagaaacgcatgagctctaataagagcgcctaatagaggcttgacatacaaccggaggtgacgatccgactcaaaacagtgcacatgtatactctcatctcatctgatgaaataaagttatctttcaattatgaatctctggttttatttcaccatgtaataatacacacaaattgcattatagaataaagaagaaaaagaatgttttagtacaagaacaataaatgtgggggtttcaaactttcaccgatagataaacagtctagaagaatttaagtttccctttggagagagcttgaacaagttgtaattgacacattgccttgtctttcccggtcaagccatagcaggacgagtgcctagcgcctaaagtgactgcaaagtaaagataaacagtacagaggaaagccaaaagagccaaagctgttaagagatattgatgcctctgaataagagtcgaccagctacccaactcgtcccactgcttctttagacattgttgtctccttgacggtgaagatacaagcccatcaagaaccatggctttataataccaattaacctgcaaaaattgacacacaagtcgttttaacacaattttacaagaaacataaacatgctatgaaaaggagatcatcacaatcagattgaatgtaacatttgggagatcacttttccatcataaaccatcataaatgtcaatgagaaacaagaattcgagacacatatcgctgttttgattggttgtggaaacgacattagtcataattataattacaaaagagcttggatcgtatacgaaagatgaaaatgaaagcaacaaattgccaacaataacgtcattctcaatcaatcatcaatcacaatacacaacaacaacaactcgcgatcgatgcacattggataatcgagggaaacagatccgaagtaggtgaaagattattagaaaacgaaccggtgagaatcggtttagagatctggagaagaaaaagctagattccagctccgtcgacaacccccgaaatcttcagcagtgttgttgcgatatggagagagagagagagatggatctcctccgtagattgatgatggctcgagctgggccgatttgccggatacgccgtacgcggcttattatgtccgttacataaaacgggaatttagggattttatatacaaaacaataaaaagataaaaaataggaaagaagatatataaagaggacaaaaaaatgatgatgcgttgtttgttagcttccactcctttgtgttttgaagatgatgggcatgttgttagaatccgatgatgagtgatgacatttacctaggactatgatctgactcttgcagcttccagagggcatttacgaatacgtattaagataaacttttttaatcattaacgagaagacaactcatgttctagtaatcacgataatgtttagtacttttgtatattgtatttgtatgacagtatgaggtgttcaatattttggtttgcttccaactaaactaaaagtctaaaatacattgttttagttgcactgaaatcctaatagactgagttgccgttgccgtgaatcactttagccggttagcatttagcatccaaaccaaaactatttacccccaatagcctagagttttttttttataacttttttctttttctttgtaaggagacttgcaaggttttagtagaggtctatcttaatcaaaagcccatgcatgataaacagaaggagaaattaaaataatttgggccattagtgggccaaacatgaaaacttggtattgatggtttactagttcctttgtaagttggtcaaaagtccgaaatcaggagcgagataataaagaaacaacgagttgttttacttttcaaggagaggatagctcaaggtttttgatcgatcgcaaggtattttgattctctctttctcaagcgattttcgttttccttcttttgttccagaggtcaaattcaatccctaaagctaggtttctcgggtgaagctttagatcgggagctatgatttcatctcgaatttggggataaatttcagcttattttaaccaatttcaattgattccaaataattctgtttatctctgagcaaaattgattaattttcgattcggtctttaaaaagctgcttttcttaccgtctccatccgaaattagttttttttgtttgtttgatgatttgtgttttgatgatttgtgtttgcgttttggttgatactagcagctgaatattgaatccaacctttaatctgagaggagaaagaag

SEQ ID NO: 9465 - DNA, 3000 bp, Unknown
  misc_feature (1)..( 3000): cDNA_ID_3042002_gDNA_ID_1972122_Annot_ID_179048 3000 nt of promoter + ATG
agtagcagccaagttgtaagaaacaaaatctgcagtggtaataaatgttgccagacgaggataccggaagggcagccgcaagtaattggagtcaacatagagatccctgaaaacaaaaacacaacagaaggaggatgcaaagttgcatttttgacgagcaacaaatattcgagtttgaatgttacagagccagaagagtttcatagtgatggatacgcggtggttgagcttggatggtactttgatacttcggattctcgtgttttaagccccataggttgtatgaatgtgtcagatgcatcacaagatggcgggtatggttccgagacgatttgcgtttgctcgtacggctacttctctggattcagctataggagttgctattgtaactccatgggttacgcagggaatccattccttccaggtggatgtgtaggtaagagatgcgtgtttttctttctgtatccattaatgaattcaatcaagtcttctatcactgattatgaatcaaattcgtgtagacatagatgaatgtaaactagaaataggacgcaaaaggtgcaaagaccaaagttgtgtgaataagcccggttggtttacgtgtgagccaaagaaaccagggcagatcaagccagtgttccaaggtaaaagtcaatttgattttatcttgaatgttgtgttgaagatattattgttttgttctgtaatgtacatattgtttcttttggtggtgcaggtgttcttataggttcggcactgttgcttttcgcctttggaattttcgggttgtacaagttcatcaagaagcagaggaggagcagtcgaatgagagtgttcttcaggcgtaatggagggatgctgttaaaacaacagttagctagaaaagaaggcaatgtagagatgtcaaagatatttagctcgaacgagttggagaaagctactgataactttaacacgaatagggttcttgggcaaggaggtcaaggtactgtttacaaaggtatgctcgttgatggtagaatcgtcgcagtgaaaaggtcgaaagccatggatgaagacaaggtagaagagtttatcaatgaagttgttgttctagcgcagatcaaccatagaaacattgttaaactcttgggatgttgccttgagacggaagttccagtcctggtttatgagtttgttccgaacggtgacttatgcaagcgtcttcgagatgaatgtgatgattacatcatgacatgggaagtgcgccttcacattgcaatagagattgcaggagcactttcgtacctacactcggctgcatcttttcctatataccacagagatatcaagactaccaacatactactggatgagaaatatcaggttaaggtgtctgatttcggaacttcaagatcggtgaccatagatcaaactcacttgacaactcaagttgcaggtacttttgggtacgtggatccagagtactttcaatcaagtaagtttacggataaaagtgatgtgtacagttttggagttgtcctcgtggagctcattaccggaaaaaacccgtcctcccgtgtccagtctgaagaaaacaggggatttgcagctcattttgttgcagccgtgaaagagaacagatttcttgacatagttgatgaacggatcaaagatgaatgcaacctggaccaagtgatggcagtggcaaaactcgctaaaagatgtttaaaccgaaaagggaagaagaggccaaacatgagagaagtttcagttgagctggagaggattcgttcatcatcttataagtcagagattcataatgatgatgatgatgatgatgatgatgatgatgaggatgatcaagccatggaactcaacattgaagagacttgggatgttggtatgactgctccagcctctatgtttaataacggatcccctgcgtctgatgttgagcctctggttcctctacgaacatggtagtataccctcatctgatgaaaaaatgttatgtttcgattatgaatttctagcttttcaccatgtaacaataataagtaacgtttctagtctgtacatgtgattatatgtgtttcataagtctgtacccacagtcatctctatgtattcgacgttcaaaagaaagaatgttttagtcataaacagtatcaggtttaagctttcaccgataacactctccaaggatttcagtttcccttaggaggtaccttggacatgtgttctaattgacacattgcctttctctttggagattcaacgccagcaaacttggacggctttaaactccgatatcctctgcttgaaaaccttctttcctacgctaccacttcagtgggcaagatttgttcaatgtttaacagaataaaaagtcaaaaccaagaatgtcaacatcatctatccattatccatgtgatcggctgattgccactaccttggattacattttatttgactggtcatagattcgttgtttaggtcaacttctgttttgtatcctgaatcctgaacgaacatgccaacatggtgacgatggtcaaatgagtataatgtggtggtctactttcatatggtcatcagaaaaaaggttaaatttttataatccaacgtgaactcattaaacttaaattagaatccttcaggcattgacattgaccaaacttaatttgttttataattccttatgccaacatggtgacgaactgacgatggtcaaatgagtataatgtcattggtctactttcacatggtcatgagcaaaatattggatttgtatattcaacgttcaatcattaacttaaattataatccctcaggcattgacattgaccatagtcttagtagtgtttactaatttttaggtgctttgtaacttgcttcacgcttctttctaaacctctattgacttttaccttaacatcagatcgggcaggtccttaacatgtagaaaagctgattgagattgatcagatcaaggaccaaagtaaaaatacaagaatt

SEQ ID NO: 9466 - DNA, 3000 bp, Unknown
  misc_feature (1)..( 3000): cDNA_ID_2182682_gDNA_ID_1972122_Annot_ID_179046 3000 nt of promoter + ATG
gaattatgaagacaaagactagcatcttccaatttattgtagcatctgtccttactctgctcatcaatgactcatcagcagcaacacctccacctccaattagcaattcttcaacgtcttgtaacaaaacctgtggaggaatctcgatcccgttcccattcggaattggcgggaaagattgttatctcaacggttggtacgaggttatctgcaacacaaccacttccgattctaacacaactgttcctttactctctatgatcaatcgggaagtggtgaatatctctctcccagacagtaacgaaccatacggacttgttcaaatcaaaggtcctgtgacatcgttgggttgttctagtaatactagtgaaggaccccaaaactcgctcccggttttgaatgtcacaggtaagggcagcccatatttcctgaccgacgagaaccgtcttgtggcggttggttgtggtataaaggcattgatgacagatacagaatcagagatcttgggttgtgaatcgagctgcgaacacagaaagagtggtgaagaagtaacaaatttgatctgtactggttacagatgctgccaggcgaggctaccggtggggcgtcctcaggctataaccgtaaatatagagaactctagtggaggagaagaaacgtgcaaagttgcgttcttgacggacaagaggtattcgccgtctaatgttacagagccagaacagtttcataacaatggatatgtggtgctagagttaggatggtactttgccacttcgaactctcgctttaagagcctcttgggttgtacaaatatgagccgaaaaggttctgggttctcggatgataattgcagttgcgagtatgattacttctccgggatgagttataggaattgttattgcgactatggctacacagggaacccataccttcgaggtggctgcgtaggtaagtcataagtgattgttttcttcttttgttttctcattagatcatcaataattatgtttcaaaattgtgtagatactgattcatgcgaaggaaatcacaactgtggggaagatgctcattgtgttaacatgcctggaccaatgtccatgtgcaggcctaaccccaagataaccaaacctaccaaacccccggtgcttcaaggtgagtggcaacttttaactattagactgataaagtagaggataatgtataccttatgtttatttgggttgttgtaggcattcttataggtttgtcaggattagtattttttgttgggctattctggctatttaaactcataaagaagcgaaggaacatcaaccgcagcaagaagtttttcaaacggaacggaggcttgctgttgaaacaacaattaactacaaaggacggaaatgtagaaatgtctaagattttcagttcaaaggagttaagaaaagccactgataacttcagcatagatagagtgcttgggcaaggcggtcaaggcactgtgtacaaaggaatgttggtagatgggagcatcgttgcggttaaaagatccaaagttgtggatgaagacaaaatggaagagtttatcaatgagattgttcttctgtcacaaatcaatcaccgcaacattgtgaaactcttgggatgttgcttggagacagaagttccaatcttggtgtacgaatatattcccaatggagatctgttcaagcggcttcatgatgaatctgatgattacaccatgacttgggaagtgcggcttcgcatagccatagagatagcaggagctcttacatacatgcactcagctgcaagttttccaatattccatagagatattaagactaccaatatcctactggacgagaaataccgagccaaagtgtctgactttggaacttcaagatcagtaaccttagatcaaactcacttgacaacattagttgcaggaacttttggttacatggatccagagtacttcttgtcaagccaatacactcacaagagcgatgtttatagtttcggggtcgtcttggtggagctcataaccggagaaaaaccattgtcccgtgtccggtctgaagaaggtagaggcttggcaactcatttcctcgaggccatgaaagagaacagagtgattgacataattgatattcggatcaaagacgaaagcaaactggagcaagtaatggcggtagcaaaactcgccagaaaatgtcttaaccggaaagggaagaaccggccaaacatgaaagaggtttcaaatgagctagagaggatccgttcatcacccgaagatttagatgtccgtaccgaaaacgaagacgaagaagaggatcaaccaatggcaatcaacaacaaaagatgattcttgaaccgcgttcatcagattttctgagaacatctgtatatatacaaaaaaaaaactaatgctcattttgtttgctaggaggagtaattataatgcgtgttagtaagtgtaaaaacctctgtaccactattttttttctcttcaaaatctagggtttccaatgaagaaaacaaaacggacaaagtaaagatttggggatcgtgattcgtaacgatttcggaagcttccttggtcacttcggctgatgaaagagagatttgtgggccagataacactttacgcgtccaagttttgatttcttcagaaagtgggactcaaagagttcatgtcagattgtcagctaccagctaccaacgtcacattacttgcacacttgtacattagaagactaattctgccaaatgttcatacgtcattggtcataatccaagagagtcaaacatgaaattcgttgactcttaataagtactatattttggtcaacattgttttgcatctcttttcacgcatcatccatcttatctcatttctgacattttcgtctatgcagagtcttgatttttgttttctcccttcattaaacaacattactagaatcaaaagatcagatagagctggcaagttgagagaacaagaacaagatcagt

SEQ ID NO: 9467 - DNA, 3000 bp, Unknown
  misc_feature (1)..( 3000): cDNA_ID_2182678_gDNA_ID_1972122_Annot_ID_179045 3000 nt of promoter + ATG
aggagtgctgcttttcgtccttggaatcttggggttgtacaaattcattaagaagcgaacgaggatcatccgcaacaaaaactttttcaaacgtaatggtggcttgctgttgaaacaacaactaattacaaagaacggaaatgttgatatgtcaaggatatttagctcaaaagagttgaagaaagctactgataacttcagcatgaacagggtgcttgggcaagggggtcaaggaactgtgtacaagggaatgttggcggaagggagaatcgttgcggttaaaagatcgaaagttgtgggtgaaggcaagatggaagagttcatcaatgaagtcgtacttctctcacaaattaaccataggaacattgtgaaactcttgggatgttgtctagagactgaagttcctgtcttggtttacgaatatattcctaatggagatctgttcaagcgtcttcatgaaaaatctgaatccaatgattacacgatgacttgggaagtacgtcttcgtatagctatagagatagcgggagctctttcatacatgcactcagctgcatcgattccaatataccacagagatatcaagactaccaatatactattagatgaaaaatatagagccaaagtatctgatttcggaacttcaagatccataaccattgctcaaactcatctaacaacgttagttgcaggcacttttgggtatatggatccggagtactttttatcaagccaatatactgacaagagcgatgtttacagtttcggggtggtcttggtggagctcataaccggagaaaaaccactgtcaaggaagaggattggcaactgatttccttgaggccatgaaagagaacagagtgattgacacaattgatattcggatcaaaggagaaagcaagctgtgccaagtgatggcagtcgcaaaactcgctcgaaagtgtcttagcaggaaagggagaaagcggccaaacatgagagaggtttcatttgagctggagaggatccgttcttcatcacctgaagatttagaggtccatgttagaaatgttgatgcagaggaacaaatcatggaaatcaacagagaacgattttgagggtatgtacatgagtgacaagatccattctttatgttaaactagaagttgcccacaaatatgcctttaattgctttcaaaatacgaattaaatacgatgataacttgtagttaaagtctcaacttgatatgtttatagataataaaattttagtgtattaaaatctttcaacaaagtttaaatctaagaccaatgaaagaaggaaacaaagttgaagaaacacgagaaactatgtagatcaaagatttgtcctccattccatgcatgaactttaaggctgataccatacggcatatcttcactatgatcgagtatattactctggatttctctcctacacctgtggccatcttcttgagcatagaaaccaaaaattcagctatcttcatggttgatggttcagttttccagttattgctttcttgcgttcatccaagtagatttggttgttgtctgttcgtataggtcattttcaacaatcacatttaggccatacattcccaacgtcctctagcttcttctagcactttttctcttctctttttatcctaagctcaatctctgcaaacataaatacaaacctatagatgacgtgaagagaaaacctctctgagtttgacttgtcacattctgaattgtcaaagcttttgagtttcactgatcaatgtaaagaggctatgttaacacacaatttagattttttttctaagacataatttagaaatttcttctgtcacgaatcatattccatctatattatattctctaaaacacgcctgcataagagacatcaagagagaaggaagactgtatataccttttcggcctcatactccgttctccaagaatagctcttaacaattcctttttaccatatactgttttgaatttcaaaacagaagacgatgagcttcacaaatccgaaaaatgcagcccttgcaaaattttggatgcaaaatatattcaacggaaaatatgtttttatgttatagatagactcaaacatgagtactggatgttaaagccctctaagaacatggataaagtgtaagaattaaaaggcaggtaaaagtataaacatacaataccatcggcgaacagtggcggagatggaataagattatgggagaagtaccatcaacacgatgatggcgtgaccggaggtacctttagccacgaagggaagtttcgtggtagggtaaatagacttttttttgccgtttcgtttattgaaaatcatcaatgagtaagtaaagagggtttggcaaataaatttgccgtttttgtttaataaaaattaatgagtaattaaaaagttttttaaggaagaaaatgtaagataataaatgaggaataatatgtggacacatgtagaatgtataaaatgtcaaatgtccaaattttagagcaagttaagaagaaaccttgtcatattatgtaagataagatgtatctttaaaattatataaccttagtgacaagaaaatcaataagatcccatcgacagccatcaaatcaaactagatcatttaaatctgactcagtctgttctcacttcttacaaaaaacagagcactctgttcttacttctcacaaaagaccctttcagtggtgaggttgctcttcttttgggttttttcccacctaaatctggagtttgacttagctggagtagcgtaaacagcactagaggtcaagtttctcaaatgttgattcattattagaaaatagattcccttaggtgtagagttaacattgaataagagtattttaatgctactttgtaacatgcttcacgtttctttctaaacatatcttgaccttttcatcagatcagacacgtacatacctttttcccctagatgaacagatcaatcagatcaaggaaaaataaacagaatt

SEQ ID NO: 9468 - DNA, 3000 bp, Unknown
  misc_feature (1)..( 3000): cDNA_ID_2990057_gDNA_ID_1972122_Annot_ID_179042 3000 nt of promoter + ATG
caaaatcgttgtttagtgctaattacttatacattcaggtgtcgagactcatccaagaacttgcagcagctgctgccgcggaaaaaggactaacctttgaagagaacatggtggaaagactatgtgcttattcacgagctgtttctcatttcccaactgctgttaaagaagtacatatatcacttttatcatccttgatctctctctttcaatgcatgtgcatgtgcatcagtatctgtttcacaactagttttctgattattgcagtttaaatggaggaatggttggttttattcactctcagagaaggcgattgcggaagggcaaccggatccgtgtcccctccataccgaatggctgaaagagcttaaagtgatatagagccagtctttctaaattgtgagtatctggattaagtatcattcttacatattttaagtagatgatctgaaactagtgtcaactgtgtacacgcctgagaagtgaaaaaaagatgtaattttttaataaagaaagagaatcagttcacgctttgtaaaatgtccagacttttatatgtgtaaacttgtgcattttcaagaatcaaaacttttctgcttctagactcccatcaattagggaagactagaatcttcaataataaacaaattatgacagatacctatgtagactctttggaatcatcaatagttgacaaagtaagaggcaggatcgtccacgcttgtttgaattttcagcctttgcaggcaaggtggtccaagtaggcaactgtggtttcttcggttagttactatataacacataattctatattagctttagctttagcttcacataacataactcagttttctacaaagaaaaaaaaacagagcataatgagcagagagaagttttccatatataacttgctctctcttctggttctgctgatccatggtttgattgcagcatctgctcaagatctcactgtcttcagttcttgtcaaagccattgcgggggaatagcgattccttatccctttggaattggtaaagattgctatctcaacaacaatgagtggtatgaagttatctgtaaccgaacctcaggaaaccctctgccagttcttaagagtatcaacagagaactggtgaatatctctctcccggacgactcaagcgatgtctttgggctaacccgaatcaagaatccggtaacttctttaggctgttccaatatggaagaaatcagcttggctttgaatgtgaccgggagcccattcttcctcaccggccgtaatactttagtagcagttggctgtaacaacaatgcctcgatgactgatgataagctgcagattggaggatgcgagtctacctgcgacgtggggtttggtcagagaggacggaacagaagctgcaacggctatagatgttgccaagcgaagatactctctgaccgtctgcaacagattggcatcaagatagagagtcttgatggtaacacaacgaaataagctgggtgcagagttgctttcttgacagacgaggcatattctcctttaaatataaccgaaccagctttgttttacgataagggatatggaacggtggagttaggttggttcatagataggttacacaatatgtccgttgtactggggtttgctattcaattaccgagggtacaagcggttggagttacagtaactatgaagcttgcatatgtagatatggtaagtatttagagcgaagctatagaagctgcaggtgtaacagtggctacagaggcaatccatatctctcgagtggatgtacaggtaaactaacattttctggtataactttgcgttagtttctgtaagctccatgaatcattgatgcattcttcgcctaagtagatattgatgagtgtgaagaagccaaagctgaaggaagcaaccattgtgggaaagggtatgattgtgagaatatcccaggaaactttaggtgtaaatccaacaaaaacaaaagactagccatcattcttggtaagctaccgatcatctgcgatatgtcatcatggatagcaataaaacggatttggctttaaatgtgtttcttttgtgttgggtaggtattagtctaggctttggcttgttggtagccattggagcatggtggttgtataagtttatcagaaagcaaagggagataaagcggaagaagttctctaagcttaatggaggactattgatgcaacaacaattggtttctaacgaaggcaacattgagaatacaagagtattcagctcgaaagaattggagagagccacagaaaacaagagtattgcaacatagaagatccttggaacgtttgtactgattcttcctccaacatcaccaccacatcttcatttggtcgaaacattgtgaccatcagagaccactagatgtaaccgtatcatttgaaattttggtgttattcgatttgtttagttgtatgtattttgttttatccggtttggagaatgttatattgaataataagaaccacaaacatatcaacgaaagtaatcgctcttgactgaatatttatgagattggactatgactagaatagtagtctcattgcatttgtagtactagttgttcgcaacagctcagattcataaggaccaccagccaatcaatagaacaaaaatgaaaagtgaaattatcgcccaccgtggggctcgaacccacgaccacaaggttaagagccttgcgctctaccaactgagctagacgggctttgtgcttagcttaactgttaattgttagatagtctataactgtaggtaccaagtcaaattttaaaatatctcaagtcaatgatctgcactctgcagaaactaaataattgagatgaaaggatccatacatggagttgacttttgatgataaaagcttcacgcgtctatccaaacttctttgaacgtggacttttgtcacatagaagataagagaagatcaatcagattaaaaaaatgcagaagt

SEQ ID NO: 9469 - DNA, 3000 bp, Unknown
  misc_feature (1)..( 3000): cDNA_ID_1582349_gDNA_ID_1972122_Annot_ID_179027 3000 nt of promoter + ATG
aacatgaagatggcattaagactggcaagtcaagtaaaaaggagaaagcagataatggtttagcaaaaacatctgcaaagaagccacttgcagaaactatgatggtaaagcccagtggaaaaaagttagtccattcagatgctaagaaaaagaattcagaaggtgcaagcatggatacgcctattccccaatcatcaaagagcaaggtaatcagttatttgaaccatgatttcgcttatctgtatataatatactagaacttccttaaacttataatggggtaactgtgcagaagaaggattctcgtgcaacgacgcctgcaaccaaaaagtctgaacaagctcctaagagccatcccaagatgaaacggatagcaggagaggaagtggtgattattttgttgctttctctgtccatgatatgaggcattgacttctcacctgtattcatatggtatagattcctcttttcaggagtccaatacaaacgagcttggtgaagaactcgttggtaagagagttaatgtctggtggccactcgacaagaagtaagtttattgttaaacttactaacttcatttttgatactatatgatgaatgatagcaatcttacgatttgtatttgcacaggttttatgaaggtgtcataaaatcttattgtagagttaagaagatgcatcaagtgagttaacttctctatttggtattttaaaattctctatttattgcataactggtttatatagaattttcccactgatggtctcgcaggtaacatattctgatggcgatgttgaagagcttaatctgaaaaaagaacgttttaagataatcgaggataaatcttcagccagtgaggtgaaaatttcttacattctatcattcaccattctttatatttaccaaaatttcaatgtatctggtttccctaataaaatctaagcaggataaggaagatgatctgcttgagtctactcctttatctgccttgtaagtgaaacttccatagttctatgataacccacaatttataattttaatttagctttagtcttgagttttttgctgttatgtgcagtatacaaagggagaaatccaagaagaggaaaattgtgtctaagaatgtggaaccgagtagttctccagaagtcaggtatgaaagtatataagaattctagttttagttgtttgaaagtttgatccgtgagtgaattagttcacaattatggatgtagatcctctatgcaaacaatgaagaagaaagactctgtaacagactccattaagcaaacaaaaagaaccaaaggtgcactgaaggctgtaagcaatgaaccagaaagcactacagggaaaaatcttaaatccttgaaaaagctgaatggtgaacctgataaaacaagaggcagaactggcaaaaagcagaaggtgactcaagctatgcaccggaaaatcgaaaaagattgtgatgagcaggaagacctcgaaaccaaagatgaagaagacagtctgaaattggggaaagaatcagatgcagagcctgatcgtatggaagatcaccaagaattgcctgaaaatcacaatgtagaaaccaaaactgatggagaagagcaggaggcagcgaaagagccaacggcagagtctaaaactaatggagaggagccaaatgcagaacccgaaactgatggaaaagagcataaatcattgaaggagccaaatgcagagcccaaatctgatggagaagagcaggaggcagcaaaagagccaaatgctgagctcaaaactgatggagaaaatcaggaggcagcaaaagagctaactgcagaacgcaaaactgatgaggaagagcacaaggtagctgatgaggtagagcaaaagtcacagaaagagacaaatgtagaaccggaagctgagggagaagagcaaaagtcagtggaagagccaaatgcagaacccaagaccaaggtagaagagaaagagtcagcaaaagagcaaactgcagacacaaaattgattgagaaggaggatatgtctaagacaaagggagaagagattgataaagaaacatattcaagcatccctgagactggtaaagtaggaaacgaagctgaagaagatgatcagagagtgattaaggaactggaagaagagtctgacaaggcagaagtcagtactacggtgcttgaggttgatccatgaatgaaggattgttaggtaaatgttaatccaggaaaaaaagattggttcttgtggtttaggtaacttatgtattaagtgaagctgcttgtttagagactaatggtgtgttttatgagtagattcttctgacctatgtctcgttatggaactagtttgatcttatgtcaccttgctagcagcagatattgatatttatatatttaagagacatgcgcatgagaatgagggtatggaaaagtccatatcagatgacacaaacaatgatcgtatgtgtagtcacttgtgcatttccagttttggacataaaattctgatattgcatagaaatgtttttaaataacactaatccaaacctaaataaaatatctctatacatcatctagaaatgtatggcttgatcaagaattgtagataataataccctgagttaaatgattgtaggtattatttcagttttcaaaattgtccaaatttatgagctatattaaagataatattttcaataaggtgtgtagttctaaatgtttcttcttcttccaccaacccctctttctatatgtatgttcttttttctaaaataattgtttgttcttttttagatatatcaaattaaatataaaaaatattgacaaaacttatttaccattgttaggtgaacttggcaagtgtgtaaatataaagataacattccttttcgttctttatatatacgaaacgtaccacaaatttctaactaaagcattcatagtctctcgaaagcctcttttcagaaccgaagctctttactttcgtccaccgggaaat

SEQ ID NO: 9470 - DNA, 3000 bp, Unknown
  misc_feature (1)..( 3000): cDNA_ID_3042024_gDNA_ID_1972122_Annot_ID_179030 3000 nt of promoter + ATG
aaattaaaatgtagcatgtaatcgattcacacaaatacgtctggtctaagagttcatcgcaacattctactatgcatgaaccgataaccaaaatacatctatacaacaccaaaatacaaaactaagaacacgtcacggtaacaaaacctcgttgtgtcaattaatctctggaagcagaacaaacaacattggtactcaaatacgttaattagcttatttcagaatggctcttatttatcactctctctctcgttcttcttcttcgccttcgttgttgttgttgtctctgcatctacgcaacagtcttggtatctgaagcagcctatgagatgatcattcgtgagtccagctgcttgcatgaaggagtaaataactgttggactaacgctgcgaaagcctctgcgtacaagatctttgcttataaactcagctttcgatgtcttcacagggacttggcgctgatacctgaattggctctgtgtaggcttgttgttcacaaagttccacatgtacttcttcaatgatccacattcagctataatctggatgaagttaagaattaacaggcagacagattataatatttagacaagttctaagttttcagtaattatgatcagtaagtgtgagcttatgttctgttaccttgcgcacatggcgtgagttatcgaggattgatcgtatcttgacctctgatagtaaggaaatggcagcagtacctggcgctgttaactttttgtcattcaattcagctacagcgactggatcgaagtccataaaaacttccctgtttcaaataagaagcaaattaggcaatcagagatcagagctactggcttagcatcagaagtttatattgcgaattcaaaattcatattactaaagaacttggtttggttacctgagtatatgtcttctggagagaatgtcggtccatgagagttcggctagagcaccagagaggcataataactcaaaaagcttcctacacaagttaaccaagcggtaagagactcttataactacaaagtgtatctcagatagaaggaaaatagttgaggatgccacatacttgtcgtcatgtacaggaactccccattcttcgtcatggaaagcaacatagcacgggtctttacaacgtagaaaaacgcaacattattagtcaatttacagcagagaaagatatgaagcatgagagaacaacaaagaataatggaaagtgcctcttggcatggaaacatttatgctcattagtatagagaatccagaaaacgctgtttggcttacactaaaagcataaacgaagtggatctatcagctaatcaaaacatccttcatctaaatttcatggacactgagaagttaaaatatttataagagaacttcaggacaagctacttcataagttatgcaacatagcaaatgatctacacaatgctcactgaataaaatacatagcaattgaaacattttgttggccattgaattacttaatattcacatacagaagaacataattagatcaaacaaaaaacactagctccttgtctcaattcagtcccatttgattcaactagataagaactttatcatctcacacaatcaggctaaactcaatctcacattcacattttcactcatttcatttatttgaatgcatctaaagtcaaaagctctctcactatgcaatgtgtgataggtgaaagtttgatgcttaccagctttaggtgtgatccaagcacaccttttacgaccatcagcgaagcaatcaccagaaaccttctcttcttctttcccaacactcagcttccttgtagaagagacagacccacttcgcctcacaaccttcttacagctcgaagaagacgccacgctcaaaggcgatgactcacacgaagacgaagcatcagaggaatacgaagcagtcattgaagcactattctttctcaaaatcgaagagcaaagagacgagcattgcttcagagtcgtccttggtgaagccggagtagttggtttcttcgctttctcatcttttgagtcgatgatggtcttctccatcatcggcttctccagtttcatccccggtggtttcctctgcagcttgttcccggtaggaccaagaactgatcggaactctcgctcatcggaatttacggaccggaatctaggaggaaccgacattgacccgattctcacaaaaaactgctttttgatttcacagatctatcactggatcacacaacaacaacaaaattgctatttccaacagtctcgaaacttatttcaagagattatatatcggaaggcctagactttacagctacattagcaccaaaaatgaaacttttttgtcaccgctaaatatctcatttttaggaatcttctagtaaaactaaaccaagttgcttgctgtgttcacgagaaaagcaaggttagaaacaatgagcaacaaaataaaatctttgaacaatgaagaaaaaaaaagcttttgacttcagaaaaacccagaaaaaaaaaagaaagaaagaagctttttctgatcgacgacgaaacgaatcaaatcgagagagagagacgaggagaaaaggtcattcaccagtcacgacttaacacgtcatcgtttggttcttctgctttttctgttcttttgttcctcgacccgacaatgaaacgggtccttattgctcgacccgacaagttaaatggtttaattgcttactgtaatcagttggttaatgcttctgagttctgagattaggaatgtttctttgctcgtgcgtatcaaccaatgtaaagacaaaagttttaattaatcgaacagagaataatttctggaattgccataaccaaaataaataaattaaatgctaagttttcttctatggtcggaaaattgccacaaaagggacccacttatcctaagttcctacagagatctgttttctttcacaacatttaaaaatccaaacttttctttctttggctcaaaaaaaccttcca

SEQ ID NO: 9471 - DNA, 3000 bp, Unknown
  misc_feature (1)..( 3000): cDNA_ID_2182647_gDNA_ID_1972122_Annot_ID_179031 3000 nt of promoter + ATG
acgctcttggattcgtgttgatacttctggtaatactcaggtcatggaggttgacaagttcactatgatgcgtaggtgtgacttacccgcccgtgatttaaggctgcttgatcccttattcgtgtatccctctactatcctaggccgagagaaggctattgttgtcaacttagagcagatccgttgtattattactgcagacgaagttctgcttctgaattcccttgacaactacgtgctgcgctatgttgttgagttgcagcagagactaaagactagtagtgtaggtgagatgtggcagcaggaaaattcccagttgagtaggaggaggagcaggagttttgacaatgcttttgagaattcatcccctgattatttacctttcgagtttagagctcttgaaatagcccttgaagctgcttgtacgtttctcgattcccaggttagtaacactttagcttcgattttgtttccccctcagaaaatatagactaatattgggcttggatttgactactacacgctaagttgatttaattttatccttctctataggcttcagagttggagattgaggcatacccgttattagatgagcttacctcaaagatcagtacactaaacttggagcgtgtgcgtagactaaagagcaggcttgtagcactgacaagaagagttcagaaggttcgggatgagatcgagcagctaatggatgatgatggagatatggcagaaatgtatctaacagagaagaagaggagaatggaaggatctatgtacggtgaccagtccttattgggttacaggtcaaatgatggtctatctgtttctgcaccggtgtctcctgtttcttctccacctgattcccgaagacttgataaaagcttgagcattgcgaggagtcggcatgacagtgcaaggagttctgaaggtgcagagaatatagaagagctagagatgttgctggaagcttactttgtcgtcattgatagtactctaaacaagttgacatcggtactttaatggctcctctcatttttacttttgatctttcttcgctagacagctttaatcatctgtgttcctctctttactttacagttaaaggagtacattgatgacactgaagatttcattaacattcaactggtaatacctcaaaattccatcttccacagctgatattaatccagattgagaatgcacaagagtcatgctgaaaacctcttcaatatctgcaggataatgtgcggaatcagctgatccagttcgagttgcttctgacgactgcaacgtttgttgtagccatatttggggtcgttgctgggatctttgggatgaactttgagatagacttcttcaatcagccaggtgcattcagatgggtactcataattactggagtatgtggctttgtgatattttcggcattcgtctggttcttcaagtacagaagactcatgcctctataagaagagagacatgaatgtgctccccagaaagtagacatcaacttatattgttatgttgcttacagatattaatgatttgtttcctttacacaatggaatcttgggaatttttatcataggcattgtcaatccaaatgtgatagaatctttgatctttttattaaaaaacggataaccaaacatggtgcatgaaaatgagaatgattttgaatctaaatcacaaaaaagactcagattttgactaagttttaacttgtgtgggaaaatgagtacgagataacagtgtgcaaatgactcaatccttcagacagactacttgttagctgatgaagacgatgagaggcgtgcttttcgagctttatcggccttgtccatgtaatcttggtgagattgatgctttgaccctaaaagaaaccaaagaacttcaaccaattagcccaaacagagtcaacactataggatgtaaccaaaagcagatgtaagagatatacagattcaggtcctatgggaatgttagaatgaaacaatgtgatccatttccatatatactgagaaaccatttactcactatgtcatgtttctcattttgcaagaaaaccaaaatcagaatctaattgcaatcaaaatcctccaatttcatcttctaccaattaccctttcaatccccaagaagggatttggttatacaattattaaacgatgagagagagatcggaccttgagtcatcaaataccaaggaactccgaagatgatggtgacgattccgatcccgaccaagacgtgcttcttttcaccactgtaaacgtaatgttccattttagctctgaatcctccgcctccggccatacttgcaggaccaccgttggtcttcgtctcatttcccatttctcagatctctcttttttacttttcctttccgatcaacagcacacaaggtttatccatcagaggttttagtaccatgtataagtgggccttattatggcccatcaacataagatttcctttttattgaataacattttaaaccccatattttgttacatattagtgtagaagcgtgataactttctgacattacagtttcaccaaaaaatacgcggtaaattcgctactcatcgaaagccaataaagagagtgaattagatagaagagaagagagctataataactcttcgcgcctcgtcaaaatacgcggtaaatacgctccgcatcaaaagttagttagtgtatgattatggtaaccaactttcacaacggtccaatctaaaggagtattcaatcattcatccgtcatctatggtactaagtaggaaccctcaatttcttcattctcaagtttcttcaagccctagattttccttaatcattcatacactttcccacatttattacaaatcactttaagtatttgttgccgatccttaattagctcttttccagtttttatttcatataattgagatctgttgtgatgttgttaggttaatttttgcatgaagcttatgattgtttctcagaataatg

SEQ ID NO: 9472 - DNA, 3000 bp, Unknown
  misc_feature (1)..( 3000): cDNA_ID_2182651_gDNA_ID_1972122_Annot_ID_179033 3000 nt of promoter + ATG
ggaatcaattgagccaacgggtgccagattagatctagaagagatttcagatgaaccaggccctttacgtagatatgaccaagaactcgtatcagaggataaagcttttgaggtcaacctcattaccgcaaatgtaaacaagtcgacggtatcatcagctgagagggttgttgaaaccaaaagatcttgaaataagatcatagagtgacatcgtaagctcccagcacatgaatctagtacttgaacaagagactgtacatccaaaaactgttcgtcaaataccaaattagtatgtgtaataataatccaacaggtttggagacacaaacctgaacttcaactgcagtatcccttgctaaagtaagcatttgaacagttccacgctctctcaaagtttcacggaaagttggtagctgaagtttcttcccaacaaaaaattctgccaggaacagaaaacctttgcataagaacgaacttgagtattttaccatgaagataacaaaatatgcggtggttttgcacaaatccaaaggaaggcattcgacacagcaacttcaggattttaccacagcagcagtcttccgagagagaccatatttgaaatgctgacaattattgacataaaatgtattgaagcgggaaacagaataaaaagggaaaacagtggaaagttatatatgctagattttgtgatagtcacttactgcttaaataatctgtgatgaacgggtacaatagtgatcgggtaagccctcctgttggttctttttcgattaatgccctaattgacccgtgaaacatcacaaagagtgagtgcacttctttaagcaccctccttaatgcatcgatcctccatatcgctcctgtctccttatttttctccacaacctgccaatgtatagatcagatcttgtttatttacattgctaagacaccataggatgcatcattcatagaaaacattgtgctataacaaaagaaaagtaagacaatgccttaccataaccatccagatatcaggttcagcctcatagaaaacatgggaatgtctttctgcttcgatcacttcacaagccgcctccggagagaaaagtctgcattaatagtcacaccaagcctcaaaacatgaagaagatctacacagactatcgattaacgaccctgacttaatttatcgaacaagtcacaaatgcaaccaaatctagatcaccagcaattgtaaaaacacatctcacagtgttcaaaaagaagaagaatctatagcagctgacctagtaaaagtaataagcccttcactgagcccgatcactgataactgcgtcgagaagtctaaatcggcaggataaaagaacaaaattttctctaactcttgtccttcagtttgacctctcctcaaatcaaacatgcaaagtcgaaggctttcatcaccagagctcatggacgccatttctggtagcttctacgagctcattaataccctaacaatacaatgcaagaaccgcgtcagaatcaagcatgttacaattggttgttgtttccaatgtggatgtactctacttcaaaatccaaagtaatttcagggtttcaagagcacattggtgattcaaccacggcacacaaataccaagtaaggttcctaataagaagaccgaagaacccatacatcgagaagagaaaattactgtagaaggctaggaaacggaaaaaaaattaagtgaaaattgactaccttgaggacgaattcaaagagcaatgtcgaaggagtgatcaatctcctggtactgcgagatagttcaccgatcggagatagattcaagaacagaagagtcaacttcaatttctaaacgcaaactcgaatttgagcgattgagctgaaatcagtagaagaattacgcgacattttgtgacaaggatcaaggaagaggagcaggtggacagctgctaaccgccacgaaataaaccgggtcgggttatcaaataatcgggtcaatatctgaaacgggtaaaccgaatatttctagatgctccaccggttaagtcagacatatccgtctgaattatacgttgtgtgaatgcgaatctcaaataatttgttcaatcattcagttagtatcttactttattactcggttaattattaaccataaataaaaataatgggagatagtgataatgacacaacgttaaaagatctaagtagttaagtagtttagatttgataatataatgggaagttagagataaccggtaaattagctatagtcggtcggttagcattccggttaacccatcaatggctcgtattcacactagtcgcgcgactaactaatagagaaaaagcttttgcgtgtttgttgttgtctccatcgctcgtttgtttcttcttcagccatatcggaaaaaacgatatccgacgagccattcggtgtttgttccgagaagctccgatcgatctgtgttagggtttttctttttccgccttatgaatctctctatcgcggtttcattagattcagtttaactcgagtgatgaaaccaatctccgtgctagaggtaaaattctgttaggttttctcttttttgtttttatgcttcgtaccgatcgatatgattcctggttcgttttgtttccaaatctgcagctctttgatcccgtggctggtaggatattacggcgtttgtagctctggtatggcttttgttgttcgtttggttctgattttcgaaaattttcgaatttttaatcggaatctgattctagttcatcgttttattgttacagtcgtcgtggatagagttagaacgacgaaatcagccttggtttcctaactggtatttgttctttagcctatgttttcaatttttctcttccggttttttggtggtttgtgaaactacttaatcttcttgattacctaattaatcatatcattgtttacatcatttattttgatatttgtagttatttggcatttcagtatctgaatttttgcaacaatg

SEQ ID NO: 9473 - DNA, 3000 bp, Unknown
  misc_feature (1)..( 3000): cDNA_ID_2182643_gDNA_ID_1972122_Annot_ID_179029 3000 nt of promoter + ATG
atgatgagagtgacaagaggcctatggttatcacaagaagtgagtcttcttctagactgcgttcaacgatatttgcatcaagatttgctgctaatgcattgaaagggcacagacttaggagctcagagagttcaaagaccttgataaatctgcaaaagcctccggaacctgattttgatgctgaataatccaattcttgatgagaggccaacatcagaacagagactacataactgatttatacacataaatgctctatatatagaacttgtttcagaaactgtaaagttatctacacgagagccaatgatccttcaaagacctgcattgcatttttaacagttccaatgtcgatatctgctagttttccagtcttcgaagcaataattacacagttactcttctcttctgcatacggtacaaagagcttccctttctcttctgaagagaacaacccaatactggaagaaaaagaagcacacacatgttagttcttgaaaacattgaatcagtactctttatattactcaggtattcaccatggtttgtctcgcgcattagctagttgaatcgcagctgtgtttgttgcgatgactccagcagaatcgtttatcagagcagccaactaagtaagctcaagaaaaggaatcaaagtaagatcagtgaattcaactttgttcataacaaatacagacagataagcatgcatacctgtcctggtgttgtgatgaacactatagatgtatcatcacccacaaaatcttcaacgttttctctttctttctcatgtggaatcacaaagaccggcttgaatcccctggcattgttcacaatcatatctcagagaatttcaaactaagcaaaaaattcacattttgaaggtgtgtaataattaccttacaccctttataatcttagcccatttttcaagtgaaagtaaactatcagcatctccttttgattgcattgatgccttagaatctgattcaataccatgaatcactataaacttccccgtcactgctccagcattcctatactttgcagccacaacctctttcactttccgtgaaatcgataccctaagtggcaacagaggagtccttggaacactcctaaacggtcttcctaaccaatcttccatctgagtatacctgaaaccatcaacagtcaatttagacaggcgataaaaaaacctgcagtttcttcggtttcaaggaactcacatgctataacctaattctgaaaggttggtattttctgctgtaaaggtctcggacagcatcagaccagctcctgcagagttaacattcgggtaaatgtaactaaccctgtctcgagccgttgtcatgaacaagaacgctgcgtggcctaaccctgctagcttcgtggacagaaccatgtcatagtaccttccctgaaacatgacttaaaagaaaagttaactaagcagtctgataaaggaaagatagaaaaaacgttgaaatatttgaaagttacaaactttgaggagtccgatcatgtctgtgtattcagctggttcaggccaatgatcatccggatcatacacattggcccatctcacgtttttgtttagctcgtatgtttgttttcctctttcagtcgttaatatatctacctgaacaccaggataccttacaaaacaacagaaacgtacggacaatgttctgcatttcagtttaaggttttaaaaaaatgtcgaatcggagacagagtcttatacttttattacctgtctttgattagctgaatagtcgggaaaaagagtagattctcgtaaacgccaccggagataacgcagcaacatcgtctaacatctcctctgattttcaacggtaaagaagcaagctcgacggtgtaaccctttggaaacttcaagaagccgtaagggttatcaggattatccggtggtcttggatcctcgtcttgttttccgtcggcaaacaaggacccgtattcgttatccgggtcttcaccgctatcaaacgggtcgagccacggattattcttcttcttgagattgaccgatacatcggaagatctcgacgtaagacgagtttgaaagttgaggaagacgagtggtttggaggtagaaaacggcggcgttttaaagaatggggaaatgggtttgggtaacagaggaagtgaagaagccattggaaggtttttttgagccaaagaaagaaaagtttggatttttaaatgttgtgaaagaaaacagatctctgtaggaacttaggataagtgggtcccttttgtggcaattttccgaccatagaagaaaacttagcatttaatttatttattttggttatggcaattccagaaattattctctgttcgattaattaaaacttttgtctttacattggttgatacgcacgagcaaagaaacattcctaatctcagaactcagaagcattaaccaactgattacagtaagcaattaaaccatttaacttgtcgggtcgagcaataaggacccgtttcattgtcgggtcgaggaacaaaagaacagaaaaagcagaagaaccaaacgatgacgtgttaagtcgtgactggtgaatgaccttttctcctcgtctctctctctcgatttgattcgtttcgtcgtcgatcagaaaaagcttctttctttcttttttttttctgggtttttctgaagtcaaaagctttttttttcttcattgttcaaagattttattttgttgctcattgtttctaaccttgcttttctcgtgaacacagcaagcaacttggtttagttttactagaagattcctaaaaatgagatatttagcggtgacaaaaaagtttcatttttggtgctaatgtagctgtaaagtctaggccttccgatatataatctcttgaaataagtttcgagactgttggaaatagcaattttgttgttgttgtgtgatccagtgatagatctgtgaaatcaaaaagcagttttttgtgagaatcgggtcaatg

SEQ ID NO: 9474 - DNA, 3000 bp, Unknown
  misc_feature (1)..( 3000): cDNA_ID_2182635_gDNA_ID_1972122_Annot_ID_179026 3000 nt of promoter + ATG
gatttctcaccaggctggatcagatagcttgttaacgttgcgtactttcatcaagatgaaagagttcttcttcactggttccttgctcaagtattctggttttttgtttggattagataatcctcggttgctcactggatccaaaaattaaaattgaaaaaaaaaataaaaaaaatgaaaaaatttaaaactgttttttggtgtctttttggttaggctgcttttaggctatgtggaattacaaaataggtgttaagagcgtatatgatgcacaagaatttagtcactaaaaaggttattccatgatcttattaggtgaagaagaattgtagaaatgaaatcatgtatttaacatttggtttagtgagtttgattgttatggtgaaatgattctgcagttttcttattatcgatgataccatttcgtggaattgcgttttatatttcgcaaaactattgacaataacaaacaaatttcagttgtttacaccctttgtttgtcaaccacaacttttccaatgattccactaatccacgttgctgccaatgtctaatatcgtatcaattatcaaaattgtgggagagaagggaaccaccgaaataataatgtccttacacaacgtcgtctagcccaattaataggcccatttaagcccaaataatacagaattgtggccctggtccgctacgatccgttaaaatctgaaattagggttttagtttaactctccatataaattgttccaaatttcattcgtatcctttccgctgctgccgtcttcgtctctgaggtcagtgtttcagctccttgaacgatatatacgatcttatcgatttcgcattattctatcttaggctatgtatatgactgtcgaacttagttttaccgccgccgatttggcttcgttatattttccctagtagaattaattgtttaggtgtttgctaagctcatttgcatgacttatattggcagataataaggacttgtgtatttttccatcgttaaaaggcatttcaaagagacaatatgtcagggtaagcttctccttcgttgttaactgcatttgtgaatcttgcgttatcagtaatacatgtagctaatttctctgattatccatccctttttcatatactccacgataattctctcttctattttgaggtggccttatctatttaattaaatagcatctgttgttacattgttgatttctgttttgtgggacttagtcaagcttcggaataatcagaaagttgctgtacgagtatcattttgtttgtttagcttgtctgattcttctaatcgcgtctagttggttcttgacaagtttcaaatcagaattgttccatgctttagatgtttcgatgtttattgtggacaatccaagtatatgatatcatgtgttgtgtcctgacttttcagtgatgaggctgcccctgttgttgttcctccccccgttgctgagccagcggccatcccagaggacatggacttaatgactgcattggagttgactcttaggaaagctcgtgcttatggtggtgttgttcgtggtctccatgagtgtgctaagcttattgagaagcgtgtggctcaactcgttgtcttggctgaagactgcaaccagcctgattatgtcaagcttgtgaaggctctctgtgctgatcacgaagtcaggttgctaacagttccaagtgccaagacccttggcgaatgggctggtgtaagtctatgttttcctctttaatactgactcttcatatataccttattgtcgctcagtttatcctcctaaatgaatgtttggttatcaatggcaaattgaatctttgatgttgttgcagctctgcaagattgattctgagggtaatgccaggaaggttgttggatgctcatgtcttgttgtcaaggtatataaagtcatggatgaatcatctaatttttaggattcattgatgatggtccatagttcttttacttaacacgtttctgtgatttcttgtcaggacttcggcgaggagacaactgccctcagtatcgtcaataagcatattgcttctcaataaaatgccatgaagcatatctaaactcggatttcatatgttttccacccccaatgctgttttctcttggttttgatatattatctaatatttagcggacagctcttgagatttgtttggaacatgatcaagttttgttgttatctagactttactcttccaaggccaaatttgcttgagatttatttggctcattactcttcatcataattttttttttcctattaacctatatggtttctacttaactaatatagttgagagagtgaaagcatttaaaatctgtttaccgtatcaaataacaggatatttaactcagcctcgaaaacacttatatttcatattattcatcttgttccgtctgtatacatttttttttttgttaaaggctttggtccgtctgtatacatatgaattgtgttctatcgtcgtcaattttttaaaaaaaaacttttttcgttttacacgaatacaaaaatcattgaaaatttcattcatttcttttgaagtgaaaagctcggggagaaggcgggaagtggaaaagccaaggctctggtattgcaacaattgattataatttgtagagatacttaattatgatttgaaaaaacaggggattacttaataatcgaatgacaaagcacacacatgattgattttagttttgtgttttttgtcaagacttgcataatcgagtttaaagagtagcgtttttttgtttgtttatgagttaatttcgcatgtacgggttacatagagcagttcttgcatgttctacaccgcctttaaaaggcgcaaagttgtcatttttatttccttttcatttgcttccaaccatttagatttgaggactctctgtcttttcttatttcggagaatgttctttttctagggttttgaaattctaagagattttctgaagaagaaaacaaa

SEQ ID NO: 9475 - DNA, 3000 bp, Unknown
  misc_feature (1)..( 3000): cDNA_ID_2182712_gDNA_ID_1972123_Annot_ID_179064 3000 nt of promoter + ATG
ttgtgtacatatgacattcttggcagtaggaatggctaacaatatatttgattgtttcaaaatgttctgtaatgatcccttttttctggtgtgtagaatagagtgataaacaatgcaagagcttctagtatcacttaatctgttcatatgtacaagactccattaaactatctgcaaaatataaaaaggttgtgttactatcatagtcttagtgataaataaaatcttaacgaaatatagacaagaatccgttgtagtctagctggtcaggatactcggctctcacccgagagacccgggttcgagtcccggcaacggagtttttttctcatcgtactgagtaattttccacgtggcaggatttagttttactccattattttaccttttggcccctaaaattaaaaagcttgacgtaaaaagcgtgacgcttgcgaaagccgaggcgtgtggtgagtttgtttcccatgtggccttgagggttcgctcacgcctttgtctaaaaggcaagcaaattaagcgacatctattcatggttttgttcggacttgtaaatttatattctttctttctttttttcacctttttgtttgtaaaagcagaatgtgaggtaaacttatcatgtaatttacttttacatacacactagagagtgaacacgtaatgattagctcaaggtttatgagcatgggaaaaaatacaatattagacaccctcaaaatgagatctcgatttcactcttctgtctaagataatttaaacttccataaaaaactacttgtctttagtagatacatataaaaagtagtggtatacggtttctgtttttttttttttacaaagaatttgaaaaaaatggaattgacttgtggatgtgggggtgagtgtagatcgacaaaggcagaacataaacgcatgtaaaaggaaaggtgctttttgtgtgtggacaaggagcataaaaaatgtttaaaagaaagagcattccaatttcaagatttcaagaatcctaaagacataaggataagacactcagtcactcacacttagcttcgccgtttaggtccttatcattgttcaccattgcatgcgtatttttgtttatttttcttttaattgtttttgttcatagacatgtatatagattattatcgacgtaatataagtgcatagttagaaaccgcattaaaacttcaaaatgaaaacagtttagtttaaatcgctagagtacaaattaaaggttgaaataatccttaattatatgtttattgaagtcgttggttcagtttttttttgtgggaagttgagaagtacaaaaaagttaaccaaagagaagtcaaaagttcacgtgggctagctggttactacgtacgtcagccgaactaaaagacacttcgtcggacaacgaagcttcaaccacatgcttagataagtatagtactacggacaaaatcacattccatcaccaaataataatagaggaatattttgctataaaatgtctttcgtgacttcgccaagtgcgttcgcatattgtatcggtttggatattcagagatatatctttctctctgtatacatatataatcttttgttcttttgtaaacgatatagtatgtatgtagagcgtcatgattaaatagtggttaaaaagtggcagaatgaaactccatagataatacaatttgattcctaattttgattagcaagaggactcctcaactatacataccgttatcacttaagacatgaatgcgccaaactatttaaagccacccatgattttacacctactatatacgcactccttcgtgactatgacaagtcggcgaggttattcatgaaatattgaagtgatccacgttctgaaagttatgtgtaacaaacgtacgtagatgactagatgatatagtttgtatacgagttgaacactatgtgttaatgatttactacataggtgtttacaacagaacatatatccatacgaaattttttgagatcgaaggtcacgaaaattatcataaacacatagtgttcaactctaagtataaatgaatcaaaatctaagaataaactagtaaataaaatattttatttaattatcagaattcaaaattttgagatagggagtgaaacacttaagtatatataaccgcaatcgcacgccaaaagttagtgggaaagattggattctttgagtaaagattaggacaaaattaaaccccacatttaagaaatgaaattggaaaacaaaagtgtatttgctaatatcaagaatcaacacaatgagtatgtttgaagatacaaatgaccccacatgcgtgcatgtgttcatcttaaacaaaagaaaagactcattaatctcttaatctcgagattttcaaatctccatcatctctttcctttttctatatcactatcgattaaatgagtttctaaagtaaccaatactgaaattatccaattaataattcactttctaatttcttacaagaccacaattttgcctttatttagtttataatatttaatgtttgggggtatatggtccccttcttccatgtatattctctcgtataaagaagctggtaacttctgcttagctgttcttgtctagctgtgctcttggggttggtttcttttcttcttttcattattttttgtttgaatttggtgttggagataagattatttgagattctgggtttctagtggttttgctcaagggatctgttgttgggtttaggttaatttctggtgttagttctgttactgaatgtggagaaaggaagcagctttaagtgtttgttagaatgtctgagtgaaattgatctgtttttattattatctcgatctgggttttgagggatgaatccaaagtttctttctatctgagaaactctgtacattagggttttgattttagttggagggagtttttttttagggttttggaggctcaaatttccctagtttctttgttgaattctggtgagagaaaga

SEQ ID NO: 9476 - DNA, 3000 bp, Unknown
  misc_feature (1)..( 3000): cDNA_ID_3042055_gDNA_ID_1972123_Annot_ID_179073 3000 nt of promoter + ATG
gcagagaaatattacttgaatgtgcaacatgatcctcataattaagagcttctacttgtatggtatttcgatgagaatctctccattgttctctacttcaaatatcaaattagctatctaggtaaaaagtgccgttagatcgaaatccttcatagtaggtgatgatcaatcttgtattttgcgtatatatatacttcacataagaaataaatatattaatttatatatttatttctgtccaaaaatcatagaaagttataagaaaaccaaaaaagaatagaaaagaaacaatgtttggacaaatggatacaaaccaattgaaaaatcgtaaccaaccaaaaatacaggttgtacccccagcaaaggcagacctgtctttgttttctcataatttatagggaatttaataaaaaaaaccctcaactttggccagatccatttttaaaccctgaactatatttttagtaaaacaaaccctgaactaaaacctgttaataaacttaaccccacagtaattaaatattaatgggatattaatttccaaaaatcgaccaaagaacaatgacagaatccgtgatccaactgaagatcgtccacctcaaaaagttctttatacacgtgaaaaagttcaaatggtaaaatagaaaacaatgaattatgtttcacaagatcttccttttcaaattatttaatttaatctttgcatatttagacttgtagcaactatcaacaagtcggacacaacaaacgttcatgcaagcgtaaagcagtgccaaaaccacccaagaaacctcaaagacgaccaaggaaaaaacagaaaacaatggatgaagagaaccctatcactcagccaatacaatcttctcttcaaagttaatgcttgacaagtctttactttagaatatcttgtccctctgaaacgattgttttttttgtgacaaatattgttgtgttgcaacagcttcgatagttatgttggttggatttatttaagtatgactctttggattattttaagttgttgtgtctttctttcagcttctaaaatccaaactaattaagcaattcaaaatcatttagaacgtttttttgtaataaattcaaaatagttttaaagaacatcatgtggtttttgcgctaaatacaaatgtctcgttgtttttttttttagaaattaatatcccattaataattaattactgtggagttaagtttattaacaggttttagttcagggtttgttttactaaaaacatagtttagggtttaaaatggatctggccaaagttaagggtttttttcattaaattccctaatttatattcaaaactttcaaaacaagttaaaggaaataaaaccaattaaggttaaccaaaaaaaacaacagatttcacgcatctcacgcgcatagtgacattgtacatacttgtcatgcatcgtctcttccacatggatacaaaagataggcatacaacaacaccatcatcatgaaaatatgtacatgcacatacatacatacatacaacgtcttaggactagagagcaaagagggtagggaaaatttgatgctatgtttgggtaggccactgtcacagagcttaaagagaagtgctttctttccctaagttagcaaattaccccattttgtcaaaattccgtttcttctgacaacaacacttacgttttacgaatataaatagttgtagcatgatttatttttgttaccaatagataaacatatttattcttatcgattgccattaggactagggattctgataataattgatatgtcttaaaatttgcagagacaacaactttgcgtgttggttttctcatctgtttgtgtttagccttagtctgaaatctgaatgcatttaagtttttcaaaactaatcactttcaatcctttttaattgtcaacatctacttgtccttttaatctaatccaagaatattgaatacagaaacatgtttacacaaagaaaattaggtggtaatgatatgaattagagaagtgtaatcaagattccatctcatattaaacctatttaaaagagttgtaagaaaaaataataaaacaagtaattatttacttataactatgcatcaaatattacgaaacttttaaaatgaattgttaatctaattcaatcaatattataattatctatttaactaataatatttatatggtggcaaccaaagaatatatatgggtccaactggtaatttagatgaattgtaaaatttttcggaatagttgcaaactataaaaaagagttgtacgagaaagttgtataataaaattgagaataaaactttttataacgtttttgataaagattttataaatgataactgtcaaagttgtacaaactctaccgctttgataatgagttatcaaagacataaacttttatcctagttaatcattttaacttttagaatttaagctttgaattaaaattcaagcttagctttgtataagaaaaagtttaaatatttttactttgccttaacagtaaaaagcttttaaccaaaaacattgaattcaacctactctcccaaaaatttcacctttaattttttttgaaaacaatatttaccagtttagtgcatcttgttgggttgttccttgtcctttctctctcagaaagatctttacttttactttttcagtattttcctctctcttctctctcttctctctcttctctctacttagctgcctcgcttttgctccttttacctctttccatctttcaatctcctttgagagagagagcaaatgaaaaaaacccaaaaaactcttttctccaaccattaccatctcatgaacactctcacaggaggctctctcttctcagagagcctacccatctaatatttcttcatctgagtctcttttacttctctcaaagtatcgatctttattcttctttttgtaaaccctctctctctctctgatttctactgacctgtttggaagatatgatg

SEQ ID NO: 9477 - DNA, 3000 bp, Unknown
  misc_feature (1)..( 3000): cDNA_ID_3057627_gDNA_ID_1972123_Annot_ID_179076 3000 nt of promoter + ATG
aaacaaaaagagatcaagtagcctgaagatcattatggaggaagcagaatcaaacatgttgtaccagaagtgaaacatataacaacagcatcatcagaagcccaagcatacgttgctaaggaaggcaccagtgtacgctgtttaagcatctcggttgtcaaaactggccagtaacaaaaaaaaaattgagtcacaattccatctccttaatcttgagttttaaggtttataaaacaaatcatacactggttaagttcatttgcaaaatctgttgaagtagactccatcaacacacgccatttcaaggaaggtatatctccattttgaacatcaatgcaccacgagacacatgtctcatcagtaaccaaaagcacaggttctactagcagcattgccatttttgcttctttcaagctctgccctttcacacaaataaatcattaagaacaccaaataatgtgtcaggaactttattttacacataacacaatatactaaaaaggatgtaataagcagacactggacttgaaaaagagagactgacccatctgtaattcaaaggagcaactactcctccaaccaatgcaacagctaataaccactccaagaacaaatcactgaaaccacaaataacaacaaaccaaactttcaacggttcagattcaaaaaacccaaattttaagtcctcactcactccattcattcaaatttgaaaaattcagaactttcgtagaaaaatgtacctgttaaaagcagcaatagagacgacatcaccgtttcggaggccgagacgaatcagtccggcggcaaggctcagtacgccgtcaacgaactccctgccggtgcgcttccggtttccgtagactgtgacgacggcgttccgtttgacggaggctagccgagtcaaacactggcagatgtgaggccgagagtgattagccattccggagaagggcaaattatgaaattcacagtgtcatccaagtttactggaagaagaagagggagacagagagattcgattttgtgttctttccattgatgacgtggcagtacatgtcatcgcatcgacgacctctccttatcttacgttatctgtaaagagagagtatcatcgtttttgcgtttggtgactatataggccaggcccaattaaaaatgggctttactatcagattagtaactgaccaaggttgagttgaaacttgaaacattggagataaaaaattgtttccaagatcgaagtgaaaacaaaagatacagtactcaaattcctctactaacacttttgagatgaagatcagctagcattgagaatttgcctgaaatgatttatgagagaacgcaaggttttggaaacgagggaaagtgaagggtaatgcatttttgagatacgtgcgaagcagttcacagcgaattcgtttgggggagacgtaaacgactcacatggtagatgctgaagcggcgactcaacttcttcttcggggatcatcatcgttggtggagtcaaaaagtcatgaattttgtttaatttatcttgatgcaaatatcattgtttttctgtttctggaaatttatgtttttaattgatgaaaaaaaaacaactttcaaggattcttctttgctttcaagaaatagaaccttggataccactcaactataaatctataactgctactgtagtttacttgttatttttcctttttcacgctatttaaaacaaatcttattatagctatattataaatcgatgacaaaaatactcccgagaagtatatggtaaattcaaactggaaaaataaaaatgggaggttttatatttcttaatttgtgttagatccccgtgaatttagggccaatctccgacaaggaaactcacgagaattatttataccaaattcagacaaagcacaagagtcgagagacactgttcctagccaacgtggaataaagaaatactacatgtttagtcgaatgtagtggcaacattcgaagtagcttaaaacggagtcgtttcgtcttgtttggattctcgtataaagccttccttcacgggaaggtcttgtaaagttgttgtaactctctttaagcctaagagaaaacttcaacaagaaaatggccgcacacaaaaccagtgagtatccaccgttgatttcaatgctgatcatgttcatcatcgtcctagaatcaacgattatcaatgcaagagaattacgaccgtccgatcacggtctcgagtactactacgaaccaggcgagtcatcagaaatgacgtcattctttggaccaccttcttcaaatgatctaacgtcgatatcatcaccgtctagctcgatattgccgagtgcggtgaagtctccaatgaagacgctatcaaaagatcaggatgatgatcgcgtgatgaatcacgtgctggttgtgggcagcttggtgtgtggactctccggcgtggctttgatggtcgcttctgctctcatttattttctcggttacccgaaaacgcaaaattcctctgttaattgtgatcacattcataataataccaagtagaatcgttcctttttttttgggttttctctataattttctcaattgtatcaagaacaataaagatgttatcatgtattattgtaagaaaacagatactaataatcttttggttggttattgattatgtttggtgtgttcggttcaggaaaatgatttgaactggttcggtttgggaacattttgtcaattcggttcggttattgctaataatgaattaatttttaaagcttacaagaaaaatctaattaattaattaagaagtctgagagcgtcagttggaggagtccaaaagaggagaagaaggaagcttggcctttgaggagattcaaaggatcgtgttgcttactgtatttaaaaaccctagagttcatcatcatcttcctctcattattgattgctctaatcaggttccgacgagactaataatcctttctcagatcgataacaatg

SEQ ID NO: 9478 - DNA, 3000 bp, Unknown
  misc_feature (1)..( 3000): cDNA_ID_2182765_gDNA_ID_1972123_Annot_ID_179082 3000 nt of promoter + ATG
gatattaagctactcaatattaccaaatcccaaatacaagcgattcatggactgactcggaccggtttaatccaaaccggtcgagaatcgagtgttagttaataccgagaatttcgatttcccgtagaatcgaatcgaaccccgctttatcttctcggactatcagaggcgttgaacgagttgactctttgactcacgagtcacacaacatgacgagatcgatgaagctcaagaaacgatcgcgcttgaagaaaggtaaatagaagctgcccagaatctgtgcgcctttctccaatttttgaacttttctgatgaaaaaaaccgaatacttcttctgcagaggtaaaatcaacgatagagaaagataatggtaggagacataaaatcactaagtactggattcaacgttacgatctcttctcaagatatgaccaaggtatcgaaatggatgaagaaggatggtactctgtgactcctgaagaaatcgcaatcaaacaagctcagagatatcgtggcaaagtggtgattgattgcttctcaggcgttggtggtaacactattcaatttgctaaagtgtaaacctttttctatctctctcaatatcaagaagattgtgatgtttttctaaaggactcttttttatatagatgttcttctgttgttgctattgacattgatccggtgaaagttgaattggcgatgaacaatgccatggtttatggagttgctaatcgtgttgattttgtcattggtgatttcatacaattagctccttctctcaaagtaatcttctttttcttctctctatcagtttttatatttctgcaagtgtgaagatttattttgacccttttgttgttgttgttgttgcgcttgtctactagggagatgtagtgtttctttcaccaccatggggaggaccaatgtatagagattttgagagttacaatttggatatgcttcaaccaagagacgggtaacaaaagattactttacctattgatgtgttcaatatagttgtggatcttgtaatgagtttttgttttggtgtaggtactcattgtttcagattgctcagtccattacacctaacatcattatgtttctaccgcgaaatgttgatttagcacaagtggaagaactagcttggctctcgtcgcctccgttaaatcttgaggtaagacgcactgtcaagaagaatactaggagagctaatttattggaaactattgtcttgacaaatttgttatgctgtgctttcagatagaagaaaactttgttggaggcagaatgaaagctgtaacagcttattttagttgcaatgcagtttagtttagaaatgggaaccattacattaaaaggaagtatcttttagcatcagcattagaggaactgataattgaatactcttattattcactatctgttcttacaatattataatttcttgaaaagatttcttatactaattccaacaaagatacaaaactgtcattcgaattttgaattgtcttctatcttacttttagtttgtaactaaaaaatagaacattagaaaaggagtaaccagataatgaatgacaagttgaggagtagtcgtatgatgagtcctccatagtaaaggaggaactgtgggttctgcaagaggagcaaagggttaggttccttttgggaattttaagggtacatagagtcaatacttctcaaactcaagcaccttgagctcctagaggatttgatatcccacttatgaacttccagcctcaagggtccttccaaaactggttctgcagcgctatcaaaatcctaggtatgacatccattccattgtacatcccatgtcgttcatttcttgcattttcccgatgggatgtgaaagggtatcctatcgcttgacttgcttatttatttatgatgttttttgtggctatgcatctcggcgtagtcacacctagtggagtttaaatcctgcactgtttatatttatttgcatagaaaagcctaaaaacaaaaggttgcatgatttttcttttcacagttttacttccacatattgcattctagccttctaggagtgttcttatgagttgcatttacactttgcatgttttaggaggagatgatctactctaagagaacaatgttcactttaggtgaatctaacaaagcttagctgtgcgaatgctacctggagtgataggaaaagtctctaatccattaagtcacgtggctcaaggactcacagaactaggaggtttctagggatatacttcttagcggttttagtgttttgtcattcatgtctcagcgtaggatttgatttggttaggaacttaggagttgtcctagcatacgcaacattttaatctacataacaggttcttgatctaatcgatcattagcactcagaaccactcttgttatgatttgcaggttgacagagccagctagatcttcaacagcactagtcatgagactcatgactcatataacaagcttcccaattaccggaggtttcccttttgtcaagatccaaagcagaagattcgtttctcctctcatgtgttttgaaacttgcttcttcctttgtcaaaacgattagaacgcttgtgtatataatttcatctgaatactaattttcatgaatattttttcaaatacaaagactattatcatttaaccgaattctgtagtgtgtagataaatgtatctaaaaatctactcctcttaaaaaagttacctataaaaagaaaaatcgtgtatgaaagattttgctataattgttaatcctctgtcgttgataaacccttttaaaataatatttcctgaaaaagtcaacaaagacagagagatatatatctttcgacgaaattgaaaatttcaggtatccttgatctccgatcgaaagggcactaatttcttactggcgtgtctcaagtctcgacgacccatttctccatcttccttgacctcatctgggttggtttttattggtgaatg

SEQ ID NO: 9479 - DNA, 3000 bp, Unknown
  misc_feature (1)..( 3000): cDNA_ID_3610938_gDNA_ID_1972123_Annot_ID_179081 3000 nt of promoter + ATG
ggtacaacatgtttgattctgcttcctccataatgatcttcaggctacttgatctctttttgtttcgattttatcgccttcttgggataggtacaacgggaagacccaagggtgtgacgataagccacttggctttcataacacagtctctagctaagattgctattgctggctacggtgaggatgatgtacgctttttacctccacttatctgtttgtcctcaatgaaatctatagagctgaatacttccgtaagtaaatagtctcttaaatttctctgcaggtgtatttgcacacgtctccattagttcatatcggcggtctgtcatcagctatggccatgctaatggttggagcttgccatgttctgctgcccaagtttgatgccaaaacagctcttcaagttatggaacaaaaccatataacttgcttcatcaccgtcccagctatgatggctgatcttattcgtgtcaacaggtaaaagtccttgcttgaagtaaatttcggtctgtaaaccgttggttggctgaaatacttttactcaaaggacaacgaaaaatggagctgaaaaccgcggtgtgagaaagatactaaacggaggtggatctttatcaagcgaactccttaaagaagctgtgaacatcttcccatgtgcgaggatactttcagcatatggtgagtcactctcatcaagcttctaaatcaaccgtttttgttaatgttttgactttgagatgttggttttaaagggatgacagaggcgtgctcttcgctgaccttcatgactctccatgatccaacacaagagtcttttaaggtgacttatcctttgcttaaccaaccaaagcaaggcacatgtgttggcaagcctgcccctcatatcgaactgatggttaaactcgacgaagattcatcgagggtcgggaaaattctaacgcgcggaccacacactatgcttagatattggggtcatcaagtagctcaagaaaatgttgaaacatcagaatccagaagcaatgaagcttggcttgacacaggtgatatcggggcctttgatgagtttggtaacttatggcttataggccggtccaatggccgaatcaagactggaggcgagaatgtttaccccgaagaggttaccttccaacacaagaaactgctcgatattaccctcaagtttttttatggattgaatttacgcaggtggaagctgttctagtagagcatccagggattgtttctgctgtggtgataggcgtcattgatactcgtcttggagagatggtcgttgcttgtgttcgtttacaggagaaatggatatggtctgatgttgaaaaccgtaaaggaagtttccaactgtcaagtgagacactcaaacatcattgcagaacacagaacctaaccgggtaaaatatctttgataatctagttacttaacgagtaaattgttgtatatatacttatcagtttgatgaaattcatgaaacttttgttggacaggtttaagataccgaagaggtttgtccgatgggagaagcagtttccgttgacaacaactgggaaagtgaaaagagatgaagttcgaagacaagttttgtctcatttccaaatcatgactagctctctctgatcattacaattttaaaccgttaaaacattctttatttgtttgatgatacaaatttttagttagttttagtttgatcattaaacccattattgccctttaatacagagacaactaaaccatacagatcaaaatcaacaatattttcgagccgatcatttttctctgtgatcaactaaaccaaacccattcttgtatcaagacttcaagccgatcattttcgaagctctctctcaaagaagtttccgattagtatctaactatctatggatttaatcttctatcatatcgttttcaagctttattttaactggatctctttggtaaaaaattgcgtgtttctcttggttgttgtaattgtaaattaattttaatataaatatggttgcacagaacaaaaaaagaacaataataaagtggattcaaacctaaatgtatattatttgatttttccaacgtgaaaagaatgcatgaccgtacaataatcaggaaccactaattttacctaccaaaactatatgtatatgttattactttactgatgggatgggatgggaccataaataattcatattacatttatgatcatcagcagagattgagactctcaaagcatcaccgtggtgataaatggaggtgtcttccctaattttttaatatttgattaaagacacacatgaagaaagataacaaaaatgtctataacaagacattaagggtttgaatggttacggcggacaaaacctccgatcataccactttttatttactattcatcaattataatccacagtggtctggaccaaaaaagataaaagaaaaccgcagcggcttatctgcggaccgcttttacatacaaataaacttggtccacaacggtttattgtctgcttcaaaaatgaagtagactaaaccgtagacaaattagaccgctttgtccgttacatccattcaaagagtaaagacatctttaaagacactcttgattgatcaagacttttgacctagaatctaaaaacgaagaagaagccaaataagatcgaaagagaggtaatttagacaccattaattgttcgcaatgtttataggaaacacttcattcttttatagagagagaaaattatagaaaaactaagcaagtacttgtaagtgtatatttaatctctaagtttaatctcttaattagatttgttttcaagcttagtttaatctctaagtttggtaagcgttcttcaagtggtacctaccactgtccagagcaattaaattcactggccatagctctttactacttacttgctctattccgtattcttatttaatgaccctctttgcttctgcttccttcttatcattcactcacgacactaacc

SEQ ID NO: 9480 - DNA, 3000 bp, Unknown
  misc_feature (1)..( 3000): cDNA_ID_3042051_gDNA_ID_1972123_Annot_ID_179075 3000 nt of promoter + ATG
gtgcggtgaagtctccaatgaagacgctatcaaaagatcaggatgatgatcgcgtgatgaatcacgtgctggttgtgggcagcttggtgtgtggactctccggcgtggctttgatggtcgcttctgctctcatttattttctcggttacccgaaaacgcaaaattcctctgttaattgtgatcacattcataataataccaagtagaatcgttcctttttttttgggttttctctataattttctcaattgtatcaagaacaataaagatgttatcatgtattattgtaagaaaacagatactaataatcttttggttggttattgattatgtttggtgtgttcggttcaggaaaatgatttgaactggttcggtttgggaacattttgtcaattcggttcggttattgctaataatgaattaatttttaaagcttacaagaaaaatctaattaattaattaagaagtctgagagcgtcagttggaggagtccaaaagaggagaagaaggaagcttggcctttgaggagattcaaaggatcgtgttgcttactgtatttaaaaaccctagagttcatcatcatcttcctctcattattgattgctctaatcaggttccgacgagactaataatcctttctcagatcgataacaatgtctcactctgctgtttctcaggtcagatcctccacacatttccttatttttttagtcaacgattggattttatatcttcttgattatagtgattatagctggagagtttcgaatcctctgttttgtttaggggtttgatttgggtcttaatgttccatttgtctgttttcggagaaaacgagggaatttttaaaaactttattgatttgaggttttattgatctttaatctgggtttaggcttgtctttaattcgattaacgatcttttcttagtgatcctgtatttgagtttcatttgttatcagaaaggagttttaatctgatggagtttaaatttcttctatacaggctggtgctgtctcagtttcaattgaaaaccaacgttctcttagaagatccgtcttcaaggtgatgcatctaatctctcatataagtataaagattcgagcttgagctgtgttcatactcagagtcatggattctgattgtcttctacatgatgtctattgttttgtttgcttgagtttgatcttaaaccatcgcttgctttgtgttgtactctatttccattctgcagcagaacaatagcataagcttcaacagcaagtcatggtcatcttctttagcattgaaccagaagacaacaagcataagagatgggaaacggtacccgagcacgacaatatgtatgtcggttcaacaaacaagtagttccaaggttactgtctctcctatagagttggaagaccctaaggatcctcctttgaacttgtacaaacccaaggagtcttacaccgctaagattgtctctgtggagcgagtagttggcccgaaagcccctggagaaacttgtcatatcgtcatcgatcatgatggtaaccttccttactgggaaggacagagttacggtgtgattcctccagtaagtcatgtccctcgtgctgttacgttgtcttcaaattgttaccaccattcttaatctcttaaatctattaatgaactggaacttttgcgtgtagggtgagaacccgaagaaaccgggagcgccacacaatgtgcgcctttactcaattgcatcaacaaggtacggagatttctttgacggtaaaacagcgagtttgtgtgtacgtagagctgtttattacgaccctgagactggaaaagaagatccttcaaagaacggagtctgcagcaacttcctatgtgattcaaagcccggtgacaagattcaaatcaccggtatgtaaactaattacccaaccaactgatctcatacttaaagaccccttggactaagttttcttttaactcaatatacatttcaaaaccaggtccatctgggaaggtaatgctattacccgagagtgatccaaacgcgacacacataatgatagccacgggaacaggagtggctccatacagaggctacttacgtcgaatgttcatggaaaacgtcccaaacaagacatttagcggcttagcttggctcttcttaggcgtggccaacaccgatagccttctctatgacgaagagtttaccaagtacctaaaagaccatccagacaactttaggttcgacaaggcattgagcagagaggagaagaacaagaaaggtggaaagatgtacgtgcaggacaagattgaagaatatagtgatgagatcttcaagcttttggacaatggagctcatatttacttctgtgggcttaaaggaatgatgcctgggattcaagatacacttaagagagttgcagaagagagaggtgagagctgggacttgaagctttctcagctcaggaagaacaagcagtggcacgttgaagtctattgagctctttatttgtatttgctgtttttgatttttgatttaagaatcgtaataaatttgaatttggtgtttttctacttttcaaacatgatatgatgataatatctgaaatttgttggttttgagaagagaatattctcagagaataatcaatatatcatttatgtagtgacatgagccatcaagaaaacgacgaaaaggtatatactattaaagttgagaataatcttatcttacatgtgctgccataaacccaaccaaaggttatagaatattgcataaaatattcgaatcgcctaacgtcattttaatgaaaattttagagagtttataaatcaataaatcataataatcatcggtttaccaaaacataagtattttgaattttcggcttttgttcggttatgtagctgaacaattcgaattagtgtcatagattcataccgaaccgagattactctcttgtctgatgtctctagaattcaaacaaatacgaaccggtttcgctatcgatg

SEQ ID NO: 9481 - DNA, 3000 bp, Unknown
  misc_feature (1)..( 3000): cDNA_ID_2182736_gDNA_ID_1972123_Annot_ID_179071 3000 nt of promoter + ATG
gtatatttttgcagacgtgcatactaaaagtcgatctaaagtgttgcattggttgccaaaaaaaagcaagcatgaaattgcagagtatctctggtaaaaaatacttcaaagcttttaattgcgtggctcatatgtctttaaacatgatgatttaaatactttgtttccaatggaaataggtgtagaggaagtggagtataacatcgaaaaagggctcatgacagtcagaggtgacgtagaacccatggctctggttcgtaaacttaataaacatgacagaaaaacagagcttttctcagtcaagtaccagcttgatgatgatgatctaaacagtgattcagaagactactcttcttctgactctactaattcatcttatgatcctaaacccatggaacgtcaattccaagagaagatgatgcagcagaagaagaagaagtctgggatactaaaaatgctttctcttttatggtgtttcagcagtaaatcaaaagttgttcagcctttaccgatgcgaaaccgaaactggcatgtcccatcaaagtttgagaatgttcctcctggctttggcttcaattctactacatcgtcgcagttgcggcctccgcatccaatgatgccctatccaccaatgatgcaaccaccaatgatgcagcaacaacgaccactaatgatgcagcaacaagcacaagttccaatgccacctaatgttaacatgttccagtcagcaccccaaccgtttaagatgcaccctaagttgcattacggggagcagaaacaggttgtcacctaagctacttgttctgttgattatgtctctgatacatatactaagcaaaagaattgtttttaagtttcgtatcttttgccaattgccgatagtgaacatttctcaagtctggcaaacttttaaaacaaaagaacaagggtacattttgaattcatttatgtgtgattctctgcatctcccaaacctggttccataaacatttggataagatgagctttgtttgtgtcacggaacaagaatctcattcataacccaacagagaaaacataaataacaactcaaatctgtgcctattgctagtactagaatctattgtttttgatacagagatttctcttggagaatacttgtcttgagatttgtctgttgtgcttgtgcatcatgttttcctccgatttaatggttgttttcatgttcgccctccaaatctttcaagtatcccatgaacaaaagaaacccgaaaaggaagaatccacctgaagagctccctccaccgcctccgccaccaccaccaccaccatcatcccgaggtgggaacccgtttccaccgtcatcaagctttggggatttaacttttcctgatatttaagttaaggctaaaaaaataaattctgaagatacaaacaagaatagaccagtccgtttctgttaaagcacattctcaagaataagaaccatagcaagccacaatttgagttcaaaataactgtttcatattagctagaatcgtatggttttttaagcccctcttgtttgttagaaacgcaaaatagttgttcaacatagagaaggggatgaaacaatttaccatgagtaggagcttgtgtgattgttggtgattgccgtgtaacggtctgtgtttgtccttgactgcattttgaattctgcagaaaacaaatcagaataagtaaacagctagcgtttcagagacacttaggaagagaataccggaaaataaactattatcggccataagagcaaaaggatcttgttcataaaacaagcaaaatggcttatgatgtgtaattaagttatgtgagcaaaatggtgtgtgatgaagttatcccaacagctaaagatttaaaacacttaaacttaaaggctgcaaagtcatgaatggaacctaccagcgcagagttacatgcaaagactggtcttttattcttagagacgacaactggttgcactgcatcctggagagaagggaatttactttggctccaaggctggcgttgcatagaaacgcttgtaggataacgcctttgagagtttcctattacagacagcaagtagaagaagagctttagaattccattgttcattcaataaaagcaagctcgaacgatgggactaaagcaagaatcaatgctacaacaacactcactaaagctctgagatatcaataacaacaacaagtctagtttcttcaatttgtcaagagcaatccaaactcaatttcaaagaattttccaaagaagcaattgtaaacttaagagccaacaagtgttgagatttagaagagacataccattactcgtaaaagatttctcacgaggagcgaggtacaccgatgtttgtgtaccaatacacaatgatggattcattaccggcataactacaaacagcaacaaaacaataatctttaacctatttcacaagggagaaaaataaaaaaaaaaatcaatttctcataaatcgaatagagaaaaaaattatggattcatcaattttgaaattcgattaatgataaaaacccatagagatttggatcaaagcaggtagattttttgtcgaggaaaaatttgggattttggttgctcctcgaagcttctcgatcatagaggacgaaacgcaaataaatagtttataagaagaacaaaaaagatgaggaacgtgaatcgcacctgaagactaaaacgcaaaaagacggaaaaaacaaagatctttcttagggtttatgtaaaattctcgcacaaatcaattttaaagcgttggcttctattgcaagaatctaaatagcccagaaaataaaataaaaggacaaaatatttctcctttgtttgtcggttttttattttccaacaaaatgatatttgttttatttattattactaaggctgatcggaaaaaattaaaaaccctaatttgagcagatctttccaattgaaagcgaaccgtgaattttgagtctctttaccggcggcgaaaaa

SEQ ID NO: 9482 - DNA, 3000 bp, Unknown
  misc_feature (1)..( 3000): cDNA_ID_3042066_gDNA_ID_1972123_Annot_ID_179065 3000 nt of promoter + ATG
ctgtactgctaatgtatcaaagttgtgtttggtttctattttccttttcatacattgtgttttatcagtcttgtggataaaaaaaatcgttactgctgttccttgaaaatttggttttgagctctttattttcttctaatgactaatcaccagtgtcttgcttttggttcctacaaaactcaattcagtatctgtagttttggcaatgccttgcttctaataatgagaactcttgactcttgttgtagaaatcagtctctactaagccttctctttgagaaagaatgttattacttgcaatctctcatacttatttttaaaatggctatctgcagtttcccttgctctctagaagtggagtcatggaaagaaggattgcagaagcatcaaaagaaggcgatgataaatgtctcattgaaatctctgatcttcctggtggagacaaaacgtttgaactagtcgctaagttctgctatggtgtgaagcttgaactcactgcttctaacgttgtatatctcagatgcgctgctgagcatctcgaaatgactgaagaacatggggaaggaaatcttatttctcaaactgaaacatttttcaatcaagtagtcctcaaaagctggaaagattcaataaaagcgcttcatagctgcgatgaggtcctcgagtatgctgatgaattgaacattaccaagaaatgcattgagtcactagccatgagagcatcgacagacccaaacttgtttggatggccagttgtggagcatggtgggcccatgcagagtccaggtggcagtgttttatggaatgggataagcaccggggctagacctaaacatactagttcagactggtggtacgaggatgcatcgatgctaagttttcccctttttaagagacttatcacggtgatggagtcccgcggcattagagaagacatcatcgctggctccctaacctattacacacgaaaacacttgcctggcttaaaaagacgacgtggtggacctgaatctagtggtcgtttcagcacacctttgggctcagggaatgtactgtccgaggaagagcagaagaacttgcttgaagagatccaggagcttcttcgtatgcaaaaaggtttagttccaaccaagtttttcgttgacatgcttcgaatcgccaagattttaaaagcaagtccggattgcatagccaatttggagaagaggatagggatgcagcttgaccaggctgcgttggaagatcttgtaatgcctagcttttctcatactatggagaccctatacgatgttgactctgtgcaaaggatcttggaccattttcttgggacagatcagattatgcctggtggggttggctctccttgttcttcagtagatgacgggaatttaatcggatccccacagtcaataacaccaatgacagcggttgcaaagctgattgatgggtatcttgctgaagttgctcctgatgtcaatcttaagcttccaaagttccaagctttagctgcttctattcctgaatacgccagactcttagatgacggactctatcgtgcaatagacatttatctaaaggtaacactcaaaagaaccctatcaatctcctatgtaacaggtttcttttcacacagacagattaagttttctctcttttgatgattctcagcatcatccatggttggcggaaacagaaagagagaatctgtgccggttgttagattgtcagaaactctctttagaagcttgtacacatgcggcgcagaacgagagattaccgctaagaataatcgtccaagtgctcttctttgagcagctacagctcagaacctctgtagctggatgcttcctggtctcagacaacctcgatggcggatcaagacagttaagaagcggaggatatgtaggaggaccaaacgaaggaggcggaggaggaggaggatgggcaaccgcggtaagagagaatcaagtcctgaaagttggaatggacagtatgagaatgcgagtttgtgagttagagaaagaatgttccaacatgagacaagagattgagaaactcggtaagacgacaaaaggtggtggttctgcaagcaatggagtcggtagcaagacttgggaaaacgtttctaagaaactcgggttcggttttaagctgaagtcgcatcaaatgtgcagtgctcaggaaggttctgtgtctaagtctaacaacgagaatgtgaagatagagaagctaaaggatgttaaagagcgtcgtgggaagcataagaaagcttcgagcattagttctgagaggtgaaaatggtaaatttccacggttcaaatgtccagttactgtgtgtttggacattgtttagctaaaaaaaacaaaagagagcttccattgttaaatgtgtgcattgtaggcttgtaatcatgtttctttttttcaattgtttatgtaactttgactaccaactattttgtcatttttatatttttattttaaacctctaagaatattggaaagattcaaaaattactgataacgaatatattaattaactatgtaataatcaatcttcatgaccacaaggattattaagataaggtttactttttttatactatacttattggggagtttcagatttgataagtttatgtctagcctttaattaatgatttagagttaatcaaaaataaaatctggaagactttgaactgaccaaaaagactctcatgctaagtaattgaaggacatttcagccgccagcttgacccaattaaaaagcccattttagtttttcttccctttgttttctcttattttaattttacctcagtttataatattttattctctgaaatctgaaaaatcatctcttctgaaaattttgttttccgttaattcgtcgagtctctcgatctccgttctcatcagatttcaaactctccgatctcggattccgacgagatattagtctcattgtcgaaagagatctgttccgatacggcgtgagaa

SEQ ID NO: 9483 - DNA, 3000 bp, Unknown
  misc_feature (1)..( 3000): cDNA_ID_2182724_gDNA_ID_1972123_Annot_ID_179068 3000 nt of promoter + ATG
tatagatgatgatacgaatgatcttgacttcataagttatagaatgttcacaacggtctttacattcaaaattctattgtgatttttttatttattgcttatggcaattcttcggattcattaccgataaaattttagattataaagtcaattggtaaatatggtactaatctggtacgggacgaagttggaatcttaccataaatattagacatgctccacgctggactacaattcttcttcttcatcgactaatcataccaaaatttcattgatatcggattctagtcaatcgtcggatcatcgattttttgaggaaaacttccaaatttctctatgattttttaggctatgaattaaggatttcatttgatttgtgaaaacttgaaagttgtagattacgaattaactccatcagtataaatttaggatgaagttccatggtggttatgatattgtgtgatcaaacatttgacgagagatttacagctttcttcgacgaagaaaccatggactttttttctcatgaattgatctacctaaatggcgaagaagggtttcaaggatgtcggttctcgagttgggaaaagttatttttctatttctatttttcttatttttggtgaaaatttaatttaagtcgttatatagagttttgggcctttaattttgccaataaacgttaaccttttttttttcttagactaatacatgtcttttattgatataatgaaatcaacatttgaatatgtactatatcaacatttaaactccttttgcttccatcctatatatactccttgaggattttcaagctttagaatctctttgtgaccaacaatctcattgcctctgatcacctttttcgtagacttgtacatccacttcgcaagaggctgaagacgaatctctctattaaaaaggttgttccgtagacggagtcttggaacataatactagtaatgatttttaggaaagaacttatgagttggaagcacttgattctctgataatcaagataaaactcaaaatgaattaccagattgcgcttgaagttgttgtttgtgatatatggcctcaaaaaatccacaactagctcaatttctgaagaagaaaacttgacacccctatgcggcactggactttataatattttaggttttggatatttaagtttaagatttaattttattagcatacaaagtaattaaatttaataataattaatactgtaaaagtaaatttcatgaattaaactattttttgaggatcaaagctattgcgttccatccaacctacaagatttagattttgtgttcgtagagaggaaggtaacattttttgtgagatcatcttcaataacaaacaaacataataattagaaacgaagctttacaaaattttaaaaactgaaataaaaatatataaattgagataacttacttgtttcaagaggtgaaataaacataggcaaagatgtaggatcttttgatgttgctttccaaacaacaactacacgaacaggaaatgaaaaattagacgatgatgaataacacgaagcacaaagattagtatacaaatataattacgtgaacattattgaagaaaaaataattgtcttatttttgagttatggagggcacataaattacatgttggtaactatttgttatatgttgattagcacaatagctaggaaaaccaaaacatgtagtcgattaaactaaccttgcgtaaacaactcatcatcaattggcaaagatctatgagattttattttccatggaccataacagaaaaaggagaaaagaaaaccgatgacgatgcatcatagaaaggtccaagattgaagtaaaaaaagaactataaaccataattattacatatcatgcataaaaatcaagccgtgatgtttgagtttcaagggagaaatcctatatttatagaaattttcaacataaggttttagggttttagatatgacggcataaattatacggacataatttttttaatagaaaaatataagtccaataggcgaataagagaattaggattgatagacgaattaggggtgattagagttgattagggttaataggcgaattaagattgatacgcaaattagagttgttatttgtaaaacagaaaagattacattacattttttacacattttttttacatattaaaatatggaaatctcattaatgtaaaatataatcttattaattaataattaataattaaagggggcaaaaacgttcgttaatattctgagagcaaacgtgagcactttgatatataagataaagtttatttatttcccaaatgttacgaaaaattaattccgtcatctttttgttaacaaaagtttatcgatatgcttaaaatgatccaatcatcgaaatttaagtatttttttataaagtcaaattaaattttaaaattttaataatatttcaaaattatatactttttcatcttaaatttaaaaatttgtgatttgtttgacattttttcccaataaaatatagtttcaatttttctattttgctaagatagcaatgtctgtttataatacaaatttggatgtataataaatattttgtctcacaactaacacgttgaaaatcgaccactacttggtacgaaaatagcaaaataaattaatttggggcttttcttaaagaaaattattttatatttttctttaattttgtgtttgtgtcgtccttctatctctaagaagcactacccctcccgcaattgaaggttctcttcgtcgctcacatccaatctctatcgatctcagattccaatttctgcgaatattttcttcccagagagattacagattctagggtttcgaatagttctttccaatctagtcttcttccttttgtttctcgggcgaaatttcccttagggtttcgaagatccgaatctgtggacggagacaattcgacgtcttcttgagctgcaaagatgttctggcga

SEQ ID NO: 9484 - DNA, 3000 bp, Unknown
  misc_feature (1)..( 3000): cDNA_ID_2182720_gDNA_ID_1972123_Annot_ID_179066 3000 nt of promoter + ATG
tatgtaataattatggtttatagttctttttttacttcaatcttggacctttctatgatgcatcgtcatcggttttcttttctcctttttctgttatggtccatggaaaataaaatctcatagatctttgccaattgatgatgagttgtttacgcaaggttagtttaatcgactacatgttttggttttcctagctattgtgctaatcaacatataacaaatagttaccaacatgtaatttatgtgccctccataactcaaaaataagacaattattttttcttcaataatgttcacgtaattatatttgtatactaatctttgtgcttcgtgttattcatcatcgtctaatttttcatttcctgttcgtgtagttgttgtttggaaagcaacatcaaaagatcctacatctttgcctatgtttatttcacctcttgaaacaagtaagttatctcaatttatatatttttatttcagtttttaaaattttgtaaagcttcgtttctaattattatgtttgtttgttattgaagatgatctcacaaaaaatgttaccttcctctctacgaacacaaaatctaaatcttgtaggttggatggaacgcaatagctttgatcctcaaaaaatagtttaattcatgaaatttacttttacagtattaattattattaaatttaattactttgtatgctaataaaattaaatcttaaacttaaatatccaaaacctaaaatattataaagtccagtgccgcataggggtgtcaagttttcttcttcagaaattgagctagttgtggattttttgaggccatatatcacaaacaacaacttcaagcgcaatctggtaattcattttgagttttatcttgattatcagagaatcaagtgcttccaactcataagttctttcctaaaaatcattactagtattatgttccaagactccgtctacggaacaacctttttaatagagagattcgtcttcagcctcttgcgaagtggatgtacaagtctacgaaaaaggtgatcagaggcaatgagattgttggtcacaaagagattctaaagcttgaaaatcctcaaggagtatatataggatggaagcaaaaggagtttaaatgttgatatagtacatattcaaatgttgatttcattatatcaataaaagacatgtattagtctaagaaaaaaaaaaggttaacgtttattggcaaaattaaaggcccaaaactctatataacgacttaaattaaattttcaccaaaaataagaaaaatagaaatagaaaaataacttttcccaactcgagaaccgacatccttgaaacccttcttcgccatttaggtagatcaattcatgagaaaaaaagtccatggtttcttcgtcgaagaaagctgtaaatctctcgtcaaatgtttgatcacacaatatcataaccaccatggaacttcatcctaaatttatactgatggagttaattcgtaatctacaactttcaagttttcacaaatcaaatgaaatccttaattcatagcctaaaaaatcatagagaaatttggaagttttcctcaaaaaatcgatgatccgacgattgactagaatccgatatcaatgaaattttggtatgattagtcgatgaagaagaagaattgtagtccagcgtggagcatgtctaatatttatggtaagattccaacttcgtcccgtaccagattagtaccatatttaccaattgactttataatctaaaattttatcggtaatgaatccgaagaattgccataagcaataaataaaaaaatcacaatagaattttgaatgtaaagaccgttgtgaacattctataacttatgaagtcaagatcattcgtatcatcatctataacataaaaaatgaaaaggagtatatgttttgttggacaatactatgaaagaaattaatgggtttcaactttcaagtaagttgatcaataacccatttatatgcaaaaagagtttttctttggtgcaatatgcgatgggtttattttttatttttggctcaacatcaacttttcattaaccaattcaaaagtataagtgattcgaccacaacatattttaaccaaatacaatgaatcagtttagtatcaccctgaaacactaagatggattcaacgctatccaactgaaatttactgtatttttccaaccacaacgagatgaattacaccacgactctaagtgaaatcatctcttaaaccacctaaattcacccaatgacacaaaaacaattactaacacaaagaaaatcaaatcctatcctaagatccaatccaaatccaagctattagtccctcatgatccgagtgtagaacgtgtcctaatagcatctacgccagaagcgcaacttcaaaaaggttttgactcctcggctttcactatttcggtcctaagtctaaaacggatatagtaatccgaatgaaactcaacaggataccgggctgagacaaaagtttttgaaaccggggctttattggagagctttccttcttcttcaacaatccaaatggttttcttttctcccctacttctaatatgaccggagaatgcgatggatttatttatattagtcttacgcaattcatattattatatttggagatggaaataatatgactggagaatgtaattagtttagagaacaatgagaaaaaaattaaatcaagaagaaagtttatttgataaggtattattactggtcattgacttgtaatttgtaaaaattcacaatactctgtatacgaaacgagatgactttggttaaaacacaaatactgaaccgacaaataaataaattaccggtttaataaaccgttcaaataccggttcaatctgatagttatacgatgaaccgagcttgagtcgttaaaccttgtttctaacatcagaagctcgaatcctccgatttgatctctctgttcgtttcttccaaaccctagaaaaatccttagcaatg

SEQ ID NO: 9485 - DNA, 3000 bp, Unknown
  misc_feature (1)..( 3000): cDNA_ID_2182999_gDNA_ID_1972132_Annot_ID_179091 3000 nt of promoter + ATG
gttatttgatttagtcacttaatcgtcagtaatttcataagttcaatttgttttctaatcgttatgtaaatttagcattttatttttttcgtttttagactagatttacaaaacgatatgaaaactaaccggactttggatcccgtcatttgacctagtcatttgatcgttagcgatttcacaagttcaatttgttttctaatcgttatgtgaatttagcatttttttgtttttgactagatttataaaacaatatgaaaactaaccggactttggattccgtcatttgatcgttagcgatttcacaagttcaatttggtttctaatcgttatgtaaatttagcattttctgatttgtttttagattagatttacaaaacgcttgtcacttgatctagtcattttgttacaagttcaatttgtttttttttttgcgtattttagattagatttacaaaatgatatgaaatctaaccggactttggatctcgttatttgacgtagtcatttgatcgttagcaatttcataatttcattttgttttctaatcgttatgtatatttaatattttttatttattttagttttagatttacaaaactataagaaaactaactgggatttgggtagcgtcatttgatagttcaatttgttttatcatacgtaaatttagtactttagttttttatcagaaaaaaattgctttgaattttcaaattatttttataaaaaaaattcctacaaattttatacaagtttttgtgttttgtttttgttcttatgtcaatttttcttcgtttgtggaataattcattacaccaattacgtattgaggaaagaaataactggcaaatgtctaatccttccaagagtgttcgtagttttgtgttataacattagttctctgttcatcatacacgacatgtttttctgctactttgtttaaccaaccctaaacctcaattttcacagaatcctgtaataatctatttcgataacccgaggtctgctccattcgatccaacccagatgttgttcttcatttcataattggattaagaaagctctcactcttgttttttgagtgcatgatcatcactgcttgtggctccttttgtcaatttgttcacactatctttggcctcagcgagaaatgcagcgtctggtttgtgtttatctgcaggttctttcatggccatacagatgtagaacacgatcactgtgttcactgataccaccgcaagaaatccgctcaagagaattagagaatgaggagacaatgtcgttgaacctgttaaagatcaagctcaaaacactgatagtgagtattgaggtcagcttatcacattaacgagctgagcaagtaatacataaaacttatgtgggacagacaacgccaaaggaacaacgagcattggatgaatgtgaagatcatcaaaaagctatattgatatgacaattctaagagagtacagtttcaaaaagttgtacaatagagaaaatttctaaaactaccaccatagccaagtaaaaggaactattaaactgctttcatgagaaaagttctacataaaagagtgtacgtagaagccaaagatttcaagaatttgtgtagtttatgatctccagcgaagaagatgaagttgttttgcttcaaggcatcattgacttcactcattaggagtggaaaccctagtaagaatatatatgatttttatgagtttgtgaagatctctctagctataatgataaggatctttctggcttttcatcttcttcatctttgacccttccttcaagttgtcctagcgcatcttctttcaatttctcaaaccttcctcgacaaatcataacgacatgggccaaaaggtatcggaaacccaatctctacttcagtctttcccttttggaaagagagagactgaagaagaggttgagttttcgaaaccttttaaccaaagttgttatgatttgtcaagaaagatttagggaattgacagttgttgccttctaaatcaaagaaagtgcgccaaggacagcttcgaggaagagtcaaagatcaagaagatgaagagccagagagatacttatcatgatcaccagagagatctttacaaactcatagaaaacatccatattctcattaggcttttcactcctaagaagcgatgaagctaaagctaagatgcgaaatttagctcaattgttttacaatccaactataaagctaaatagtagataacaaaatatgaaaagttgcacatttgtgaacttcatacacaacaatattggaatgaatccaactcgaaattgcatcagcataactagaagataaaactcaaccaaaagaaaattggagaggatcgcaataaaacaaggagattaattaccaggaagcaaattgtggttgaatccgtataatatggcaacaggaagaatccacatgaacattgacgcaataaggaacttgtgcataactccagccatggcaaaaccaccgaattgaagtttacagaaatcgagagcccattgattttagatgaaatcaggaatcgagagacacagatcttgctcagggttaagggatggattgagtccggcgttggatctagcgagtgcactctcggtcttagactcggcgggttaaataagattgcttgtaagagcggtataagccgattcgtgggacggtacaaacattaatcttgacggtatttttttactaagattattttgacggtttttgtttaattttaacggttttttttgtactacaattaattttgacggtttgattatttgatatgtttcaatttatgacttattaaatagatagacatggaataaaggtaaggaatatatattgtttacaagttatgcaagattggaatatctcatcatgtaacaagattatcctaaaaacaccgacttataagaaattaactcttgcattatccttaaagtaagagggaacaaaaaaaacacataaagaagaaaatg

SEQ ID NO: 9486 - DNA, 3000 bp, Unknown
  misc_feature (1)..( 3000): cDNA_ID_2183028_gDNA_ID_1972132_Annot_ID_179104 3000 nt of promoter + ATG
gggattacaagagacggaaacaagagcagtgagaaaccaaatcagcgtgaatcttccgcagatggggaaagatacgattgataaagtcatcttctttcttcttcccacgtgcctgatgtttacagcgtcagtcgtctcggcggagaagttgaaagaaaccaccggaccggcggcgacgacgacgacgacgaggaagttcagaaattacagagtttgtttggtcacttcttccaccaattcccgtattttattattttttatttccagcgtggacttttctttttctttcgacccattaattcgatatttttatggtttcattcaggtaaatttattacatgtaaacttaggtgttactgacgctgttacaactcatattttactgttcagttatattatcctttttgtcgtttcaactttcaattgtaacaaaattataaatcataggaatttgtttccttaatttaagtattaggttatgagtttaagactaaaaaccatgtgaacaaatttataacaaacgaatagaaacaaatatcattcgcaaaccacatttatgtttccttgctctttctctattttacacacattcttccaatacaataattaaatatggttttacatacagaaaaatataaaatgtaatgttgtttgcattataagttctagagggacaaaaacacacttcttctttttttaccacaagcaatttcacttattacgtaacattaagcaagagagacttgagagcaacggcgatatatcataagacttacgaagaggaagaggaaggtacagttgaagggttgaaaggtttctgttctgcgcagctgagctcatcgtttggtcccgcgtcttctcttccaatacccatgaggtcaaggaagtataagtagtgtgagattatgttgttcattggatcaatggaaccttgaccacatgtgtactctccgtagaggacgttcatggtgctgccaaaagtcgggccacgcttggacaaagtgtcgttctttgtaggtttccagtttccgacaaagatgtcgtgagctgagggctgagctctcttgattggagtcatccatctccagattgcagcttggaatgcaagtgtcgcgttttgctcaatgtactcagggtggttcaagagatcagctttcagggcttccccagctgctccgtagttgaagttccttcaaataacacacaggtaaaaataccttcagtatggacgaatgcaaattgtttgacacagtttttatctagagcttcaaagtagaagagaaatgtgtaccagtaaatgggtaaggcaccgcgtccgtagtattcagctccagggctgcaggggtacttgaatttccaggactcgtcacagtaggattgcattgggctcatttccctgttgtagcacagaccccaagctaaaggccctcctgttgcaactccatagccacctataagacatcacagtaacactcatatgcagcttcttacaacatagaaaccaccaactgcaacttagggcatatccattttcatgattctgaatgtcgagtttgatcagattaatataatggtatagctatggaggtaagcttaaagcatccttttttctattcatagttagatggtcaactatgtagaaagaggactaaaatgaaggaaaacttacaggacgttttgctggctacatgaccgagaaaggcagccatttctttctgtcccatgagctttcctccagtggtaccaaaaccaagaggctcaaagagggcagcagcagtaatgaaagactggtagtcccagaaaccaacagcatgagcaatgggagtgttccttttggaaaagagttgctcaaactgataaacctgaaagtaatctgatatcgtctggttacagcagtatttagaccaccagctgcattcccatccttgcgtgcacaccttatttcccctcactttcttcactttaatcgttttgtcctctccattggcaaccaaggccagaaatgatacagccagcagaaccaaaatcacgattgaaccactcctgattgtcaccatagcttacaactatggaacaaataccagctacaagctgcaaacatcaacaaaaaaacaaatttagaaacatccattaatcccaagtaagcatctgaacattactataaagaaaacagaacacaaattactaacaatacagatctaccttatacaataggcacttaatgccaaaaagctgattagaaacaacaaaggaagaattaaaccaaaaacatggaactctctaagttcttaagtgaaaaaactaagaaaaattgttagattgaccaatattataccaacttggagagattgatgtataagatatgcgaagacttcaaatgtgagatcacgaattcaataaccaagcaacgaaacaaaattctctagtcaagatttagctaaatcgttaccaaaattaggcataagtacttgtggaaaaaatgcttacccgcaatgcagatcagctatagatccagagagagatcgagaaaactagcttgtgaattcaaccgacaaaaattaccctttttgcttcgttgccgagaaaataaggaagagattcttgggaaagagaggaggaagaagaaacactaaactaaagcgggtgacggatcagcagtctctatcaaccgttggattagagaacaatcaacggtgaagattgcgtttggtgtaatgtatgtgtcggttagacaagacagcctggttcgtgttgtgggccctactttactgaagtggagccttccaccgacagccgcacaccagcagaacctgatttaaaccaatcggtctacttcgatttttttcatgggttttcggttcatgttatggcccattgggcttttaagtaaggcctttctataaatgtcaattttgccagagtttcctgtctcgtccttgtctttcctctagccactcttcgccactctctttctctctcccttgttttccaacagtaaca

SEQ ID NO: 9487 - DNA, 3000 bp, Unknown
  misc_feature (1)..( 3000): cDNA_ID_2183052_gDNA_ID_1972132_Annot_ID_179111 3000 nt of promoter + ATG
atgtatgctgctactactctatcatctgccaaatcaatctctgcagaatccctaaatcttcgttccgattccaattcaggtctactccgaatttgtgggaattttctactgatggaacttagctttctaactggtcgagttgttgattagatgcttttttttttttttttttttttgaatcagaggcagcgcatggtgcttctgagtctgagactcgagtctctttaaggaagaagaggataaagcaggatgatttggagcctgtaaagaaatgttccgccagagaaaccaaggcccgcaaggtaatatataatagggtttttggaaatttcaagtcttgcgtcgagtatgataatttttgagatttataggcaatttgttgatccctttgcttgagaaaagttactgctttttatgttcttaactaatcagattttaaagatgtgtattatatgatcctcttggtcttttgtttatgtaatgcaggacatgtgtggattacctgatatagaagactctccttataagaagactaatggaactgcttcatctagtaagtctcactatctatagttattagtgactgagccaaaacttgttctcactactcttcaactaacaccatgattacttgtatgaaattgttttgcagggacgagaaaactaaactcatacataaaatcaacagaagctagcccttctgcatcgtcgatcaaaacagcaggttttctttcacgagactctactctactactcttagtggcattttgggtacatttattctttacggaaaacgcgatgtccctaagatgtttatttagggctaggcataccacctgaaaactgggaaaaggtgctcgagggtattcgaaaaatgaaaccttcagaagaagcaccagttaatgctgtagaatgtgatagaaccggaagctttttacctccaaaggtagaaatatcttacactaaatggaattgaggtattgctgagtttgtgcctattggttttatgtggaagtatacaatgagatagtttcattgctttctcaaatattacttcccatttgcttttcattattacatggtagtactctatgcatatattgggaaccaagttccaagtggtttaccgtgaattagtaacaaatgctagcttatgattagaaaattttcatattctgaattcttgcttccttgaaaggtcgatggaaggtttcccttcttgtttttccttttgatcttatctctccctatttctaggaaaggcgattttatgtgctcataggaacacttctttcaagtcagactaaagagcacataactggtggtgagatttgaattacttatctctccctatgttgcaagaacgcttaatttcagcattctagtatctctgatttcatctggatctccaagtttcctgatattatattcaaacacttataatatgcagcggcagtagaacgacttcatcaaaatggccttctcactcctgaagccattgacaaagccgatgaatcaaccattaaggaattgatctatccggtacattatccctttttaatcttacttcatgttgttaagggctctttgactctgctatgcccccagctgccatatttttcatgagaagtatttaagaaattaaaaggaaaggagtgagaaactataaatagaaattgttgttatcgttttaatttcgataagaaacttactgtttcccctttacttttaggttggattctatactagaaaggctactaatgtgaagaaagttgcaaaaatatgtctaatggaatatgacggtgacattccaaggactttggaagaactactttcacttccaggagttggtcctaagattgctcatctggtataagttgcccatattattccgctttgtaagagagatacatgttttcaaagttcttaaaaggtttctttgatgtactgcgataggttttgcatgtagcctggaatgatgttcaagggatatgtgtagacacacatgtgcatcgtatttgcaatagacttggttgggtgtctaaacctggaacgaaacaggtgcttctctaacaccaggtttatgttgaagtatatatggctatgagattgatttcttaacacttggtaaaatttggttcttctttagtttgcttatctgctcttggtcacctatctctactttgttcttgaccagaaaacctcgtcccctgaggaaactagagtagctctgcaacaatggcttccaaaaggagaatgggtggctataaactttctgttggtgcgtcatcctgggatatcctaacttatagatgcatgaccatacatagaacaatctacttacactccacttaatcttcgtcctcacatttttgttgtctgaaatctcatcaggtaggttttggacaaacgatatgcacaccgctaagaccacactgtggaacttgtagtattactgagatttgcccttctgccttcaaggagaccccgagcacatcatccaaattgaagaaatctatcaaaagcaagaagctttagttgctttggctctggattctccttctagatcattgttaaacccattttttgattagtcctcggttaaagttaaattgtatccaagatattgtatagctttatggggaatgcaagagcatcccacttgtgtgtaaaactaaaacttatagaatggaaacttacccttatgaaagacactgggcaagtacacttttaactgaatattatgaaaaaacttaaaagatgattcaagaaccttttaaagtgtttccactaaaagcaagtgatttggattttggagtcatccaccttgtaatctatctaatttgttatcaaacattaaaatttttgaattccccttatatagaattaacagaaatttctttctttggtcaaactaaaattaactgatattctatgtaaagactaaaaagattatcaacaaattgaattttgcaagacggaagaatccttactgatgtg

SEQ ID NO: 9488 - DNA, 3000 bp, Unknown
  misc_feature (1)..( 3000): cDNA_ID_2183040_gDNA_ID_1972132_Annot_ID_179108 3000 nt of promoter + ATG
tttatttagctttttctttttttgacattcattagatgaaatggcatcctatccaggggtctagatgcgccattgatcttagtccaggttctggaaatgccagtgtctcctgtcaccgtttggttagattctgttggaatgtgagttttttttagcttgaatccttttgttttgaaaccattttctattactatatattgaatcttagcttcagtgcagagaagacgctcacagtcctgtggactgtaaaactgctgcaaaatggttagcaatacacgtttctgatatccaaaacccggaacgtcggtatatttcccatttatgaaatgattcagtctttttggattatgattttaggctactagaaaatgcggtgccttgtcccaagtgtaagctaaggatcccacgaaatcaagataattcactgaagatgaaatgcttaccttgtaactatgttttctgttggtaatatacttgttcttctagctactattagctcttatgatcttgtggttaattagtatgatcttactagtatgctctttcatgaaatgtcctctgcaggttctgccatgtcgactggattgaagacatggaaggaactggtggtgatttacacttttgtaccttcgatgctgtcttggtactttatcagctgatgatatttattgaaaagtttcttttttattgatctttcatgtaccttaattttctgatgtttttgtagagtgatcaacgtgggaaaatgtcagaatctgattcaaatagatacgaagattgttatgaaaattgggacagtaatgaattggtatatatgcatttatttatgaacttcaaatccattatttacctatgaaaaatgcattgatttcttttgagtttgtttttgggcagttgatgcaaaaggaacaagcaaacctgccaaaactagatactattgtaagataaatctatattgtcttttgtttcaatctctgtagattaaagttgaatcatcttttttttaataatctattttccagattcaggaactaagtaacacacagttagaaaacgtatcgcagcttaagttcatcctagaagctggacttcaggttagcaaaagtcaaactagtgtgagaaatatcttatgttttgagttttggtttccgacataacttaggtgatgactgatgcatatatacatgatacagatcatagaatgtagaagggtcctggaatggacttatgtttatggatattaccttagagaggatgaggtcgggaagcaaaatttattgaaggatacgcaaggtatgtaacttttgtatatgtatatgcataaaacacagagaggttaattttaaggtaacatatttttgttaatcagagaggttgaagaagtttgtggaaaatctcaaacactgtttggagactaatctgcagccgtttcgttacgaggaggaaccgtcaaaggatttcaatgccttccgcatcaagttaaccgaactaactaggtttgatattccattgtttcttgtaattttaacaagatccaacaattaaaccctaaaaccaatcaacttttttatttatttatttctttctttcataatagcctaacgcggaaccactatgagaatgtggtaaaagatgtagagaatggcttagctagtgttgtctctgagggggaagcaagtggttcaggccgtaatcaataatcatgatgattaaatcgagtctaattgttgagttccaatttactaccgataaattggtttaattgcaaattgcagtttaggctggaatattggatatatattaattttataaaaaaaaacgagaatgttctctttttttaatgtttgaaattactgttgtaaaaatgtttgaattgactaattataaaagaaaatattgggtgtgagttatgtactctgttttctaggtttcaaacattaatatattatacataatataagaaaagtagatcatttttataatcttgctaggtttgagccaaaaacgttgtaattcatgcataattaatatatatcaatggtacacattcgttgcatttagattgattcttgttccctatattatatgttactcgaaattgtgaatttgataagaattttgtgttgctcgtttgtttgtgtgattcatctacttagaagtctattgaagctgatggtgccaatatgacatcggtccggaattgcaaaccctattaaatactcaactcgaggaagtcttcatttttttgagatgtttaatttggggtttaccattctttcaacattttgacaaatcaaatccgtcacatctaaaactatctcattaactagaagataaaacaccaaaatgcaacacgtaactcttttaatcatttaaaaacaatatactatagttgaattctacatgaaatcattttcagttcaattttggcttcatggtgcttaaacattgattttcctagatttactttacgttgaagaactaattatttttgtttttaatatcacgtgggtgacttctcaaagaaaatgtcaaaaatctttgtaagaaataaacaaaatttctttttttaagaaaaatatcatagactttacttttatagaatttccattgttcttaaaatcgattactttgttctttttttgggtccaaactttaaattgattacactaatagtattaaacttttttttgttggttactaaaaatcaattgaaaccgatagtggcaaaagtccatatatctttctctcatctactcgatttctgaatcgcgaacgcagcgagcgatccggaatcgagagagagagctaccaatttttccaacttgttcggttccttataaagctgtttactttcccttgcgaattctctctctctctactataaagcaatacccttttctttcttttttggtaacccccaaaccctactttgtccagcgagaaaggaagaggggtttcgtctgattccgctaaatctctagtctttatctaaagatc

SEQ ID NO: 9489 - DNA, 3000 bp, Unknown
  misc_feature (1)..( 3000): cDNA_ID_3042093_gDNA_ID_1972132_Annot_ID_179103 3000 nt of promoter + ATG
ccacaggaattaagtttgcctgaattaagtttgcctgaatcaagtttgccacaggaattagaagtaaactgttaggacttcggaaatctactaaagaacctagagaatacattccaaatatatcctcatttcaagctaaacagcttaattaaaccattgtgtcaatgttgctcctcgcttgattgaagctccttgtaagttgtaaccttgtaaaggcactcacagctaaatctgtcaattcattgcagaagcagggtcggtcaaatggtatgcaggtagattaactgcttgaatagagattacaaacctatatattataaacgtggcttgcttcaatgcttaaacaaaggtattgggttcaagtctagctaatccacattcaacaagacaacaatagataattacgaacgatcacacagtatgttgtttgttgaaatccatgtctactcagcttaatggaaataaataactgttagctccaatcacgaaaaataaaacgaaaaccatgagacacatcctagaagctagtcatgctaaaagcatctttgctttgctaagcttaacaacaacaaaaaaaaattcctaccaacacattctgtgtgaacacgatctactacattctgtgtagatgactaccctatctatcaccagtcaaacacgatcctgtacctgtctttctcactagtgatgatagaaagccagtcatcttaccttccatttttgcacaattgtggaaacaaacagcttctgctcactctgtttgatttagcttgtaagttcttcttttactaagcttttcaatttgccctcttttcgtggatcttttctttttgcttgaatatgatgcacaaatgcagctactatgtcatggagtttcgggggaggcctgcttgctgaagaaacattatgaccagcatccttcaaagctcgagcaacatccttttgggctttctggaagtgcacattacagagggcaggaacagtcgatgcaagagttggttttggacaagttattgctttcgactgagctctgcatgaacaatgtgaccacatagagttagaataaagctgattatataattatcacatgctcattgcactccgcaatgcaaaaatttaagttctttccaatcagggatatcaaagcacagatgacacagacatctcacatctgctccatttttatcaccaatttaccataatagctagaccaccatcacagtaagaacttcataatgatataatcatgcagacaatcctaactcctatcatcttcgcccattacgatacaaacaatgcaaagtactttcaattcctcaccacgaaacaaaaccaaaaccagtatcaaggaactgaaatttcacagaatcataaaaacagattagcatttattgaagcacctattatttcctaatgcgagagaatatgatgcgaatcaaaaggaaaaaactatgaaactcgaaattgtgaacgaaccttttattgacgtaagtacaagacgtataaagcttctgctttttatccatgaggatatgaagctgacagtaattggtgagtgccatggccttagatttgcatccactaccacaagcaacacaattaccagccttaacgccatcgttgttgttattatcattatctccgctaccttcaatttcatccccagtttgtccttcaaccttacgtctcttgttttggtgataattctcatctttgaaaggactaacaccatagttccagctataatatctatgttgtgccttgagatcctccattagagcccagtaatggtctctgtagcatctagagagctgcttcaggttgtgcgatctgcgtcggagaagctccgggcgagtgaggtgattggaatttcccaggatctgatcctccaccgccatcgaaatcggtgaattcgatgacgtcgacgggttattagggtttcgaaattgggattcctccaatacaccggatttcgagggggttgaagcaatgatcggagatggatgcctaggaggtttggaagaagaagggttttgcttggaagctgacgccattgttactgttggaaaacaagggagagagaaagagagtggcgaagagtggctagaggaaagacaaggacgagacaggaaactctggcaaaattgacatttatagaaaggccttacttaaaagcccaatgggccataacatgaaccgaaaacccatgaaaaaaatcgaagtagaccgattggtttaaatcaggttctgctggtgtgcggctgtcggtggaaggctccacttcagtaaagtagggcccacaacacgaaccaggctgtcttgtctaaccgacacatacattacaccaaacgcaatcttcaccgttgattgttctctaatccaacggttgatagagactgctgatccgtcacccgctttagtttagtgtttcttcttcctcctctctttcccaagaatctcttccttattttctcggcaacgaagcaaaaagggtaatttttgtcggttgaattcacaagctagttttctcgatctctctctggatctatagctgatctgcattgcgggtaagcattttttccacaagtacttatgcctaattttggtaacgatttagctaaatcttgactagagaattttgtttcgttgcttggttattgaattcgtgatctcacatttgaagtcttcgcatatcttatacatcaatctctccaagttggtataatattggtcaatctaacaatttttcttagttttttcacttaagaacttagagagttccatgtttttggtttaattcttcctttgttgtttctaatcagctttttggcattaagtgcctattgtataaggtagatctgtattgttagtaatttgtgttctgttttctttatagtaatgttcagatgcttacttgggattaatggatgtttctaaatttgtttttttgttgatgtttgcagcttgtagctggtatttgttccatagttgtaagctatg

SEQ ID NO: 9490 - DNA, 3000 bp, Unknown
  misc_feature (1)..( 3000): cDNA_ID_3042107_gDNA_ID_1972132_Annot_ID_179095 3000 nt of promoter + ATG
ataaatattaattttgatgaaaaggaatttgtaaagaagcggttctcgtaatttttcttcggaagttgtcaaagaaccggcagatcctcgctgctcttgcattcgctcactacggtaacactctatcatctccatctctgttttgaattcgagattcgaactcaaagatttcgttttggaggattgcaatcttttcaatcaaaaaaaaaaagtaaaaagattgtaaaattgatcgttgattgggtgcggatgatctttggtcttcttgagcttaacttgggttgacatcagtttactgttttaagagatgaaaacccacaaggcatataacttttctagggtttagggtaattatattttaggatcaatcttctcgaaaaggaagaaaaattgaagcttgctatgtctctttaccttgagatatgagaatcacaggtcaaattatgttcttgatagattcagttgttgagttcatgtgtggtgttggaagaagtcaaaactctagttctagatataagcttgaaatttggacatgattttgtagatgtaagcttgaaaatggtttaggagagatgttactagatgcttccttatgccttctctgagactttaacattttgttgacacttttgttcttttttatctacatcttttgaatcatttgtttaaagcttttgcttaactcaaaagtaatttgtctcagcttttgcttaatggtgcctttttcctctggcaaacagatctcagactacagttaccaagatggtgtacgaaataactgagcaaaaaagtaattatttcttcacaattatcgctgtatagctttttcttgtgctgtttctgatgtacaactcttttggcaacggattttcgttagttctaagcattttgtcggtcctgtcgttcacttgtctttctcttgtcttataaacattactgaacagatcaaggtagatactgggtcagatttctttatatacgtgttatatctcttctttaggaattaaatcagtaatagaaatcacaaacttcatttttctttgtcttatggcttccatttcctgaatgtttgcagaagttgggttgggcctcattggttttggtttatcctttacgtttctcggagtcatcttgtactttgacagaggtttgctcgctctaggaaacgtgaggatatccttgttatttctaaacattaaatctacacaagggtccaacatttgagtctcatttggcttttgtgttcagttattctggttgataggtgttggccttttacttggttggcagtcgacttggagagtatttacaaatgttaataacttgagggtacgcattggactaattctaatctctgttaattgtttctcttgatgaacctttcatatggacatatcaatatgttcttgcaggggactatctgtttcgtccttggactctttctaatatttgtacgttggcccattatcggcattatcttggagatatacggtgtcattgtcctattcgggtgagtgcatttgtttctgttgctcatagtttcttatcgagtttttcacacattgtgcttttagatttgacatattaaagcagactgaaaaatgagtaaactagtggttctggcacagcacactaggatcttttgcctacagaatgatgatgtttgactaataacaatccatatctgatgaactcatttcctttcaccagtcacttattaattttattcagcttcttgcttaaagttttagcctgttacagtgtctaaccaacatcacatgtactaactttgcagcggattttggtcaacagtaaaggcatttctttcccagattccttttgtcggatggataatacagtatcctctcatggtaagtaatccacaacaacacttgccttttcctctaatgctcctttcttatgctttttgtacattcagagcttcctgtcagggccttgttcttgaacaacatcccgtgctcctgcctcaatttattcagtcccttgtggtagcttaagttagcctttctcggaaatggatagacccaatggacgtttcctgatatttagtttgcacatgatatagggatgaacataaaatgatttagagcgatggactgaattttgttttggaatgatctgtttatttttgcaggttcttgagcaacttgtaagaggtgctcgttgaaaaagatcaatctcaatctcatggctcttcagccgcttaacgacatcaaagcctttctttcttttttgggacatgacagagactttgctctgttttttgtttttttggtaaacctcacctttgctctgttttacatgtctaattttgctgtatatgccaaaatacattttcccttaaattgatttatcttctcgttaagcaagtattttcaactataactccaatcttgtgccaaatttaatcaaattcagatgataagtttttttttttaaacctccaatcttgtcccaactcaattttcattatgtaacgtgcggataataattaagtagttttgtaacgaatcaacgacatatttaacataaattaaattttaacagaataaaaagtgttcacgttattaaattttgtttttatttgcgtacggacataagttcctaaatgtgtcagccaaagatcaaattgttttcaggatcagacagagatcatcgagtgcggatttttctcggagagatgtctcttcgtgctttcttgctcggcgaggcattgacctaaacccgcttaataatctccgacgaagatccaggacacactcggcgttaagaggggaaagaaccaaaaatcaaacaatcatgtggatttcgaggttgaagagagttaggagaacgattatggttctgggcgttgccaatttcgtcgtgattgtttccggctgcgttcttactctcgtttctgacgcagattgcgacagccccggacaactatttcccctcttcgccgtttgtttcgctgccggcgtcaaactcgccgcc

SEQ ID NO: 9491 - DNA, 3000 bp, Unknown
  misc_feature (1)..( 3000): cDNA_ID_2991053_gDNA_ID_1972132_Annot_ID_179099 3000 nt of promoter + ATG
ctatatagttttcagtcattcaatcattcattgctcaactaaagatccgttttttggtgaaatgaaaatctaaccacgagggtattttcggtatttctcactgtgaagtatctagtttcttacaagttaattaacgactatgtatataaaataagttgacattgtgagctttgatatttagggtcgttgctaaattagcttggttggtacttgtgcaagacgtgatcctcgtattttcggaatgacgaaaataccatttgatccctaaccacgtgcttgaaaatacagcaaaaatgtggctcggttacccttaatttgggatattatttaaatcttcgaggattcctatatctcaagttgcatttatttatttagaggatggattttttcgttgatgaccaatagtttctctgctgagatggcgaaatatcattggttgtgatgaagattattcaaatagaaagcgatgtagatctagttggtggatctgatctgtccacttttatattattttttccttggtcctgatgattcgtgctttgcttcgttgttatctaatcataatatcttccaccaagcctggatgtgacttcccacacctaaccggtcaccggcctgaaccggaattcaactatccatattatccaaaaatccctctttatttacttacattatatggtttctaatattttggatgtgaatgtgaattatttttaaaaataattttcacgtaatgtcattataatatagtttactttgtaaatcagatttctcgttgaaccaaccaaccagtgattatagtccgcaaggagggtctaatgggggacgaggacattccagattgaagtctcagctaagcttcacgaatcacgactctctggctcggatcaacgaggtcaatgagaccccagtccacgacggttcaggccattcgttttctgcggctagctttggtgcagccactactgattcttgggatgacggttccggttcgatagggtttaccgtgactaggcccagtaaacgatccaaggacatggactctggtctcttttcgcaggtacaatttatttgtttccatgtgggattcctttttttttttcttcatgtgttattactataaacatgctactttagtcaaattatatgaaatttcaaaatttctagaaaaggacaaaaaaatgtaaaatatttgttttaggatagacataaaaaaaaaaattaactagtaaaggtaaatgcagcaaaactctttagtggccatacatttttgttggtggccaattcttaccgaatatttttatcactggttttgcagtatagtcttccttcagacacttcaatgaactacatggataacttcatgcagcttccagaagattctgtaccctgcaaaatccgggccaaacgcggctgcgccacccatcctagaagcatcgctgagcgggtcagttataaacactttttaatttatttagcgatggataattaattcactaaatttagcaacaaatttgatcgtccctaatcatgtagaccctattctttttgccatcctcctatcttaacctatacaatatgtttatattataggagaggagaacgagaataagtgggaagctaaagaagctacaagatcttgtccccaacatggataaggttactttatatcaaatatatatagtatatatggtaacatcattttgaaaaagtgttcattacctcacacacttgttgctgattttcttagcaaacaagctattcagacatgctggatttagctgtacaacacatcaaaggccttcagcatcaacttcaggttcccttatcttactttttctgtttaggtcagctgaatccatttccagagttctctctagttcatgatccatattgatacataaacacattttcatatacaaacgcagaatttgaaaaaagatcaagagaattgcacgtgtgggtgcagtgagaaaccaagctagctcaaacccaaaggtagggtcatcctaattttatttgcattgttccgattttatcatatgagagaattagagaagatgtaaataaaatagattatattaaatgtctaatcctcttataattaagctcctcattcgttatcattataagatagaacagtgacaattgtccattatgtttttgtttcaagtttatgttttgagtgtcgcctattttgtaaggattatgctatgaattctgaaactaattcgagttatgatcataagcaaagcaagctagcatccattatatatatgactttctaatttgatctctcttttctttatacttcttcataaatagttcctgaattgaatattgaaattaaaggtacgctaatttttcttatttttaaaattgaagaaatggaccaaataccaaagttacttgaaccaatgaaaacattaataagcagaattcacgtaccaaagaccaaagtgaatctcgttgatcatataatgaattatgatatatttagtagtagttagaaacatgcaaatagatataggttgatatgaaaattggcataaaatgtatgaaccggaatactattagtagcattaactttcctattattaacaaaactagcgtgtatgcacgttacagagaaagatttattctttattagagatgaaatttctttagttatacatacactttggttttgtaagttaaaaaaatataactccctcctacgttaccaagaagtccaccaacgtggtggattttaaaataactaaccaaaaacacaaatcagggaaaagtcgtaaattaaaactgataatttggaggaaaatatagaaaaagaaaaaggtaacgacattaaagaaggtgcacttaatgcgcagtatgtcctcttgtgccagcttgttgcaccgtcttccgtctcctcctctttccctctctctctctctccaaaccagtcctacttctctctctagaaacctagggaagaagaagaagacggtgaagcgagcg

SEQ ID NO: 9492 - DNA, 3000 bp, Unknown
  misc_feature (1)..( 3000): cDNA_ID_3014269_gDNA_ID_1972132_Annot_ID_179101 3000 nt of promoter + ATG
ttgatacacttgtctaagttatacactaattcttgttctttttatattttctgaaaattttggcagaaatcttcgaatgttgacgctaccaaaggtggtgctgaagaggaaactcttgatattagtgctatgggtgctgttatctttgtcatatcagcgtccacattcctcgttttgctcttcttcttcatgtcatcgtggtttatcttgatcctgaccatatttttcgtcattggtggtatgcaggtaatgttagctaatcttgagcatatccttagtttcatggttcaatagctagaactatgatcaatgtttggtaacaggttgatagtaaactttctttagcattgtttccttcccttgtaaaaatacataacatgatgaactctttatgtgaaatgaaacagaggcctgctaagctaagcattattatgtcaatatcacaattattaatttattttctatctcagggaatgcataatattaacgttacactcataacaaggtactctcagaaacccaattaagtttttgaaccgtgaaagagctctattccagctagttaaaagcatcatgtgatgttttctctttattcatgtttatatttctgcaggagatgcagtaaatgtggccagaagaatttaaaactacctctgcttgggaatacctcgattctctcactcgtggttctgttattctgctttgtggttgctatcctctggtttatgaatcgcaaaacttcgcacgcatgggccgggcaagatatttttgtaagtccattttagcctggtaattttacagttgtctaaagccaaattatccctatgcattttggttcttctttgatttttttccgtatgtctaaacacaacttctggcttgacgcactcaacatttactttcacttcttgctcaaatccaactcaaggttctgttttgttttcgacatttatcggttgacttctgtaggacttagcttaggatgcttttggttcaaaattgtccttagttggctttctaaggttgacgtgtcatgtgacagggtatttgcatgatgattaatgtcttgcaagtagctcggctacctaatatcagggtaaattttctgtatgtattttcctactaaaattcttttgtgatccctttgtatgtgttctaatgggtgtctcacacttaggttgctaccattcttctctgttgtgcatttttctatgacatcttttgggtattcatatcaccactaatcttcaagcaaagtgtaatgattgcggtgagttttcgttattttccttcatttaacaaattgtgtgtcttacaccttaatatttaattctgtttctgcaaggagaagaatatttagtgttgtttcttcaaaaatccatcaaatcatatgattcttataaacttaagcctcatcaaaccagagcatgtttaccattagtgtgttttacttttactccggagcatgatttgtgtcggataattgctcaaaaccccaaagattgagtttgagttcacttgttgtataaaatgtttgcacatagcgagaacgaagaaggtcgatgataggttaactaacctcaatcacgttctagttgattactatattcttctgtttgtgtaaatttatggcataggttgcacgtgggagcaaagacactggagaatctattcccatgcttttgagaattccacggctttctgatccatggggtggttacaacatgatcggttttggagacattcttttcccgggccttctcatatgctttattttcaggtaaccctcttatgcatgatgcattggctcaataacgattatggttcacgacaccaattgtgaacacatcatctgttacaaacgctgtccgtattcaatatgccccatctcaatatgttttttgaccgctttttaactcttttacgtctcagatttgacaaggaaaataacaagggggtctcgaatggatattttccgtggttgatgtttggctacggacttggcctcttcttaacatacttgggattgtatgttatgaatggacacggtcaacctgcattgctatatcttgtcccttgcacgctcggtatcttgttcatctcatgaaaaactctgaattttgatgattagtcccctatatatgcattccattgaaacccaaccaaatgcaagatttcttacatattgagcggcttgcaggaatcacggtcattctagggttggtgaggaaagaactcagagacttgtggaactacgggactcaacagccttcagctgcagacgtaaatccatctccagaagcataaattgcttcaacatacataactcaaaactctggagactgaagaacaagaagaagaaacatcaaaaaagaaacaatttttcttttgcacataaaaaattataagaaatatacacttttgtgcatacacatgtagtctcgagcccaccaaaacgtatataatgtaatgtatatgtatacatacacacaatcaacaacttctgattctgaaatgaacaagtttttgtatactgtacaaatacgaatttgaatttttttttcccctcaaaaaaatataaaaccagctttaataaggatttgaaaagtttccaagttcatatatagataaaccgaaagaatttggatcaaactataatttttaggaactggaactgacacttatcattaagacaacaagagacagattcgattaaaagagaatcttcaggcaaaacggcgtcgtgtcttgtttacacataaacagaggttattaaaaagtttgggaagagcagatctggaagaagaaagaagaagaagaactctctactggttaattttagccggcgggtaaacggatatttttggaggaagagcagctcttctctcaaaaccatccctctttctctaaaaccctaattctcgacatccttcaaaacctaacaatttcaatttcaattaacccaacaactttcttactctcttcctttgaatgatttca

SEQ ID NO: 9493 - DNA, 3000 bp, Unknown
  misc_feature (1)..( 3000): cDNA_ID_3042101_gDNA_ID_1972132_Annot_ID_179100 3000 nt of promoter + ATG
gagaaaccaagctagctcaaacccaaaggtagggtcatcctaattttatttgcattgttccgattttatcatatgagagaattagagaagatgtaaataaaatagattatattaaatgtctaatcctcttataattaagctcctcattcgttatcattataagatagaacagtgacaattgtccattatgtttttgtttcaagtttatgttttgagtgtcgcctattttgtaaggattatgctatgaattctgaaactaattcgagttatgatcataagcaaagcaagctagcatccattatatatatgactttctaatttgatctctcttttctttatacttcttcataaatagttcctgaattgaatattgaaattaaaggtacgctaatttttcttatttttaaaattgaagaaatggaccaaataccaaagttacttgaaccaatgaaaacattaataagcagaattcacgtaccaaagaccaaagtgaatctcgttgatcatataatgaattatgatatatttagtagtagttagaaacatgcaaatagatataggttgatatgaaaattggcataaaatgtatgaaccggaatactattagtagcattaactttcctattattaacaaaactagcgtgtatgcacgttacagagaaagatttattctttattagagatgaaatttctttagttatacatacactttggttttgtaagttaaaaaaatataactccctcctacgttaccaagaagtccaccaacgtggtggattttaaaataactaaccaaaaacacaaatcagggaaaagtcgtaaattaaaactgataatttggaggaaaatatagaaaaagaaaaaggtaacgacattaaagaaggtgcacttaatgcgcagtatgtcctcttgtgccagcttgttgcaccgtcttccgtctcctcctctttccctctctctctctctccaaaccagtcctacttctctctctagaaacctagggaagaagaagaagacggtgaagcgagcgatgtcttcggacgacgaaggaagagaggagtatctcttcaagattgttgttatcggcgactctgccgtcggtaaatctaatcttctatctcgttacgcacgtaacgagttcagcgctaactccaaggcgacgatcggagtcgagtttcagacgcagagcatggagattgaaggtaaagaggtcaaggctcagatttgggacactgctggtcaggagcgtttccgtgccgtcacttccgcttattaccgtggcgctgtcggtgccctcgtcgtttacgacattacccgccgcaccactttcgaaagcgttggacgttggctcgatgagcttaagagtaagtctcgatgtgaattatgcgattgactatcgatttaggggatcctcatgatctaattaggtcgtacggattgacttagaattgggaaattttgaatctagttttggtagattatagaatttgtgacctagctagaacataacagaggattattcaagaaccgcttaggaaagtatctcataatgaacatctttagattggtctgagatctaaaattgattcatttgctcttttcttggttgtttcagtccattcggatacgacggtggcgagaatgctggtggggaacaagtgtgatctagaaaacataagagcagtgagcgtggaggaaggaaaggctctagccgaagaggaaggactcttctttgtggaaacatcggctcttgattcgactaatgttaaaacagctttcgagatggtgatacttgatatctacaataacgtgagccgtaagcaactcaactcagatacttataaagacgaactcaccgtgaatcgggtaagtcttgttaaggatgataactctgcctccaaacaaagctctggtttctcttgttgttcttccacttgatgatataccacaccaaaataatccttttttatttctcacaactgtaactttattatataaatttttgtttttttctttgactcatggaagaaaagaaattcatgaactgtaatttatttggtcacattaattttccttttataattttggcaaacattcaaaagatctattcattctacttgggttatttcctattttaaagaaactaaatttgattggttggttttgtgatttttgtcattatttgggaaaagcgagggaaaataaatccaaataggggaagaaaaaaagagatggcttttcaccgagttttctctgcttttgtaacaacgaacatgaaccaagaataatcttttctttccctttttttgtttgtcccacaattcttcaaattttcttctctctatctaattctcacggtggcgatgtctttacctccgtttacttgccgccttctcgcggcggcggcggctctctatctgataggtctgctgtgcgtcggagctgacacgaaagatgttaccgctcccaaaattcctggttgctccaatgaatttcaaatggtaacaggtttccccaattcgagttcctaatcattaattttatggaatttcactttttaatttcgtgcgaagatttggttaaaccggaatcgtttttgcctttgtctaacggaccctacgtatatatctcattgattgatttgaatcttcattggaattgcattcaaccacaaatgcagcttttgttaaatttcaataggtttaggttaaatccgttattgaaatcgattgatgatgaggatggggtagtttgttcattgattttgataaaaattgattgatatgatataaagcattgttccttttccccacaatatctatgtgatcaatattgaggtttctctgtttctgtttattaccagttgtctataaatagattcatgtacaacaaaacttctctacattatcagatcgctcatgcaactactgattattgaacattgtccaggtcaaagttgagaattgggtcaacggagaaaacggtgagacttttaccgcc

SEQ ID NO: 9494 - DNA, 3000 bp, Unknown
  misc_feature (1)..( 3000): cDNA_ID_2990271_gDNA_ID_1972132_Annot_ID_179094 3000 nt of promoter + ATG
ctctaattctcttgagcggatttcttgcggtggtatcagtgaacacagtgatcgtgttctacatctgtatggccatgaaagaacctgcagataaacacaaaccagacgctgcatttctcgctgaggccaaagatagtgtgaacaaattgacaaaaggagccacaagcagtgatgatcatgcactcaaaaaacaagagtgagagctttcttaatccaattatgaaatgaagaacaacatctgggttggatcgaatggagcagacctcgggttatcgaaatagattattacaggattctgtgaaaattgaggtttagggttggttaaacaaagtagcagaaaaacatgtcgtgtatgatgaacagagaactaatgttataacacaaaactacgaacactcttggaaggattagacatttgccagttatttctttcctcaatacgtaattggtgtaatgaattattccacaaacgaagaaaaattgacataagaacaaaaacaaaacacaaaaacttgtataaaatttgtaggaattttttttataaaaataatttgaaaattcaaagcaatttttttctgataaaaaactaaagtactaaatttacgtatgataaaacaaattgaactatcaaatgacgctacccaaatcccagttagttttcttatagttttgtaaatctaaaactaaaataaataaaaaatattaaatatacataacgattagaaaacaaaatgaaattatgaaattgctaacgatcaaatgactacgtcaaataacgagatccaaagtccggttagatttcatatcattttgtaaatctaatctaaaatacgcaaaaaaaaaaacaaattgaacttgtaacaaaatgactagatcaagtgacaagcgttttgtaaatctaatctaaaaacaaatcagaaaatgctaaatttacataacgattagaaaccaaattgaacttgtgaaatcgctaacgatcaaatgacggaatccaaagtccggttagttttcatattgttttataaatctagtcaaaaacaaaaaaatgctaaattcacataacgattagaaaacaaattgaacttgtgaaatcgctaacgatcaaatgactaggtcaaatgacgggatccaaagtccggttagttttcatatcgttttgtaaatctagtctaaaaacgaaaaaaataaaatgctaaatttacataacgattagaaaacaaattgaacttatgaaattactgacgattaagtgactaaatcaaataacagaatccaaagcccggttagttttcgtaccgtattgtaaaaatctagtctaacaaaacaaaacaaaatagaccaaaaaaaaaaaattgtagaaaagacttagaaattcacctgaaatcgttcttgaattgatgtaacgcgtaactcttttccttatttgatacctctcgaagtcgtcttatctgagtcatcatctcacgaatctttaccgtagtcctcctttgttgttctccatactcaaccaaattccaaaaatagcccttgtatgatgacatcatccaaaagagccgttgtgtgacatcatcacaaataatctccgacgaagccattaattgatcgtagtcagtttccgtcgtcttgtctcggtcatctcacgaatctccaccgtagtcctttgttctccatactcaatccaaaatagcccttgtgtatgatgatatcatccaaaagagccgttgtatgacatcatcacaaataatctctgaagaaaccataaatctatcgatcgttgtcaatttccgtcgtgttctgtcatatctcggccacaacgtcatcaccgtaactttgaatcccttacgtataactataattccagattcaccttctttaaacatctccttgccctctctaatgatcgacttaattaaacatgatcggagaaaaaaactgaagagatacgaataattcccaaagcgatcgagaaagagattcatgacggcttcgatcgacatatataatttggtcgagaagaaactcaagtttttaaaagaagaaggagcaatttagggttttgctcttcgaagaatgagaagtttgattcttaagaagagatgagtggggttaataaggaaaggttatcatcggaaaaaaaggaaattaaggtgattgatcacgtggctataatgaattaatctgattgcccaattaaaaaaaaaggaaatttataaatattaatttttaaaaaatatatatataaatattaattttgatgaaaaggaatttgtaaagaagcggttctcgtaatttttcttcggaagttgtcaaagaaccggcagatcctcgctgctcttgcattcgctcactacggtaacactctatcatctccatctctgttttgaattcgagattcgaactcaaagatttcgttttggaggattgcaatcttttcaatcaaaaaaaaaaagtaaaaagattgtaaaattgatcgttgattgggtgcggatgatctttggtcttcttgagcttaacttgggttgacatcagtttactgttttaagagatgaaaacccacaaggcatataacttttctagggtttagggtaattatattttaggatcaatcttctcgaaaaggaagaaaaattgaagcttgctatgtctctttaccttgagatatgagaatcacaggtcaaattatgttcttgatagattcagttgttgagttcatgtgtggtgttggaagaagtcaaaactctagttctagatataagcttgaaatttggacatgattttgtagatgtaagcttgaaaatggtttaggagagatgttactagatgcttccttatgccttctctgagactttaacattttgttgacacttttgttcttttttatctacatcttttgaatcatttgtttaaagcttttgcttaactcaaaagtaatttgtctcagcttttgcttaatggtgcctttttcctctggcaaacagatctcagactacagttaccaag

SEQ ID NO: 9495 - DNA, 3000 bp, Unknown
  misc_feature (1)..( 3000): cDNA_ID_2990259_gDNA_ID_1972133_Annot_ID_179123 3000 nt of promoter + ATG
ttagatcaagcataccttgatacagcaagacttgagtcctctccaatgcgtactccaccatgaactttacgctcttcatcacgtctgcccgcaacacatcttctacttcatcactacattcctcaaaacgaaccgtttcactcactcccaaaacacgttttgcttctctctggttcaagaggtccaccacgaggtctgttctgtatggaatcgcccgtgccgtgttgtagagcgtcgcgagtcctgtcatgttacttagtagcgtcaacagttcggtcctcgcgtctgctgcttcacgccatttctgggacttcacgagagctacagatatctcctgcgctttttgcagttcaactctctgttttgcgttgaccagacccgagtagtagacgttgaccgcatgggtttgaacctgggtcaccgggtcggtcagcccgtttccaatggctagcccctttagattcactttcccattgggtttctctttaaggatatagtatccaatggctggaacgtacttcccggcgtagctctctccagtgaagtaaaccggtcggttttcgaagcttgggttttgttcaaggaactccacgagagcggcgtaaagatgctcagcgacctgtctctgatttgtgggtatgtcttgttgtgaggctgcgatgctgaatccgactcctattgggttatccacaaaaagtagtccgaatagacggttccatgcgccggggttgcgctcgaggtctgtggcgcgtgaaactacacgccagggaccgagctcgtaaaagttgccaatcattgaagagcagcctggcccaccttggagccaaacgaggagcggagtgtcaggaagaggtgtggttggctcttgggcttcgtagaaggcatagaacatggacgagccgggtgcgggtttaaccgggaggtagccagatttagtggggagagcttcatcgggaaatagcggtggctgaggagactcaacggagacggcgaggaggagagtggaaagcaatatgaagagtgtagtggcttgctccattatttccactaattggtgacgcctttacataaagatccctttgtattatttcatttatttcattatttgactgcaaaacattacgtttatgttttgtcttgtataacatgtgaatttttaaatgtgtaacaataacatttttgtcaagacgtgcttgcttactaacctaattgcattaacatgtgagttttttaatttaaaggtttttgtttgtagatgattttccataatgtatattattttaaatttattgttgccaaaagaaataaaatctaaaagttttattgggccgaaaagagaaaaaggtcagataggcccataaaaagttggacaatacaaagcgtttacaatttgtcaattgcaaatttcgtgagatgcttcttctactcgtcatctctgtttggtaaagtgatcacaaggtgttcgatataatacctgaaagagtttccgaaggtgtgaagatgatgatcttggatgtttgctcagaggttataaagatccagaagctacgacgggctgtctcttacgccggattctactgcttcactgctgccctcacattcttctatacaaacaacacgtaatgtctttcgtccgatctcagtttgcttcttttggttgttctttcttttcaatatcggaattcgcagatgatttcaatttctgggttcttctcttggtttctgcttcaggtttaatttgatttaatgttactgattcgaatgttgtgtagaacaagagcaggatattccaggggagatcagttttatgcatcttaccctgctggcaccgaacttttgaccgacacagctaaggtttgtccttgatgacaattttgagttgtcgtttacagtttatatagttgattagttctgtgtggaactgatgattggggtttattggagtaaagctgtacaaagcggcgcttgggaattgctatgaatctgaagattggggtcctgttgaattctgcataatggctaagcattttgatcgccagggaaaatctccatacgtttaccactccgtaagtttcttcaatctctttatgataatctctgtggtgcggatattttagtgttgtaaaggtcagtttccataagtctagaatcttgatggtactgactttgtggtgccattgatagaaatgtttgtcgaatcatgtggggttagaaccaagaattgagctcattttattgtgaatgcagcaatacatggctcaccttctatctcaaggccaactcgatggaagtggctagtggcgccagctctctttgtttcagctttgtgcctaatcttgttatagcaaattcgaatcctggtatcttggaacatttgtatggtgtttgtataagtccggaaccgtaccattggcttacatggattattcagatttgtactctgaaaattaagagcatgtaattcccgcagaggcacaatgtaataaacatatagcatagcaaagcaacaatccggggaaaaactttggttaccaccttgaaagaaatggggaaaactgacagagcaagaagctttccatcatcagcagagacgtttgataaaagaaaggtcaagatttcattccacgaaaaatctgccgaaaataaacatctcattctggatgtggtatatgaaatgggattgtacatggagtttgaaaaacttggcaaagagaatcatggaaggaactaaccatttgagctgcaaggtcatacaacacttccaagaatttatttagacaaacacaaatgcgactggttttttttaatgagtgaggcccattaaagaaatagtatgatattataggcccaaacaatcccaaaacccttggcctttttctgtcgcgctaaaccctacgatctagaaccttccgtcttatgtgtctctgccccaaattaaaaactcagaaaccctagaaaattccgattcatcaactgagagagaagaagaattgagaaatg

SEQ ID NO: 9496 - DNA, 3000 bp, Unknown
  misc_feature (1)..( 3000): cDNA_ID_2182978_gDNA_ID_1972133_Annot_ID_179125 3000 nt of promoter + ATG
ttatagcatgatcatgaataagcaaagtcaactaagctatcgtctacattggctattgaagttgctgcctaaacgtaaacgaaaagcatccacagattacggaaaagcacaaaatgagaagatgcaacacttgggttatccatgtgattgatgcccatttgtaaaaattcaaagacaggttcataaaggtagattcaatgataaacgacaacaaagtccaaccacatcttcaagataaactaatttataaatgacttctcctcataacacaaacaccaacatgaaccctcgtggttaagttggcaagcttagccttttcaatcctcgtgcaaagttcccaaaacatcctcgtcccggaagagatggtacctgcgtccatcacacaaacacaaaagttactcactttgagtcaaattcttcttcatttgtaatttcttattcgtttctaaaatcaacccaccaatcaatatgtaaatctggtgttcaaattggcattattaaacattgatcaaaatgtttttaaatcctctgttacaaaattttcaatatcttcacagtcttacaagtaattcccttagttccatccattaatctaattaatggataatgattcctgaacatgattagctaaacataaaggttcaattagatcagatcagaattttatcagaatattagggcaataataagaaagaagcgggtttaacttactcgttctcgccgagcttgacctgtgtaccaccgtactctggaagaagaacagtgtcgccttccttcacagagaccggaatcaatttcccgtccttatcccttgatccaggtccaacagctatcaccttgcctgagttcagctgcaatcacccaaaaatatgtttatttttcagatctaagaggcgaaaatcagaagaatcaaatcgtgaaatcaaagctcttttaccttggaggatttctcaggtaggagaatgccgctttcggttttagcgggctggatgactctctgcaccaagatgcggttgaacgttgggatcagacgcttcatcatttctcaattcttcttctctctcagttgatgaatcggaattttctagggtttctgagtttttaatttggggcagagacacataagacggaaggttctagatcgtagggtttagcgcgacagaaaaaggccaagggttttgggattgtttgggcctataatatcatactatttctttaatgggcctcactcattaaaaaaaaccagtcgcatttgtgtttgtctaaataaattcttggaagtgttgtatgaccttgcagctcaaatggttagttccttccatgattctctttgccaagtttttcaaactccatgtacaatcccatttcatataccacatccagaatgagatgtttattttcggcagatttttcgtggaatgaaatcttgacctttcttttatcaaacgtctctgctgatgatggaaagcttcttgctctgtcagttttccccatttctttcaaggtggtaaccaaagtttttccccggattgttgctttgctatgctatatgtttattacattgtgcctctgcgggaattacatgctcttaattttcagagtacaaatctgaataatccatgtaagccaatggtacggttccggacttatacaaacaccatacaaatgttccaagataccaggattcgaatttgctataacaagattaggcacaaagctgaaacaaagagagctggcgccactagccacttccatcgagttggccttgagatagaaggtgagccatgtattgctgcattcacaataaaatgagctcaattcttggttctaaccccacatgattcgacaaacatttctatcaatggcaccacaaagtcagtaccatcaagattctagacttatggaaactgacctttacaacactaaaatatccgcaccacagagattatcataaagagattgaagaaacttacggagtggtaaacgtatggagattttccctggcgatcaaaatgcttagccattatgcagaattcaacaggaccccaatcttcagattcatagcaattcccaagcgccgctttgtacagctttactccaataaaccccaatcatcagttccacacagaactaatcaactatataaactgtaaacgacaactcaaaattgtcatcaaggacaaaccttagctgtgtcggtcaaaagttcggtgccagcagggtaagatgcataaaactgatctcccctggaatatcctgctcttgttctacacaacattcgaatcagtaacattaaatcaaattaaacctgaagcagaaaccaagagaagaacccagaaattgaaatcatctgcgaattccgatattgaaaagaaagaacaaccaaaagaagcaaactgagatcggacgaaagacattacgtgttgtttgtatagaagaatgtgagggcagcagtgaagcagtagaatccggcgtaagagacagcccgtcgtagcttctggatctttataacctctgagcaaacatccaagatcatcatcttcacaccttcggaaactctttcaggtattatatcgaacaccttgtgatcactttaccaaacagagatgacgagtagaagaagcatctcacgaaatttgcaattgacaaattgtaaacgctttgtattgtccaactttttatgggcctatctgacctttttctcttttcggcccaataaaacttttagattttatttcttttggcaacaataaatttaaaataatatacattatggaaaatcatctacaaacaaaaacctttaaattaaaaaactcacatgttaatgcaattaggttagtaagcaagcacgtcttgacaaaaatgttattgttacacatttaaaaattcacatgttatacaagacaaaacataaacgtaatgttttgcagtcaaataatgaaataaatgaaataatacaaagggatctttatgtaaaggcgtcaccaattagtggaaata

SEQ ID NO: 9497 - DNA, 3000 bp, Unknown
  misc_feature (1)..( 3000): cDNA_ID_3042123_gDNA_ID_1972133_Annot_ID_179130 3000 nt of promoter + ATG
agatttcctaatttctgatcatctaagccgtaagagctgcacaacattaacaagaaaacagatttatattagtatacagtattacccaactgaataagttacaggggttttcatattagccaacataaagagaaacagattgctgaattctataaacatgacttttaacttaaatggtagatatgacattccagtgcgtacatacctgcctatctgcttgttgatccagttcaacaaaagatcagcagtgcgccattcattgactacgcttatctcatttttctcttgtttaggtccccagctgccaccaacgaaccttttaggaggagcccaaaagagcattggataatgattgatagagaacttgtcacaaagctttacattcatctgtgctgccagaaaagtcacaataacaattagaaagaaaaaaaactatacacaacctcataagatacagttttcaagccccacgctctgactcacacgatccacatgaagtaagagaaaaaagagaaaggaaggtcaagatacacgttcatctatataaataaaaaagatggtgcaagtacctttatcgcacaatcaactctggtcatcaaaacgacaccaggatatactgcgtctgctccattgaatagccttgcaactttttcataatgtggctgcagcagagtcacccattggatataaacaacattgacaagagtaagcattgaataataagacattgaatggcgttgttaccttgtagtttctacatgcagggcaccttgagccaaacaaaaattatgggtcaatgtcagtatacaagcctttcgcatttatatataaagttaagttatttccggataaatctcagagaattggataacgtaaagtcaggttcgaatatgaagaacacttgcaaacaaattccgtgtaagatccagtgcttaaaagcctaaagtttgaatttttttcagattttttacgagagagagagagaatgagaaaactgaccagtgagcgaagaactctaaaacggcatatttggcgggggaatcttggaaaactgaatcaaagttggtagcgttcaattcgatagcgttgtctttctgatcggcgacgttactgccgatgtcccggagaatcgagcgcgatcccggtgaaaacgacgccgcagcttcaaggctcagcagacccaacaacaagaacaagtgtatcaaagacattaaatcgaataaagcatacaaattttgaagcttgatccggatgagagggaagatctaagagcaaaaagagcttccctccttccgttgagaaacaaaggtctctggtgtttattacgacgtcgtaacgcctttgaccggcgtcgatactttgttctcctccgacaactttcatactgggctttattataacgttataggcccattactaatctccatttgatgtttgtgtttgtttccttttgacccgcccaaaaagaaagaatttgaatgtagataagataacgctatctctagtcaatactcaatagtcaaataaaagttggccattttgtttggaaatcggaggaacagttaatgttatccaatagaaaaacttatggagtggttttatttgagatgtttttgtttttctttgtttatagataaatttcggattggatataaaacaccatccgttggtagtattaattttacaaaaaaaattaatcatatatttattttctttgtattctctcatctatgaagataacatgagaaagttataagaaaatatatatatgagataacatgagaaagtctaaaaatggattaattagaacagagagtcaacaagttcatgtctcctcctcactctaaccacaagtcaacaccatttgtcttagtcatgaggagacacacatacacacctcacattaagaaaatttaacacatagcttccttatactattgccacttctcttgcactattcggtatcaattgtttttaagtgcccttcttggtactggggaaaaaattgacaccaaaaagtatcgatcatgtgcacatcctcaacctctaataataatgtcacttaaataagaatgcagtaacacagtccacgtgcatgaattcatttttctgatatagtttgcattcgtctgacatatttggtttcctgatttagatgaatattaaaattcagaaccattttagtatagtgttctcatttctcaactcctgcctcgatctctatagacgttcatgtatgcttttttttgttttcgtttatcaactctcaaaaggatgagatattaacaaccattcttaatttttggcaagtataacaaactgagagagaatgtttaaaagtccaattttaagattccaatatgcttaaaaaattcttacgcagcatctactatccgccgttagttttagacccttttattatgcgggaatttcccaattgtaccttttttgtttttaaaatcaccaataagggggtgatttcaattttcaactaattatttgggtgtaatgttgaatacgaaaaaaagttgagcaataagtaataaaacatgaaatacaagggtcaaattatgcaaaagaaaacaaaaataagaggtgcttcaatctttttattaaagagtccccttttattgactgtcctctctctctctctcttctttctctttgtcatgaaccagtaatcttgtttctcttcatcttccattgacgtttccttctatcctcgttgccttcatttttcactcgcacgctaatcttcgcctactttgttagattttcggttttgggtttttgtcttttggtcgatttcccctgttcccagaatctccgattaagctgcttccttaatctcttgtctgaatataaactttttccggcgtgtaatttagataggtggttaaaattacgagtagtgagaggagtgttgttgctgttttgtttattcggtaaaacgaaatcggaagttctttgttgtcgtttgattccttttgagaaagagag

SEQ ID NO: 9498 - DNA, 3000 bp, Unknown
  misc_feature (1)..( 3000): cDNA_ID_3042125_gDNA_ID_1972133_Annot_ID_179128 3000 nt of promoter + ATG
aactttatacagttagttgatagtccttaatggatgctttggaacgaacagaagagttgttgcatttgactaatagcattactttcataaataaatcttggatgttacttcaactgtttgttttgaaagtcacaacttatctaataacagtaaaattagtacaaaagaagctcaaaacatgaataaatacatctttcaatacctaacttccgtgtagcctcatgcaaaatttatttcaaaatatgagacatttaacatcataattgaatctttttggtttctaataactcctgcatatgccttgatgacttgatagaatgatagagttaaaatagttaaaccttgtcggcaaagggttcacggacgtaaggaagatcacgttcaagatactcaaatatcaaacgaccttgagagcttaaaggctcgccatcatcactagacgaatcttcttgatgctcctttcttaaggagagtttgtccattctagcggagatctgctcttttgaataacagagtcctctttcagattcactactgcttccttcactacttgaatccctaaaatcgctttcgctctcctcaccttgccgcctgcacattaataaacagaacaccccaaatttcttagagaaagacaagacttgagctttatagactaaaaccactacaagttatgaacacgtaagcttgaacagttcttaccttgcttgaagagatgaagttaaagcatcaacatcagcgtatacttgaataccagaaagcgagggcacgtagtattgaaagacacgatctttattgttattcaaagtgagaggaactccaatgccataagcactccactctgcaaacgattcccatacatctccaagaagaaaataaggaacttgagactcaacatcactgcctcctctttccctaactattgtctacacataaatttcacaccaattagctgaaagtttttgtctttttagaaaaaggtattgactagacatgtagaagcaaaccttagataaatagtgagccggaacagatggtgtcaccgaatccaaaaaccgttccacattacttgacgatgcctcagaaacatggtgtttcaacaatgcagagccgttctcacgatccttagtgtgactcgatctgcagccataagagacgtcaatttgagctctctgaagctgagtgaagttaaatccagctcccaacatctctctttctcaaaaggaatcaaacgacaacaaagaacttccgatttcgttttaccgaataaacaaaacagcaacaacactcctctcactactcgtaattttaaccacctatctaaattacacgccggaaaaagtttatattcagacaagagattaaggaagcagcttaatcggagattctgggaacaggggaaatcgaccaaaagacaaaaacccaaaaccgaaaatctaacaaagtaggcgaagattagcgtgcgagtgaaaaatgaaggcaacgaggatagaaggaaacgtcaatggaagatgaagagaaacaagattactggttcatgacaaagagaaagaagagagagagagagaggacagtcaataaaaggggactctttaataaaaagattgaagcacctcttatttttgttttcttttgcataatttgacccttgtatttcatgttttattacttattgctcaactttttttcgtattcaacattacacccaaataattagttgaaaattgaaatcacccccttattggtgattttaaaaacaaaaaaggtacaattgggaaattcccgcataataaaagggtctaaaactaacggcggatagtagatgctgcgtaagaattttttaagcatattggaatcttaaaattggacttttaaacattctctctcagtttgttatacttgccaaaaattaagaatggttgttaatatctcatccttttgagagttgataaacgaaaacaaaaaaaagcatacatgaacgtctatagagatcgaggcaggagttgagaaatgagaacactatactaaaatggttctgaattttaatattcatctaaatcaggaaaccaaatatgtcagacgaatgcaaactatatcagaaaaatgaattcatgcacgtggactgtgttactgcattcttatttaagtgacattattattagaggttgaggatgtgcacatgatcgatactttttggtgtcaattttttccccagtaccaagaagggcacttaaaaacaattgataccgaatagtgcaagagaagtggcaatagtataaggaagctatgtgttaaattttcttaatgtgaggtgtgtatgtgtgtctcctcatgactaagacaaatggtgttgacttgtggttagagtgaggaggagacatgaacttgttgactctctgttctaattaatccatttttagactttctcatgttatctcatatatatattttcttataactttctcatgttatcttcatagatgagagaatacaaagaaaataaatatatgattaattttttttgtaaaattaatactaccaacggatggtgttttatatccaatccgaaatttatctataaacaaagaaaaacaaaaacatctcaaataaaaccactccataagtttttctattggataacattaactgttcctccgatttccaaacaaaatggccaacttttatttgactattgagtattgactagagatagcgttatcttatctacattcaaattctttctttttgggcgggtcaaaaggaaacaaacacaaacatcaaatggagattagtaatgggcctataacgttataataaagcccagtatgaaagttgtcggaggagaacaaagtatcgacgccggtcaaaggcgttacgacgtcgtaataaacaccagagacctttgtttctcaacggaaggagggaagctctttttgctcttagatcttccctctcatccggatcaagcttcaaaatttgtatgctttattcgatttaatg

SEQ ID NO: 9499 - DNA, 3000 bp, Unknown
  misc_feature (1)..( 3000): cDNA_ID_2034266_gDNA_ID_1972133_Annot_ID_179124 3000 nt of promoter + ATG
aaaacggctaaggctgctttagcgcgttaccttatcgtaatattgatggggtcaccatcgatcacgtttccttacaatttcacttttgtttcttctcaatttcagctttacacgtcttttacaaatttgtcgacacggccaaataaaaaaacatcaaacatgaagctccgatgaaaaagatggatcggtgttaaattggagatatcattaaatgtcaatcccattaacgtactatcctcataatttatcaaccaataattatatgtacattgacctctcctttgtttacatccaaaaaacgtacgaatcaatccatatgattaattaaggaatcatggggtactctcatacttaacattaatttaagaaataatggtgaagtgatgtctattttttttgtttgttctaacaatggtgaggtcaaacgatggacatagattatacacagtagcccaatgggcttaatagttacctaactctgaacccaattttttctcggcccaactaaaaggattatcgtccgccctaactctcctaatttcgcactataaagttgcgagtttcacaggttttagcaggagccgtcattagggttccaatgaattttgtttcaatttttcgatgttctgaatatcattctctcaacaattaggcgaaagattgattttcatatgattagtagttttctttctgttttccgcgaatgtttttccgagaaaattgaatcgggaaagaggcaaaaaacaggggagagattttgataaatagctctgaaatacctgtaggttttctacggggtgcccttgctcttctttccctaataccaaaatggcttcatagtacgggtttctttgtgctttctctgtgttttgtgtattttttatactcaaatcactttgaatctcattcacaatcccgcctccaatcgccattacatgtttttaaaaattctttagtttatgcttcaaatctccttattcttaccaaaacagtttatctgaatcaatccttaagtgtatactgtatgctaacttttttgagaaagtttaagacttcaggaacaggcaaatgataaactaagtagcaaaagttaccaattcgtactaaaatgaacttgtgaacatgacgtaacaaatctaaatccagagtacaattagaatctgaattgaatcttacagaactaagtacaagtacacaatatttagattgaatggtataagctcgacgaagttgtctgcttcacatctttaccaccgaacaatcctttccccaaaacccaaccttcaatcatatcccttgaattcacagctttatctgtcggaacaaaatgaccagctcctgtaaccgccacgtggcacaaattcccccatctctgaacataaccagcgaccacaccgtcttcatccttccacacacgcctctccgccgtcgagaacattcccaatcctgaccagttcatagtcttcatccactcctccgtcgaaacgacgccgtctcttagatcaagcataccttgatacagcaagacttgagtcctctccaatgcgtactccaccatgaactttacgctcttcatcacgtctgcccgcaacacatcttctacttcatcactacattcctcaaaacgaaccgtttcactcactcccaaaacacgttttgcttctctctggttcaagaggtccaccacgaggtctgttctgtatggaatcgcccgtgccgtgttgtagagcgtcgcgagtcctgtcatgttacttagtagcgtcaacagttcggtcctcgcgtctgctgcttcacgccatttctgggacttcacgagagctacagatatctcctgcgctttttgcagttcaactctctgttttgcgttgaccagacccgagtagtagacgttgaccgcatgggtttgaacctgggtcaccgggtcggtcagcccgtttccaatggctagcccctttagattcactttcccattgggtttctctttaaggatatagtatccaatggctggaacgtacttcccggcgtagctctctccagtgaagtaaaccggtcggttttcgaagcttgggttttgttcaaggaactccacgagagcggcgtaaagatgctcagcgacctgtctctgatttgtgggtatgtcttgttgtgaggctgcgatgctgaatccgactcctattgggttatccacaaaaagtagtccgaatagacggttccatgcgccggggttgcgctcgaggtctgtggcgcgtgaaactacacgccagggaccgagctcgtaaaagttgccaatcattgaagagcagcctggcccaccttggagccaaacgaggagcggagtgtcaggaagaggtgtggttggctcttgggcttcgtagaaggcatagaacatggacgagccgggtgcgggtttaaccgggaggtagccagatttagtggggagagcttcatcgggaaatagcggtggctgaggagactcaacggagacggcgaggaggagagtggaaagcaatatgaagagtgtagtggcttgctccattatttccactaattggtgacgcctttacataaagatccctttgtattatttcatttatttcattatttgactgcaaaacattacgtttatgttttgtcttgtataacatgtgaatttttaaatgtgtaacaataacatttttgtcaagacgtgcttgcttactaacctaattgcattaacatgtgagttttttaatttaaaggtttttgtttgtagatgattttccataatgtatattattttaaatttattgttgccaaaagaaataaaatctaaaagttttattgggccgaaaagagaaaaaggtcagataggcccataaaaagttggacaatacaaagcgtttacaatttgtcaattgcaaatttcgtgagatgcttcttctactcgtcatctctgtttggtaaagtgatcacaaggtgttcgatataatacctgaaagagtttccgaaggtgtgaagatg

SEQ ID NO: 9500 - DNA, 3000 bp, Unknown
  misc_feature (1)..( 3000): cDNA_ID_4262218_gDNA_ID_1972138_Annot_ID_179179 3000 nt of promoter + ATG
acctacaaactttggctcttgggctggcttgttgacttggcttaggtgcaagactgacagctctccttctattctccggaaagtttctgtacaaactttggtttacaacgtttggcgcgagagaaacaataggtttttcaatcttcgctccattccatcttctcagatattcattgtgattgatagattgataagaaacacgatatcacagcaagaagacatcgtcatcttttccaaagcttaatatcgtcatcttttccaaagcttaatgcgtttatggattcgttgactgcagtttgtttctgcattaaatcgatttgttgccacgtattttttacttcttttttttgccgtggtaacaaaagcttgggtttacttgttgtataactcttttcattaatatgatatttacagtttgacaaaaaaaaacaaaaaaaatcagaataattggaaatccaatcatattatcacagttttcatttaccaaaaaagagtataatgtcatgactcacgtaataatattactatagtaataacgaaacctctacaaggacaaaactggaaacaaaaaaaggagataactgcgcacgaagaacgggtctcaagctttccgacaagacatgcgcaccacaaatttatttagtctccgtatataaatcctccatttccaaaaccttcccaatcttcttcttcttcttctttctccttcaaacaaatcatgagacctgcgcaagataatcaaggctcgttccttggccggattagtatccgtcgcaaccaattcgtcgacgtcaacaacgaacaagaacaagaagatctcgagcttttccaaaaacacatcgccgatcgtttcaccgagcttctttctcctcctcaaccaccaccgtcagatgaaattaacacggtagcttccgtagccgcgacggagcagattatgtccgtgacttggcttcgtaagctgatggatgttttcctctgttgcgaagctgaattcaaagcgattttgttaatgggtcgtgacccgacccagatttctaagccgccttttgaccggttagttcctgaaatgttagaccggtcgattaaagcgcttgacatttgtaccgccgttgttaacggtatcgattccgttagacattaccagcgtttagctgagattgctgtgacggctttggagcaacgtccgttaggtgacggtaacgtgaggagagctaaacgcgcgttggcgaatctcgtcgtcgcgttgagtctcgaggataaagagaatgttagcggcggaggtggtggcggcggcggagggaataagacgacggagagatcgtggtcgtttggtcgtcgaagcggtggatcatcggcggcgagtaaaggaggagcaacgattggtcagctcaaatcgtcgtcgtgggcggttgggagaaattggtcggcggcgaagcagatccacgcaatgacagcgaatcttacgccgccacgtggtaacgaagcggcgggattgcctcaaccaatgtttataatgagtacggtgatggttttcgtaatgtgggtgctaacggcggcggttccgtgtcaggagagatcaggattagcgaatcatttaccagtgccgccgaaacatttgaattgggctcagagtttgatcggaatccatgagaaaatcggagatgagtggaagaagaaagagaagaaaggatctgctggattgatggaggagatgacgaggatggagaagctaggtcactcgttgatggaattcgcagatggatttcattatccggcggagaaagatgctgctgaatctgcggcggtgcaagtggcggagatggcggagatatgcaggagaatggaggaggagcttgtgccgttacagcaacagatcagagaagtttttcataggatcgtgaggagtcgtgcggagattctcgaggtgttggagcaagccgggaaagtttcggcgccagttgtgtaaaagttttgaattattgggaatcaatttcgaagttttgtaattctttgggggctaataggatattttattttcttggtttcgtctattgttgtttttctatttatggttgggcttttagaactctggacaggcccatgtcatatgttttcccttctccttatatttttcatttttcattttgttaaattaatgcataatatccaaaaacaatttaaatttttgaaggaaccctttagttacggctccgaagctttcacaagtgagaatgtgagatcaaagaaggcaaatggaggattttaaaagttaaaatcatcttttatctgcaaaagttgacaatttttttgtatcaaatctaaatcatcaaactctcttaaactacaagagcataacaacctctatgtaatccatgaaataatctgcttgaaggacataacataaatcattatggctagagtgactaacttcaatcaaatcctcttaactctagctcccttacaatggtatcgtaaaacattatgcattagggattgttgtcctaggaaaataaaataaaaatccccacagaccaactaccattttaacttaaaaataagcttcgtccgcgacgaattgttttccatcctaaaaatagaatggtgtaatctgctaatggtttagttccattaacttgcaagttctattgaaagcctaaatgtcaataaagatattaaaattcggagtcaaaagacaaatgaatcaaaagcaacaagacaagtcagctccattcttcactacccatcttttacaataaatcatctctcttttcacaaatttcaaactactctcattgccctttagctttgttatagagccaacactacagagagactcacacacttgtttcaataattaaatctgaatttggctcttcttataaactaatgtctgcaggtcttcttatctctctcactcaccaccatcttcttcctcgattgtcaaaaccctagatcgaaatcttatctctctaatctgttgttacagttcgtagagtcatg

SEQ ID NO: 9501 - DNA, 3000 bp, Unknown
  misc_feature (1)..( 3000): cDNA_ID_3042186_gDNA_ID_1972138_Annot_ID_179188 3000 nt of promoter + ATG
tatatctggtatcgatgaagtctatatcagagagggagcttttagaagaatgtctaatcttcggttcctcacagtatacaaaagtaaagatgatgggaatgatataatggatataccaaagaggatggagtttccacgtcgacttaggatactaaaatgggaagcatacccaaacaagtgttttcctcccaaattccatccggaatatcttgtggaacttgttatgaagaatagcaagctcgagtacctctggcaaggaacccaggttggtgttgtactttttaatatatgaattttgtatcctactttctcatcaagttatatgatgccctttctctctgttaatctgtgtctttcttgcatattcagccgctaaagaatctcaaggagatgaatttaaaagggtcctccaatttgaaggcactcccaaatctttcaaatgctacaaagatggagatattgaaactgagtgattgcaagagtttggtggagattccatcctctttttcgcatcttcaaagattagagaagttgcggctgagggggtgcataagtctggaagtcattccagctgacatgaacttggaatttctttacgacttagatatgagaggatgctcaagattgagaaatattccagttatgtcaacgagactctactttctaaatatatcggaaacagctgttgaagatgtgtctgcatcaattacgtcttggcatcatgttacgcatctctcgataaacagcagcgcaaagttaaggggtttaacacatctcccaaggcctgtcgaatttctagacctaagctactctggtatcgaaaggattccaaattgcatcaaagatcgttatttgcttaaaagcctaactatatctggatgcagaagactcacatcattgccagagctccctgcttcgctcaagttcctagtcgcagacgattgtgaatcactggagaccgtattttgccctttcaagacatcaaaatgttggcccttcaacattttcgaattcaccaactgtttcaaattggaccaagaagcaagaagagcaattatccaacggccattttttcacgggacaacgctcttacctggaagagaagtgccagcagagttcgatcaccgaggaagaggaaataccttgaccattcctctcgaaaggaaaaggtcttaccgtggcgttgggttttgcgtcgtgatttcccctaaccaccaaatcacagaaaaatttcattccggactacttatcaaatctcgaacaaaacatttactgataattcactatcactttgaaagattagaccaccaatctccagcgttgagcagagagttgtttttcgaattacgcagcgtaaacgataacttcagattattgaatgtggtgccagattgattgaagaagagagcattgaagataactatgagtctggatcagaccaagcctccgaagaagatagcatcgaagagaactatggatctggatcagaccaccaagcttccgaagaagatagcatcgaagggagctatgaatctggatcagaacaagcgtccgaagaagacagcatccaagaagagaactatgaagagagcatccaagaaagctatgaagctggatcagaccaagtgtctgaagaagagagctatgaatctggatcagaacaagcctctgaagacgaaaatgagtttgaacacagcgaagaagcctctgaagactacaaatggagtaatactaatctgtgactcccaaagtcgaaggagagagcaagtgccatacccagacaaacgcacgagcaatctccttcgcaatcatggtgaattcttcctctgaaacattgaattattttcttgctattaactcgaacagaaatgaataatgatatgatgattttctcgtgcttgcagattatctcagagaagaatcgccgcgagatctccaaataccacctcttcaaaggtacaactctttttattttgtttgcgaatcgtcttaactttgatctgtatacgtgtaatcagatacagtacgtagatattctgaatctcttgtacttagcccatcgttttaactttagctgtttctgaattcgatgccttacttactttgaacatagttagcaagaacaatgtgattcactaggattacttagaaatgttacttttatttcgagaaagttttgtatgctaaaagaggacttgaatttgccacaacatcccttgatcgagtgttccgaatcctgcaggtgattaagcttatgtagagctttttgtcaaaggagtatgtcaaagagacttttacttgggtacattactactggttccttaacaatgaaggcattaacttcctcaagactcacctcaatctcccacctgagattgttcctgcggtcctgccaccttaaaaagcagccttctttttttttccacgactgagaccttaattaaaagcagccgaataagcgaccaattttctgtaaaaagcacttactagattttactttgttaggctttcccttttgtgtatttttgtatgtctctttaaaaagataaggcattcacggtaaaacaaaacaaaaaaatcaacgaaaaataattacggaaacacaaatatttaatgaaaataaaaaaccagtttaaacacttttatgggtcgatttttatttttaaaaataaaatcctttaaaaaaaaaactaaaaaaggagaaaaaaatcgctttgattttaaaaacaagtgatcgaattcaggagagggatcagatgataaaagaaggagagtgctcaatagtcgtaacaggctgagcgaaacactcttctcgcattaagcgagtttaataaccactcctcatttcccctttaacttgcctgaaggatcatatttattcattgccccacctttaatcttttttatagccaactaatcatatccctcccgtctcttctaaccgatgtgggacaaatatctcttcttcagtttttcaaaaccctaattagcctaccgaaa

SEQ ID NO: 9502 - DNA, 3000 bp, Unknown
  misc_feature (1)..( 3000): cDNA_ID_2036317_gDNA_ID_1972138_Annot_ID_179194 3000 nt of promoter + ATG
ttgagcaggcggtggataggactgagggtatccgactggaggagggacaggttgatcaaaacgagacatctgctgagctggtggcacacccattggctgcgatccaaacactccatctcttttgtccatctcaagtttgtgttgtgtctgcaagcagaaaattggattttgggttatatatatataccataagagaagatagtttcagaagctcagataagtttctaattctcgctttctagtacctgcatacatgcgcagaccctgcaagaaaatcaagaccgcaaaatattagcaattcgtgaacatgaatagattagagggagaatctaaaaatcacaagaagtaaatacagacgtgcagtagaccatatcagcacagcaagagagtatctgagaagcctcggaaagttcatcactaccaacaatgcaagcaactatagagaatatgcaagcaacttggctgaggcagaacataaatcccttcaaacacacaagatgagatttgttagtttcacacatgtgtaaaaccaataaaagtagaagaaaaagagagtatgagagtacaattatgcaattgtcgcattgtgttgtctggatgttgaattcatcctgcagaagaaagcgggtagaggccacagagtttccgaagcaaaggaagacctgaaaatttcaattgcaaatgctaattcataagaatcatgaagagatctattgaattattgcaagcaggttttaaatgccaaaatatcaagaacatcacactcatcggtaaataatgtgatctcctaagtcaaataagttgagcaacggaattctaatatagagcagaggaaactaggaaagatgacggaatcacattatataagatttgaacagatgtcccagaaagacacagtgacacaactacgagaaaaagaaaatatccaaatcataaactgtttcatgttccactttccatttcaataagtttacacaaacaaaacgagtgtcattcactgatgttaaaactaatgttacattcaccaaaaaaatcagaaataatcgaagtctcacctcagtggcaaggcaaagttgaggacatttgctttctccacaccttccactacagggcatatatccagcacagcaagtatacctgtgacgcgcaatatcttagcaaagaaaaaaatcagactaatattctcaaaatagtttagaaattacataccttgacatgtcattgtaaagtgctcttctccgaagcatgtatgacacacaaggtccactacattcaaaatgtataacaaatcaaatatgtaaccaaaaccatgaatacagactcaaaattgaatcaagcaaaaataagcctaaaaacaatctcagatacaacgaaaccctaaaagcaaatagatcaacaacaacttaccacagacacgagatgcagcaatctgcaaaaagtaagttcataattcccgaaaaaaacaaaaatcagttcttcaatagaaaaaacaatgaagttaagagacataaaaacaaaaacaaaagagactgagatttacagggagtgtcggcggtgacggtgcccatgagatcggagtgccataaattccggtaatcttgcctaagtttcatcttatccaacttatcttgcgacgccgccattgctttggaaactcaaaaaagaagaagttcagattcgaaaaaccctaaatcagtgactatacagagcaaaagcaataaatcaaaatcggttacaaaatctataagaacctgatgatctgcttcacgcgtaaacctttaattgatgaaagcagaaacttctcgtcaccctcacttcaacgaagatatttttttttatcaaatcagtttcttagaaaaaatgagaagtttgactattatttaggaccagtttgacccacaactttttctttaattgtcgggaccaacaaatttaatatcctcgggttctgattggttaaaatatgaccttggggaatgccggaattatataataaattttaaatttatataattagtaagatcaaaaataaaaatcacattaatgcacaaataaaaagattttcaaaatgttgaacgcattaatcaaatgagggtttggtaacaatttcgatggtttctagaaaataactattcctctacggatttaatgagagtttgaagtcgaagaaagagtttttctatctctgcattctaaattttttgcaaatgttggtaatattacaaaatattttgccgacaaaaaaaaaaaattacaaaataagtttttaccgtcaccaattaccgcatgtaaattttactttttcaaagtcagatccgttacattgacaccaaatttcaatttctcctttttcaaacaaaagtccactgtcgtcaatggctctacgaatcacacgctaaattcgatttgtttctatttcaatagcaaatgagtataaaaggtttgtcaattcttacctttagcttatgtcatgcaaaataccctagtgggtttagactttaagatataaaaacaccagagagaaaattactacaataaattatttacaaacatagacaaaaatgtgtaaattaaatgtatatggagaaattcataacataaataaaatacgagggtacatttgttaaacccactaattgtctgctatataaacatagcccaccagaccaaataaactggacctgtcatgccttggttctgaaacaagaactgtgaagaaaaagagagaaacaaaaaaaaaaatcacacttttttgggtaaaaggtccaaatttacattaagaaaaaacagttttctttttgccaattttggattctggtggttttcaaaaaaacaaagatcacgagtgtcacttgtgttttctctgtaaccgtttcatttgctcaattcaattgcagagacagtaaaaaaagacagaacataaccccaaaagattcacttgtttatctctcttcttcttcattgagaatcttgagtttgtgttaccaaaataaaaagggc

SEQ ID NO: 9503 - DNA, 3000 bp, Unknown
  misc_feature (1)..( 3000): cDNA_ID_3042178_gDNA_ID_1972138_Annot_ID_179198 3000 nt of promoter + ATG
cttgcgaaaaaatcgattcgcgaagactgcaaaaacttataccatcctgcattccagcaatggaagtcatgattcaggtgtaatcattacaccagatggttactggcatagttactttgtcttaattagtcatcttaacactcctgtcattattcttcttttgctatctcagctagaaggttctggtaactggcccatggatgatttagcagttgagaaaacaaaatctgccttcctcctgaaaattgcagagaggtgggtgaagctattgtttgtaacacttcaaactattaagtcacagtgtttttatctgagtactgacaaatgaaaatactgacagccttcagaacgtcaagggaataccatgcacagctactgaggataatgtcgatgttttcattggtggttacgcatttcgcttgagaatattgcatgaaagaggcctgagtttggtgaagagagaaagtgagttttcttcttgtacacactatcctctatttcttaataaaaagcttatgtgatgctgacttcctcgatttctactgagttgcagttggagtggacccggtgaagcatgtttcctctaccgataaaatgctttttattcgtagtcaacatgcaagtatgattaatggtttgcaaggtcgatttcctgtatacgcaccagttgccaggtaaaagtcaataaaatttatgtgttttacttttgtttgctttgaagtttcataacccagaccttgtctgctacttgaaggcttgcaaaaagatgggtttctgcgcatctcttttctggttgcctggcagaagaggccattgaacttttggttgcttatctcttcctcacacctctcccactcggtgttccttcctcccggattaatggattcttaaggtacatttccgcgcttccatacttatgaattttatggaaaacaaccaggcaatgctgttggcaacaatcaaaacatcacatctttccgctggaccgtgtaacaggttcttgcgattactagcagactatgaatggatgttctacccgttgattgttgacataaacaatgactttggtagaaatgacgagaaagagatcaatgtgagtcccaactttaataatgggtctagtgttgggttagatttgttagaacggccgtatgtcattgtaaaacatttctggtatttttaggataacttcatgtcaagtagaaaaggctacgaagaggacaaacaaaacataagttcagctatgttcttggctgctccttacgacaaggcatcagaggcatggacatcaacttcaccaaatttattggttagtaattagaatacgcttttgaaaagcatatcttccgctactctgttctttttcttcttaactctctttatttcctttgttaaaggaacaaaaaaggttggtggcttatgctcgaagcagtgcaaacgtgttgagcaagatggtattgcaagaacataatgattctgttcaatgggaggtgagtgtgatgtattgaaaacaaaatgtattgaaccggtattatgagaacattacatcgactaattttatgagtatatatgttgcagtgccttttcaggacacccttgaacaactatgacgcagttattcttctccatagagacaaattaccttatccacgtcgtcttctgtttccatctgaacttaaccaaggttccaaacatagctctctctgtctctatttattatgtctatatcgttagttccaccatttaacttctttcccatttattgaacagggaagcatgtagcacggggaaaagcgagtagattgttcaacccatttatgtcgcctggagatttgaagagaagccatgaagagcttaagaataagctaatggtggacttcgagccgaccaagtgcttgttgagtgggttgcaggcaagtgttgtctcaaaaacataaacaatcatatttattcaatttcttattaaaagaaaggaacctatcacgcgattcttatctttatgcggttgtttgcaggaagagtttgggacgttgaagccatggtatgatcatataggaggcgacgcaattggtttaacatggaacaaacacaattcaaaggtaaacaaaaatcttcttagtgtcttacttaaaagaaacactaaaggaaaaatcgtaataacaaatgtaatgtttgattgcagaaacgagaacgagatgaagaagaagaagaagaagaagaaagtaatccaatggagatgttaaaggcggtaggcgaaatgggtaaagggttagtgagggatatctatttgctcaagcctccacgctttgtctaaatatcaacttgtcttagtttctttaaaatgtgtttgtcaattttgtttactcatcatcatactcaaactgtctaaagcgactaaacacattaccagttttgcttcattcattgagtttaatgtgtaccaaagcttaatgactattcgttgtcctactattttgttttttaaaacaaacaaagctcaagacctttcggggaaggttatgtgacaagcaaagacatatatacaaaacggagtagtatttgtggagattggagaagaacaatgaaaatgaatttacttgtgctttgtaaccgttgtgtaataacggctattacaagaaaagtttatagataagataagttacatgatctcaaatgtttcgatgggttttgtttgatttgcaaatagcttcctgagcatatcacgacagtattcatgtctacattttctttgtggcctaattattaaatttaagttaccgtcgaaacttgaacttgaaactttatttttgccaacacggcaatgagttctcttggaacatctcacatcatcatcatcatcatcatcatcatcatcatcgatatctgtaataaaataaaacaaaataatgaaaaagattctctcacattatcttatttctccacttgattcccagaagacaaaaaaaaaaaaaatcagaaaaaaagaagaagagagaaacc

SEQ ID NO: 9504 - DNA, 3000 bp, Unknown
  misc_feature (1)..( 3000): cDNA_ID_3034573_gDNA_ID_1972138_Annot_ID_179199 3000 nt of promoter + ATG
atgcaacgcagactcgtaaggttaaaaaaagagtatatctacaggaaaagcttggaaggtgatgagcgtaaggtctatgagcagaagcggctgataagagaagcccttcaaggtctagtgatgattttttttttcagtatctgttgaaacaatcattgattcgatgtgtatttttcgtttttctgattttggtttatatggtttaacagaaggaaagccgattcctactgagctccgaaacgtcgaagccaagcttcgacaagaaattgatcttgaagaccaaaacacagctggtaagaatttggaagctagatttttccaattggtttgaacctgtgatatgaatggtttgtggcatcagctaatggttatcatctaatcatgttgttactagttccgcggagtcatatcgatgatgaatatgcaaatgctacggaagcagatccaaagattttgttgacaacttctaggaatccaagtgctccgctcatccgattcactaaggtattgttttgtttagtttccgtcgttgaatagatgctgacgttataatgttcctgattccttttcattgatggtgtggtttctgttgcaggaattgaagtttgtgtttcctaactctcagagaataaatcgtggtagtcaggtatgtgtgttgttctggcttctgcacttaaagtcatttggaaatatctaattctctttttttctgtaatctggttttgttttgcaattgatcattgcttgtggtttcttcatcgatgttgttaaattgattgccaatggtattagctcccttttgtttcctgggtataactattgcatgtgcatagacttgtatcagattattgttgaatttatgcgcaacactggtcatatcaatgaattgcatattagatcaagctttataatttaaaatgtagttgagtctgtccaattctgcagaatctagatttcaaataaaagcaagactaatataaacgatcatttaagctggagttgtactgacacttatattcaacacaaaacctctctatgtaagtgtaacacggaaactatgttgcattcgaatcgtaatctaagtttctttcccactctgttaatttgcaggtcatttctgagatcattgaaactgctcgttcccatgattttactgatgttatattggttcatgagcaccgtggtgtgcctgatggtctcattatctctcatctcccatttggaccaactgcatactttggattacttaatgtggtaagtaactctttgaggatctgatttttatatccaaatctttcttctttcaactcctagtttagcctttttacttaatccaaagtcccttctgtttaggtaacaagacatgatatttcagacaagaaatccattggaaaaatgcctgagcaatatcctcatctcatttttaacaactttactactcaggtatatctctagagccaaaattcacttcgttcttactgtaatttggtattggaaaccatcaagcttcgtcgtgtctcatagaatgatcgctctggtttattcatttctaatgtaaacatattttcaaatttgatttccctttgttttgcagatgggtcaaagagttggaaacatcttaaaacatatcttccctgctccaaaactggatgcaaaacgtatagttactttttctaatcaatccgattatatatcattcaggtaaaattttctcacaatgatcagattttacgaattttaattggtgacatcaattgtagtatgcaaagcctaaggtcttaaggcttatgttagcatttggtaatctgatccacatagaaacagcatgtaagaacactgtaaatacaacagatggagatttttataaattcttgtgggtatatatatataggaatcatgtctatgataaaggagagggaggtccaaaatcaatcgagcttaaagaaatcggtcctcgatttgagttgcggctctaccaggtacgcattctgcttaaccgaatcaaaactgttttcctcgagtaaaataatggtttgataaagaatcattctagttccttagtaacaatgttgtttctgtgtaatgcaattatttttgcaggtgaaattaggaactgtggaacaaaatgaagcagagatcgaatgggttataagaccgtacatgaacacctctaaaaagcgcaagttcatcggtgaatgatgactaaacggaacagctttgaaccctttatctaaattctgttttacttatcattctgttggaagagctgttcagtttttgtgtccttagagaaaattgcgatgattttgttttaacgtttagcttataaaaacaaaactttcttgtcttcaattagtatttatcttcaaccatatactgttgcgtgagtcataataaaaaattttgtagtagtatttttatccacgaattcaaacaaaaattatctgagcagcatcgaagtgctaaaaggtattggaaaatggataaacacaaaattgtcaaaattctaaactataatttttattttttaattataaatatctttcatcgtgttgttatatatatatcagtcccaggtttcgtctcatagtttcagttgtgtctctttcatctgatcatcggatctatcggtaatttacttcttcgtcttcctcagatcgatttgatctctgtgaaagtcgcgaaatcgaattttaatttcgtttaatcatttgcttgcttcccagttttatttttgttttttgttaatattatatcgaattttctcggccatatttttcattttaaattctatccattagttttataaaagtccataacttactgctctgtgttttctcttttgattcttctctgtttatagtgagtagagagagttatcatctagggtttatagattggagattttagccgcaacaaggaggaagtgtttttaatttaattttattgttaagagttattgttgctttagggatttttagaatttgggtgttcttttaa

SEQ ID NO: 9505 - DNA, 3000 bp, Unknown
  misc_feature (1)..( 3000): cDNA_ID_2036309_gDNA_ID_1972138_Annot_ID_179197 3000 nt of promoter + ATG
gcattgtttattcacaaaagaatcgatacagaatggggctcgtgtcacatatatacgtatttgggtttagttaacttatcaaactttaacatatgtcgatacttccattctcttatcgatctccttgcattgatcttttttcttcattgtttccaaagtttcacatttaagcatatagctagacatgtttcctaaagcagatgaagttcatgaaaggatgctcaaaatgttgaccactaattaaccttgtacctttgatttcttgatgcatgctagacaaatctcataaagttaaattcaccgaaaacaaggataatccacaatttagcgcattgacagtactaaattttgtatggctataacaccgcaaactttctaccattatataaggaatacctggctactaattatatttttacaatgagaatagccaaatgtataaaagagtgtattaaggaataccaaactactgtcatgactatcgtctactttctatcctagaatcagtgagccagaaagaccaaaaaattacatttcgctataatatcaagaagtaatcagaaaacttctaaacttttaggcataagataggaaaacatcaaaagttaaagggtctaaataaatcagacctagctagttagagggaatttctgcgagtcgtgattccaaacagcttaaactataccctgttcgattaacaattaacaagtgtattttacaatcagtcatgtagcaatatagaatatttcataactaatttaaatcaatactatttagtacagtttttattatctcgctgtgtaaaaataaagaataattaaaatttgatatacaatgttcctaactaattttctatacaaatacataaatattcacatttttacaatgatcatcagccaaatgtacaaatgagtgtggattattttatgcatgaacacattcatgcatgcacacgtacgtatatgtataccacctacatagaaaatggctatatttatagaaaaagaagagatggcttatgtggcaaattagtgccaaaacacaacttttgtgaattgtgacctcaagaggatttggtcgttctttactgcaaattgtttgtttatgttcattgttctaggagagtcttctattagaaggggcacatattaagttgagtgtgtgtttaacaaatgttttacatatatatatatatatatatatatgtatatatatatataaatctttttctttataacttacacgcacattaacaaatttgaaactaagttatgacatgatagccgtatatcaaaaactaatttatactatttattatgaattcttaaccaacaaatcactattagttggttttataaacttggttaggctttcaattctaaaaacaaacatcatataaatagaaaagataaaagcaaactgattcttgctatttaagaacaaaacaaaactatttacttattagttaaatgaattttataatctaccttcgtgaaaatacccatttctgatattcagttataataatgattaatccctcaaccaatagggagttggcatttcgaaagaattttatatcataaagcttgtacaaacagataaagaatcaaggatgatttgattattatgacttaaatgcatattttattaaatcaatgaataagagtaagagcactcttggaaaagtggtcaaaatgctacctgtttaattctttgtaggtgtagtagtctaatgcctaaaaaaaaataatttgtacaaaaatctgaatacaaaaatataaaccaaatattcttttaataattttatttcgtttattgatttgtttagctaatctattgattttgcttattaatttgtggggtatcttaccaacttcctccacaaagacaaactagcttcaaaagacaaggtagtcttttatcttccgttgtcgacttgacaagtactttataaataaataacaaaccgtcaaattggcgaatcaatcttgagaattagtgtcgacataaattttattattgtacattatacaatttagacgataaatagtccaaatccattgtcctcgagcagggacgactctaaaatatgggaggtccaactgtccaagccaaagaaaatgtcttttggatatttgtagatagtttaaaacaatgagagaacatttaaaaaaattggggacaatgttttggatatttttatatagttttaaaacaatgagagaacatttttaaaatattttttaaattgaagacatatatttacaaaaataaaaaatttagtgattttagacccatatttcaactcgtagaggatgaactgatgcatgattagaaatttagaatcctgaccttaagtcacttgtgtttttttgctcaaaaaaaaaaatctgattatttatttttaagcccaaaacttagataatcctttacctttttgctttgaaaaagttctgattaaaactttgtgggcaattttcttgaacttcatcactatttgggctttttaacaaactcacttatggccagttttatagaaccggcgtcgtatgatacaagcccttgcacgacagcgtatctatgaaaaataacaaaaactgaaagaacaaaataaataaattaattcggacaaaggtttaaacttaaacccaaccctggtttcttcttcttcctcagtgccgccgtaaacaagcttcgccgtcgattttctcctcctctgaagaagaagataatttaatttctaaagtaagtttgcttctgattccgttaatagtctctatttcgaagattgtagtctcttaggagaaaatcttagtaagattgtaattttgctctgcttcacatgatgggcttaaacgatgatgaagcccacataggccattctgcaatttgagacgaaatccttgctttcaaaatatatatacattaaacctttcattattttgctcttcttctccttcttcttaaaccctagtcatcgagaatccagtaccagtaacc

SEQ ID NO: 9506 - DNA, 3000 bp, Unknown
  misc_feature (1)..( 3000): cDNA_ID_2036242_gDNA_ID_1972138_Annot_ID_179189 3000 nt of promoter + ATG
caatcaactttattcaatacaaccaattccacattagaaccaatttttttttttttttttggtgttcagactaattctgaaaacccctaaattttaagctactactaattttaaaacaaatctgagctctaataatttttatattaaatatgaataaatcatactatgttaaataatgattggtcatgaggactgacttggaccacgcggcctttttcttttcctttcccacaggaataaaattattttaattaccttttataatggatcgtctctttctaacaatttatacaaacatattttattatccgtatatgtcagaccgtacactttgcctgtatcgacacacgatgtatgttggtgcggactttactcatacatctaaaatatttgtaacacaaagtttccaacagtgaaaaacgaattaggaaaaaaatgcaagaagttcacaaacaatcattttgtttatattttaatgttttagagaatcagttttgtttgtaataacttacaaaaaaatgtttttataaaaataatagaatggaaatgtttataaatagatggaatgctaatttatctatttattatctaatactaacaattgttatataaaaaaaaccataatactattactaacaattgtttgtttccactgagatctgtcgcaaacaacacaagtcatacagtattaataatgatcaaatatgtttgttgtagatgtgttcaaacttcaaacacagtcatcattttttatttataattctgagtctgaatatgatgtatattttagaagtaagataagaagagacagtaaaagatctttaaaagaaagaaaaagagttgatacaagaacatgaaatagtacaaagacagctaatacaagaactgaagcagcgaatctattgtctccctcccccttctcttctagcaggcaaactaacgtgccttccattcacctcattctttctttctttcttcactttttcaattcgtcctaatatataaatatttgtttagatatttttttaactaaattctttttattttaactttattgaaataagattaattgtttcatgtctataaacaagatataaatttgtttagctgaactatatatacaacttaataaataaattatagccaaattaaaagagtttggacgtttttctttattaaaaaatgaacaatgaataagacttttgggtcattcattaatatttataagtttcaactattactatgatgagtacaaaaaaaacaaaaaaaaaacaaaaaaactattactatgatgagtatttagttttttcttgtcttaaaagatctctatatgtatggttgataataggtttaatggaatcgattatcttaactctgtctacgcaaagtgacaaattactttttctttaaaccatattcttatcgcccaccaaacatcatgtaaatttttaaatattgacctgaccacataattttttaatctgtaatgttggttgttattttcacctgtcctttagaaaaagaaaaagcttcatttcttgtctctttttttgttcactttattattgttctttcttcaaaatcaaattctagctttttgatatttaaaatcactcgttgacatataaataaatatatatactgtacggctaaaccgtatgtaactggactaattgggccattcgttagaaaaaccctatctggttacatgtacaaaactggaccataaaatatgggccatttgcacacaaaaaacatatgggccaatgcttcattacactcggcctatgaggctatgacccaagtgtatatgacctttgttagtaacttggcatcaattcaaattgtttgtggtgcccaattagttcttattattacaagatgaccaaatgtagccaatcctttatacaatagtaaaaactctaactaaaacacatattacaaacattttgttatagaaaaccataagaatttatatccttaaatgagtttctaatcagtgtaaaaaaaacacttgatttgttatgacttaattatcagctgtcactctatagtataatacatccctttctttgatttattcattgatagttagtgatcaagaacttttaaagtcaaattataaccaatcattatcaaacataaaatatgattaaatctaacaaaaaatgattatatgatggaataaaacaaaataaattgatgatggtgaaagaatgattgtctccacacagtatatagaagcaccaaaataaaagtcgtcatcacaatgtcgtgcgtggctatgatgcatttgggctttggcccacactacaaacaaaaatccgttgaaatttgtacaagaaaaacagtttactttttgcctctccaaaaatatctttatttattaataacaaactaatttagtattattatttttaatccaatttaaaccaaattttattgagacaattttagttgtattttttcattttttttctaaattcaatagaagcaaaagtaaaagctctatggaactgctgacacctaattaaatactcaaagtttaatatgataatgattaattcgagaaataacgagcatctttgttagtaccgaagctctataaataaatattatccacagcgataacgataatattccatcgataaaaatcacaaaagtagctgccaaaaaaatgaaaaatcacgaaaactataatatatacacattttatataaaaagaaaaaaatatgcactaaattctaagcgttgtgcatttatcactcctggcactgtcgatgcctacaatcacgagactcataacaacaaccaccttcaaaatctcgggttctcgggtccggttcaattccggtttttgacccgaacctgtttccgtcttcttctcaacggttatgcttctgaagtgatatcaccactctctctcgtctgaacctgaattttcaacccgacccgactccaacttcgttttcggatccgaaaggatctccaccggtcatg

SEQ ID NO: 9507 - DNA, 3000 bp, Unknown
  misc_feature (1)..( 3000): cDNA_ID_3042189_gDNA_ID_1972138_Annot_ID_179187 3000 nt of promoter + ATG
tctaacaacagagaaatagtgatccacaagttattgcaacaatttggtagacaagccgttcataaagaagaaccttggaaacacaagattttaatacatgctccagagatttgtgatgtccttgaatatgccacagtaagttctttctcttgtgtttattaatttatcatttaaacttaggcatgtggtgaagaaaagcaaatcctacctattgtgctaacaatttcctattaattggtatacatattggtcttagggtactaaagctatgtccggcatatcatttgatatatctggtgtcgatgaagttgttataagcggtaaatcttttaaaagaatacctaatcttcgattcctcaaagtctttaaaagtagagatgatggcaatgatagagtgcacatacctgaggagacagagtttccgcgtcgtctaaggttactacattgggaggcatacccatgcaagagtcttcctcctacatttcaacctcaatatcttgtcgagctctatatgccaagtagccagcttgaaaagctatgggaaggaacacaggttggtgtctgtactttaaatatatgtatgaataatgttcatgtttgatcttcatgctctttctctctgttttgtgtcgatttattcagcgccttacacatctcaagaagatgaatttgtttgcgtctcgacatttgaaggaacttccggatctttcaaatgctacaaatctggagagaatggatctgagttattgcgaaagtttggtagagatcccatcctctttttcgcatcttcataaactagagtggttggagatgaataactgcataaacctacaagtcattccagctcacatgaacttagcatcccttgaaaccgtcaatatgagaggatgctcaagattgagaaatattccagttatgtcaacaaacatcactcaactgtatgtatcacggacagcagttgaaggaatgcctccatcaattaggttttgctctcgtctcgaacgtctcagtataagcagcagtggaaagctcaagggaataacacatctccccatcagtttaaaacagctagacctcattgattctgatattgaaacgattccagagtgcatcaaatctcttcatctgctatatatccttaatctatctggctgcaggagactagcatcattgccagaactccctagctcacttagatttcttatggcagacgattgtgaatcattggagaccgtattttgccctttgaatacgccaaaagcagagctcaatttcaccaactgcttcaaattaggccagcaagcacaaagagcaattgtacaacgatcattacttcttggaacaacgctcttaccgggaagagaattaccagcggaattcgatcaccaaggcaaaggaaatacattgaccattcgtccaggcacaggctttgtggtttgcattgtgatttcccccaacttggcatcgcaaatcacagagtacaggcttcctcaactattgtgtcgtcgtcgcataggtcaaggcgacttagaccccattgaaaaggtgttcaacgtacgaactctactcaactttcaaacggaacatctatttgtgtttatcattcaccctcacttgccatttatcgatccctctgaagtgagcagagagatagtgttcgaattcagtagcaaattcaaccactttgatgttattgattgtggagccaagttcttgaccgacgggagcatcaaagggagttatgattctggattggaacaagtgtttgaagacaacaccaaacacggtgaccatgcagattgttggaattggctattccactgttttgatctaccccattttgtgaaaaacgtcagaagctttgtctcagtatgaagaaaatagaatccagaactgatgaagtgttcattctccaattcatgtcagcccgagactctgtcaccaaagattttctatactaattttatatccatcttatggtgtcgtcgtctcatagatcaaaatggtttatccattaaaaaagcttgtgttttggttggcttacctcatcgattacttatatactgtagttcaatcagaacatatccgtgtgttgtaattcagtcttgtttagtcgtgtgaagcgagatcctgttttggatcatcatcgttttcttgcttcgataattgcgaggaaaaccgggaaacttggtttggggaaaatgatgatgacgtggccatcggcttcattcaatgcgttgggtccttctaggtctaattaaattgggcctataggaaaaaaagtgtaatccatctcttttattttctgggtggctaaatatatgggcttagaatgggcctacagacaaacaaagtgtaatcaatcttctttttttgtgtttttattccgtgtaaatcagtaatttcaaatgaatctgtttcttaaccgctcgtgattttgtatcgctaatcgtgttgtgtgtgtttagattttacaatactcagcgactcagggtccacaacattttcgtctttttgaagcagtctgtaattttgttcttcttaagaggttatacacaagaaggtttgtagaaaaggttacagtgcacatcagcacataaagctgcaaatatggatatcgtttgtattattcttcagaggctgctcatagagtacattattattttctttgacttaataacgcgttcagatacaggagggaccccttttttgttcattttctcctcttgtataagtttccaaaagttacacaatggcttcgaaatatttgatacagacttatcttccacttctcagtaccccttgtccatgcattattatttcgttgacttcataacgcgttcgtcataagtcatacagaaagagaggaccacctttttgttgttttgattttatatagtttccaaaagacgcattaatttcaaatatctgatttttttttatttttttacttatcttccaattctcattacccatttttccatctctctggctctgagc

SEQ ID NO: 9508 - DNA, 3000 bp, Unknown
  misc_feature (1)..( 3000): cDNA_ID_2036273_gDNA_ID_1972138_Annot_ID_179182 3000 nt of promoter + ATG
aaatgctcgttaacttcacaaatatagtcatttctatttatcacattccgagaaattatgattacttgaatgcattaatgttaaaaatataatgtttgttgcaatgctaaggttttttttttttcattctaaattttgttcttatttttttctctaaaaaatgagtagaagtaaatatagccgagaaaaagattgcgatatatagaagcaaaagtcacctttctatgtgatcaaattcacatcgatgtttggtaattgatttgctttaatccaacggtcccacttttacatcgacttcatctactatacatacatgcatgggtcttccaatacatgtgtgtagcgttatatacataaacatatatagtgacttgtataaaaactaaatgtaaataaaacataacaaaagtaatggaacagtgatttagtgatgtgtggtaactggcgagtgctttggacatttttgtataaccgaaggtttaactaatcaagattaaaaaaaaaaagaaaattaatcaagattataagaaagcacaaaaaattatcaagattataagagcaaccccatcggttcaaataaaagatatcttagctatatcttagctaataaactgattaaatttaataaaagcagctaagattagttaagatttatatcttaaccaagatattttcttaagtttaagaagtggacaggtgttgtgtatttattgggtacacaaataaacaaaagtaaggaaaaaaaaaccattggaacataaataatttaaattttttcccttaagaactttttgcttcttaaccaatggagcataaataaattaagatattctctaacttatcttaactttgaaaaagcaaaattttaattttaaaaaaggttaagatccaagattaaaagctttaacatcttaaccattggggatgctctaaaggaccatgcatccagtatcttatgtgttggaacaggtgtatccgtatatgtatgtaactatgtattatgtatcgtaatttgtacgtaagcttggtgccctggtctacagttccctagttaagattctattttgacaacaaaattgatgattccaatcatccatatttgttatagggagaaattgagcatgctatatacggtgatatatatgatatttatttaatatattgaataacaaacacagaactagtgttataggtgcaggtatgtaaatataatgtgataaacattttttatatagattggaaagaatacgagattgttgttgctctgttagaacgaacaaacagaactagtgttataggtgcaggtaaggtaaatataatgtgataaacattttttatatagattggaacaaataaacatttttctgttagaacgaacaaaggcctgtcaaaaagaacaaacctgatgtgacatattacatatatgattataattgattattgtatatatagtattgcatgactatctttacaagatttcaatacgaaaataaattaaaaggagaaaatttataaacgaagcgatttcattctcggtaaggttttccgatatgtctcctaactaaatcaaagccttgtaattgaaacttgtaatgattgttattctatatatctttgaagaaagcttcggtattggacgtacttaatataattggattttatttaaattacaaaaatcactgtataattcggctacatgacttaatcaattatttcacgttgaaaacaatactatatcaacttcaaatacactccttgtgtatggattccacaagttcttttctatctatagaaatatagaatccacaagttctatctacttttattagaattttttattgttcgttgttgttaacataattataagcaataaattcaaaaaaaaaaaaatctaaaagacacaaaatttccatctttgatagggcttcggaatcattaattactttttacaaacaaaaaagaagaagatagggcttcggaaattattagaaagatggaaggatattgtattaaatttggcttcatattttcctttggtttgcggccatcaagtactagtactactcagtacccacaggccacaggaaaaaaagtagtactgctttattaagtgtgttacgataaatggaaagcgttttagtatgtgattacaaattgttgtatgtgatcattaattagttattggtccgacttctaagtttaaatattttcagaattcagttagtttaattatacatgttagacgaaatgactctttttgagccaatatataatgtatctgaatttttcattttgaaaaatctttttataaaataataggtcaacctcgaattattataataaaataaataatttgcgttactatgaaaattaatttactgaatacagtatatagagagagatagaaatagaggaaaacagtggataatacatgattagttgatactcatgtgcagcgagtctatatatattatatactcatgattagttgatacatatgtgacgattagttctacgaatcaatctctagttttcgtcttaaaatcatttggttttatagaatataagaaacaaagaaaacaggaactttcgcgggagacagaagggtacgtgaagagaaaaacacataaaagtgataagggcttaacgtaataatactacaacaaaacctctctacgtacaacgagtaataacacatgaaaatagaaagtcgatgagacatcgttttaaggttagatcgatgaagaaatatctcaggccccacccctgggacccgacccgacccgacccgacccgacctttgtctcctctccttttaaaaactctccattgcttctttgtcttctctcttctataacataactcaagaaattaaagaagatagatagagagagagagagagagtaaaaacctaaagggtgatatacttatataaaaattaatttaagattgtgattaagtggttcactatatttaagttactttgaggagctactaatc

SEQ ID NO: 9509 - DNA, 3000 bp, Unknown
  misc_feature (1)..( 3000): cDNA_ID_2036263_gDNA_ID_1972138_Annot_ID_179184 3000 nt of promoter + ATG
ccgacaaagtggacagctggtcaagtgggaggagcatgcggtgcagcagcacatatgaccacacctgcgagtaccaaccacaagcattttagcaagttgcaaatgcagaatcaaccaaaaatggcggaagaatgcttacgggacaaacacagcgttgtactcctgctctaggcatatcacacagagatcaggaacagcgtcttctttcttggtagaatctgaaatgctctcacgtgtcccgtttgaacctggtcagaagagattgtagtcagagccagtgcaacctatatgtagaataaagagattcaccaatggataccttcactctctagctcagctctctttgctgctgcgtcaagcactctgcaaaaacagctgactacttaattttgtgtgtacatagtttcgagagaaacaagccgatctagtactcatgcttgagaacggttattcacttttagacagacaaatctgtgacataccttttttgtaactgtctccgccgtcttctctctagaacagagtcaatgacatgcttcgtaattaggaacacaccaagaacagtaaaacccatggaggcatatttgtacaacctgtaaattatactcttctcaatcagtttggctcattgccgtttttctacaagagtataggagaagaaccgagagaggagagagacacgaccttgaccattttcccaaattagaaatgagctgatcgagtgatttagaagagacgtagaaagggcccctgtcaggtttttgaatcctgaattctccaatatcgtccttgacagcctgttatacatggcagcaacacaaattagatttaaactcatcggtaagcctctatacatagatcaatcccacttcctacaaatattgctattaaaggaactttgagaaaatttcaagaggcaaataccagactgatgaaggagttagtgtgctatgtatctctatcaacagttacaacttaagcaaaagagaggacccgaaaacactgagaatacgacatacctcaccaacaattgttagcggtattccagttggaagaacacgctcaatgcgcttaactccaagcatctgaaacaaaacaatggccgcttaagcaaatagagaagccaacaaacaaagaaccggaaagaaaagtaaaaaccttaagtccttgaagataatcaagtgttcctcgtacaagcgagcgtcctgactcttcaaaaacttcactaccaacagtcaaggcaaaacccgtcgcaccacgagctcccattacatggacacggcttgtcccatcgtcctatcccaaacagttttggaaatggtattaagaaaacatccaatcacagttgtttcaaacactatgctactagactagacttaccagaaaccaaggaacctctttgctcattgatagcatcaacgcactatcttgtacccaagaacccgtctcattatgtttcaggaaatgttgttccgcctgaaaagatcatgcaattactagagtttcacataaaacctaatcgattaaaccagaaaacaaactaagttccatgcgctaatcatcagtctacaacataccgtttcttcaacaataacaccgcgtatgccactatgctcgcatttgataggtgtctcagagccgactcttcctgataccgcaacaatgaaaggcagaatcttgctatctaattctagcaattgagctacacatacagaacaatcagaaaacatgatcaaaacttcatcctgagagtagatgaagcaatcaggggagaagaagattacctaactccttgagctgattaaccctagtgactgtttcgagtacttcagcatccctgcactcaaaaggataagaaaggatttgattgattgataatctctttgggaagatgaaatataaaagagatcagacaaacctgccactactccggccgagaagataaagagcagcggcgctgaggcagcaagtaactccaccccaaggaatcatcagactctgaagtcactcttacttgtttgcagaagaacaacaatacctttgaagttattgatgagcagagagatagaggtaggttttgaatctggatgcagcgaattgaatgaaatagagatgggagtgaaacgaatctggatttagaacacagagagatggaagaagatcatgcgaaattagctaatgagagttatgagtatgaatcgaggaagagtttgaagaattagaaactagaagcagtgaaagaagaggagaatttcgaaaggggaaattaaaagattcagagggttggaattgaatgatcctttgcttcgatctctctcaatattctcatgcgcagggtttggggaagacgacgatatagtccccaagcaacgaagctgatgacgtggccacttcccaatccaatgggcctactctttttttttgtttaagcccagctaagacgcatgagtctttttttgtttttttgttcttaataaaaagttaaaaactgtcccattccccacggtaagagagtcgttaatcttttgtttcattatgcaattaggtttgtacataatttaaatttacaatcgttaaagctgtctattagtcgctgcctagtcagtttgaagtatgaggcggttcttgactcgaactttctgcatattatcacggattaaagaggttttgaagagtgaatagatttattataaacgacaggatttataagtgagagagctttcgaagcaatttgtaatctctttcgctttctttaagagccattcgaacaacttggagcaaagccttgactcattcaaatgtgagagggcccattgagtcttgactcttgagtataagaacaaaaaatcttctctttttattatagccacaaaaaattaatcttattatctctttatttgatattgcctctctgataatttttatatacagcatttccaaagacacattaacgttaaatatcttcttttagttatcttcaacatttccagctcgttcatc

SEQ ID NO: 9510 - DNA, 3000 bp, Unknown
  misc_feature (1)..( 3000): cDNA_ID_2036267_gDNA_ID_1972138_Annot_ID_179183 3000 nt of promoter + ATG
aatgacataccatgaacattccagccggtaccctataccgaattccaaatatagaagaaattgttagcaggactagtaggatttgtttatctacagcgaatgccttaatttacattataattgaagatagaagataagaaatacgaacttactttggcgtgctcaagaacatgacaaatctcccgggcatctattaagatttggcgttcccaaggctcttgtttttgaatagctcttttacccatttgttgtagtaatctgtgcatcactatttttgtatccccattgctaaaaatcttcatctttatgagagatctgttttcaaggattttcagcccgtatttgacatccaagtcactctcagcgaacatggttttcacaagatcaccatcttccttgttgaagaagattgcaatgtggagaaatagtgtttgcgcattctcatctaaactttcatagccaactcttagtacgtcttcgatatcttgatcaagaatagtttccagcctggtcacaacatcttcccattcgtcttccttcttcccccgtaaagatgaacccacgacacaaagacccaacggaagcttaccacaaagctttgttacactttctgaaagctcttcaaaaccatgacgtggagaggtctgtttaaaagcataactacacaagatcttgagagcatcttcatcagatggaaaccccacatggtaggtattgttaataccatgttgctgcaaaagctctttgttttctgtggtaactacaatcctacttcctggaccgaaccatgtagtttcattagccaaagcctccaactgctttaacttgttcacatcatcaagaatgatgagcactctctggtcgcttagattttcttttattgcacctaaatggcatattctcattccactttggttcaaaacctttgaaagaaactgttcttgtaaatgcagcttaaaaccatactcatcaaaaccactatgatagcttcccctaaggttgtccacaaaacaactaagttgaaaccttttagagagtaaaccatataaagctctggcaatagtagtcttaccaatcccagcaggaccagcgattgcaactatcttaacttcaacattatctaaatctagcaaagattttatttctctcaaatgagcttcaattcccaccataccatcaaaatccctagatggtgtagcattcagtttatctaaaacatctctggcaatcttttcgatcattatagcttcattgtccctaacaaaagagaaagaaaggaaaagcacagtttccatcaaatagatacagagataacattgcatgttcccaacaatttatgacattttaatacttaattcaacaaaaacatttcccttaatcatttaaattccaataatcgtaatacctcctacatcataaaacagcactaattgtttaagttttctctggtgattacaacttaatataatataacctataaacaaacaataaatcagagattaaaataaagaccaaccatcttaagaagtcttctccagcaatattgctgacttggttcaaagctttgctccatttttgcctttcctcctcggtcttacgtgcacaagtttcattgaaagcgatcccgaatttcccgatctgtttccgcacatcggatggatctactccgtagaagatggtcatcactatctgtcccatagctttcttgcactccaagatctccaccaattcatccaaacaccagcttgatgaagcatatttcttggagagaatcacgatcgagatccttgattcttttatagcttctactagtgaaggcccgatcgttgcgcttctcacaatcttttgatcatcaaacatagtgatcccgttgcggttaaactgtagtcgtatgtgactgagaagtgttttacggacgtcaggcccgtggaagctcgcgaagacattgaacttgtagttctgagacgaaaaagaagaaggagaagccatgatgaacgagctggaaatgttgaagataactaaaagaagatatttaacgttaatgtgtctttggaaatgctgtatataaaaattatcagagaggcaatatcaaataaagagataataagattaattttttgtggctataataaaaagagaagattttttgttcttatactcaagagtcaagactcaatgggccctctcacatttgaatgagtcaaggctttgctccaagttgttcgaatggctcttaaagaaagcgaaagagattacaaattgcttcgaaagctctctcacttataaatcctgtcgtttataataaatctattcactcttcaaaacctctttaatccgtgataatatgcagaaagttcgagtcaagaaccgcctcatacttcaaactgactaggcagcgactaatagacagctttaacgattgtaaatttaaattatgtacaaacctaattgcataatgaaacaaaagattaacgactctcttaccgtggggaatgggacagtttttaactttttattaagaacaaaaaaacaaaaaaagactcatgcgtcttagctgggcttaaacaaaaaaaaagagtaggcccattggattgggaagtggccacgtcatcagcttcgttgcttggggactatatcgtcgtcttccccaaaccctgcgcatgagaatattgagagagatcgaagcaaaggatcattcaattccaaccctctgaatcttttaatttcccctttcgaaattctcctcttctttcactgcttctagtttctaattcttcaaactcttcctcgattcatactcataactctcattagctaatttcgcatgatcttcttccatctctctgtgttctaaatccagattcgtttcactcccatctctatttcattcaattcgctgcatccagattcaaaacctacctctatctctctgctcatcaataacttcaaaggtattgttgttcttctgcaaacaagtaagagtgacttcagagtctgatg

SEQ ID NO: 9511 - DNA, 2838 bp, Unknown
  misc_feature (1)..( 2838): cDNA_ID_3049893_gDNA_ID_1972139_Annot_ID_179206 3000 nt of promoter + ATG
aagctttagccctttgaacactcccttttttttcttagttatataggtaacccacttatgatcacagttaattccatgtagatcgtattaaagtagtctattgactaaatcactaaaatatcaattaatgaattaatgttgtatgatttgttatcgtttatacgaaagtaaagaaaaacaagaaaacatgacttggattaagtaactctatgttctgtcttaatacaggagagcagggaattcaagacgaccaccaggaagagcataagtacggttaaagcttgggtaagaagcagaaagagagagagaagtataattgttggcaaattaatataggtcttgtattgctgctagattctcttttcctttcatttgggatcgaatcttttaaatatgcgcaaaatatttgtgaccctacaattctgttttttttttttttaaatgtttgttttgttcctatagtgaagaaatattgagctagttaggggaggttttaaaaaaatgaagacactgattattaaaaggatttcaagaaagaaaagaagtatacgtacatgcaatgcaatcctgttttctcacgcattgcacgacttatattgggattatttctaatttgatccatcatcaaataacgtttagatgctttatttccttactcacattgtttattgggtacttgcactaaatgatcattaacatttattaagttaggtaaataattgtgtactccttttatgtgcaaaaacacaaaatgggtactattttattactaacatgctttcttatcaaatagcagtaccctatgttgttctaaataacatgctaattcaattcagatttggcagacaaaataacatggtattttagagagagcgcgcacaagtgtgtttttttaaaacaaatgaaaacatcataattacgtacctgattgacccttgtgtatatattcacgattagaaattgtagattaccaaaacactcgcacaaaatggttctatatatagacaatatatgattcttatcacatgttttgaatgaaaaaaaaagaattaagatggattttttttttgtaaagaacaattgtactttgaaagagtcttatccaatcattaaaaaaaatgtcgaatccattatttattgatgtattctgaaagcatatattcttccaaaggggcaaataaaagagatgtcgacaaagattggatacataagatattaataatttataaatgcaatggcatatatatatgatataatttgagctctaaatgccgaaatttgaaaaggagaatgtgtgtaatggttcttacaaataaaggagaccacaatgcttctttgtgttatgcttttttcccatcttttattcttttgttcttttgtggggttaactctaccactactcattttctcgctcttttttcacttattttccatatatttctaatttctaaattaattttactaatcttgaaatacaaaaaactattagacttagcttactaatttactacaccaccaacatacacactacgcaacatatgctaatatgtattaaaatgaaaagaacaaaaaatgagaaccggtattacaatttatcgtagtgtatgactagttatgagatgagaaggttcttgaaaaaagaattactaaccaaataatgtagattaattatttgcaaataaagaaaagcaagaatatatagcaaaatcatgagtttacggttcggctctataaaatcttctacaaccatccacgataaacttgatacatgaaatgtcttcttccattaaaacatgagttccacatataaaatggtttacaagtaactctcgaacatatgtgcatggtaaagcaaatatataataccattattttttctgtcttaattaagcaaaattaaacatatatataatatatgatccctacatgttcacttttaaagttcacaatttcaagagtttgaatatctttaatttgaattattaccaaacgcattagacagactaaacagagacataataatcaatcaacttctttttgtcttttttttttttttttttttgggcttccagtcttcataatcaaaagtaactgaagaccagtcttaaagctggaacatttgaactaaacatatacgactgctcctatcgctctagaaattttaattaacaattattcatagttacttaattacaaagacaacaataaaggtgaacgaataaattaaaggaaaattatgaaaatagtttaatttgtatgaaacttttcatccgcataccaaatgtcatatactcttatcttacatttttctcttgggacatatttttggagcgaacactttcgcatgtacgataaggttcagtggtctgagcttcgactacgttaaaatgatgattagggtttactaatttggaattaggagttacatttaaggttaaaagtttatgagtttcaagtttcaacgaagctttaaagtttaaacgatggttaaagttttatgattatggtgggctatgttatagttctttcaatttcgttgggccaaatgggctaaacgattaacgaccctatgaatgggcctgaaaaaatgaaagccacgtgtcagacccccacaatggactttgactcggtgcggctgccggagagaataattaattatcaactccgatgaaaagaaaacaaatacaaagttccaacaaaaatcgaaattcacaatttctcttcttctaaatccatggagtgatgatgatgatagatagattgaatccaaacacaaaccggatccgagattaaaaacaatccggattgtttatatttactttagatcggagaaagatg

SEQ ID NO: 9512 - DNA, 3000 bp, Unknown
  misc_feature (1)..( 3000): cDNA_ID_3042222_gDNA_ID_1972139_Annot_ID_179220 3000 nt of promoter + ATG
tgtcaggatcattaaagtgtagaactaagtcaactgattgattaatagaaaaaatcgatacaatctcacttcctttaagaaaataaaaataaaatatgctttagagaaaataaaatctcgcttatttatgagatatcatatcatttttaggtaaaaaagattagatgtccttttgagacacatcataccatatatatgaccgacaacacacataaaaccgcgtgaacaaaaaatatcatccatcaaccccttacgatgcaaatgtactgtaaaagatggttcattaatttaacatcgtattttaacgttacaattgtatggaacatggaaggttcacaatacgtggaacaaaacaataatgttacgtacggtgtaagaaaaacaaaaaaaacatagcactaaaatagttttcttttaattttcctcttcaaacttctcacgtggaggctactagtggcgaacgtcattcaaatttacccacacccaccatatattatctactcactcccttatatatacacacttccacaaataattcactacacccaaaaaagcttctaacaaagagaaagtgtctgtatgttgtgcccactctctacatttatcaatcacttcatgtgtgttaccttgattgcaaaaaagtgagaatatattctcacaacattaaatccaccccgaaatcgaagtgagtatatcacgagtgtagtaatatcttagagatggttttggaggatagaaaggacggttcttctttgccgggacgatccggtagtttctctaaatcgtcaccgtcggagttggatgttgttgatccctacaagcggataagttcgccgggatctatattggatgctgagaaggtagagaaaaagcctggaggatggagagccgtctcgttcattttaggtattttaattttatttttaggcttcgtgtacataatttagtttacctaatccttgacctttcctcagttattggctaatatttttttgttaatttccttaattggatatatagttctagaaaccagttaatatattatcattgggagatgtaacgggccgttgcaagatcacgttctgcctaaatcattgcacataatagtcagaacaaaagaaatgagcgcataatcttttcagctcgatcaaaaattatattatatattactctcgtaaccgtcggtccaacatgtttgacactcgtctagctgacgactttataactgaaatggaataaaaatttgtcatcataagtgctcttttagccaaaatgttaactttcattttaaattattttatacttttaaatttttataatattttatttctctctatttaatggaatatgattaattttgttagtgatgataattactagataaaatggagtataattgatattcttcaatagagggattatttgtcgatttatttgctgataatattttgtaataaaatgggttgaataggaaatgagacgctggagagactgggatcgataggattgttggcaaacttcatggtttatctaaccaaagtgtttcacttagaacaagtcgacgctgcaaatgtcatcaacatttggtcaggtttcaccaatctcactcctctcgtcggagcgtatatctcagacacttatgttggccgcttcaagaccatcgctttcgcctcattcgccactctcctcgtacgtataatatttttttatttaacttattgaaaattttatataatctttttaaaaaactaaaataaaaataaataatctaatgtgtctacaaatacacaacatttacgtacgtagtagtatttactttatatgttcctaacacctcaaatccgcaactattcgcggcctactgccagcatgggtcagtgctttagcgtccactgttcgaatagttgcatccaacaaaaaacataacaactctaaatagaaagttctatattactactcaatttacgtgtttttttgtgtgtgtggcgacgatacatgatacttggcacataatttcaccccgcacgtggacatgataagaaaatacgtatagacaaattaaattaagtatatatatatgtaaatgacaaagtattaacactttatatattattttatacctattatgttactctctttttttctatatcaaaagctattaaattacttttgtatcgtacgaaaacgcatgaacttattgagggaccacgctatcgaggacgataaggtcggtcaataatgtgaatcataagaacaaaagcattagttagtacacttattcttgtcggtatttaccttgaaaatttatataacatccaaaaaaaatggtaagaaaatacttatctcacgtaaacatcttttgttcattgatgaaacattttccaataaaggagttacgtattagaacgtgttctgtttaagagataaagagatgtgcgtagaaaaggaagagatacgcaagtggtcaatatagattattgacaatgagattgtccaataattgagtgtttgagtttcttgatgatttagctagctagttgggttttagatttggtcagtatcacagtgacgttacgtatataataatagttacttttctagtgtctgtttcattcacaattatagaattatgatcgcatccaacttgttaatttctcttgcacttttttgtctttttcgtaattagttaaacgttgaacttaaactgttacaaatgctcatattactatattagggttacaacagaaataaatgatattaggttctacgtcactgtcactttcacctaatcaaggtaacatcacttttcaatcatatgaagtcaaacctaattaagactattgtaaactttattaattgtttgtatttgttcgcataacttcaatctatatatcccacactactgtttgctttcttcaatattaattaacaatcattcagtttcaagttatatattatagaatatctaataatgaagaatcggtttcaaaattaataatg

SEQ ID NO: 9513 - DNA, 3000 bp, Unknown
  misc_feature (1)..( 3000): cDNA_ID_2183305_gDNA_ID_1972139_Annot_ID_179218 3000 nt of promoter + ATG
gcatcgtttcctcaactccacccagcatcatgcaacagccaggacccactcagttgcggcggtccgaataagctccagatcggagttttgctattgggactctgtttcctctccgtagggagtggaggaatacgaccttgtagcatcccttttggggttgatcagtttgaccaacgaactgaggaaggggttaaaggagtggccagtttcttcaactggtattacatgactttcactgtggttctgatcattacacagaccgtagttgtgtatatccaggatcaagtcagttggattatcggttttagtatccctaccggactcatggctcttgcggttgttatgttttttgccggaatgaagcgttatgtctacgttaaaccagaaggaagtatattctctgggatcgctcaagttatcgtggcagctcgtaagaagcgaaagctgaaacttccggcggaagatgacggcactgtcacctattacgacccagccatcaagtctagcgtgttatccaagttacaccgcagtaaccaattcaggtacttaatatatgatttttgtttttattttttgcttatcactttcaaggtggttttaagacaacactgattacatgattttgtattaacctatagtctaactgaaatggcataaaattaggtgtcttgacaaagccgcggtggttatagaaggtgacctaacacccgagggacctcccgcagacaagtggcggttatgcagcgtccaagaagtggaagaagtgaagtgtttgatccgaattgttcctatctggtcggccggaataatctcactcgcggccatgacaacacaaggcactttcacggtctctcaagctttgaaaatggatcgaaacttaggtcctaaattcgagattccggctggttcactctccgtcatctctctcctcacaatcggcatctttcttcccttctacgaccgcgtttttgtaccattcatgcggcgaatcaccggccataaatccggaatcacactcctccaaaggataggaacagggatcgttttcgcgatcttttctatgatcgttgcgggcattgtggagcgtatgagacgcatacgctccatcaatgccggagatccaacgggaatgactccaatgtcggtgttttggctttcgccgcagctaattctcatgggactatgtgaagcattcaatatcatcggacaaattgagttcttcaacagtcagtttccagagcacatgagaagtatcgctaactctctcttctctttatcgttcgccggttcgagctaccttagtagtttccttgtgactgtcgttcataaattctccggtgggcatgatcgtccggattggctaaacaagaatctcaacgcgggaaaattggattacttctattatctgattgcggttttgggtgtggttaatctggtttacttttggtattgtgctcggggataccggtacaaggtcggtttaccgattgaagactttgaggaggacaagtcctccgatgatgttgagatgacttcgaagaaatcgatgaaatgatttaatagactatccttagggacaacaagaagattgtcgatgttgtttgaataattactatgacaatgtatgtatcataatatgtaagaactagaatatttaataaaattttacctttcattatgtagaagtgttagatatagttcacagttttgtcttattttataactttgtcatcatactctctgcctggaatcagaaaaccatctctaacaagtatatttaaaatcataaaagtaatctagttagatggattgcatttggaactatatcatatacactatgttatgacttgatagaaatataaacagtatagttttaattgatcatttctatggaggatcacgttattaggcatagtttcatcctttatcgattacggacggtaaatgagtacaacccaactaatatgttgtaaagaaaagctactactgctattactgttaatattaatattagacttcttgggtacataaaaaaaaaaaaaatatatatatatatatatatcatattagacttctagaacaccaagtccaaaacatatttggcatgaagcaaaaatatctactgctttattttgtgtctacctctttgccacatgctgtatattccatcattcatttaacctacaattgaattccgttttaacgtttattcactcaattaatatattggggtttgacaaaaataaataactagtatataggtttgtatgcttttttactgttagctaataaatagaaaatccaaaagaagctttcatacaaaatcaactaaattaaaatgaaaagttataagggaatcatatattgtgaaagatttggaatccttttttcacggctgtaaaagggtcaaacacttctgctgccaccattgttgtctctcttgcgagtctaaaaagtaactcacactaacgaaaaaaaaaaagatagaagagagatagctgtggatatcacgttgaacttaaaatttaggttgcataatcagtggatggataaataaatagaaataaattatatcctaaacttaaaacaaacaatataataaaacgttttatacaattccagatttattcaatatattggatatgactcatgcgatagatatagcgtaagacagctatttagaattccaattataactttatagttttcacgaactgattctagacaacttgatttttaatttggactttaagattactaaagtaggtttacatgcaactttccgcttacttcatatgatagttttgcgctacaacttagagccaatagaaaatgtagtgttaaaattggttacgaattacggctacttggtccaccagagaatatttgacgttatatataaaagccaactcttccgctctccttgtgctcaaactaagagcttctactcaaaaccatttgcttctttctgcttagagagagagagagacacactcaatg

SEQ ID NO: 9514 - DNA, 3000 bp, Unknown
  misc_feature (1)..( 3000): cDNA_ID_2183347_gDNA_ID_1972139_Annot_ID_179232 3000 nt of promoter + ATG
ggagaccgtttcatacttccaaactttcgatggtgttatggcagaatctgacaaggtaaaacaaaacactatttctcgatttaaccgtttaaaccacaaatttctctaattcttgttttattttcaatctccttctggtgtttcaatcggttagaattaatctcatgatcatatgattctgttatatatttacatatagttaccatataattcttatgtctgaaattaatacagttttactgcatctgataaaagtcaacttgcttgttcggaaatggtctcgagtatcgaaagttcattattttttttgggacggttatttaatgctcaaggataccaagattttccggtatttagaaaacttcggatgaaaacatttataattaagatccgctctaattaatataggtcggatcgatccattttttttctttttttctttattggcattcgatcatgttcacttttataatactatttactttgtgtgtattgagaactatttatcgtagaagtttagaagataggtccaaacagtttttagataaaaagtgaatataaatgtgtcttggatattacaggaagaggagcttgatgcaacaaaagcaaaggtggagaaagttcgggaagaaaatgagaaattaaagctcttactctctacgattcttaataattacaactctcttcaaatgcaagtctctaaagttctcggacaacaacaaggagcttcgtctatggagctagaccacattgatcgtcaagatgaaaataacgactatgatgtggatatatcacttaggcttggaagatcagagcaaaagatctctaaaaaggaggaaaataaggtggacaagatttctactaagaacgtagaggagtcaaaagataaaagatctgcactgggttttggatttcagattcaaagctatgaagcctcgaaactagatgatctttgtaggcaggttaagcttgcaaacgctgaaaataaatgtgtatcttcgaggaaagatgtcaaatcagttagaaatgaaaaccatcaagatgttttggaggagcatgaacaaacaggtttgaagaaaactagggtttgtgttaaagcatcatgtgaagacccatcagtacgtaccatcaaaaccatacattacatatatgtgtttatttaccatttcacatctaatttaattatttgatcatatacacgttacatgaatatatatagataaacgacggttgccagtggaggaaatatggtcaaaagactgcgaaaaccaatcctctcccacgagcctattaccgttgctccatgtcgtcaaattgtcccgttagaaaacaggtataatacattctataatttctcaatccaaatatctgtttattaacaattggttttgagtaaaaacttttaaaacgaatgtctataggtgcaaagatgtggagaagaagaaacctccgcttttatgacaacgtacgaaggaaaccatgaccatcctctccccatggaagcaagccacatggcagctggaacttccgcggctgcctccttattacaatctggctcctcctcttcctcctcctccacctcagcgagtctaagctatttcttcccttttcaccacttctctatctccaccactaactcgcacccgactgtaacattggacctcacacgaccaaactatcccaatcagttaccagacgactaccctctatcgtcctcctctttcagtctcaacttttcctctccagatcctccacctccatcatcgcatgaccacaccttgaactttagtggcttgcgaacacaagctccgttgagtacagattcattattggcccgttatcgaacgagactttccggacagcaataagccagtaactgtatcggtatagctagacacaagtctagaaagtaactgatttccgttttctttgtcattcatttgtttttcagcctctgaaagagagatctggttttggcatgatatgcaaaatgcttatatacttgtagatatccaaatgtttaaattagtggattacctatcatatcatggattatatatgtatatgaaggttttgtaaattaatggtctacacaaatttgatacaccaaatatttttttatgcttataaaaattttaaatacaatgttaattttttttgttggtgaattaagtaagtatgactatgatgacacaatgatatctaaaatggaaggtggttttcatgcagattgacaaaatctccctctttcacttttgcaaaattgtttgatttttacaaaataaactttagttagcatcacataaaatagtgggttatttgacaaattatcaacacaacgtattattatttgaaatcacatacgtattgtttactaatttgattattattattttttgctacagacatttactaatttgatggtcaaaattgtagtcaccattaaaattatttacataaaagaattgattattttacttccctcaattatcaaatataaatttgtgatgaatttgaccgaaatgaagatgtctgaattgtttgagccacctaaatgtttagatggtcgattcttaaaaaggaaagaaaacaaaatgaccaaaagaaagaaaacgtatgaaactatgatccatcagatattacttttaaatcaatcttgggctcaggcccgttactaccgttttctatcttagaattcggcccatccacgtcagcgactccggttataacgctgttaaactcttttgacacacgaccacttattataacgtcacgtgtcaatgcacttcatcaggacgcgcgtaaccgccagaaaagcgaaaccaaaggtccatctccgacacgttgcttatccgaccacactcaccactgttctaaattctctcttttttttttccttaaccaaaaaagctctctttttttcttctgggtttcatcgtttccaatctaaaatcatcgtagatttgtttgaaattcttcaaattgagccggtatcaagac

SEQ ID NO: 9515 - DNA, 3000 bp, Unknown
  misc_feature (1)..( 3000): cDNA_ID_2183328_gDNA_ID_1972139_Annot_ID_179227 3000 nt of promoter + ATG
atataaactagaattatttttgtccaaatttttcgtaaataaattttgtaaacagcgattatgactctggcaatttcttaaaaaagaattggataagtactgataaatttgtattctctcaactaaaatctctttttaatagaaataaaagctaaatcccaggaatcccattttagtaccagtcgtggtataaatattaacacttactgattgccgagagacgaaagaggaaaatcccaacaataaagagcaaacgatcttacagctcataatatttcgttaattatcaaattgctaataggtaatttcgcggaatcttcctttgtaatttcctccaactttctctgctttgcttataattgcgtctttgcttcctcctttacctttacgcggcacatagattattctctccaagtgtgttaatttctcttcttcgtaatctaattttgttttgttactgttgatttgtgtctttctgtttcgtggactctttttgactcccatcaattttaggattcttcttcgtgtgtggattttgatttcttcttcttctctggtgggttttggaactgttaggcttttgggtattttgttgaattccttagggttttgtagtaagattttgataattattgaatcgtttagaacaagagtcaactttttaaagtcattttatagaatctgagtctactagtcgttgaataaatattcttaaagaaatgatttttataatcttcttctcgtcgactttatttattatttagaatcttgtatttgtttttataacccataatctagaatttgatgatttttcaggtataaagttttgtaatttacttttcaggagaaaaaaatgggtcaagctttgggttgtattcaagttgatcagtcgaatgtagcaatcaaagagacttttgggaaattcgacgaagttcttgagccgggttgtcactgtttgccatggtgtttgggaagtcaagtcgctggtcacctttctttacgtgttcaacagctcgatgttcgctgcgagacaaagactaaggtctcttgacacttcctcttgaatcaataccttactcgttctgtgtcattgaaggttgtaatggttttgggttactttgttgtttaggataatgtgtttgtcacggttgttgcttccattcaataccgtgccttagcggagagtgctcaagatgctttttacaagctcagcaacacgaggaatcagattcaagcttatgtctttgatggtttgtttcaatatccttcctttttggcttcttgatgttattgtgtttgccttaactaatcgatccaccatttttgcatagtgatccgagcaagtgtacctaagctggatctagactctacctttgagcaaaagaatgacattgcaaaaaccgttgagactgagctcgaaaaggtaaactactttccagccatctccttgagcaataattttgaaatttgtgcaaaaaattattatacataggttaagactctaactgctgttgtgtatataataggctatgtcgcattacgggtatgagattgttcagacactgattgtggatatcgagcctgatgtgcacgtcaagagggcaatgaatgagatcaatgctggtacgtttaaatcttgctatagaagttttcgacttttgtttgttgagaatctcacaatgttctgttctgtttctggtgtaaacacagcttctagaatgagagaggcagcgagtgagaaagctgaggcagagaagattctgcagatcaagcgtgctgagggagaagctgaatcgaaatacctttcaggtatgggtatagcccgtcagagacaagccattgtggacggtctgagaaacagcgtcctcgccttctccgagtctgttccaggaacatcttccaaagacgtgatggatatggttcttgtgactcagtactttgacacattgaaggaaattggtgcttcttcgaagtcaaactcggtgttcataccgcacggtccaggcgctgttagggacattgcttcacagatcagggatggtcttcttcagggtaactctgctgctgagtagagaaatgtctcaaagtacaaaaaggctttttcagagttttagagttgtgttactacttgctactcagtttatcttttagcggttggctctatatgggttcttaaatttcttatcgtttctctcttctaggcttgtggacttgatccattttcttgttttatgggtttgtggatagagtttgggcttgaaaaatatttgtgttattttgggttttaatgtcgttaactcgttattaatgtttaaacagtggttaaagaatttgttaacgagaatcctgattttactgaataacaaccagattgttaacatttaataaacatttcaatttaataaaaagaagcaaacaataaaataacgttataagaataaaaggaaaacaattaacttgataaaacaaaaagtagctactttttaaatctctacgataccaaaccactgagatctgtgcttcactatttttcagaaataaacgatttcacgatcttaacgttccaaactcatcgatcagccgtcagatggtaaatcagacaaaaaatagaaaacacaaaatctgagctactaaatttccttgtatcttgtatttagtaagattgtataataattaatatattaatatcgttgctcaaaaaaaaaaaaaaaaaaataaataatatattaatattttagtctaccgacgtggcagagaacgcggaaggatctaagctgacgtggcgttatagtttgataataacaagtccacgcattattcgaaataaaaaaagatcttttcctttcaccaaaccaaaagttatcatatctctctgccaaatactattttctcaaaaaataaaaataattccaacgactcttattaacctcttcttcagtaacattcgctgctacaaaatatcttcttcttctttcttctgctctctctctctctctcgcc

SEQ ID NO: 9516 - DNA, 3000 bp, Unknown
  misc_feature (1)..( 3000): cDNA_ID_2183321_gDNA_ID_1972139_Annot_ID_179225 3000 nt of promoter + ATG
agaaaacaggatgatgatttatgttaaattagaagaaactatttattattaaatattttacatcatgaaaggagataacacctcgagtaattacaattagttttgagttaaacttcttttaactattcttaaaatcgaaatattagaaattgacattatcattttaaacaatttcccatgaaagccaactttagatattactcattatacaaaatcatgatctaatgtttttagacaatgactccaatgagtgctgacttaattagaccgtccaataattcaggtgcaattaaataaatggaaaattttaacattatgttactttctaacatatatatcattggttatacagtttgcagacccctgcaaggttggccccaactttagaactgataatataagaaataaaaaagcattaaaaagaaaaaaaatcttcccagcttcaagtcaggtccatgaaatggagaagtcagcagtcaaacatatcacagctcatatacagacgagattataaaagggaaatagaaaaagaagatataatttcacgggcagtctaaagaactttggttatgaatatttcgtataatttaatgtcaatttgttgtatgctttatgaaaagagagaaagagttctaaaaaattgaaaatgaaataaataatgtagagaaaagagagggtcggtcactgccacaattaagcggaagtggagaatggttggtatttgttgtgtccttcaaacctcaagaagcttcaatctcaagatccttttgttttattttctgcagattactttgtaaaatggtttattaggtatttttatatttgcaacagtctttttaacataaacagatgatatctaattctatcgatcttgctaggaaaaacaaaaagagaattttcttctcgagtctttaacactttagtgcagaaatttatgtggtacgcttagtcaaattcaataattgtttgtaaatgaatccacagagttgaatattggaaaattaatatattgcggctatatatttcaagataattaatgtttcggattttttttcggtacatgctttctaattcaccggaatattttatttctcattgacaattgtgtttttaactaaaattaacaccaaaaaaaaaacagtgttttaactaaaggatgtggtttgttgtttatgttaaccacaacaataaattctgaagagaaaaagtttgcaatagagactgaaccaggtttacaataaaattccttaatggaagggaaataaatcaagaaaacaaaacaaatattgcatggataagaaaaacacgacacttgtctatgcaacttgtttctttagttgcatgagatcactttaatgttaaagtcctcccaaacagtattggattcttcgttataaaaagacctcagggtgattagagccttgtccttgtgaatttgaatcatatactccaacatgtatacacgtacacacaaatacgtattcatatatggcactggaataatcaatatattcaattctgagaatagtagaatagcactggcctaaaaaaaaagcattagttaaatttcagcatattcttgtatccatgccatgataatggttactttgttgttttattgtctattatttctattatatatgaactttcaatttgaattttagatatattggcagtacaaatacaaaaattactttaaccactatagctcctccgagcattcgtcactgatcagtgagtgtgtgtttatatatgcgatattaaattaaataagtttttcttcacactgtgtgtgtgtgtgtgtttgtgtgcgtggtaacaataaagttctgcgtagacgacacgtatccaatattaatggagttccgaaagaaagatcttctggcaaaaccatcatatatagagacaacagtttattttatcttttaaacaaaaatacgatcacattttttttacctaaattgctaataaaaagtacatagaaaatggtttacaaatatcagccattaacatatatagttcaatattacccgacaaacaaaaacatagtttatttatgattctatctcaaaagaatttaagacgtcaaaagaggtaattagtaacatcattttattggagatattttgcaatgaaaactgccatgaatagaaagaggaggaatcagtaggtctagattaagtgaatgttctacttcatttttgttttagtcaaaaagatagtttcactaaatttattttaaagccattaagtggagggcttgattccttccatcacctttatcttgccctcaactttttttttttggatttacttgcatccttctccattaaacaaaccaaacccaaatatagtgtgtattttatttaataattatgaccagataaatgtggtagactaaaagtttattttacgtgaaacaatctatgtcattctttaactatctagaagaatttagtgttcattaacatgtaaatgtgaacgaataatataatgtgagtaatcgatatgcaatcaatccttaaactttgttaccactataccttgtagagaataatagaacaaaatcaattctcatatgttaattggtattggaaaccccatttcaaaatcaacttgcatattaagtaaagggaaaacaaacatgattgattagtctttattccaccactatattactagctttataaattcttggaattaatatcatctttagtgccctaaaaacaaagaaataaagctagttttctctagaggagaagaaaacaatgttatttcctaagaagagcataaagaaaactacaacatgaagtcattttctaataataaagagggcccaaattcttctttcttctcacccaattggacccttcctcaatcccttctcctctcctctctttaaattccgctaatacccttctcactttcactcttatatttcataaaaacctttttttatatctcctctacctcaaagtttgagagaaagaaagagagaga

SEQ ID NO: 9517 - DNA, 3000 bp, Unknown
  misc_feature (1)..( 3000): cDNA_ID_3042231_gDNA_ID_1972139_Annot_ID_179208 3000 nt of promoter + ATG
ttgaaccgcgggtctaatatggtagcgatggctagaaccaggtagtttttatcccagaaatcgtcaaatttctttctcatgtttacaactagagagctaatgaaatcatccgggttcttgctccactcaattaaccggaggtgtatgtcgcatacctctgggaagtacatattggcgggtaaacaactgctctttgtgaatgcatttatcacttcaacaaagactttcaagaactcaacaattgttcctaatctctcccattccaaatcagatggacataacacggaatcaggatcatgttcattcatgagcgaaaacgcgctcttttgctctaaagcattctccagcatggtgcatgttgagtcccatctcattgggtcatcgatgcataggttcctttcacttacagctcccgtttcaactatccactggttgaatctatcttgaatagattctgagcttttaacatatctaatactctctcgaataatgtttattgtgtcacaacaagcttccagggaatcttgaaccatctcgttaatgacattaactccacagctcacatcaaacaattggccgtaacagtaaaggaacttattctgcgataaccggtctctgattttactagctacgttctcactaaacggaggagcatgactcgacgccatagaaaacaacttccggtcaatatcccactccatcaaacacgtcattataacttcagcaagcatctcaccactatgagatggatcaaccataaagaagttcaaaactctctttttcaattcccatccttcatcaatataatgcgctgccaaacacaagaattcatcagaatcacccgaaccactccacacatcaacactaatactaatcttcccaggtaacttatccaacgcttcgaaaatcttatgcttctctttcgcataaatctccatacaatcagattcaactctttcaaaagcaacaagctcaaacaaaggctgtaaatttccaataaacattctgaatccaacatcttcaaccatactcaacggataaccatgtaagataatcatcctggctaaatcgaatcgacaccgcctctgatccaaacccatactcacaacattaacatcttcatgttcttctttctcatgttcatatctaacattcactacactaagcacttcttcatcctttatccgctcattagctaactctttcttcttccccttaacgaaatactgagcaacaccgttgttgttaccattagttctcctcctacatctaatcaaatggttcctcaaatgcgaagtcccgctcgcgcttgagccgctaagtcgcttcttacaatgcctgcagattgcaatgtatgtctcaccttttctaactctatcgaaatcattccacactactgatttcaatctaccagattttacaatcactgcatctgacaaatccatctcattgtttatcatcagtttcttctgtctcctacacatgtaaacaaatagcagaattttcaccagataattcgaattcaaacaacgaaaccaagttacacaaaacctaaaatctcatagtttccatttgcataaagcttttaagaaaccatcgaattgtcaagaaaaaaggttagaatctgagctctaaagcacatgtacctcttcattcaagtcgcagcggtaagcttctcactggtggtttaacggcggcgaagtctctcagtgtcggtggtcgcggcggtagggttttaagaagaggaagaaaaaaaagctgaaagcttttctgttagcgagagatatttttttgaaacggcgaacaaaaagtaaatttacgaaatgagaccttggattcatgtaactttagaaatatagcccaaagttagtttatcatcaaaattgtccttttttttaaatctaatattaaattatattcaaagaaaaataaacttttatacatgtaaatgcaaaagacttttcttaaaaattaaaagagatattatcgatggtgttatcttgtcaaagcaaaccacgtttggatcccgcctttgtatttctcacaactccctctccttgttgtccttaactggtttctaatgtttttgtctatcaaattgtactttttcgattgcttatgttcatataaacacacttctctccacgtcgcaaggtttgagcctgaacgtctgcgatatgttgttcatcttgtcgaacatagagccgctttggaagctcgcagtcactgctttgaaacccctctccgcgttgtttaagtaactagagttgtatgactcagctgcttttgaattgtggagccgatattgaggctcagaatgaagttggacatacttctctaagaattgctcttcaaaaatgaaaatctcgatctttcaagtaaatttgtttatcttttaaactttgttgtgagtctttgtaaatgaaaaataacatgtttatgtcctcttgattgcagcttcttcttgaaagaggtgtcaatctgaatgcttttaatttttatttgcataaagcttttaagaaaccatctttataaatatagcccaaaggtatgttattatcaaaatggtgttggtgaacatgttgatgttgttacctcctcggatgtgtctctcgacatggatttaatcaaattttttttttaaattgtttttttaataaacttatggtacataaattaacagttgtatagtcttatcaaaatcacaaaaaaaaaaacgatgtagtaaaaatattaatagtaaaatctatcaagaattaataaaatattttgaaaacatacaaaattccaagagaaattatagcgggttgcaaaaatggatcaccacaaacaataatagcaaacgagaacaaaactcaaaacaatttaggtctctgaaacagtatatatactcatggccatctttccatcaaatcatccagaaaaaaaaaacgaaaaaaaacaaaaaaaaataataaaacaaaaaaaactttttatttttaaataaaaataaaataaaaa

SEQ ID NO: 9518 - DNA, 3000 bp, Unknown
  misc_feature (1)..( 3000): cDNA_ID_2183293_gDNA_ID_1972139_Annot_ID_179214 3000 nt of promoter + ATG
ccttgacggagtaaacataagtttcgaagaagaaactgatacaagtgacccaggatccgacccgatagattcagaagatccaaaagtcagcaatttctgacccggtgacccgagatttgacccgtcggaggagaccgacgagttaaaactagaagccggtgatgaaaaccgatcagcaaacaaaaccttatcaggattctcaacaacctccacagaccacaagatccatttcttcgtcgctgagatgtgcggctcacgatcacacgtcacagagttcctccacggcggagctcctccgttcccacgtaaatatttctcgttccacgacatgagtttaaccgttgactcttctttgattggttcccagtcgctttcatgctccgcttgacgaaacggcggcgtttggatgactttcgcgccggtcattcccagaagaaacgacgactcgctcgccgttaaatacttgccgtagcagctcttgagacgtatgaattttggtttacgtggaaccatctccaccgtccatagcgattgccgtgaggttccgtcagagctttgacggacggttttttcatcctcgacggcgtagatgtatgtatcgtgacagctccgtaatctaacggccgttccattattgaataactccattcttcttcttcttcgttaaggacacggtgagattttgttatgattgtctaactatttatacaatattttctagtctactatttgttctccaagtattacaatttcattaaactgaaatgttgcgcgtagattttgttaggtgacatatgtgttttcttagttatttcaattcaattatattgttactctaataaatggatgattttgtcaaaattaatttccaggctgtatatcattagtctcctccctgacttggtccagatgtcacagcaagatacattttttttgtcttttttatgaagctagttgtaatttgtgatatttctatatcaaaaaaagtcaacccttttttgttcttttaaaaatttagtagatcaatgactatattttggggtaaaaggtagatttatagattttgttttgtaagtttcatataataatggaatccaaaaaaaagattataaaattaatggcaataatttcagtgcttgctaatattattttttttaatagtataaaatctcttataattaagtagaacacgcttttaacttaagagttaagagtatcaatataagcaaacttaaaaataaataaaaggttaagaagaaaaaagtatagaaaatactatgacttttatcaattactgtctattaaataaatctaaaatctgatatattatactatttcataatcttcttgtttatttattcatttatttttgggtgtgcaaacaagcttcaaaacttggatagtgcatatacgcggtagcactagacatgggcctatattgctgttcaacaaaatcaatcatagatttctatgggtcgaaatgaaggcccaataatacgattttttcaaacggtacaagcccaaagcataatttgaagtttcaaaagtctcatgattaaatggagaaacttaatcacagagacattattaaagagtgagacaccaaaaaaggtcagctttattgggtcgcatcgcatcgcattaattggcccttttttttgaatcatgactggaggaaaggctccaaatcaacggctgtatcattgttccttagatttttgttgcaatctttatgtttgaaggacaaaactcatatgtgaacaaattaagctataatttgtttttcattaatgtatacgaccaatgagcaggacctgcagatcaagccaagagatgtgagtatcctaatgaatatgtttgtttgtttcttcatcctgatatgcaacaagatgtaagtatgtaagttatgtaacattcagatgtagcatcaaagattactttcttaatttaatttttggatctccatgcagtattcaatccaaaactgtttgtttgtaagtttatgaaaaaaaaactagaggtaaaacaagtcactttttaaaaacaatatagaaaataaacagttttgatgtcaaaacaagattctgtaatttgatggaaaattagcacaaaacattattcgatggttcaaacgtgattttacggtttaacattaaaatgtgattccgcaggattttcatatcgaaaaataaagtgcgtataacgagttctagtaggtcaatgagcttactcaaactatcccataggcaacttcatgacccataatgtgttaaacataaaaaaaaaaattcaaccacccatcgacccaaacagatgaagaaaaacttggtttaaatattctattactcaaaagctctttatcattttactccactaaaacagattaaggccactcaaaacacccttcaaacgagttgagtttaatttgattatagagttgttgatctttggctcttctgcttcttcaccaaccatttctgcataaaattgttaaaagtagaagttccttagattttctagtaataattcaaagactgatataagcatccatttccattattgacaaaataaagctttcactttaatctgaactatttttttccatttgtctacaatgtctgtcgtcactttttgacttttctttttgcttctatattcccatttgctctttactcacattcatatactttctcaatttccttaatttcaaggagtgcaaaaatattgttcttactctcattcatatactcttttttaaatcagaaaaaataattgtttttaggtcgagtatcactcactgcctagggagagtcgaaaaccaatttttttttaaaaaatcagtaacaaagagttattatagaataaaatcgaaactcttcagtttcaagttcctaaaccttcacgtgcctcttcttcttcatcttcctcacaacactgtccacatcgaaaaagttcagtcaacagatttagaatcagatctcttcctttctcttttacatg

SEQ ID NO: 9519 - DNA, 3000 bp, Unknown
  misc_feature (1)..( 3000): cDNA_ID_2183297_gDNA_ID_1972139_Annot_ID_179216 3000 nt of promoter + ATG
cttgatttgacaatctctgcatttaatgaagtatggatcttgagattcgtcccattcaacttcaaatccaaatctagtgaagaaatcttgaagaaaaccaagaagatctccttgacagccttgttcagataacgacccgtgggttgattcacaaccgtggaggatccgacccggattctttaggagtttacagtcccaaggacaacgagaacagttggggagagtaaaaggagagcaaggacggagaagagagagacgagagcaagaagagtcagagactctgaaaggtgaaccggttaagtcgatgaaccggtttggtgaggaggagaaccggagagaagaacagttgtttgtgttccggttagtgtttgtaatgggagagagggttagagaagaggagattgatgagtaatggaggatagagaaagtgaggtttttgattgtgatggtggcgcgtgaagatgagcattggatctggaagtttgggtggccacatcccggagaagctgagaaagggtacggtggtgaggagttgaacggtgggcaatgaaatgaagaagaacatgaagtagatgcagaggaaggtttagtactaaaaatggtgagaacaaagatgagtagagagaaacatctccacggtggttgagacatgtaaaagagaaaggaagagatctgattctaaatctgttgactgaactttttcgatgtggacagtgttgtgaggaagatgaagaagaagaggcacgtgaaggtttaggaacttgaaactgaagagtttcgattttattctataataactctttgttactgattttttaaaaaaaaattggttttcgactctccctaggcagtgagtgatactcgacctaaaaacaattattttttctgatttaaaaaagagtatatgaatgagagtaagaacaatatttttgcactccttgaaattaaggaaattgagaaagtatatgaatgtgagtaaagagcaaatgggaatatagaagcaaaaagaaaagtcaaaaagtgacgacagacattgtagacaaatggaaaaaaatagttcagattaaagtgaaagctttattttgtcaataatggaaatggatgcttatatcagtctttgaattattactagaaaatctaaggaacttctacttttaacaattttatgcagaaatggttggtgaagaagcagaagagccaaagatcaacaactctataatcaaattaaactcaactcgtttgaagggtgttttgagtggccttaatctgttttagtggagtaaaatgataaagagcttttgagtaatagaatatttaaaccaagtttttcttcatctgtttgggtcgatgggtggttgaatttttttttttatgtttaacacattatgggtcatgaagttgcctatgggatagtttgagtaagctcattgacctactagaactcgttatacgcactttatttttcgatatgaaaatcctgcggaatcacattttaatgttaaaccgtaaaatcacgtttgaaccatcgaataatgttttgtgctaattttccatcaaattacagaatcttgttttgacatcaaaactgtttattttctatattgtttttaaaaagtgacttgttttacctctagtttttttttcataaacttacaaacaaacagttttggattgaatactgcatggagatccaaaaattaaattaagaaagtaatctttgatgctacatctgaatgttacataacttacatacttacatcttgttgcatatcaggatgaagaaacaaacaaacatattcattaggatactcacatctcttggcttgatctgcaggtcctgctcattggtcgtatacattaatgaaaaacaaattatagcttaatttgttcacatatgagttttgtccttcaaacataaagattgcaacaaaaatctaaggaacaatgatacagccgttgatttggagcctttcctccagtcatgattcaaaaaaaagggccaattaatgcgatgcgatgcgacccaataaagctgaccttttttggtgtctcactctttaataatgtctctgtgattaagtttctccatttaatcatgagacttttgaaacttcaaattatgctttgggcttgtaccgtttgaaaaaatcgtattattgggccttcatttcgacccatagaaatctatgattgattttgttgaacagcaatataggcccatgtctagtgctaccgcgtatatgcactatccaagttttgaagcttgtttgcacacccaaaaataaatgaataaataaacaagaagattatgaaatagtataatatatcagattttagatttatttaatagacagtaattgataaaagtcatagtattttctatacttttttcttcttaaccttttatttatttttaagtttgcttatattgatactcttaactcttaagttaaaagcgtgttctacttaattataagagattttatactattaaaaaaaataatattagcaagcactgaaattattgccattaattttataatcttttttttggattccattattatatgaaacttacaaaacaaaatctataaatctaccttttaccccaaaatatagtcattgatctactaaatttttaaaagaacaaaaaagggttgactttttttgatatagaaatatcacaaattacaactagcttcataaaaaagacaaaaaaaatgtatcttgctgtgacatctggaccaagtcagggaggagactaatgatatacagcctggaaattaattttgacaaaatcatccatttattagagtaacaatataattgaattgaaataactaagaaaacacatatgtcacctaacaaaatctacgcgcaacatttcagtttaatgaaattgtaatacttggagaacaaatagtagactagaaaatattgtataaatagttagacaatcataacaaaatctcaccgtgtccttaacgaagaagaagaaga

SEQ ID NO: 9520 - DNA, 3000 bp, Unknown
  misc_feature (1)..( 3000): cDNA_ID_4255143_gDNA_ID_1972139_Annot_ID_179217 3000 nt of promoter + ATG
caatcaaagaagagtcaacggttaaactcatgtcgtggaacgagaaatatttacgtgggaacggaggagctccgccgtggaggaactctgtgacgtgtgatcgtgagccgcacatctcagcgacgaagaaatggatcttgtggtctgtggaggttgttgagaatcctgataaggttttgtttgctgatcggttttcatcaccggcttctagttttaactcgtcggtctcctccgacgggtcaaatctcgggtcaccgggtcagaaattgctgacttttggatcttctgaatctatcgggtcggatcctgggtcacttgtatcagtttcttcttcgaaacttatgtttactccgtcaaggtcgggtacattgtccccaaaaccaacagaggtacgcttcaattctaattcatataattttgtcacgcattatcacaacatactatactatataattaaaatattgattttgggggtattttgttttgtaacagaggaaatgttcgaagaagataatagtagaaaatgtatcggcgatggaaatattccgggatgcgaaatcggtgcgtttacgaagctatgcacatcatgggaaatatttgattgctgatgacgatgaagagggtgtgataatgggcaaaaacgggtcatctaaagaggctcgatggagagttgaaatggtaccaggatccgaaaaggcgatccggttaaagagctgccatggtggatacttgacggcgtccaatgagcggtttttgttgggagcgaccgggcataaggtggtgcagtctaggaagattcgtgccgatgagccggcgggagagtgggagccggtgaaagaaggttcaagggtgaagttaaggagcagaaacggcgggaattatttaagagccaatgggggagtgccaccttggaggaattcggttacgcatgatttaccaaaccggagtgctacgcagagttcggtggtttgggacgttgatgtggtcgatattcatgggaccggttgattcattactttaaaacttgtcttgaggctttgacattttgtttgcagcatgaataattttcatattttgataattggttggatgtaattggaaatgcgtttggaatttgtgaaaaaaaaatcagtaaacatagagttgcaacacttggtgtagagggtacttgttctgatttaattttgagagtaatcttagaagagtgtgacttttagacttttagtcctatgtcggaatgagctgtagggtcaatgggcttcaggttattgagatgactagtaagggtcctttgaggtttcttaatgatgatactctacgttttaagtgctcaggtttgttacaaattggtgatgatagcagagaagagagtgtagaggctgtacgaatgtattatatgtttccaaattccacccttaagaatatgtacgttagagtgttcgaatttctctatttgatatagcgtattgtttgtttgagaacgaacaaatgaagtcttatgagtttttcgtatagtttccgttttttgttgttctttcattttcttgttctttcgggtattttgatgtattttgattgttcaaggtttgatatgtagaaatacaaaaaatgatgtcccaaacaaacaaaatgaacatgcaaaattatgtagatgcttcaaaaagatcattaagaatagaagcccccaacctaaacaagatgggtttcaattttttcaagtagagcaagaagcgccaagcctggtgcaaaatatgccattgtacaaatatgtatataaagcatatttaaagcaaaataatgcatgtacaaattacgttaaccaaggaaattaacaatagaaacacaaagagtgtactaattgaaactatctacaaataactaatcgacgtctttttatttgaacgtctttttaattgttatgattagtgaaattatgacattaagtaaggttttcttagttagctaatgtatggctattcaattgttatgttaggctattttagttagtatatgaatttaggcagtctatgcaaatgatttcgttttcattttttcatatgtaaacatcaagatcaagtaacgccattcgagttgatattttttttttaaattagtgtgtgtaaattttggaccgcttatttgagtttgctaatgaagttgcatatatattacgttaaaccataggcaaactaatttgaaacatccgattcgatttcctgtaatttttcttggttaattgaccaaaatcaagatcttcagaaataaaataaaagacgaaagaaagctgtcgcaaagcagattgtgttaaaaaaaagtggattgggctcaaacgcaacttgtccagcccgtgacaattaccctatacgcaagtaagagtaacgtatcactggcaaaagttggtattagttacgatatctttgtcatgggggcatgcatgggcatggcttaagagttaagccttaagaagagtcccacactcgtgactctcatgatcgcttgttgtttcttacgggcaaatacatttaactttattcttcatttattcacctatattcttttggataataacttttctctatataaaataacaaacatcgtacgtttcatttatttacaacaagcgatgagaattaaaaggagaccttaattgatgatactcttcttttctctcggttacaacgggattattacagataatgataatctatatggatgctgacgtggaaaaacaaaatttggtgaaacacgtcaattaagcacgacttttccatggctagtggctaagatcgtttcatcacatggctatatcatataatacttggatgaattcaaaataaacgactgagaaaatgtccacgtcacggcgcaccgctttggacttaagtctcctataataaatacaacaccaaacattgcattccacattaattcgtcttgtgcaaaaaaagacacttcttaagcttcaacaagaaagaaatagtattcgcatagtattagaag

SEQ ID NO: 9521 - DNA, 3000 bp, Unknown
  misc_feature (1)..( 3000): cDNA_ID_2183284_gDNA_ID_1972139_Annot_ID_179211 3000 nt of promoter + ATG
ttatttaaaaccttttaatatagatcgatcctttgtttattttcagagttcaaaattttactctgaatttaatcaaagagaatgtattatatttgaatatagacaaatcataaattcaatgatgctaaatcataaattaggtttatgtggacacatcatcttcttctttttttggatcaaagggtgacatatcttttggtaagacgtaaatacttaatgtgtctttcttgatgatgttaatttctgtaaaacctcgtaccgtacacattgatgaaaatagtgagatcttgaaaatagagaggtcgaaaccaccacactacactagaccgtcttggagttactatagctacatctttgactttcattgttctttgcacgcaacttatccaaatcaacacatgttatcaggaaacgcggattctgtatttctcatgtgttacaaaagcgaaaagaatatatattttgaaaagttcatattataccaatttgacatcaaacaatttaataaatttgtgaataatttaagaatattcaatatattatgctgctgcagttgaaacctatacacaatatgaatttttaaagggggaaataaaagacaatctttaaagttgtaactcttaattagttgagcaatttttttttatccgggtatgattttgggatatccctatatatcggtttgtttgaatttgaaattatttttctttgtttaaacatggataaactgtaattacgatatattttttttgttttttcttaaactacaactaagatctatttggttttaatgttttataaattgagtctttgttttctttctagaaaaaagttatgaatcagtcgtagttaaaagaaaaatgtatagacaaacacacaaaaactataagatgaagaaatttcaaagatgtttactttccggaaaatttgacgctacaaaaagtgagaaagaaggtgagtcgtcgtcactctgagttggtagcaaagacgcggaagtttggaagtatctagggtttattaagtcatacataaagtaaatcataaataaagttaactcgtaattgagattttgtttaattactttttccacaactctcggtaaactgtattgttctcttctaataagtcttgggaatcagagccagattgttttttttccataatataatagtataatctctgtggaaactataaaaagtagcagtacaccatagactatgaaatttcaaattcattcatcctgttaagggctcaactagttaagtaataataattacactccaaatctgtaagtactaaattttgtaacaactcctaaattacacatacgattttatgtatggattacacatctattaatacgaaccatgaaaacatttcacaagaaagttttgattttaatttatatatcaaattggtatacgatgtatatcgtattttgttgttgtttgtttacgtcatgtatatctcatacttaccaaattaaatattgtttcggtcaatcataatggaaagtgtaaaaactattatttgaatctgaagatattcttatttcaaatatttgtcgtttttgctcgacgacgaactgacgtacatgttttgatcttacagaaaagaaaatggcgaccatcgaaattccgaaaagattccctaggttacggtccaaactcaagttaggacgtggaacatttgagatttgtaatgatttaccggccttgactgttaatagatatacatagacattgaaagggataacatgaacttctgacttaatttcacaataagttaaaccatgactgacattttggtgcttataatagtcaactcaaagacatatccatagatatgatacatttaacctgttagtcaagatttacaattgaaatagaattatttgtaagtttttaggaatgtacttatatattgatattgtcaaatgttaaagtatgtgcaaatatatcttgacccagtcgtaattataattaatgaaacacgaaccgggtacgtttgtgtgtgtgtgtatccaatatcacaatgtatagaccatataaactaaaattattgcatatcatagacttcgctctcacatcggatagagactgtttataaggtatctaatacaattaagaaggcaaaatcgctaaatacacaacaatttgtggtgaaatatataataaaatattttacataattttggtggcaagaaaataaataactgatccgttagttatgatattatccatgaagggttttgaatatattttatgtggtgaggttgaagtatgaaaccccataaaaaataggggagattgaagatagaaggtaatggctgaacctcattataaagtgttgattggaatttggaacacaacttagaacatacagtatatagttattgctgatatattccacacgtcttggttttggaagatatatgaagtctagactacaatatgatttttggaaaatttaaaattttatagaacatgaagtcaaaatagactatgattttttcaactacataagcaagagaacaaaaaaaaggagggatttaaattccaactcatgtctagagaaaaaaaaatcaactacttggtaccattgtgtcccactatttactattttagcaacggtacagatcaggcaatcaggacacactttcctggactctcttgtagtcttgtccctttgaatctcctaccgacccccaaaaaaaaaaaaaagtcttatttaattatttaataatcatttattttgtgtatatgtttattattattagcatatgcatcccgaatttgaccgtcatgcatgccgtaatctaagaaaaggataatcaaatttgagcacgttcatttcgaatatatatatagacgccaaacatagagactaaacctcatcaaaccacagctgttcaattcctatcccacacaaaaaaaaaaaaaacacgcacacaaaaacaagagctgtgagtttgatcaatctcttcaaaaagtgtaacac

SEQ ID NO: 9522 - DNA, 3000 bp, Unknown
  misc_feature (1)..( 3000): cDNA_ID_2183269_gDNA_ID_1972139_Annot_ID_179207 3000 nt of promoter + ATG
acagaatcaaaccatatacgattcgatactagtgattcaattaagtaagcaaaatggtaaaagattacctcaagaaatgctcttgtaatggaaagtgaacctaataacaatatcccatctactgcaaaagacacctgcaaatcataaaaacagaggaaacatcaaaagtggaaacttgaggataaagaaacaaaatttcccacaaaactgaagaaacacttaaaagctttaatggagaagaagaagagactcacgagtcgaggagacatggcagctggcaaaatccgtcgcgatgcttttttagttcgtttcgagactttcttgaacatgcttctcaagaatctgatcaaaagatcgacactgctttctctttcgtcttcttcatcatcatcgtcgctaaatccgtcgtcatcgggaacaacatcgtaattgtcaccaccgccgaagaatctatcgtctgattcgtatcgcctacgcgactaaggataaagagattgagtaaattcggattcggattcggattacacaattctatgagtaggagataatcagaacgtacgtgggagctagacgaagcgagtgagcgatttaggcggcggaatcggcggcggaggaatatagagttagaagagaagggagttacagagacaaatctgtgtgaggcattgatgagagttagcgatggtgatgatgaagatgatgataaggttgttgtagctgcggccatttgtgagcagagagagtaacaccagatgattattcagtgattgtaattaaaacggacctttttgataattaaatacatttgggatacttttgtaagtatacataaacaaaaggtactgtttcgtagtttttactttggtcgtgaccgagttttacttttagacttaaaagacttttttgataattaaataaaacctcggctattttagaaaagctacataaatatagggtaccatttatacttttatttgagagagaaaatcaatttatttcggctaagtctcgattgcttatatgtttctcagattatcgacctctcggttctttgcataaaagcatacatagggtcgtaagtagtgacgactaggtaaagaaaaagtttgctaaaagtgatatatgtaaaaataatttttttgttaaaagtgatatatgtgcaaaatatgattttagacttgatattgaagagtttacaaagcgggtggtgggagaagccacttggatccttggatgtagccgagggataggaaacggttagcttctttgtcgtcaatgtcttgtgtgaatggtactctcttggctttgtgtgatcctggtcctgaacacttgtactctccgtagaacacggttctgtcatttttgatataatcagcataaaggacatggaccgattgggtgatattcatacgattttttatgtaatgtgaaaagtgggacttacttgtcatgtgcgggagtcttgttttcttgccatccggtggggttgacaacgctggtcatctcggtgtaggcataaacaaccttagggtggctcatccatgctcttcccaaataaattcctccaccggttccagtcaccttgcagtgcacgaaagagtatccactcttctcttctgcgctctttcctgcatgcgctgctatcactctaataccgtctccaaccacgtgcaattgtgttcccttttgaactcaaacatgcattagagatctcgcactttatgtattaagaaataagtatgagatgttacgtaccaagtacatagaggttccacttccgaagatgaaatcgaatgttccttcaacgtaacaatccttgaagaaatggtttcctgtatcgtcacagattgtgtcttggaaaccgtagaatttgcagttgtagaaagcagcaaaatttccggagattctcatggataaagcttgtgctcccttagttttaccatctggtgccggcgcagtgttctacatatgcaaaaaaataaatcactcggccatgaaatagtcgactagtcacatagatgtatgatatatagtaggatcacttaccttaacgacgatgttaacggccatgaaatagtcggataagataatgagagaggcgctatcaacggttccatacttggcggcggtaccgtcataggtgataacaggcatggcattgggttgtcccatcaatgtaatgaagggtttgttcctgtcgatagtgaccttctctttgtattcaccaggagccatctttatgatcacccgctttgtgttccctgcaggaacgctctttattgcgtccgttagtgttttgaattcaccaccctttggattcacctgcaataatttttacatgtttttcaaaaaaattgtatcaaaatctattggtacaaaggatgagtttaagacaataagtgtgaatagtacgttgatgatacgtggagcagcctcagcagctacaagagcaggatctaagcctttacgttgagccaatggaccaacgttggcattgaaccactgcgccacttggggtttgccctctgggattggtgtcacatcatctgcgaacaccatcggtgtaacaaagaccatcaacaggcctaataaaatggacacatttgtgtatcccattttttattttatttttatttaaaaataaaaagttttttttgttttattatttttttttgttttttttcgttttttttttctggatgatttgatggaaagatggccatgagtatatatactgtttcagagacctaaattgttttgagttttgttctcgtttgctattattgtttgtggtgatccatttttgcaacccgctataatttctcttggaattttgtatgttttcaaaatattttattaattcttgatagattttactattaatatttttactacatcgtttttttttttgtgattttgataagactatacaactgttaatttatgtaccataagtttattaaaaaaacaatttaaaaaaaaaatttgattaaatccatg

SEQ ID NO: 9523 - DNA, 3000 bp, Unknown
  misc_feature (1)..( 3000): cDNA_ID_3042267_gDNA_ID_1972140_Annot_ID_179249 3000 nt of promoter + ATG
aaacttcaaagagtttgagagattcctcaaacgaatgcatggtatagcttccgtttcatattctcctagtggaatttagtgtcttctcaaggttttataacctggggttactttcacttgcaggtgaagccgttccggatcttggtttggctccagggacacaagagaccaaccccgagtgaatatatatagtcctccaccatgctactaaaaacacttattagcgcctggttacatataataagaacgtcttggcttgggtttaccaattcagcatagctaagttggagggaatcaaaaccaagattgtaaactgagcttgtaagttgtaagatgaatagtgtatagaacaatataagtggtatgtccattgatatttcagaagaaattgctagcaacattacaggctgtgttacacacaaaaagagctataacaacaaagaaattcttaaatctctcaataatgaatttcatctactttgcttctctgattctatatcctattttctacatttacacctataacaagattttcatgtttcttgaccacacaacaaagcttgagattcctgatttttgaagatcatatgttcactgttgtcatttacaggaaaatggcaatctatgaattgatcccattttcttctcattcctttgaaggaccacccggaaggggatccttccatgcctgatcctgcagagctttctccttcttctgtatcatggaatgttccataagacggcgatggagacatggggatgttcagagaagctgctttcattatagccgctctgtattcttcgtcatgatcctcaacaattgatttctggcgtacaattttctgctccaccggaatctgcataacttggtcctcttccaccattaactaaaaaatttcaccacaaagaaagtgcgtttgtcagaactcaccatctccaaaagctgaagcagtcacaaaaagcaaaacacatttcaaggtactcacatcgagagctctctgtgattccctttcaatccagatgatggcatgatccgctgttgcattacaggagagaacaatctgctcaaatctcccatcaactgggacagctgttctcacaacaggtggatatcttcctaatctgtataccaagggcatggttttcactttgaaacccgtgtcttcgagttgacgaaaacgattttgaagcacatgagtaaacataaagtataaatacctcaagggcttgcgcacgacgatatggtataacctaccaggagcatatagacgccttgcatctttgagcttcctctcctcgaatgtgaatgtatctttcaaacatgtgagacacaacaagcatggcaagctgaaggtttaagatttatacaagagcatgagatgtttttcatcgtctaaacttaggcttataacataataactgcttttgaatttcatactgtttcattaccagataattgacttgaagacattctccagagctgtggtagtccgaggtaagaaatcatcctggtttatccagagcagcacgtaaaatggatcagaagagtcacctaaacgagtcaatagaggctgatatatacaatcatcatacctgtagaacaacagagttgatgacatctgcatatgtcactgctagatggagagacatacatcttggaggagcaatagcaaagcatctaatcctctttctctcaatgttccccaacctaacccggttctgaatcacgaataagacaagcaaagaaacaacccctgctcctaacgaatgtccaacaaacgtcaaggaatagctcgggtttgcctcgagtaattcccttagaaccacatgctcctcttcaaaaacccacatggccgcctttaacaacccgttatgtacataacctccatcaaacttagtctgcccaagtttgttatcaagaagaacagcataatcacactccttagctaaattcagccctctaatagccaagaccacatcaccattctcatgatccaagtagatcatgtaaggcgtcacacgaccctcagtctggtcatagtctttcttcagaataacatgatttggatcaatcccataaccatcaggaggtgcccacatagggtcatgaagattctcctcatagacggctaagatcaagcggcagatcctagggataggctcaaactcatcagatgtagctaatccccaattctcactctcgtgacctgctgagtataaacatttcttccacaaccaatgggtacaacccaagcagtacacacattcaagtacaggaacacaacacagtatcgacatgagaacctatgaagcaagcaagcatcctctgttgaattttctggcgatgggatcggagtactccaccagaacccactgacacgagattagtcagtgtggatcaagaggctctaagaataaagacagaataatcataagctggtcggatcaagcttgtgttccaagatttgtgtccgaaaccaccaccaactactctaaaataaaaaaagaagaatttttaacaatcaagtgatttcttttggcgctgaagaagacacgaattagagagagagaagacaagtggaatttgttatctacgaaatgttcaagtcaaccatagttcgtaaagacgaaacaatgaaagaaacttgtgggcaagaagaatctactcaccagtcaccatagatgctcgaaagattccattagcatcctcgagactagcggagaaagacgtgcaatgtagaaatttcgtcttcggaagctgtcgggtcgggtcgggtcgggtcgggtcggatctgtgctgagtgtagaagaaacttttgttttctataggacagcgtattaggatttaggaccaacaaatttgggcttttagctataggcccattaaatttgtcagcactgcatctgagcggtgtccacagactctatcgtatacccaagggtactggataattacctcgttgcattttttatttgtttggtcagcatatttttagttga

SEQ ID NO: 9524 - DNA, 3000 bp, Unknown
  misc_feature (1)..( 3000): cDNA_ID_2990282_gDNA_ID_1972140_Annot_ID_179262 3000 nt of promoter + ATG
ttattataaataggatattaaggaatatataggatatgtaatgtgttatggcctgcttaaatgctcttgtaagattctaattttgtttccagctcttaaagtacaatttatctcgttcatgaaactaatgggacgagctgcataaaatcaggtgggcatgtccattgatccaaaacttcttctcgccaacttccctctcataatggggaccttaggactcttattagttggcaagactatattagtggtgatcataggcaaattgtttggcatttcaatcatatctgccgtgagggtcggtcttcttctggctccaggtggagaattcgcgtttgttgcttttggagaagctgtcaatcaggttattatatatatgatgatttctgttttttgcttttttacgatgggtttagtaactgcagtgtttcttggagagtatatgggttgtttttgatgcttcccatctattattttttggaaagttaggctcacatcatgatgcaagcagttctattagtttacaattagtcatttaaatgaaaactagaaaacgatattgtcatgttttatggatatgacagctgaggtttcagttctactttattcccatgtttcctctaaggcttgattggtatttcttccagggtataatgactccgcagctatcttcattactgtttctcgtcgtgggaatatcaatggctcttactccttggttagctgctggcggccaattaattgcgtctcgatttgagttacaagatgttcgaagtttattaccagttgaaagcgaggtactccttcacaacactttaaaataagtcatttatcaccattcctagtttcaattgtaaatttaaaacaataaagccatgattgacctcaatatccttccgaagctcatgcattcttggggtaaaaatgactgatcctttactttctgaatttacttgcagacggatgatttacagggtcacatcattatttgcggatttggacgaattgggcaggttggtatcgttatctataaactttgttgcgaaaacaaactcctctagaagtttagatagtttgatttagagaatagtttggtgatatatgattaaattcgtctttgaccgctgctttctaaatgttaaacgcagataatcgctcagcttctttctgaaagacttatcccatttgttgccctcgatgtcagcaggtaatgtaacatgcttgccttgtcttgctcaatgtatctaaccagctctttatttgtctcatttcgcaccaaaaatctcttattttacagtgatagagtagcaattggtcgttccctagatcttccagtttattttggagacgctggtagtagagaggtaagagtagaaagctgatgaaacaagtcaaaagtataaccacacatcatccaaaattattgacgttgttttacctatacgtgcaggtactccacaaaatcggggcagatagagcatgtgctgcggctattgctttagacacacctggagcaaattacaggtgtgtctgggctcttagcaaatatttccccaatgtcaaaacctttgtccgtgcacatgacgttgatcatggtctcaatcttgaaaaagccggcgctaccgctgtaataacttccacaacttttctattctccttctgtcattgcacaacattttcaaagtaaactgattaaaatctcgatacaaaaactcgttaggttgttcctgagacgctggaaccaagtcttcagttagcagctgctgttcttgcacaggtacaagagataattcttgtagtcattaagtcaccaacaatgttatttggggtatttgttaaacttgtcggcttctttttcaggccaaattacctacatcagaaatagcaacaacgatcaacgagttcagatctcgtcacttgtctgaactagctgaggtatatatttggtctatttaaaaaactacaattcttcttactctccggtttaatggatcctatgatggtacagctatgtgaggcaagtggaagctctctaggttacgggttctcaagaagtacgagcaaaccaaaaccaccatcaccatctgaaacatctgacgataaccagattattgaaggcacactcgctatctaaccttttttctcgcttctggtaagaccacacaatttcaacttcttttgcttaaaactgtacagaaaccaaaatccttattttgaagaatcttagcggagaaaaagtaacaaactctcaaaattttgatgggatgatgatgtgttgaaatttctctagtttctttcctctgggggaaaaacaaaggcaaataatatttgtattcaacatattgggtctaatatgtgaatctatccctcatttatccgacactatttgtctgtactttctacctttgcttcacccttcaacaatcttggcaatcgcaataacatgacttgctctgataccacttgtagtacatttagctttgattgttggagctctcgagttaaatcacaagggtatatatatctagtgtggtactttagaccgcaaatagagaatagaccgtaagtcaacgaacttacatgtattgtttatatattgatcagtgttaattacatgattaatctgagtttaagacgactaatcaaattaaaaagctactaaaaatatgaagcggtccgattggatttattaaaaaagaaaagaaaacgaaagactggtataataaaaccggaaaattcaggtgaaatcaacaaaccggtttcttttgtgatttgaatgaacttaaacccttgttgatatcaaaagaagaaaccctagtctctccgactctccgtagacgacgaagttatcttcttcaattcatcgtctcttctctgctctgctttgctctagatcacaaattaaaagacttcattagtcttcctgtctccaccattaccttcttcctttttaactcagccacgacgagcagactattgttctgttttccttgtataaaaatg

SEQ ID NO: 9525 - DNA, 3000 bp, Unknown
  misc_feature (1)..( 3000): cDNA_ID_2183253_gDNA_ID_1972140_Annot_ID_179271 3000 nt of promoter + ATG
tcttcttcttccttaaacacacatctctctacacttcattttctcacctttctcttctgatttcacttgtacacgattaagcaaagattcaatttccaacattgacgtttctctcgagtgggtgaagtagaagaaagttatgtttaaaccctaaaatatttttttcctgagaagtcgatctctaatggctcttgtacccaagattcgcaatcgcaccatctcggacaaaccagtctcttcgtcttgtactagaacatcgagtttcagacaaagacttctcgccagttgcaaacgatttctcaggttcaaattgttggttcgtgcttcttcagtgtcattaaaaaagaaagcagcaaggtgttcacaatctcaacaagttgttaaacataatgatgataggattgaggaacattcttctagtaatcggggttttaaagatggcaacaatttcttagtatcatcaacagaaacgaagaagcttgttgcggtactgattctaattaatatattgtatcaatgtttgtggatgcaatgcaagattgttctgtttcattgatttagtaagagagctcttgtattgatttctgttgaagttttgtggtgaacctttccaaccactcaacgaggaggaagtagctctagtcaatagtgccttgtctaagagaaacaggttttttttctttctttcagaattagcttatcatgtgatttgacttgattgagaatttaaccacttgtgttgctttgctatctcagaaagaagattttggtttcgcataaaaactccaatattgacatctctggagaaactttacaatgcctaaggccgaatcaatggcttaacgatgatgtaggttaagtcaagagttccttatgtgttttgtttgcaggaatcgtgttttattttcttctttgttttatatttataggtcactaatctctatctggagttgctgaaagagagacaaactagagatccgcaaaagtacttcaagtgtcatttcttcaataccttcttttacgttaaggtttgctttctcttttacttgttaaaaatagatttcaaaggtctatgtttcctcatgccatgacttactttacacattttcagctcgtaagcggctccggttacaattacaaagctgtcagtagatggactaccaagagaaagcttggatatgatcttattgactgtgacatagtgaggtttcctctttttgtcagaagtatatgtatagtccaatttgattgatgatgaacttgtgcagatatttgttccaatccacatagatatacattggaccctgggagtgattaacaatagggaacgcaagttcgtgtatcttgattcattatttactggagttggtcatacaattttgaatgctatggtataacttcttcatcatagaactctctgtccatttgcattttggagattatggaaccagtgttattgttttaggcaaagtacttggtggatgaagtaaaacaaaagagtcaaaagaatattgacgttagttcatggggaatggaatacgttgaagaacgtcctcagcaacagaacgggtacgtaattctcattttgctatgttattgatctcacttgacactagtctgttcgaataattcgcaggtacgactgtgggatgtttatgcttaaatacattgatttttacagtagaggattgagtctacaatttagccaggtaataagagatgtcatcaaggtctgtgtttgcttatgaatctgtaccaatactgttgcattttgaaatcgagaaatatcaaattcctatccggttcaaactagaagaaacattacttaagcacatgagacattattggtcatggaattaaagtaggtgttggtgaaacatgtattaagagggatactataaaatatgttcatttcgtctttaattctatcgtttgcagaaagacatgccgtacttcaggttaagaacagctaaggagatactgagactgcgagctgactaatagtgcccccatcttggtgacataaccttgctattttacaaagccgattcatattagtttagcagccttatttgcttgggctgtggagaatgctagatatcttcgttgctttcttgaaatatttgtttgattttttcttatctagaagaagttgttgataagcttttagaattctgttttattgtttagtgaaggaataatcttcaattttgtaccctggcctgaggaataattttaagtttggtggaaaattgcagattgttatgcaactcttagtctataccataagataacctcatgaatgaatgtggtaatagtggttgcagagcgtgtaattacaactgctttgtgttctgttgtttagtggaaatatgaatctccattttggcttgagtaattgcatattttgtgatgtatccatctctctaagtctctagactaacctgaggtgacaaacgcagcgatagagtcgctggataaaatgcgtaaaggaagtaagaaagcagcactgcagatggttgacatggaatgcagttacctcactgttgatttacaactcttatgcattgtgtttggtggataatgcatatcaaacgtgcagagagtactgatcagtttacaactcttaaccggaaactgagattctcggttcggtttaaccggtttctaccgaattcacaggactacaaatattttaagttaggtaagggaaaccaaaagtccacatgtttctgatccacgtcagcatgaaattctaaacgacgtttcagcgtaattcatcttctcttgtataacacttccgattctaattagggtttatcgtttgcatcgctcttgccactacctccggagtctgtttcatttgtttaaggtgagtgaccacattgattttagaatgattatatatgtatggtttgaattcttgcttacctcttgttagctaaggttttatcttaaccattaatttagtaatataggattcttgttttcaaacagtga

SEQ ID NO: 9526 - DNA, 53 bp, Unknown
  misc_feature (1)..( 53): cDNA_ID_3086330_gDNA_ID_1972140_Annot_ID_179276 3000 nt of promoter + ATG
taagttatggcaaccacaccgccgcaactaacgtcttacccggtggtgctatg

SEQ ID NO: 9527 - DNA, 3000 bp, Unknown
  misc_feature (1)..( 3000): cDNA_ID_1829785_gDNA_ID_1972140_Annot_ID_179274 3000 nt of promoter + ATG
gaacggtggtgattcatcctacgtggctctccttccgtccggtttcgctgttcttcctgacggaggcattgacggtggtgggtcaggtgatggtgaccagcgaccggttggtggtggatccctcttgacagtggcgtttcaaatccttgtaaacaatctcccaacggcaaaactcacggttgagtcggtggagactgtcaacaacctaatatcatgcaccgttcagaagattcgtgccgctttacaatgcgaaagctgatcttgatcaagactggcgcgtgcgtgtgtttctttttcttaatgaattgtgaatttttatataacttgtttttttggtcttgtactatgggagggagggggtgtcgagtcaagaacgaaccgcgcgagtgggcgagatccaactcctttgtcaccgtgatgggacaacgacgtaaaagggttcgggtccgatcacggtggaggagttggtggttcgggtattgactggggtttggaaaccccctctttactctttttgtttgtgtttgttatttttattatgtagcgcgagtaagccacacgcgtggggtgtgttgtggttagaaaacgcgaactgtgagatgatgatgttatgttggatgggatctgtatcgtttcaagttaaaaaaaaaaaaaaagctgtctctcgtggagcattaaatgtattttgcaggcatattcattcatttaatgctataccttgtctccttcctttgcatgatatggggcttacgtattccgccattttcgttgcgccacgtcattcccttgacagactggtgcgatgaaccagacgttacgccgtcgttttctcccttctgtttgtttggttcttttctctttctcaatatgttgtttttaagttgcagacaggaaaagaaaaacgtaagcaagtgaatttaaatagctgtacggtggtgggctttattttaaagccctggcccgttatggctaatgattcctagatcttataacattaattgggcctacaacaatatcatgtgccattatttatccgttcattttgcaaagactttagattgatactgcactaataagcccataaggcaagtgaaaaatgtcatttaatcccccaactttcaaaaaatggtcattttatatatcaacttcgtatgtggccgtttaaaacatgaactaaaggttgactaattttttaaacatgatctttcgttgaccagactaaaatagacatgccgttatcagtcattaacggaacttctaatgtccgttatcatccgttaattttattagtcaagtttcaaattgtggccattttaaacatcaacttcttatttggccatttaaaacatgaagtaaacgttgactaccatttaagacatgaaaaattcgttgaccaggccaaaatagacatgtctttatcagtagaacctagaaactcgttaatgactgctaatctatccaaaacaacgtcgtttgagaataatcgaaagaacataaagattttttccatatgaaatttccatatcaaaaagttttaagcagaacccaagaacatagtttgatatagagataaccgcagtgccagtaattggaagcaaataaaggtgttttcgtttatatatttgttttaaattttaaaaggaatcatggaagcaaattgaagactcattataagattgttcgtcttgtttgagcggttgtagaaatagatttggggaactggagtttcatttagaaaacaatcctgattttctttggattattctcaaaacaaagtcattttagggatactaatagagtcgttaacaagtgataatgaatgttataagttcttttaatgaatgatgacaacatgtttattttggcttggtcaacgaatttctcatgttttaaatggtagttaactcttagttcatgtttaaaatggccacatataaagtcgatgtttaaaatgaccacaatttaaaacttgactaataaagtcgttaacggatgataacagaagttagaagttccgttaatgactgataacggcatgtctattttggcctggttaacgaataatcatgttttaaaagttagttaacgtttagttcatgttttaaacggcagcatacgaagttgacgtataaaatgaccattttttgaaagttgggggattaattgacatcttttcccataagacaatggttcaatcagtaataaccacatcctcattaacattcctcagatagtaaactaaccaatatatgttttattttacttcgtttctcaatctaatagattacttgaattgtttatagattacctcataggatgatgataattaatagtttaaaattttgaacagagacattattaaaaatgtctaaaaacagtaagaaattactaaaattatctgttgcaggagcaaaaagagggaagtggtcaaagatggtcaaatgaaaataatacagtgcccgcatattccgcgtgggcttagatgcaatcattcaaaacccccaaatccttttgcctaatcccgggatacgtaaatagacaaacaatacaggggtactttagtaatcacagcttgtcgaaatcgggcggattcatcctaacccgtcggatgagctgctgcgataaatcaacggtgaggagtcaatgtttgaccaaaaaaagagtagagagagatagagaaagagaacgaggctggcatgattggctttgcccacgagagagagagaaagattccacctgggttgggtcgtgaagaaagagaagaagaaaccgaagaagctcgaagaagaacgaaggagattcttcctttccccagatttttcgtttgaagaagaatcgaaaaacttagatttttggttttgctttcggagttattcgaatttgaaatatctgaatctgttgattcatttattctccgcatgaagctgtgttggtgaagtttttcggagatttagggtttctgagttgttcctcgtttggttggtgaataaagcgaagatg

SEQ ID NO: 9528 - DNA, 3000 bp, Unknown
  misc_feature (1)..( 3000): cDNA_ID_2994823_gDNA_ID_1972140_Annot_ID_179266 3000 nt of promoter + ATG
catgacacaagcttttccatgaatgtatttatgtccgccttcttatctttcttgaggaagatgaattcaccgaagatccaacttgagcttgacaatcaatcaaatccgaaacagaaacagagctttttgacatctttgatttagcagtctttgatcttgaggaatatcaatgaacactagatacactcacacttgcaggctttaaactggattttaaacatgaatagaagcattgattccatggaatgtggtaagtgacatagctggacttcttaaacaaatgtatgaacgggtagggttcattacaatgtagttatacagcactgagatttatggaagaaaaaaaggacacagctttaactatctacagagagacaagaacactaaagacaagagaatcataagttcaggagttcgttaaaatggctctattcaaatcacacattggcacaagaccactaataagataccaagtgggacaatcgaaagataataagagatagcatatcagagagagagagagattttttgaggagggagaagttcgccggaggcttctgtttctagtcggcgttgtgattggaattgtttgagcggtctttccagtcccggaattggaaacaagagggctaattttggtccttttggaaagatttgaaacgacatcgttattaagccctaattctactataacgatgtcgtttacgagaaacatacatatacatacttgagaataaagcccattaccaagagaccaattttggtctttttcgtatagtattaactctacggcgattgatctaagcccaataattgtggaacttgctcgacttaggtctcaatctctattttctaccaatgccaaaaaacaatttccttacaaattttttatttttcccatcaaaacaattcccaccaatttacatttaaaaatcattgtaatctatcacatttccttacttttaaaaccatttacaaatctatttatcgccaaaacaaaaacgggaaaaatgtttttggaaaaaaaaaattgacagaaaaattattttcggaatatttttggcgaaaaaaatcgatattctattttgttaacctaaaatattttcaaaatatgagtaaaatagtcattaaaaattaaattaacgtataaatgaaaatgactaacaggaaaggttataattaaaaaatgataattttggaagaacattttttacaatttctctttaatcattaaccctcgttgtatggaactccggtggcgttgagccacgaatctctatttatgaactctctaaccgtaaacatgactgcttccatcgggtctgtgatgatcttgttcccattcggatggactctctggcttgcgtttgctctggggcctttgttttgatattcgcggtagaacaatgtggacaaatccccactagtgctgctatttcatggagtccatcccactggatctatcaaaacatccatttaagattccataatcaccaccgttgataaatcaccccacggtcttactagaaacatcttcaccattctgtgaatgtcgacgtgtcggtcgagagactgtaaaaagcctacgtattcatagaatttttatttttatttgtgatgtttatgatagttttttgttcactttattttttttgttcaatctattttaattttcttaacactgatataaaaaatttcatagtttatgttgtgtatttattttttaattttttataatatttaatttaattttgtcaattattgttttatttaatgtgtgaattaattttagctgtaatgttttgatttcaataaataaaatttaggcaggccacaatatgatgacttggatgttgatgtagacatcgtagatcgaaagtgaacttttctattatatagacgtattttacttattttttgcttaatttatgcttacttttggtcaaattattttctctttattattcaaattatttcaataatcataacatattggtagatatgtagtcgctataaaaaatttggatgtaaatgttaactgatgaaataaactaggcctaatttgtgtgaaagtagaaacctattaattgtgaaagtttgaaattccataatctcggtcgcatattgaatactcaacatataattttggtagtgtttgaagaatcatatttgagacataatcaggtataatgaataaaagcagatgacacagcaaacgaggaagatgtcatcacttgtcacaaatccagtgcatagatggatcaagtgcaattctgatgaagtataaaaacattagagaaatactctgaaattggatggatactctatgacgaccaggtggtgtttgtaacatcttgcatagcgttaatcttgagctaaaaacagctttagaagctgaaagatagatttttggggtcagactgaaaactttaattaagttagggtaaatatgtaaggaaaaggaagtaatgtgtaattttataaatttcagaaagaaagaaatgaaaacttaaaactccgttttaattaccacaaggctcaagcccaagcccaataccgctaacgaaatccgacgaaatcacaaacattataatattacatagagataatcatctttctgtctctctgtctctctgtctcacgcgagaactctggcttcgtctctatattattgacccttttgatctctctctgtctcgctttcttcctcgcgtggacctttttcgaaaaatatcaatcccagaatttcgcttcattttggattataaactcccagatctgctactctctatctccgattttgtgatttttcaaaccctagatttctccggaagagtttatttttttctctgtaactaaaccgagatttttttttcaaaattccgacattaccctaggttgtgtattaccgtagaaaaccctagttcctttttggtattcttggtgtacagatcccttccttagtcagagtttttggttattagtgtttagaggtttgtg

SEQ ID NO: 9529 - DNA, 3000 bp, Unknown
  misc_feature (1)..( 3000): cDNA_ID_3042262_gDNA_ID_1972140_Annot_ID_179253 3000 nt of promoter + ATG
tggtcccaaagatctcagccacatgtctaaggtatgaatcaagtaactgagagatatatttgtatcagaacatgtataaggtaatttagaaaatggaatctaattgcttcatttaatgccaccaacaggaggatacagtgaattacattacacgcaacatgtggttccctgtttacagccctctcgttcacgagaaatagacaacaactctatataactcttctcaggtttcatagaaagccaaaagacaaaaaatcttcgcttcatcttttatttgtgatcaacattctttttttcttcaaaatgtgatatgttttaagaaaaacaatgccaaaaagagggcttaagaacaagaacagggttagttctaggtcaacctgtacttttcctttttttttttggacatttttccaacttcttacgattatttctgatgataatgattacaactttatatactgttttggcaataataagccaataatgatatctttcttctacattttcctgctttaccatttttgttctgataccaaaaggtttaaatggtttcgagattcaaccaactttgaagagttgttaatgcagttgcagaagcatgttaaccgaaaatcattccaaaccggagaatatcaactcgaaccagaataccaaaccggaaattccaacagtgatcgtgctatgtttaagttaaaatttaaattaagcaaacaccggagagtgattggatcggggaatttgggaaaagtatggagaagaagacgaaagtgctaattgtgggaggtactggatacttgggtcagcatcttcttcaagctttcgccggcaactatggcggtgaatgtgagctatacgacgtcgctttcactcaccattcttctccacttcccgctcgtttgctcgacgctttccctcattcccccgcgtttcctgtcgatcttaaatccggtctagggctcaattccatatcccaggactttcgtcaggttccgatttcgtaatctctagctcgattaatgttctttcctctaggaattgcttggtaaatgaacatgtgaatctgtgtattagactctctggtctgaaaagcaacactttgttccattgattatagcctgatgtggtcgtgaattgtgctgctctgtctgtcccacgagcttgcgagcaagatccagattccgccatgtccatcaacgtacctacttctcttgtaaactggttatcaagttttgagactaacaaaaccttgttgattcatctctctactgatcaaggttagttgccaattgcattagccactgttatagtgttaatctcatcatgagtcatgacttatgcttttgcacttggttttcatgtctcaatttcagtttatcaaggtgtcaagtctttctacaaggaagaagatgagactgttgcagtcaacgtttatgggaaatcaaaagttgcagcagagcttctcatcaaggataagtgtcaaagctttgcaatattgagaagtagtatcatctttggtcctcaaactgtatcacctctccccaagactctcccaattcaggtgcttcttaacacaatttctcagagatatatatacacacttgagttcattgagttagccatgaaactggtcgtcttttatgttttagtggattgatagctccttaaagaaaggggacacggtagacttcttccatgacgagtttcgttgccccatttacgttaaggatcttgtgaatatcactttcaaattaatagacagatgggtctctggtagattcttttttactgagtttcattctctcgctctgcatcattgtacataaaatgtagaatcataacaacatgttgttgctgctttcagatgataaacagatgcggctagttctgaatgctggtggacccgagaggctatctcgtgttcaaatggctcaaatggttgcagaagtcagaggatacgacctgtccttgattaaacatgtgtctgcatcatcggtatgtatgaggctttcacaaatgaatctcacttgttgaatattgcagatcagtcacttaatgagtctcagctattttgtcagattgatcgtggcgtagtgtcaccagcagatatatctatggacataactaaactgattcatacacttgagctctctccaacttctttcaaggaaggtgttaggttaacgcttgactctgaatctcattctcatatgctcccatgatagtattcccttatgtgctcttctttaccactctgcttctttctatggagaaaaatctcggtttgagaaaaccaatgtaaaacggttgatatggtttcggaattaaggtttggttttcaatcaataattgtgggattgaaacggcacacagtttgagtaagcaatgggcttgtcaataattgggcctaccctataacactggtcaaagcccggcgttcttaactttgaaagtgaaacttgatgatgtttaaatgtaaaagaaacgacacgtagtctagacacgcaaagtcgtttttagattcttcttcgttctagacttggcggaaaaagaatgttggagattggaggatcctgcgaagaccaaccagtctgttaattttgtataaacaatgaaacgaagaagatcttccgagaatattctctccttctcacgcataccctagaatattgtttcgtctctcttccttctacgtttgcttatttgccccaactcgacgcgaatcatcagcttttataaattctgtcaactcaaagattgtttctgaattggaatcttacaggtatggcttcattttttttttttttttttttttttgatgtaatcgaaaatcgcttgaatcgtgtgaaaagattgtttgaatttgcagaaaaattaagaatttgtagtcgaatgttatccttattgggaagatgcaataatcagatcaaactcaattacaagaatctattggtttactctttttgtttgataatttgtagaggtttagcttgagatgatatg

SEQ ID NO: 9530 - DNA, 3000 bp, Unknown
  misc_feature (1)..( 3000): cDNA_ID_3042254_gDNA_ID_1972140_Annot_ID_179255 3000 nt of promoter + ATG
taattggtcttcttatttgcagacaatgtgagcataaaaaaagcgcttctagctttgtctatggatttcagagtactgtgaacataataatatgtctttttccttgccatgtagaacaacaccatggaatctttccaaattaagaaatttcatgtttttttccatattcctactgataatctaggggtgggttttatctgaggcagatgcagaatccatgtgggttttgaatcatcattatacgattttacattaaggcaatggaatatacaaattcacatgaaacatgaaccaatcttataaatgaactatttctctacactagacgaacaattacatcatacttaagatcttattcaagagtgatgattaattgaagaaatcctaatcaaagctaattgataaagatctaaaatttcaaagaactgaacaaattcaacatgaattcgacactcgatcttaggaacaaggaatcattgttatggaacaagcattgaattatcttttgttgcaggcccaacaaagacctcataacagaacaacctatatcaagaataatacagtgggaacacatttctcaagaaaatagtctcttctaaaagatccatgagctcaatttctactatgattgattagtatgtagacggtggaatgttcagcagttaatcctatatgaaatcatgcatgaaaataaaataaaagatatgatttaatagaggaaataagttgcttaaaccgggaaaaacataaagcatcaaatgttcaaaagacaaaccaaaagaaatcccaagacaaaaaccaaaagttcaaaaaagaagagataaagagaagcgatcaatgatcctgataagtgatagcacacaatccttaagcatcctcctcaacaatgtttgaagactgttccttcttcgatctcttgttcggcttcttcacaactttagccacattctcctgcggatctctcgagacaccatcttcctcagcgttccttgagctagaagcaactagaccatcttctttagtcggagtcttgactttctttgctctatttttctttttaggcttctcagatttagcctcctcatcaccatctttttccttgacactcatctcagtttctacacaaaattcagcaattacgactcaatagaaatgatccattgcctattatgctagagaagaaaaagtatgtatatacaaccaagaactgaagttaccgttttcaatagcttcagaagtagcattaacaagacctatgatcccttctttctcagcatcatcactagtttggtttaattcagctagaagattatctacaacatttaaagctaatcaaggcttactagtgtacacaagtaacatctagattctagaactaagaatcaaaaacttctactaatattaaaaaaaaaaagaacataagtttaccattttcaagatccttgtcttggtcaatcatgtttaaatcagcatttgctacctccttttgaacgtcgtctattgaacacataaatcatacatattagtctataacatctaataggagggaacacatcactcaacaattgttataaactattttaccttgttcgattgtccctgaaagatcaatcttggcctcaacatctatggtatgaccatcgacaggttcctcttgatctacatcacaaatattctgattctcttccaacctagtgacagttccctcaccactttcaaggccttaagaaaaacagatataacaacacaacggtaaatcaaccgatactcttcaataacatttgcagatctcctatatactattcaataacaaaggttaccttttgcttccgttggcgtctctatggagagtttctttctactattgttggcacttttcgattttctcttcctcgtttttttctcaactgcttcaccaatctgcagctcacttttctcctggacacgtacgaggtcaacggatagaaaaaagtcctcgttactgaggccttgaagagcttttttcaatatcatagaatcggacaagtgataatcattaccactcacgttaacctacaaaccaaaaacaagtactccttccttaagttgttgtcgttgttgattccaaaacaaaaacgtgttgttagagaaagtgttgttaccttcaaggcagaaacagtgatgttgccaacacttggaaaacacagttcgtgttctttgcagaatttgtctgtaaaataaacaaacaacaataaacatgagtttaagagtttagttactacaaaaagttaccaaactaaaaaaaaaaaaagggaagagattatgaagagtcacctttgaaagaagacacgctatcatgactgtcaaggagtagccccaaacgggtatcaatactagtcttcacaaagacacattgcgaaccggaatcagccatcagtaagattattgtaagagaaatgcaaaatagggttttgatgaagttgagaagaaaatgaaactccactctctctgtttgatatttataagcgagtttctttcgtagaggaatatgaaaagctttatgttttttttgggaaatcaaaaacgcttaattacttgggaaaacacaacgtgtaggtcgattctctcttttcatcgtcctttcgtcttctctcttttggtttatgactcattgaaagggtttgaccagatcataacttctttctctatgggccaaataagtgggcctcacgttatatgaagacagagattctctaaggaaaccaggaatactaggaattgttgaaaagcaaagctataaggcgaggaagttagctaagggcttttcacaggacaatgggttggagcagatggattttatcaagagagatgcaagtctatctcaagcaaagaaccataaattttcaaaagacaagtacctggtgtagaatcattgaagaaacagctccaagtaatgccggtgtagaatcattgatctaaagtgaagtgaagtttatggttttctcttcatgagctaaaatg

SEQ ID NO: 9531 - DNA, 3000 bp, Unknown
  misc_feature (1)..( 3000): cDNA_ID_2183380_gDNA_ID_1972143_Annot_ID_179284 3000 nt of promoter + ATG
cccactgtgttggcctgcctaagcaaagaatctgcaggaagactgtttaaactgtttctcgaatcttcactcagacaaaaacccttcttgggcttgggaagatcattgctttcgtccatatgcaagaggactgaagacggtggcatggcaaggacacgactcagtcttaccctacacgaaacccgactagagtagcataaatgagctaagccatgagatgggttgttgaaaatctgaagatacatcaccaagcttctggctgaaaatgttttctgatagttagtactttagtgacacctttgacaaaactagcaaaagcttccaacttgttccctcccccactaaacctgaatcttactacagattcaaattccaaatcttgacaccaaaattccaaaaccagctcagattcaaaaaaaggaaacaactttcaagttagagagtcgcaaggaccttttctggctttttggagtaagatcctacaatctctaacatcaactcacttttctgcagctccaggctgacacccactgcaagaaatttggatgcaattcccaaaccagccaagatataaatgaaagaaccagtacttctccttaataagacagaagtaaacgtctagctttctatagaagattctcttgaaaaccaaatctttgtatgttattgagaaggatgactgattgcctttatgttttctgattgccagaaacaaaaaggaaaacagtactaaaagaacaggtgggacaccaaaatgtaagaacaacggcctcaaatcaaccgatccaatgaaagttggaccagtagtagtcgcatcaagatgaagtaaggaatcttcgcctcagataaataatcatatatgcactggatttcaccatgaggcagtaaagaagatggaagataccacaatgtaaggcgttaaattcaagaagaggtgtctctgtctgcttctttttccgtttcttgtgatattattatatgtatttcctgcaacatgtgggttgtctctgttaggtggattcctttgtgttcttgtcatctactgaatcccacatggtccatcatccatctaatcccttaaatcaatggaatcctccagaaacaggtgttgatcttctgatggacagaaaatgcataaacggcttagggtagtagatagatacgaatggagtttctttcctcacttatacatttacgagaagcattccactaaagcaatagtcttaaggtctgagaagagctcctcccactaacacacaaacaagtacagattcaattagaacacacaccaaaatttgatatgtacgatgctatataatatacgtatctagcttctaattcccaaacaaacaaatgtcaagctcctgatatgacttcaacagagaaaccctgatttgaaaaaaaaaatccatagcagagcaaaaaaaaaccacacctttccacattcgctaaaatggcaaagagcccagacgatgtttttacctgaaatgtgggatctgggaagctaatcaacgaagagactctttatatatgtgttccaccaaatgtgggatctgggaagcccaaacttgtattttgtcccacatcggttacatacctcaaaatgttttactttatatatgaaattaaatcaatacttgtacgtcgagctcagtaacgtgggcttgtgacccgtgtggggacaataagttggtggaacactggctcggcccacgggtcggatctgttgtggcattgttccgggctgcccagtccaagctgagagtgatccgtgtgtgttaagcgaaggcttggctcaggcggttcttgcagtggagggcaatgcgtgaggctggtttcacagagcagcgatcacctcccgctctcagcagtggacggatcacagctcgacgccactcagattcaccatggcctgctggctcgttcccagctggaccaccaattttttattttctttttgacaattgtatttatggatgggcctgagagtaatgaatatagacttctattcggcgattgggcccaaattctttatctcaatcttcaacattggtgagttgtgccaactcagacggggttattaatttgtgttatgcacattactttaatccaaagaatacagttttgctaaacccaccacatgcgtatgttttagttagtggtgatcctgagaagaaacagacgatataagaaggtgaattattgaacaaaagttataccatattatagtacaatgatgttgactttgaatacaaattggtaaccgaattactttgactcactttcaccactttgtattgtttttcctttcaagtttttataaagagagatttggcattttaataacatcctcacctaatagatttggtttaccgaaatggggaagaaggaaatagtctatttggtttaccgaaatggggaagaaggaaatattaaattagtgtgtcctataagtcaattctcctgttcatttctaatctattatctaatccttgcaatttgctgataaaacaatagtaattacaaaaagtcttaccccttttgagtttaaagaaaccaaaagtttggaataaaataacaaatatggatataagaggacttatgtgcctatgtggtgttgagaatccgattaaagatgtgaaaacaaacaaaaaattaacatgtaattctctgccttaatcatcaataacagtaatggtttttacttttttttttttattacaattaatgtttgaataatccggttgaatgatatcgttaatccgcttacattaatttccgatgattgttgttacaaagaaataaatagaaactggaagcatcatcataaaaataaacaataaatagtggaccgaccccatgaaaaaataatgaggacagaaataaaaggaaaccaagtctgaaacacaatgattgattaatcacttataaggcctaaactcacttttcctagttttgcccttcttttagctcatcaacagagagagagatagatccatg

SEQ ID NO: 9532 - DNA, 3000 bp, Unknown; identical to SEQ ID NO: 7615
  misc_feature (1)..( 3000): cDNA_ID_1441174_gDNA_ID_1972143_Annot_ID_179292 3000 nt of promoter + ATG

SEQ ID NO: 9533 - DNA, 3000 bp, Unknown
  misc_feature (1)..( 3000): cDNA_ID_1376881_gDNA_ID_1972143_Annot_ID_179295 3000 nt of promoter + ATG
ctccgcttcaatcgggtcaaaccccaatcggacggctctaactcctcctcaccaattcaaattttacaatgtgtctacaaaaagggctctgagattaaccaaatcagatcctttctatgccggagttgaaacactagatagaagaaacagagacgtccaacaatccaacgaatccgggttattaattggaggtaaaagtaatggttttgccatctgccgacgacagatcggcggtgacaacgatgataaatactagtctctcttttttcacaaacgggaagaaaaaaagaaagaaggatcaaagctcacaagccaatgctacgattctgacaaagagattgaagaagagtgatattcagaatcgcaggaaagacgaaatagagaaaaacaaaatgaactttttggttttctctccagaaacaaaaacttccgttttcttctgttcttttttttgtttgtttgctttcttcaaccattcttttttaattacattaatattgcacgtcgtgttattttattttaactttatgttttaaaaaaacatataaggaagtaagtactactcctcagtgttttaagaattactatattagttgactaaatataatttactcaattaaacatgcatttaatttgttcagtctcgtaatagacagtgattagtgattactgtattttaatttctcttgtttacgaattcataaagaaaagaaattagtagtacacattacacaacaacaaaacgtaatatagaaaaacttgacaacttggtctgactctgagccgtctctgctcggtctgctgtcaaaatcttttctttggacaattctaccccttgttttaagtgtattaaacattatatattcgaggccgaaagagttttcgcactttattcaaattgactaattgagcatgaaatacagcattaagaaattagttatttgtaattaacgaaactttgacctcactttttattctccacattgtatgatagatagatccattcattgaccattgttcatcgtgatgccaaaaaaaaaaaaaaaaaaaacattcattgtccactttagttaagctggtaataaagcgagtatagaaaataataccgcaaatatccgaatatattacctaatttcctaatataagacatgtatatataagtcgacggaaaagacggtaataattaatatttccatttaggacctaatgccatctcattttcatttccaaccgtaaatatttttaatgtgaaaacggtaaattttggtgcaagataagtaactttactaatactgttgatttgtattttgtagttgtagttaacaaaggaaattcggggaataaagaaacatagtaagggcacaacaaaaattttatctattaataaccacatggtcccaaaaagccataataaagtcgtatgatgacatgtttacacgaccatcgttagaaaattaatacatattacggatatcaaaatcacacccaattttcaaatctctttatctaattatctaaactgttccgtttttagagggacccaacaacaagccaaagcaaaaactttctggtaattgaatgtatattgtatcatttcgccaacaatttgtttgaaaatggatgatttcgccaacatagtttttggaagaatctgaagttttggaaccctatttataaattatataagtccattaaataaaagtatgggccgcgaaggaaaacgttatgggcttcgtattgggtttataatagaaagcccaatatgttaaaatttatgaaggaggctgggcttcacgtgagttattactactagacctctgtattcttctgaatctgacatatcgctgattttaatgcgacgtggagctttataagacgcaattcatcaaaatgaatgagccccactattttgttgttgttttggagtttttctgattgagggaaaagatgaaggggatcttcacagtcccccaacaacactccattggagccatttcccaagttggtaacacgtttatcaaagccctccctcgttttcatcaacaacttatcgattcatttgctttgtagatctctctttgtttcctgagctgagtttacttaggactaatcttcttcttcttttttttaaaagaaataaatgcatggcaagattgaaaatcaaattaaaattcagtaatcactatgctaaactaataccccatcaatttataatagaaaatcaaattttgatacgttaccggtggattttagatatactcatactaattaattactaggatttcgaaaatgactagacatcttcttgccatatttgctaagtatgattgaaatcaaactgatttaaagttagtaatacatatatatgctcatgattttcttgttttttggggtcaacatacatttctgcaaatcaaatatgctggtttaagtctactaaacacaaaagttctcatatattaatatattttcttttgtctcaataattctagtaaataaagtagaggaagagaatgatgcacgccagtagagatttttattcatataaaatcgttgtctttagaggaataatacatgccttaattctcaacaaaaatacatttataatgaggaaagtttactcaagttgcataatatatcaaagtacccaatgcacgaattctaatctttttttaatactaatcattaagtccattttgacgaaatatgtgaacgtcattacaaaaatcttcagaatattcagaccaattcaattttattaattacaaggattatcagcttcgaacataattagacggtaagagccgccctgttagggttttttgtcctcaatgccaaaatcctcccattgcagatattatatcactcccactgtctaataaacaactctcttctcctctctacccagagcgagtcaccttatcgtctctctatctcctccttcctatatccccttgctctctgggtttttgctcagtgtgctacgtgagagatagagag

SEQ ID NO: 9534 - DNA, 3000 bp, Unknown
  misc_feature (1)..( 3000): cDNA_ID_2183399_gDNA_ID_1972143_Annot_ID_179300 3000 nt of promoter + ATG
tgacacacagtcacactcacacacactgacaacatgcacacacataattttttatcaccagagtgtgtgctacatgctatatgactcttctgattattcattgctaactaattagctaagattgtcgtgaaaaatagtgggtatattaatgcgtttataactttatagatatgttcttcctttttaaaacatacaatgcgttaatcttaaggactagtgttttgagataaaataaaggacccacgagatgttaattttttgtcgttttgtagatatttttttatttttggaatatagcatagtgagagccaagtcggatagaagaagacaaaaaaaaaaaagagtagaaaaataaattaaaagagtaggaaaaaaacaaaagaaaataagactgaaatgaccaaatttaaataaattaaaaagaaaatgaatggggtagtcttaccctttgttaagatgccagaggaaaaagagattcatccagtctctcaacactttttattggttcccaatattgattcaacgtttgatccgtttcaagtaatataattattacttttttcttctataaagtaacaaaaactgtaactatttcctttagaaaaattcgtacacataatcaactggtccgtcgaaactttttatgaatggggtccttgattcgtgacgtacgtgcaattttgtccaaaagaaaacaataaaattagattcgggagtgattatcatcacactattaaacattttgttatatatttgtttcgtgaatcttctttatatacataggattgaatgtcaaatttgtctttaatttgatcagggatagaaatgagtttgttgtaatttagttagaagccaaaaacagtagaggggcttaaataggtcgcgaaaaggcaagtcatgttgtggaaatttggtcattacacttgtaaattgtattactgttccggaaaaggacattattcaatgcaaaaagaaagacgataacgttttcttccactaaacaaaactggaatattttaacatatcacggtcattaccattttattcatctaaaaactaaaatcactttatatgtccatttgaacttatctgctaattttattgtctattttgcgtcttaataaatagttttcgattttataccaaacgatcaatcgtctactttgcagcatatatacattactactaacaaaaatcacaaaatattaatttgcaaataccttttttgttaatttgtaggtagtgtatacaaaacaaatgcacgtgtgttatatatacataaatgtttgaatgcttttttctcatagatttagaaataatccagatactgaaaatcttagggaacgttggtgtaatgttatttcaaagatactactaccattaattttcaataattttaggtaaattggtaaaaaaaacgaaaaatatatctaatggttaagttataaactagtataatgtatggatcttgaattaattaaatctttagtggacaaaattacattatgaatttggatcatgaagacgtattcatatagtttatctcattcgaattggattccaaacaccatattagattgtaggtaactaggtaagaatcttgcttgcatatcttaatgagacgtggccattctagatttggcaaatataggtttatcccacaaattttatagactagcgaccacattacttcccaagagtgtagttttaacgcattgctaatactttattctatacgcctcttgcgctagtatctatttgatacgctataacgttattgatatggtcgtacggtagataaaacttttaactccgtaatcgtctaaccaatacatcagacattcatcacactcaatgtcatcgatcgatcgtggtaaaaataactggtattcaaagataggtgtgtcttcttattgtctatcttcttatgttttaattatattttcttctgtcatcagcatagttgtttctagattcgttcccttccaaagtatttttgtatgttcaaataaatatttatttatttttatatattttttactccaaattattacttgcgaaaatcatttcatttttctttgtggaaaatctaaagaagataagctattttgttgtttgctgcagttagctatatattgtttgtacaagacaacattggccctttctatttttgttccttcttttgtcccaaacaaaaacactcctctttatgtctccccctttcacaattatgatttcaatcaatcaacactaatttgaccacagtcgctggaaatacaaaaaagtaatttgtggtggcgaaaaaatatatatctactgttgtgtatataactttcttaaaatttgatttgaagatattaagacttttaagacttcttttttagtatgacaataattgaagaaaaatgttggatatacttaattccaatgactgaggaaataaccaaatcaacataaacaaaacaaataattagactacaattttttttgtctctttctttcttttgaatacttattgtccctttatatacgcattaatcactttcttaaatttatagattatattgtaatggatagatacggtttaacttctacatatgaacacaatataccatattactacctcaacttcaatttgaattatacatagtttgacaacccatcatgtgtatgtatcttatcttgcataatcaaataagaaattatatttattttcttacaaaagaaggaaatggcgggacctctataattttctagaggtttggtttgttcgtattgtattaatccaataaacaagtagaataaccaataatattggaccaaaacaagtgctttaacatatgcttttgcctcctcttggtctctactccaccactataaataaaactctctaactcttccaatctcccatcaccaaacaccacacttctcataagaaaaaaaacacaaacatctatcaaatttacaaagttttaaaactaattaaaaaagagcaagatg

SEQ ID NO: 9535 - DNA, 3000 bp, Unknown
  misc_feature (1)..( 3000): cDNA_ID_3042280_gDNA_ID_1972143_Annot_ID_179311 3000 nt of promoter + ATG
gacagcatgtggcacgcccgacaattctttttaagagtgcacccataacatatatgttcttatgctatcaaacaacccacaaggaacctgaagatgataactacttgatagagatgatatgacttcaatcaatctcgatcgggttcggttaagggcactaatagataacctgctatatgggagtgtgaagaccattaattggtttttcacatatatatgactgaagaaatcagccgtaaccaaatattagtgtttttgcatcagttggggccttgggggtcaattatggagtggaataatacatgaaaacttgaatggtcgcatgcagagcagaggtagcctttaaattaaagcacacatcaaaatgtagtgcaatgttgcgaacttttattcaactaaacaatttaacactcgatctttgtgcgccaatacctctgcacaacaaacaatttaatctcatcaatatgatccgattttgaagaaccaccttcttcttcagtgacttctctggctaccttccattaactgtcgctgtcataacgacgtggaagttaacttaattgacttttaaaagattaatgatgctgtatattggtcttaaaatggcacaaaaggttccgtctaggctttgtgtttcactttaagtctataacttaaaaaaaaaaaactactaatttagcaccaaataatatcataaccattttattataaatgactataattaacgtagaattggaattggtcagttggtctcgagataataatttagctccaacgaatcggacatatctatgcttttatgtttttttttgggtataagaatttgttattaattcttataccaaaattatagatatgatattgttttattttaaaacaaaataaataatatatatatgaatggtttgatctgatattggttacggttaggatacaaattttaatcctgataccatagaggttttattagttcaattttctttccgtttgtttatgctcaacttcagattcgttgtcttgcaatattaagatatggttcaattattgagatatcatttcagttacgttcgcatccgatttgtttaaggtaattgtaatgttttaatgatcacttttatttgaattctgaaaattgaagttttaaagatattttttaaataatcgatttcaacaaaatagaaagaattgtaatacatattttttttatcataatatgaattttatatttaatagaaagtttcgattatgcatttaatttcatacaattgacttttcgactgttcattttttttaattttattttacaacgacttttagacacttcttagcacgaaagaactaaacgcaacatgtgctttgtaattaaacgtcgaatgaatatgaattatatttgacctaggattacgaatgatgtcgatctggagtaataatttagaaccgaacgacgacttcgaaatattacaattgacttatagaatagatctcgacgtagattggtcttaaaataataattaagcaccaaagaactggagatggctttatgtgctctgtgttttaaagcggattaataaggacttttaattcgattggggaaaatagaagaaagcagaagtgataaatggaggaccctttgttgactcagagtgagcacatcgtcgatgacgttacaatccatggcgattcttcttcaaatgaagagcacatcgtcgacgttacaaccaatggcaatccttcatcagctgatgagaaaagaccgcatgagggtgtccaatggagtgatatatttacatttaccactgtttgtattttggtcgagtttgttgtggctttagtccagattgttgccgccattgttgttctgactctggcaaaagatgaacaacctccacaaaaaatgtttcctacactgatcctcagttataccggttgctgtattgccacactccctattctaggtttgcgtttctggcattcttaccgaagtgttagcacagagacaaggtataaactataatttgtatgttaattatttgttttaaaggcattagaaaccgaaaccgatatagtggttttattgatttgcagaatctacgaggtggtggacattttgaaaaagatgcttgaatatttcttcgtgggttgggttgtggtgcttttatggcatcttatcaacaactcatcatctatagataatactacgcaacagttctggtgcgcatcagaagaaaattataactatatattcgtgtcccgaaaacagactaaattaacgaagtctctctaataataccaccctgcattttccttttgcaggttatgtatgactttccttgctatcagctgcattctacatgttcttcgtaatctcccctgtgcgggagtttgttttctgtatcctatgatactatatctttcccaatcgatagacttcgttggtgacattactgatgagataaatttgactacgtctataatcctattatgctttggaatctttgcctgcattatctgtggttgttgttccagatgcttatgcagataaaaagaagaatgatcatgtcgctttcttctttcttttgtttaaaatgttgtaatactctatttatttatcaaataaagccaagtgtcacgattgaatcctatatatcttcctgaaattgttggtataaaagaacaatttagcgccagcgaattggaaaggtctatgttttgtgtttcaaattcaataaacaaaagcgactttatataattggttttggtgtagttggtcttaaaataataatttcaccaaataatttgaaacagtcaatgctttgtgtttcattgtagaatatactataatttagcaccaagtagttcaatagttatttcattgtaggaataccataattgacttaggaatggtcttggcgtctaatttgaaaggtctatatatgctttgtgttgcaacgcagattttgattgaatccaagagaagtagaagaaaatcataagtgatta

SEQ ID NO: 9536 - DNA, 3000 bp, Unknown
  misc_feature (1)..( 3000): cDNA_ID_2183434_gDNA_ID_1972143_Annot_ID_179314 3000 nt of promoter + ATG
ttggacataaaacctgaaatccaaaatccgatctgacatcgatccaaaaaatagttataaaattccaacgaaaaaataaattattctatctaaattatctgatctgaatccgatacgaaccgaaaaccgaaaagatatataaaacctcaaaataaaattatatatcaaaaattattagttatatttagttagagttttatattcaagattactaaataacaaaattatccaaaataacctagatatcctaaatttttttagttttatttattaaaattatacatttttttgtaaagagtaaccaaatttttcgtaaaactaaaacaaattttttacaaaattgaactgccggattatttttttttgcaaatgttctcatttgaaggaagaatttgagagaaaaataaaacactagttaacaattgaaacttaagaccggtcttaaaataataattaaagggaaacactagtttaatattgaaactttaggccggtctcaaaataataatttagcacgaaataattaaggcaacatgtgctttgcacttcaacgcggaatcatatgaattatacattgacttaggattattattgacgtcgattcggcctttaaattataatttagaaccaaccataattataatatcactacaattggttagtatcaaacaatttaacaactgttaaatatcactgcaattgacttttagaatagatcatgataaagatcggtctttaaataataatttagcaccaaataattagagaggctatgatttgtattttaaatcggttatttatggactttaatttcgagtgggaaaatagaagaaagcaaaagtgatcaatggaggggcctttgttgactaagaatgagcacatcctcgacgacgttacaataatccatggcgattcttcctcaaacgaagagcacatcgtcaacattacaaccaatgtcgattcttcatcagatgatgagcaaacacaggatgattgtggtgatcatttgagacgtataatagctctttttgtggatgaagggtgtgatggatttacatctagtcatgtttgggttatggtcgagtttgttttgactttgctccaggttgttgcagccattgctgtcctgactctgacaaaagatgaaacagatccacagaaagtgtttcgtacactgatcatctgttataccggtggctgtattgtcgtgctccttattctaggtttggatttctgggattattgcggaaggtataaactataatttgtttattctttgtttttaaggcattagaaaccgaaatcgatagataacagtttcttattgatttgcagattctacgaggtgatggagaatttgaaaaagatgcttgactatttcttcgtgggttgggttgtggtgttttcatggcatcttataaacaactcatcatctccagataatgctacacaacagtactggtgcgcaacaatactaaattttctaactatttagtatgtctcgaaaacagagtaaatctctctaatgatgataatccaccatgcattttcctgttgcaggttatgtatggctttccttgttgtcagttgcattctacatgtgcttcctaatctcccctgcgcggcggcttgttttctatatcctatgatacttcgtcttacccagtctatagacttctttgatgacattactgaaaagatagaggacattaactggttaatctttgtatacttttttggaatcttctcctgcattatctgttgcatttttacttgttgcagcagattatgtagataaaatgaagaatggatcatgtcgtttctcctttcttttgtttaacaatgttgtaatactcttatctatgtatcaaatataaagtcatgactcatgactgaatcctctcttcctgaaatcgttggcctgaaagacacgatgcttacgtcccaattacctctgcatggacgagcttgtgaaccgcatgtacaagtatccattcctttgttggtcctagagctgatccattcctgcatacgaattaataatccaattcaaagagagagtagtagaccgtgagttcaagtcttctgaagcagcatcacgtttgaaccacgttatcgatcggttcagtcttcaactaaagtgaagtcttaggtgtatgaaatgtaactaattagtcttccaacaacacttaaaactcataagagcaaaacttcttttaggaataagtaaaacagagcagaagaagcagtcaagttaatcgggattaccaagaaccaatggtcaacctccaaattcttcaaatttcctggaaaaacacataagggggaaagcaaaacaccaaatataaacacattcctcgagcgcttaactacgtaacaacaatattatcaatattgcatgattacaactctaaatctctatatattttgatgatctataattttttgctttgataaaataaagttatgatctttgatttaaaagtataaaaagatttggaataggagaaaaaaaaaaagcaaaatatagatataactgaaattcatagttgcaaaaggggaagtggagaactggagttcgtgggtgaacggttaagaaaggttggctggtttgacattattggtccatcatgcaacaataatatattaagagtttagaggataagaatttcaacaagtggacgtgccggagtggttatcgggcatgactagaaatcatgtgggctttgcccgcgcaggttcgaatcctgccgttcacgttttttgtttttattttaccttatcccagttttgtcctttttagtttcctcaatgttttcaatcccgcctatattttaccctagatttttaattaattgataccgaatcccgctttctgaaatcattttcaattttcaaaactcatctcctctctctctttcactctatctccttcgatctctctcggtgtcagtgaatttaactgaaatcccatcgccggggaattttccggtgatttag

SEQ ID NO: 9537 - DNA, 3000 bp, Unknown
  misc_feature (1)..( 3000): cDNA_ID_2183411_gDNA_ID_1972143_Annot_ID_179305 3000 nt of promoter + ATG
cgtcttctcaataacttctgatgtttataatggtcgcattttagttatatataacaattgaaccactgatcatctaacctcaagtgttcttaatttaatatcgataggtgccttatgactttcgatggtgggaagatcaaagatgtgtatatgtgtttcgccagcctcctcctggaacctatgacattcgaacagtctgagtaagatgaaatatcaaaaaaaaagagggaccctgagagctccatctaggtcccatgggtatgcaaatatttaaggctaggaaattaccgtaagagagttgcaaagaaaatcaatctcatcaatgaaattattggtcacggcccgttttttattgggccattactgggcctgttttataagagaatccagcaaagtcagcggtaaaggagttcttttttaataaaattaaaattttcttataaaaaagtgattaaaataacgtcacaccactatataacgcgacgggaccatcggtttcaaaaacataacataaaacaaataacatatttcttttaaaaattctttgtttttctttaaaatttttttaaagccatggttactattatactcacgtgattgtactgtagaatttaaataagtatgaagaaatggaccaccaccaaacatatccattatgtaaaatccaattgtatcctatcaattcatgttctaacaaatgtacatcttatatagttaatgcgataaggaggaatggagggaaaatctgagttcaaaacttgaacttggaccaaccaaacagtaaattttgcatgagtataaataattcttagatctctcttttaacttttttttttttgggtgactttgtttgtgttttgaatattagatctacctttttggtttgttgataaacattattaggtccatgacttcttgttgttatacgtccatctctcgttagtattttagagtcattattaaactttaagactttagagtaagtaagtcaaataaaataataagactttagatatacacaaccaagtttttagtttgaattcaaaactcgaacgaagtctgattatataatcacgtgttgtaactaatttcaaagaaactatgattgactcatcatactatgaaaatatcgttgacttattacagttttttcatcaacaaaatatatatacatctcatatggttgaagtataactactatcatatcatcattcatcaatcacttttgttgttactgttttcagagagattactacatagtagtacataacaagagaaaacaaagccatgacaagaaacatcaacaaaattctaaaaagcaagaagacgaagctggacaagatctctgcagcatttaacatacaccactccactcgcaatgaagttttatcgtgttgggacctccgattttggactttttttaattttacttactttggtaattaagtgatttttttttgctactacatgtgaaccaaaaagaaaatgaaaacagaaagttgtattaatggctagggattttaacttgtagctcggttgcttctcattaattagtaaacggtgtgaattaatggcatatataccattgtacgtaacaaggatcataaatgtggcaaaaattaaatcacagttgtagacaaataataaccccagatctcacgggttgatctcccaaatctatgtttaagcacgctactaaattcaaaaaattaagcactaatttaattaactcaagtctcccccaataaaaacacttcctttttgtctatctcccatatatgtaatggtcaacaagtcaaatttttaaaattcattatattctctgtacatgaaaacatttagtaatgtttctttttaaaaaacactgttttgatttaatgtcgttagtaaagtttattattttgatttctttttaactttccttaattatttctaaatgtgtcttctttatcgtttaaaccacactagtgtgtgcgtgtctccttcactttcaaagacagtctctttccccaaagagcggattcaggattcaccatctcgatctgtgtccaaagctcctatctttcttctttcttccctgaagaattttctggagcttctcaggtcaaatctcaaatctttttttaacttaattttgttatttctatcagaaagtttcgatttttatgctcatgcttgtgcatccgcgtacctgcatttcgttttgtgtttgagccgccaaagttttcaacttttttttttgggatttattgcaaatttgtcgatgttgaaaggttttctcaaggagaatgtgaagaaaaaggaagagaatgtgagttgattttaggcatagggttttgtgggttctttcagatttatgtagaatggtgcagctctgattcatgggtttgcaaatggtttctcacgatctgttcgttttcccaaggaaatgtagctgcttttttttttttttttgtcatcagattgaaatgtagctgcttttgaagagaaaagtctgatgcttctcttccgattttttatggatggtatttataaaagaaagaaatagtagttagattgtcgaatattggttttcctaatcttttttcttctctagattttataaaattggagtctttttctgcattactgtttgcattgttcaataaggaaatcaaataacttttgattctaccattgaatcttacggagttttgaaaaaaagtttgaagctttgaactttaatgtatcttctattgatacttttgttgatcagtggaaaattttcaaggaaaatcctctgtaagactcaattggttcgattattaagtcaaattggccatctttttttcagaacatttttatatgcatggttgcagattgctatctgctctgaatgttgatctctctattgccttaactaatgatctttgcgttcttttgacagatcagaggaagatgatgcaatcctaagactctaagacttcttcaaggctgtgttttatcgtgggatttttaaac

SEQ ID NO: 9538 - DNA, 3000 bp, Unknown
  misc_feature (1)..( 3000): cDNA_ID_2183387_gDNA_ID_1972143_Annot_ID_179297 3000 nt of promoter + ATG
ttctctgcttccaaaaccaattggaatgaagctcgaaggattctagcttggagcttgagtgatacaggagctcttcgagagatcaacactacgaatttacctgttttcttcctggaaaactcttcttcttctctttccactggagcaatcgctgggatcgttatcggttgtgttgtcttcgtagctctaatcggatttgggggttatttgatttggaagaaactaatgagagaggaagaagaagaagagatcgaggagtgggagttagagttttggcctcaccgtttcagctacgaagaactcgctgcagctacggaggttttctctaacgatcgtctgcttggatctggaggatttggtaaagtttacagaggaattttgtcaaacaacagtgagattgctgttaaatgcgtgaatcacgattcgaagcaaggtttgagagaatttatggcggagatctcgagtatgggtaggttacagcataagaatctagttcaaatgagaggatggtgtcgccggaaaaacgagctgatgcttgtctacgattacatgccaaacggaagtcttaatcagtggatctttgataatcctaaagagccaatgccgtggaggagaaggcgtcaggtgattaacgatgttgcggaagggcttaattatctccaccatggatgggatcaagtggtgattcatagagatatcaaatcaagtaacattcttttggattctgagatgcgtgggaggcttggggacttcggtttagctaagttatatgagcacggtggggctccaaacacgactcgcgtggtgggcacgttagggtatttggctccggagcttgcgtctgcttcggcgcctacggaggcgagtgatgtgtatagttttggtgtggtggtgttggaggttgttagtgggaggagaccgatagagtacgcggaggaggaagatatggtgcttgtggattgggttagggatttgtacggtggaggaagagtggttgatgcagcggacgagagagtaaggagcgagtgtgagacgatggaggaagttgaattgttactcaagttaggtctggcttgttgtcaccctgatccagctaagcggccgaatatgagagagatcgtttcactactgcttggctcaccacaagaggatttgttgactgggctcacgccggccgccgccgcggcagactccacggctgctcacgcatgagttgtttttgctttttttttttttttttttttttttttgtcttgtgaggaatagtaaagttgaaatttgatttacatgttggtctatgggcccataggcctgttaatattattcgaaagcctattcagatgtacataacgtaggagacatttttgtactacattgtttttcagtttcatttactctttttcagaaggtagactcacagtggatgctttaactatggaccatgataatattaacaaggcccattaatgagtcaaataagaataaaatagtagtattttcactattgaatcaaaccggaagagaaacggtagccatttgacacacctacctataaattagattggaacagaacgttggacgaccaataaatatgattcgcaacaagtaccaaatcacctgttttatttaatgaattggcctaccaataactggtttcatcatcctaagctacattccggtttgggacgttctcgatagaattggaatatttaaaaatggcaacttccaagaaagtggttgtttcgttagttttttttggaggaagttaacgaagaccaactttcaattcatggtccaattagaatcttcgactcagactaataaaagaaataaccataaaagaatatataaatcggtcaactgtactgtatatgttttttttacacacgtttaccatttaaattttttaatctctctttattcatgacctagtatacttaatttatacattgagaagtcaatttataaattcagtgtaaatttctctagacgttaatttacacataaccaattcaaaccacacacatatattctctcttaaaatgcaggtttagttttaagaaatcagaagaatatgaatattattttgaagataaaaagtccaaggctgatacaattcaattaaataatggcggactacgaacaagaaggggctgctgagaccacgtaacgagagtcgtcaacgtctagaagtaatacttacattcgtttgttttcttctcctcacgttactatttgtacattccaacttttgttttggttgaacacttgattttacaataagttaatcagtttctcactattttgatcattggaacatatatataattaatccggaaacgtaaaatggtggttggacccagtgtttttgttttgtaaagatctttttgtggccaaattaaagttttgtggttgcatttaaaatggcaaagacaacaacgaaaaactgtccaatatgattgttgcatgaaaaaacatgattactgtatattcaaaacctttaatcatgaatgagttcacactgtctagagaaatagtttagactttagtgtgggatcaattaattacttttaattaacgtctgatgcagtaggactccttctagatttcccagacagaggagtcacagctgacgtaatagttcttttttgttagctgatgtaatagtttctctttttttcctttattcgtaaattcaaaagcacataacgtttatttcttggtcacgttccgtctctgatttttccactttggtgaagaagaaacatacatgcatgtgcctaattattatgaatagtgaaatctcctcaatgcatatatatacggagcacacaaacccaacattcatatcatctttcatctacaatttctctcttgagtttcttttcatgtgttaaagtcttattgtcttgctaaattctttaaatctttcatctgacacaaacaaaaaaagagagaagaaaaaaaagaagaagactttgatttcttggatacaaaatg

SEQ ID NO: 9539 - DNA, 3000 bp, Unknown
  misc_feature (1)..( 3000): cDNA_ID_1818288_gDNA_ID_1972143_Annot_ID_179294 3000 nt of promoter + ATG
atctctcacgtagcacactgagcaaaaacccagagagcaaggggatataggaaggaggagatagagagacgataaggtgactcgctctgggtagagaggagaagagagttgtttattagacagtgggagtgatataatatctgcaatgggaggattttggcattgaggacaaaaaaccctaacagggcggctcttaccgtctaattatgttcgaagctgataatccttgtaattaataaaattgaattggtctgaatattctgaagatttttgtaatgacgttcacatatttcgtcaaaatggacttaatgattagtattaaaaaaagattagaattcgtgcattgggtactttgatatattatgcaacttgagtaaactttcctcattataaatgtatttttgttgagaattaaggcatgtattattcctctaaagacaacgattttatatgaataaaaatctctactggcgtgcatcattctcttcctctactttatttactagaattattgagacaaaagaaaatatattaatatatgagaacttttgtgtttagtagacttaaaccagcatatttgatttgcagaaatgtatgttgaccccaaaaaacaagaaaatcatgagcatatatatgtattactaactttaaatcagtttgatttcaatcatacttagcaaatatggcaagaagatgtctagtcattttcgaaatcctagtaattaattagtatgagtatatctaaaatccaccggtaacgtatcaaaatttgattttctattataaattgatggggtattagtttagcatagtgattactgaattttaatttgattttcaatcttgccatgcatttatttcttttaaaaaaaagaagaagaagattagtcctaagtaaactcagctcaggaaacaaagagagatctacaaagcaaatgaatcgataagttgttgatgaaaacgagggagggctttgataaacgtgttaccaacttgggaaatggctccaatggagtgttgttgggggactgtgaagatccccttcatcttttccctcaatcagaaaaactccaaaacaacaacaaaatagtggggctcattcattttgatgaattgcgtcttataaagctccacgtcgcattaaaatcagcgatatgtcagattcagaagaatacagaggtctagtagtaataactcacgtgaagcccagcctccttcataaattttaacatattgggctttctattataaacccaatacgaagcccataacgttttccttcgcggcccatacttttatttaatggacttatataatttataaatagggttccaaaacttcagattcttccaaaaactatgttggcgaaatcatccattttcaaacaaattgttggcgaaatgatacaatatacattcaattaccagaaagtttttgctttggcttgttgttgggtccctctaaaaacggaacagtttagataattagataaagagatttgaaaattgggtgtgattttgatatccgtaatatgtattaattttctaacgatggtcgtgtaaacatgtcatcatacgactttattatggctttttgggaccatgtggttattaatagataaaatttttgttgtgcccttactatgtttctttattccccgaatttcctttgttaactacaactacaaaatacaaatcaacagtattagtaaagttacttatcttgcaccaaaatttaccgttttcacattaaaaatatttacggttggaaatgaaaatgagatggcattaggtcctaaatggaaatattaattattaccgtcttttccgtcgacttatatatacatgtcttatattaggaaattaggtaatatattcggatatttgcggtattattttctatactcgctttattaccagcttaactaaagtggacaatgaatgttttttttttttttttttttggcatcacgatgaacaatggtcaatgaatggatctatctatcatacaatgtggagaataaaaagtgaggtcaaagtttcgttaattacaaataactaatttcttaatgctgtatttcatgctcaattagtcaatttgaataaagtgcgaaaactctttcggcctcgaatatataatgtttaatacacttaaaacaaggggtagaattgtccaaagaaaagattttgacagcagaccgagcagagacggctcagagtcagaccaagttgtcaagtttttctatattacgttttgttgttgtgtaatgtgtactactaatttcttttctttatgaattcgtaaacaagagaaattaaaatacagtaatcactaatcactgtctattacgagactgaacaaattaaatgcatgtttaattgagtaaattatatttagtcaactaatatagtaattcttaaaacactgaggagtagtacttacttccttatatgtttttttaaaacataaagttaaaataaaataacacgacgtgcaatattaatgtaattaaaaaagaatggttgaagaaagcaaacaaacaaaaaaaagaacagaagaaaacggaagtttttgtttctggagagaaaaccaaaaagttcattttgtttttctctatttcgtctttcctgcgattctgaatatcactcttcttcaatctctttgtcagaatcgtagcattggcttgtgagctttgatccttctttctttttttcttcccgtttgtgaaaaaagagagactagtatttatcatcgttgtcaccgccgatctgtcgtcggcagatggcaaaaccattacttttacctccaattaataacccggattcgttggattgttggacgtctctgtttcttctatctagtgtttcaactccggcatagaaaggatctgatttggttaatctcagagccctttttgtagacacattgtaaaatttgaattggtgaggaggagttagagccgtccgattggggtttgacccgattgaagcggagaggatg

SEQ ID NO: 9540 - DNA, 2159 bp, Unknown
  misc_feature (1)..( 2159): cDNA_ID_3050909_gDNA_ID_1972143_Annot_ID_179285 3000 nt of promoter + ATG
aagcttgtctttctcatcgattggtttgacctgttcagagctttccgacataggcttaggttgttcgtcgcgttgactttcgtctttctgctcgttgtttcccgatttgttgagttcggcgatgagacgatcgtcaaacactataccggaagatccctgacggcggaaagagattgttgatctttgaagaccctccatggatctatctctctctctgttgatgagctaaaagaagggcaaaactaggaaaagtgagtttaggccttataagtgattaatcaatcattgtgtttcagacttggtttccttttatttctgtcctcattattttttcatggggtcggtccactatttattgtttatttttatgatgatgcttccagtttctatttatttctttgtaacaacaatcatcggaaattaatgtaagcggattaacgatatcattcaaccggattattcaaacattaattgtaataaaaaaaaaaaagtaaaaaccattactgttattgatgattaaggcagagaattacatgttaattttttgtttgttttcacatctttaatcggattctcaacaccacataggcacataagtcctcttatatccatatttgttattttattccaaacttttggtttctttaaactcaaaaggggtaagactttttgtaattactattgttttatcagcaaattgcaaggattagataatagattagaaatgaacaggagaattgacttataggacacactaatttaatatttccttcttccccatttcggtaaaccaaatagactatttccttcttccccatttcggtaaaccaaatctattaggtgaggatgttattaaaatgccaaatctctctttataaaaacttgaaaggaaaaacaatacaaagtggtgaaagtgagtcaaagtaattcggttaccaatttgtattcaaagtcaacatcattgtactataatatggtataacttttgttcaataattcaccttcttatatcgtctgtttcttctcaggatcaccactaactaaaacatacgcatgtggtgggtttagcaaaactgtattctttggattaaagtaatgtgcataacacaaattaataaccccgtctgagttggcacaactcaccaatgttgaagattgagataaagaatttgggcccaatcgccgaatagaagtctatattcattactctcaggcccatccataaatacaattgtcaaaaagaaaataaaaaattggtggtccagctgggaacgagccagcaggccatggtgaatctgagtggcgtcgagctgtgatccgtccactgctgagagcgggaggtgatcgctgctctgtgaaaccagcctcacgcattgccctccactgcaagaaccgcctgagccaagccttcgcttaacacacacggatcactctcagcttggactgggcagcccggaacaatgccacaacagatccgacccgtgggccgagccagtgttccaccaacttattgtccccacacgggtcacaagcccacgttactgagctcgacgtacaagtattgatttaatttcatatataaagtaaaacattttgaggtatgtaaccgatgtgggacaaaatacaagtttgggcttcccagatcccacatttggtggaacacatatataaagagtctcttcgttgattagcttcccagatcccacatttcaggtaaaaacatcgtctgggctctttgccattttagcgaatgtggaaaggtgtggtttttttttgctctgctatggattttttttttcaaatcagggtttctctgttgaagtcatatcaggagcttgacatttgtttgtttgggaattagaagctagatacgtatattatatagcatcgtacatatcaaattttggtgtgtgttctaattgaatctgtacttgtttgtgtgttagtgggaggagctcttctcagaccttaagactattgctttagtggaatgcttctcgtaaatgtataagtgaggaaagaaactccattcgtatctatctactaccctaagccgtttatgcattttctgtccatcagaagatcaacacctgtttctggaggattccattgatttaagggattagatggatgatggaccatgtgggattcagtagatg

SEQ ID NO: 9541 - DNA, 3000 bp, Unknown; identical to SEQ ID NO: 7616
  misc_feature (1)..( 3000): cDNA_ID_1393632_gDNA_ID_1972143_Annot_ID_179287 3000 nt of promoter + ATG

SEQ ID NO: 9542 - DNA, 3000 bp, Unknown
  misc_feature (1)..( 3000): cDNA_ID_3630424_gDNA_ID_1972144_Annot_ID_179321 3000 nt of promoter + ATG
aattttgctttggtcataaaagttggggaaacgtttttgtgcaggcatgtcctcaaactctacttatttggtcactgtcgccgacattatgcactgcgacctgctcatggtattagaagtgatggttcggtacatggttcaccaagggactcgttcacacgcccctattcgctgcaatgttagctgagtgcattgtcgtgcaatgcataccggtcttgttttcacccaaaaccatggtacatttggtatcttcggaagtaattacttggtgttcacagagtttttcggagctcctgctatgcaacttttcatatgtacggtttcctctgtctgtgctttagaccgggcctgtccattgacaaaataacactcaaatagaacacaagatttcaaggatctgtcagagcaatatggttcaaatgagatcagtcatcaatttgattctgagcctgacttatgtgcacccaaacaatactaactacacttcgaaagatgcggctgatgtagcactagaagcactagctaagcaaacaacggctaaggttgtgtattcattgtaagccacatatctattttttcttcttatccggatgtttaatcacagagactcgacagtattcagaagacaataataagtataggtttgtggagagatgatctcactttacttgggatcaacgcgggcatcgagccaagcaacgatgtcattgattacagtgaaaatattttcgtctgtatcaccttctagaatgcaatggtagccacctggatagagttttagagtcttgtcttggctgactgcatgtttgtgaaggaatttactcacagtgggatctgtgactttatcagtgtctccatgaagtatcaacagtggcaacgagacctgcaacatagaaaagaaagatctcgttttttgcccctgtctatgatgagaagagctttcctttatttctttggttctacaactaaccttgtcaacttgcatctcaatgtctcttgttgcatttagaagttcaacagcagttttgagacgtgtttgatcatcgtagcatatcacatcgtactcacactttatccacagagaacaaaaacatcaaagacaaagttagcaaaaatgcttcagaaaatgtaccattgaaaaactaagagaaagtaccaattttcttttactcaggtccctgaagaagaagtcgctcaagtctctctttggaaagagctttgctttgggaaatagtgtcgacatcaagattaacgtcttcaagactagtggaggaggttttacatcttctgaaatcttgagacaacccaaggtcaggtatttcaaacatgaactaactagatgtaaaatgtgaatacagatacttccaagcactgaaaatcttatttgcagatttgagaaacaaatctccagacctcaattacatgcatagaaaatgatatagttagagacttaccttacacattggagcgacaaggataagaccatcccaagcttgaggttctttaagatgaatttttaaggcaactgctcctcccattgactgtcccagcaaaaaccggggcaaatttctcaattccgatctccctaggaatcaaaccacttaaataaaacccaaaagcaagattcaacaccaaaaagcaataacaggtacaatttagatatacctttcattttggtgaactgttcaatagcattgtctgctaagtcatcaaaacttggaatgtgaccatgtaaaccatctgataaaccaaaaccaggatggtctatagcataaaccccataaccaaaacctgctatttgctttgctatacctgtaaaacaacccaatttttttcccacatatattaaaagaagagcctttcaactaaatgatgcaagtagagataaatctaacgaaccatcgaagaagaaagtgcaagtgcttccatagccatgacagaaacatacagcagctttgatttcgtcgccggatttcggcaaccaactcttgcagaaaatatcttcccctttcgaatttctctcataccactatcattattcagagaagaagattcaacgactttgtatctccttcgaagagaccaaataaacaaaatcactgcttacctcctctgttctgatcccactcggagctttctgtcaccagatacaaatgattagaacggagattatgttaattattttgctataaaggtatgagtcaatgcaaccttgaacaagcagtgatccagctgaagctgcaagtcaacaaaagcggaacgggctagtcttcgtgcgggagcttgatctaagttctgtgaagcaatcagattcagctcgtcgctcactccatcgatcggagatcgtttcgcgcaaacaatcgccggcgcgaatcgtcgagtgatggccagagagctcccatatcggtatcggaaaggggagagagtagctggagtatcaaaacgcggagttaaagcacgatccatggattctggagattcaatcccagattggggaagaagacgaaaagagtaagattttgtgcgggaaatttctcacgtgcaacacgtgctacgacgacgacgacgacgacgacaaagttttcaactaccagaatgatgatcgacgtcaaccgttcgattgtgacccgaaaccagtcaaacccatttataaccggctaaaaccggatttggattttgagagatttccattatccaccattgtttgactccagattattgatgggcctcactattattgggcttttacttttttttgacgctattgggcttttactttataattgcaatttccattgaatcatatataaaccggatttaagaaaaaataaagaagaaatttatgattgggtcgcataaattcgagacgatggtgagatacactgcacagttagttgtgcatagtcccaaactataaaaactctctagaatcttcaaacgtcagtgtttacataagaaatgacgacttttcagtactcgctagtttttctcgttctcatg

SEQ ID NO: 9543 - DNA, 3000 bp, Unknown
  misc_feature (1)..( 3000): cDNA_ID_3042343_gDNA_ID_1972144_Annot_ID_179329 3000 nt of promoter + ATG
aaccttagagaaactgtatgcgtgggaaaagaaactgtacaaggaagtcaaggtattaatatttttaatatttgatgcagctttgtgtttctgaatcactaatgggaatctatatcacatatagattcttgcgtgatgttaaattgtgatttgcgtgtgatggcaggacgaagaaaagcttcgtgctatctatgaagagaagtgcaggagactaaaaaaaatggatagtcatggagcagaatctatcaagatcgatgctactcgggcagccattaggaagcttctgaccaaaatcgatgtttgtataagatcagttgattcgatttccagcagaatccataaacttagagatgaagagttgcagccacagttgatacagttaattcacgggtaaatcatctctctatattttgacatctttttacagattaagctgaaaaaactgatattttgtgttttgaaggttgataagaatgtggaggtcaatgctgaggtgccaccagaaacagtttcaggcgatcagggagagcaaggttcgatctctaaaggcgaacacaaccttacaaaatgactctggctctacagcaattcttgatcttgagatagagcttagagaatggtgcatcagcttcaacaactgggtcaacacccagaaatcatacgtccagttcctaagcggatggctcacgaaatgccttcactatgaacccgaggcaaccgatgacggaatcgctcctttctctcctagccagatcggtgcaccgcccatctttatcatttgcaaagattggcaagaagcaatgtgtagaatatctggagagaatgtgaccaatgcaatgcaaggttttgcttcaagcctacacgagctatgggagaagcaagaagaagagcaaagggtaaaagcgcaatctgagcagcgagatgcagagtcagagagaagtgtggtttcgaaaggtcggtcagagagcgggatatcagctttggatgatttgaaagtggatttagattcaatgaggaagaggctagtcgaggagagaggtaagggtaaagaaaccattaagcttgtgaacaacgcgtcttcgagcagcttaaaagctggtttagttcccattttcggggcactgagaaaattcacatcagaagttgtgaaagctcatgaaattgttaggcttcaacatcctcagacctcttcttgagtagagagtgtggacttaccacatttttgcaccgttttgaagttttgttacttgcaaattagacataggtctatatagaaggaaattgttgtatagatgagttcatattcaattattggttggttagtttcccttgtaaaccgtttttaaatggtgaagaagaagatatctagtttgccttgtaagccgttacttgctgaattaaaaagaatgtaatatgactgttcctggttgagattaaaaggaaaataggataaagctatgtggaatagattagagagtatggttaggcatgatctatgtctataagactataatagagtatctataatggctagaacttaaactaagaacgattatgatgaattgtcaactattggatcagttttggaagaagaaaagaaaaattacatatacagtaaaacctttataaattaataatgtttggactgcaaaattttattaatttatagaggtattaatttatcgataaattaataaatattaatttatagagagattttcttaatttagtaactttttaaaaaactttatgagattttttcattatagaaaatatatttctagaaccagttacaagtataacataataataatgactagaaaacaataccaaaaattttgatacactaaaatatgaaaactatagtcaaacaaagaacaaatatgaatttaagcaaaaaattattataaatatattttacagaatttttttacatataatatatatatatatttgatatatttatacaattattaatttataatataaatgggaccatatatttacatagaattttcaaaaaaattattatcttattaatttatcgatttgtgtaactttttacactggtcccaacttgggaccggaagaatttattaatttacagaggttattaatttatagagtattaatttatgaggttctactgtaaactactgtgacatttttcataacttaacttggaaaaaaatatgaaatttagatatgaaaaatcacaaattcacaacaaggtaaatagtttcaaactatgcacaatgttgcaggcgatagtttcaaactcttgacaagttgacatgcataaactacaaaactatcaaagatttctcatgttttggattcgtatttagtagttttatgcattttgttcattatcacacaacttaataaatcatcagtgtaggtacaattacaaagacaatagtctagaacttaaaaatcatttttacaagtgcagaaatgggctatgttgccatatggcttcacaatgtcaaaacgggagagatactatggttaggcatgatctatggtttagggttatcaatactggctaattatgtatcaaagtcaaaccaccatggctttcatttttttttggtcagttattttttttaaaatgcacattacattattatgttgactcagcaggatataataatgagaaaatctaatgctatttaaaatagagaaaaattaagaaataactttctcctaattgtgattttcttttcaatggttgattatggaagtaaatattgaaatatcaataaccgctgtgggtcaaagagtcaatgacaattattacttgcccaaaagttaatgaaaaaccaatgacgaggtttatccaatgaaaactctccacgtgtatgtatgaccagtaatcatccagcgatttcgtaatttccagtgtaagaaatgcgctcataaatatcatcttctctattgagaagaagaagaagaattcacaagaagaatattcacagagaagagagagcgataata

SEQ ID NO: 9544 - DNA, 3000 bp, Unknown
  misc_feature (1)..( 3000): cDNA_ID_2183484_gDNA_ID_1972144_Annot_ID_179331 3000 nt of promoter + ATG
aattccaaatccttatttgtggaattcgataacagaatatgaataagaaagacatatgatttcacatagaagaaagcctgacgcaaacgctaaattctcgaactgcgaaagagatcgctctttaccaccagagcattgtgttaacatcaacaagtccatgcccaacacggtgttacacgaaaagtcattaggctttggttccattggtgtaatcatctctacaatgatcactttacctttttccggtagacttttccaacaatttttcagaatctttatacaatcctcgtctccccaatcatgtagtatccactgtcaataacttaaccatattatatttcgaaaataatgagactcaattataatttatcgattcataaacatataaacttactttcataaagatggcatctccttttggaacttcaataaacatgtctccggagacatgcttgactcctatcattagtattagtcaaaccatacaaaagatttaggaggtacattagttagtaatactagcacagcaaatatactaagtatagttttgtacctggataaaaaggagcttgggttaaaacttgagctaagtcgaaattaacacctttgatatgaggatacttggaagtgatgagacctaatatggtgccgatacctcctcctacatccaccaaagtgttaacatcttcaaatcctctgtattcttctagaaccttcttcatgaccattgtggaagattccgacattgcgcggtgaaacaacttagagaactggtcatccgaactaatatattcgaaaagtctcatgtcgtgggcagagctgaatgcatcttttccttctagtatcacatccttgagatttgtcctatatatggaattttttcaaaaaaaatatcttcaaatgttcatttacgttttatgttcactaaccatgttttgagaatgacttggctatggagcaacaataacaaggacgagagagaaccagagccgtcactatctttcaagaagtacttgcaaatcggttcagctgcatatactctctcgatctttccggtttgaccattttctctgctttcaaccatacaacacttcaagatcgagtggcttacaagtaaccgcagcatccggtccagcaataccggcgcctccgggttagtgggtttgtttgggagactaacggctatctcagacggtgagagccacgtgccgttgctagcagcagcgatcgtatcaatgactccaagctctaaggcggctttgagaaccatggggaaagccacggcgttgactatactctccgcttgcaagctcaccattttctcgtcgatttcttgttcttctttggttaaacccggtttagggtaagtggttaagggatcttgaagatggtttgacataattgtcgatataggttgaaagattgaagaagatgataacaaaggtagagttgatttgaggatgtggttttaactttcacagttagtgatgtttttataaggagaaatcccaaagacaagtggactgattatgtttaatactaatttattgtcacggggatggacaaaaagatgatggttcatgtatttttttttgaataaaagatgatggttcatgtagatagtttgcgattgttgttgttgttgttgttttgatatagataacaatggcaaagaagattgaattcgagattcacactagtgccatgcactgagacgcgtgtagtagtactcaaatgcgaattaaaagttaactaatgaaagatgcgtcagagttttcatttttttcttcacatcgaaaaggttaaaatagaatatcgacgattataaaaaaaaaaactacaaattttaaaacggtcaactatataaaacatacgatgcgataggaaagaaaatcataaccaaagtttggtgatatcttcagtttcagtatgcttattgtggtgataaacaaagatttattatggacaacactaagtcactaactggtatcatgatatatatttcaaggaaaacctctttttcagagaaaaagatatatttctagaaatctcacaattaaagggaaattactgcaattataatttttcaatatatgaccataataaaactgacactttaggaatctttgcaaattaattatttaatggtaattttagattatttcttaaaattgtgaaatttttgtaaatcaaaactaataataataataatgatattaataaattccaacgagaagggatcataatctatatatattaattatcccaaaaaaggaaacaaaataattgtgaaatttttgtaaatcaaaactaatcatagtaatgataatattaataaattccaacgagaagggatcataatccatatatattaattatccaaaaaaggaaacaatgtcataatttttaatagtaatttcttaaaaccaatttattattaacaggtggatgatgatttaaatgcataagaagagaaaagaaaaaaaataattatatatgcaagtaaagtcatattactcactttgtcgttctattattttttctcaaatatcaatgcataatttattatgactattaataatttgcaatctttttctattggttaatttttaaaataaatgttagatactatatttatgggtatttaatattagaataacaaaacatttatggtctcttaaactttgtgcttatttagaaaatattataatctggaacgttgggagtgtagattagctgtcaaatatatgatttattacttaaatgtgtttatcttatttaggttattcttttaataaatattttggtttgactctcaaattggcattaattattttggtcaaacttaactttattgcctttaatttgagtaagaataaaaaaatatctgtgtgtgtgttgtctgtatatatatgtagacattgttgataagaaaaaatattcagtaccagataaacacaacaacaaaagaaaaaatatagacatatcatttgcatcatg

SEQ ID NO: 9545 - DNA, 3000 bp, Unknown
  misc_feature (1)..( 3000): cDNA_ID_3042311_gDNA_ID_1972144_Annot_ID_179334 3000 nt of promoter + ATG
ctgaaaccgccagcaagcagcagttagatagcataaagaaagtggcgaaacttgaggctgagtgcaggaagtttcggatgttggctaagtcatcagcttcgtttaacgatcatcgatctacagatagtcattctgatggaggggaacgaatggatgtgagttgctctgattcatgggcatcatccacattgattgagaagagaagccttcagggaacttcctcttccattgaacttgatctcatgggtgattttcttgagatggaacgtcttgtagcattgcctgagacgccagatgggaacggtaagagtggacctgaatcagttacagaagaggttgttgttccctcagagaactcgttagcttctgaaatagaagtactgacttctcgcattaaggaacttgaagagaagttggaaaagttagaagccgagaaacatgagctcgagaatgaagttaaatgtaacagagaagaggctgttgttcatatagagaactcagaagtactgacttctcgaactaaggaacttgaagaaaagttggaaaagttagaagcagagaaagaggagctcaaaagtgaagttaaatgtaacagagaaaaggctgttgttcacgtagagaactcattggctgctgaaatagaagtactgacttctcgaactaaggaacttgaagaacagttggagaagttagaagcggagaaagttgaactcgaaagtgaagtaaaatgtaacagagaagaggctgttgctcaagtagagaactcgttggctactgaaatagaagtattgacttgccgaatcaagcaacttgaggagaagttagagaagttggaagtagagaaagatgagctcaaaagtgaagttaaatgtaacagggaagtggagagcacattgagatttgagctcgaagctattgcttgtgaaaaaatggagctggaaaataagttggagaagttggaagttgagaaagctgagctgcaaatatcttttgacataatcaaagataaatatgaagaatctcaagtttgtctgcaagaaatcgagacgaagctgggggagatacaaacggagatgaaactcgttaacgaactaaaagctgaagtagagtctcaaaccatcgcaatggaagcagatgcaaagactaaatccgcaaagattgaatctttggaagaagacatgagaaaggagaggtttgcttttgatgagcttaggagaaaatgtgaggctcttgaagaagagatctctctccataaagagaactcaatcaagagtgaaaataaagaacccaagatcaaacaggtctgtctccaaagttcaggtgttagttaaacttagactgtgttccatcacaatcacttttttgtccactaaaacttgattactataattcaggaagacatagaaacagctgcagggaaacttgcgaattgtcagaaaacaatagcttcattggggaaacagttgcagtcccttgcaacacttgaagatttcttaaccgatacaccgataattccaatggctgcaaatggtgtaagcagcagcagcaactcagagagttggaaggttcacaaaaacgaaactttcatgacaagaaatcatcctgagtccatcaaaccaaccaaagaaacatctccatcttcttcttcttctactgcgtctgctgctgtttcaatgccagtttcaacaaaccgagggagttctgagaagaatcgcaatggatttgcaacagtattcacaagaagtaaagacggtatccatctggctatataacataactttggcagagtaggcagagaaacttatctcttagggtttaaaaaggatccgtttttaacaccactttgttcccttttccagattttgaatccatagtagtagttttaaaagttaatctctagtgtaatgcagtggatggatattccataaaagatgtttcaaaagttttcaattttctgttaagaggttttaggaagtttctatgtgatgttgttatgaatcataatataagacaataaagaagagaagccaccatcataagagaagaatcaaagactaggcatataaagagggttcctataaagagagaaacatactattgaaaagttcttagacttgaatctacttggagacgaatatacataataaagaagactgatttaatggacgatcaaatttgcaagtgttggaagagaaactcgacttgaactctagctttccttgctttggatttagcagctttccttgctttacgtttatcgctaaccatcttcttcataagctccagtttatctctgataaaatcttcatgtccaaattccaatactccagttcttcctttaactattttgaacccatgagaacgaaggttggagaaaaaccgtgagaggtttgtgcccaagtctacatatttaggcagaatccttctgtaaaactctccaacattccagataatgaaactgttgttgctttcgctccacgatatgattgcatccgttgaagcatcatcaacaacctcatacactctcatgtagaaattgtaacccatccctaaaacctcacaaacttcacaaattagaatcttagaataattagggtttcgagattttagcatagagaggaagagcaagagcattatttatagacgagctatcaattcaaaggacggtcaagatatcagcaaaatttcagcggtcaggattaaaagttacaaagtttccttttttctattttgtttccttttttctaatacgcatatattatgtatataaataagatagctttcacctaacaagcatccgaggttctatggtgtagtggttagcactctggactttgaatccagcgacctgggttcgactcccggtaggacctctttttgtttcttacatttttttagttattacttttcaaaattaaccctattatatcactcccacttctcttcttcttctgtcgccgaaaacgcagcttaagctaaaacccctcagagagaacaatg

SEQ ID NO: 9546 - DNA, 3000 bp, Unknown
  misc_feature (1)..( 3000): cDNA_ID_2183488_gDNA_ID_1972144_Annot_ID_179332 3000 nt of promoter + ATG
ttcaaggtggaattttttgagttgattacatattttcaagacatatgctgatttaatagtatattgcaaatatgtaatcaactcaatgttttaaaattgttagcctaagtttaattatattctcacttgaaacaattttactgcatgtagtacgccaactggccttggacttcagccatgtgtttcacatggtggatttgtattcaacaagcctacccacccatgagttttaccagcaacgattaaaacaattgcaaactcaacgcgtctaagcaaagaagaacaacaagttgacgaaagaactctgagctttgcccacctctactcggtatggttcaatgttactatagattactttctaacattaaaacacacactgtttttggatttaaaattttattatagacttaaaaatttaataatagtatgacgcttttaaatgattataggatcaatcacaagttagtgcttccttaaagatattttcctgcgtgggttagaagaaagtgatatcctgattcacgtggttcggttgacccctacttttgttttcgctatggaattataaataaataaaagagaactaaacatgtattcattccatttcattatgtgagcctgaattgtgtgacatgatcagaataccaccacaaaataaaatacgaaactcatcacaatcctaaagctttgattgatacaataagacgcggctaatttaggaatcaaatcgaatcatccacagattggtaattcttagagtggagattatacgataaatcacagataatgggaacttcaacgctcaaaaatggattggttttgtaaactattacattgctctcgagggatattttatttagggtattttgaatttttatgaatcaaatttatttcctacccggccatgacacataaatcaaagataaatatctaatttttattaaatagatttagttctcaagattcagtaacgcatacatataaaggaaacttatcaatgagtacatgaacaatcatgtccacttgcttgatttatacaaacgcaattaggatagtaaggatccttagtttcatctttgcactgttgaggaccccgagcacgaattggactacaatatgttcccggaaagtattcaacaagtacaggtggacgatcttctgcctccactgtttcatatcaaccacaaaaatattagatggtggatgaaacgtgttagataaatacaaaattgataacacaaaaatttacattcataacattttttcatcagtcaatgttttcatattaagcaagtatataaacaatcgaaattatatgaattatatatatctcacctttagcattatacatcacgaaaaacatgagaacacaaagaaccacacacgcactaacagatttcatgatgcaaatgatatgtctatattttttcttttgttgttgtgtttatctggtactgaatattttttcttatcaacaatgtctacatatatatacagacaacacacacacagatatttttttattcttactcaaattaaaggcaataaagttaagtttgaccaaaataattaatgccaatttgagagtcaaaccaaaatatttattaaaagaataacctaaataagataaacacatttaagtaataaatcatatatttgacagctaatctacactcccaacgttccagattataatattttctaaataagcacaaagtttaagagaccataaatgttttgttattctaatattaaatacccataaatatagtatctaacatttattttaaaaattaaccaatagaaaaagattgcaaattattaatagtcataataaattatgcattgatatttgagaaaaaataatagaacgacaaagtgagtaatatgactttacttgcatatataattattttttttcttttctcttcttatgcatttaaatcatcatccacctgttaataataaattggttttaagaaattactattaaaaattatgacattgtttccttttttggataattaatatatatggattatgatcccttctcgttggaatttattaatattatcattactatgattagttttgatttacaaaaatttcacaattattttgtttccttttttgggataattaatatatatagattatgatcccttctcgttggaatttattaatatcattattattattattagttttgatttacaaaaatttcacaattttaagaaataatctaaaattaccattaaataattaatttgcaaagattcctaaagtgtcagttttattatggtcatatattgaaaaattataattgcagtaatttccctttaattgtgagatttctagaaatatatctttttctctgaaaaagaggttttccttgaaatatatatcatgataccagttagtgacttagtgttgtccataataaatctttgtttatcaccacaataagcatactgaaactgaagatatcaccaaactttggttatgattttctttcctatcgcatcgtatgttttatatagttgaccgttttaaaatttgtagtttttttttttataatcgtcgatattctattttaaccttttcgatgtgaagaaaaaaatgaaaactctgacgcatctttcattagttaacttttaattcgcatttgagtactactacacgcgtctcagtgcatggcactagtgtgaatctcgaattcaatcttctttgccattgttatctatatcaaaacaacaacaacaacaacaatcgcaaactatctacatgaaccatcatcttttattcaaaaaaaaatacatgaaccatcatctttttgtccatccccgtgacaataaattagtattaaacataatcagtccacttgtctttgggatttctccttataaaaacatcactaactgtgaaagttaaaaccacatcctcaaatcaactctacctttgttatcatcttcttcaatctttcaacctatatcgacaatt

SEQ ID NO: 9547 - DNA, 3000 bp, Unknown
  misc_feature (1)..( 3000): cDNA_ID_3042299_gDNA_ID_1972144_Annot_ID_179347 3000 nt of promoter + ATG
acttaagttcttgctgtttggtcccactgtaccttttaacagtttacactatcgaatcaatcccagtttcatcttcgttagctcgatgacccaattaatgggttttgcttaagcatcgcagagtttaaacccgataaatgattcttctcgtttgtgactttagggtcatcattggcatacgtactgatctcaatgcataaaagatttgtactttgaaaattttggatttggtatttgagatattagcagtaaagttttttctctctgttcttctaaatatttccaaacttgattacttaggtggcgaagagattagagaagttcaagactactattttcactcaaatgagcatattggcagttaaacatggagcgatcaatttaggccaaggctttcccaatttcgacggtcctgattttgttaaagaagctgcgatccaagctattaaagatggtaaaaaccagtatgctcgtggatacggcattcctcagctcaactctgctatagctgcgcggtttcgtgaagatacgggtcttgttgttgatcctgagaaagaagttactgttacatctggttgcacagaagccatagctgcagctatgttgggtttaataaaccctggtgatgaagtcattctctttgcaccgttttatgattcctatgaagcaacactctctatggctggtgctaaagtaaaaggaatcactttacgtccaccggacttctccatccctttggaagagcttaaagctgcggtaactaacaagactcgagccatccttatgaacactccgcacaacccgaccgggaagatgttcactagggaggagcttgaaaccattgcatctctctgcattgaaaacgatgtgcttgtgttctcggatgaagtatacgataagcttgcgtttgaaatggatcacatttctatagcttctcttcccggtatgtatgaaagaactgtgaccatgaattccctgggaaagactttctctttaaccggatggaagatcggctgggcgattgcgccgcctcatctgacttggggagttcgacaagcacactcttacctcacattcgccacatcaacaccagcacaatgggcagccgttgcagctctcaaggcaccagagtcttacttcaaagagctgaaaagagattacaatgtgaaaaaggagactctggttaagggtttgaaggaagtcggatttacagtgttcccatcgagcgggacttactttgtggttgctgatcacactccatttggaatggagaacgatgttgctttctgtgagtatcttattgaagaagttggggtcgttgcgatcccaacgagcgtcttttatctgaatccagaagaagggaagaatttggttaggtttgcgttctgtaaagacgaagagacgttgcgtggtgcaattgagaggatgaagcagaagcttaagagaaaagtctgaagtttgaattagaaagataccttatttttatctagttgtgtaacttcttcttcggttccatttcgggagagactttgatttagcaaagcaaatcaataaagtaaagtttacgttatcaaatgcaataatagtctttagagtcttttgttgaatcttgaaaagtccttaatgagtaaattaatagattaaggttgaatattctctgaaagactgaaattgatgaaattattatattttagtggtcggattatcttttctaaagccgaaagttaaataaagtaattgaatgcatcagaagaacttagatctcagtgaaagcgatgttagcttaatcaatcaaatactagaagaaccatttttaatctaatgtcattagcttaagattgtcgttttctatcttttgaaaataacattatacaatgtcattagcctccggctccgatttaacgttttccagtatataattatatatgaataaatatacatttattatacattatattggaaatttgataaaatattgtcccatgtgagcatttttttaaagtatatatatgaggcctagtaatgcggagtgcaccatgcgaggatgtttggtaaatatgtttttattcacaaattggatcaaaacccattttttgtgtttcttatctttattgatatttttgtttccgaatcaagtaattaatctctaccgtcgattagtagattacctatctttacagttttcaccaactatcttcttcccaatatgaatcgttgattttattttagtctatagtcacactttttctattaataaatataaagtatacttactatgaatatggattaaaattttaaaatactctattgaaagtccagttcaactgttatattaatatagaaaattcccccaaaaagcagagattttttcagcaaaattttaaattttgtaaaacgaaaaagttatgtttatttgtttaatattaaaaaattgtgaccaatagatgtgtgtgtagcggcacgtgccggcctgcaacagtaaagctaaaaagcgtccggctcctaatattccccgtcaagaccgtgacttcttcttccttaactcagatccaacggctattgttatacgctttcgttaatcaaccgtcagattttcatctaacggtcaatattaaatctaactccttttttcttgtctcttaaaataatcccaaacccgacgcaaagcttctctctctctttctcgatctctcctaagcaaagtgagcttcttcttcttcttctccttctttttagcttcgccgtgaaaactctccggtatcggaaaacaaaaacgacgtataagaacaagatattgctggagttgagagatcgctcgtcttcttctccgttttgcgatgcttggcacggtggtgcagtggtggttaacatattaccgtttaagatttggccggaaaaatcgagaacgaaagtggtgattctactcttaagccttcaaaatcaaagcttttttttgtttctttgttctgttttttgcaaaaaataatttccgcggagatg

SEQ ID NO: 9548 - DNA, 3000 bp, Unknown
  misc_feature (1)..( 3000): cDNA_ID_2183522_gDNA_ID_1972144_Annot_ID_179341 3000 nt of promoter + ATG
accgactgaaatggagaaaataacaaatccaagcattattgttgcaattctatgtaccttgacaggctatatgacttgagagcctccccaaatttctgcctaactactgttccacttcggcattctgatgtattggactgtagacaaaaatcattagagacataagctattttgaaagtaaacgtttccatgccagaagaggaaactaggtcttttagatacatatagcggaaacagttcatacctctaggattttaaatccttgttccttggcgcatgcatgaatggctgcagatttcccactctgcaacacaggcacaattgtactcataaacatgaaactcagaaagcattgtagacgtaaaaactgacagttcatggcagaatatctaatcacacaccccagctggaccaacaattaagagaacattcttctggctatcttcagcaccacttttttctgagtcagagtcactttcagaacagttgtaatcagcatcttgcgatttatcttcatcactactcaaaaagtctttgtttggctgaaaccctctctcataccattggcgcagccattcattcattacctttacagattcagtattaccacatacctgcaagatacgtgggtaagaaagtgtgagaaatttgtgtttggtaagaagatataaacaggcatatctactttgaaagcagtatgctcaaattgtctgacctccgaggcacttcttggctggtacttatctacccataatcgattacaaggttggccactggagtcattactgcatagattagaaattatagatcaagcattctagaaagaacaaaaagtatgctcaacttaaaacatgtgtgctgctactgatatcaaatacaaaatcactacctttctcgacatgacaggtgttgcatttcatgagaaatattggcttcaccaccagcatcatcagacaagttaattgcttcatgaacttcacaatcctaaaaagaatgatagaaaataaccctttattatgaatggttccaacaaaccaaaaaataaagaccaaaagagaaagttttaggtcatcaccgattctgctccatctaagaagccgaggcacccacgtttctcctcctggtcttctattaagactaccgaagatgcctctgcaataccttctgattgactagtgcattgttcaggctcctcatcatcgatgacacacacgtcaggatgtgaaagagatggcaattcatttaaatcaaactccttgggccgaggttcaagagagttaaattttatttgttgatcaggactctcagtagtagatgtttgctcatagaaagtccagttcttccaatcaagggtggttggataatcatcctaagaagaagattttgctattcagattcctttattattacaaacgatcgaagaagttaccctatatgtattagtcatacctgaaacttgtcaaatacatggatagggccaatggtgacgattttatctctccctcgaccaagacacgtaccattctctgctgcaacagcttcttgatttcttttacctcctttccaagtcgagaaaaacggatgtatttgcttcccagcagacatccgcgaattttcctgatcaaatagaaagcaaaaaaaaaacaattttagatgagacaaaaaaaagtcacaccaagttttgccaaaacatgcttaattaacttacctcagctcttaacttagcttccaggcgcaaattgggaactggaggtgaaacattggcagcaatcatctgatcaccagcagctacaattccgtttttagttgcacatttcttaggagttgtttttcgaggactctttcctttagccacctaaatcagagaaaaaaaaatagagagatcactcttacaaaatcttctccaaagtagttccccaccgtaatttatagacgaacacaaaccttcttggtagctccgttcttcggagttctctctttctgttttctcgtcttcttcccttgactacgaccatctcctacttctcctccttcatcgcacatcggatctccattagagtcaattacatcctccggtttatgggggagcaaagacgactgaaccaatttccgacgaacattccgccgtggagtctgatccattgcaatcaccgtcgcaattggaggaaatcagagttacggtagaatctagggtttatgtgtgaatttggggatcttggtaaaattaaattataacgttaaggttaaaagatgacatatgtctgatgcttcttttgatgaaagatttgttttatagttaggtgagaatttggagggaagaagattcttttttcgctatttcccgctaaactttaaggccgtgtttgtctccgtctctctcgaaccgcttcttcttttttttttaatttttttgcagctctttttacacacataaattctttgcattacctctcgggaaaaaaggaaagtgggcttctaagtgggccttaatttcaggcaattaatttaccggattacccttaaaggcttaaaccgattctggtagggggggataaatgttgagtgttgaccgttaaaccgttgaattatcccacgttgtacatataaccggtaggctcaaaccgaacggaaataaataggggcaaatccgtcattgaacattatgttatctcctaccgttgtcctaccgttgaacggaaataaacagctgtgagctatttcgataaagattgtaacttttcctctctctctctctctacttcgaacaggaagaagatagattctctcagttctttcaaatccataaaaatatacctggaatcttgtttctatacttcttctgtttctcatactctccactaatactaacatttttccagaattttgttaaaccctacaaaaatttgaactttttaaaaccctagaaaattccaaattcgtaaaaccctagccaagttcctctattgcgtgaggggaactcatcagaacccacgaatcgaa

SEQ ID NO: 9549 - DNA, 3000 bp, Unknown
  misc_feature (1)..( 3000): cDNA_ID_2183518_gDNA_ID_1972144_Annot_ID_179340 3000 nt of promoter + ATG
aaataaaataattcgcttaggatggaaataattaaatttgcagaatcgagatttttagattttttgaaattaaatatgtgcgctgaataaaatacatgctttatggagaaatttctaggcaagtgaagataactggttttccatcattatggcagaggatgctctaggttcaactacatattctttaaaccaatttcttttttaaagaaaaaaaaaactacttatttcctttgtccctttgaacaaattatcgtttatatacaataagaatcaaaaacttaaatgggcttttcgttatccaaactaatttgggcttcttcttggattgaattgggtttggttgcccagacttgcaagactgtgaaccggacaattttaaaccggaaaaaaccgtcaaccggccaggcattcaatacaaatttaacaatgacaaaccaaagtactagcagtgttcatgagattgtcttgcattcaaacttagaaaacaaaaaagcaagaaccaatggggatgagtaacgcaatgaatgagtaatagctcaatggacaagaagctatagaaatacttccgcctggaccattagctggattacccgggattgaattgcttgaagaaaccgtagctcctccaggtgaagccgcggggactgcggctatagatgatcctccaccagcaatatcatcaaactctggtgatggcgaaggtgaaggtgaaggtagatacatcagttcctttggaacattatcaggcggggctataagcggtgctaattgttgcggtcctgcaaattgtttttaccaattgcatttcagctggagatcaagatttcactcattgtgttttatcataacgcatgagacagtatacttaccagggcatcgaggttgaagagacatggacaacctgaaaaacaaacaaagagagacggagggagattggttatataggttgttaaattcattagcaggggaaatgtgataaggaaagactcattacgtggtcaagatagtgccgctagcgaaaccgttgtaactacaagtagtaagtttacaaccggagctactctgctgcgaagtaatgttaccaagcatgaagttgctgtttctacatctcatactggaacaagagactgatatagaagcaggctcacaatacatactgcatcacaccaatgctaaatatcagcaaatcatccaaaattcgactaacaaaactcaatcgcttaataccttcggcttccgagaacacagctgcattgtacacagtggcctgcagtgagagcatagcttccatttggaatgattaatccgtaatccgtagcgtatttggggaaatttgaactacaagctgagaagttttgatacaaatagacagaacattcaataatctgttataatctgtgcttaattggcaaatttctattcaaagattgaaactttagaactcttctaactaaataaagaagagagactttggatcttacctagcaatgggacagcgaggatatcaccaggattgatatcaggagctcccatagcattcacgtttgttaaatcagtaacagaggtcgagaatctctttgcgattccagccatagtgtcgattcctctcacaacgtaagatagataaagcgccggaagagattcatcggtaccattgaagcaagcgcaaggcaatggaatcacaagctttgtacctacatcgagaaccgaaaggtcagtctctgaattcgcgacctgaatctgctccggagagaccagaccaccgtaaacagagtcagcaatcgatcctagtgtgtcagaagtacgagtcttgtaatgagtcgagagggattttctgattccgtcgacacaggagcaagtgattgggatcttgaggaagagcttagcgggaaggacatggttctcgacgtctgggtaagagatatcaatggagttagacaaaagcattgaaactgggtctacttggaagagagaagcgacttctgtgactttgaggtcggtgtagagagtgtagcctagcaatgagttacaagtgtctttactggagcaaggctctattgtggattttgcagtcgccattgatgctaagcttgaagctaaaattagaaacagaagtaagggtttttctggattcttcatttcgattcgtgggttctgatgagttcccctcacgcaatagaggaacttggctagggttttacgaatttggaattttctagggttttaaaaagttcaaatttttgtagggtttaacaaaattctggaaaaatgttagtattagtggagagtatgagaaacagaagaagtatagaaacaagattccaggtatatttttatggatttgaaagaactgagagaatctatcttcttcctgttcgaagtagagagagagagagaggaaaagttacaatctttatcgaaatagctcacagctgtttatttccgttcaacggtaggacaacggtaggagataacataatgttcaatgacggatttgcccctatttatttccgttcggtttgagcctaccggttatatgtacaacgtgggataattcaacggtttaacggtcaacactcaacatttatccccccctaccagaatcggtttaagcctttaagggtaatccggtaaattaattgcctgaaattaaggcccacttagaagcccactttccttttttcccgagaggtaatgcaaagaatttatgtgtgtaaaaagagctgcaaaaaaattaaaaaaaaaagaagaagcggttcgagagagacggagacaaacacggccttaaagtttagcgggaaatagcgaaaaaagaatcttcttccctccaaattctcacctaactataaaacaaatctttcatcaaaagaagcatcagacatatgtcatcttttaaccttaacgttataatttaattttaccaagatccccaaattcacacataaaccctagattctaccgtaactctgatttcctccaattgcgacggtgattgcaatg

SEQ ID NO: 9550 - DNA, 3000 bp, Unknown
  misc_feature (1)..( 3000): cDNA_ID_2108834_gDNA_ID_1972144_Annot_ID_179339 3000 nt of promoter + ATG
ccaactttaatcacctaaaagcctaaatatgtttaaatcaataactggagaaagatcagccatctaaacgtcgtcggtttatcaaatttttattttgttttctgacggcaccggtttatcaactgttaatgtcaacattttttatctaagccaaacgttttgagttttgacggcctcgacgacattcataaatatttgtgtaaactcactaaaaatcctaaaataatcactgcttgagaacataggcaacatttaacatccgattggcgtcaaaggatttcattaaaaatgtagaaaataagtagtataatgatttgttcataagttgattccatagttttgttattctactcattagctggtgtagtaagcaaagagacaacaccacccatgtgcttagtagaaccatacacacacacacttagtggcaacaccacttgactctagaccataatgatcattttctgtctccatttcgtttctgattttataatttcttggatcaatgttcaataattgaatcccaaatatggaacaataataatggtggttgttaataggacaaaagtttctctaaatagatgcgtttttttttaacttttgtaggtttctttccctatctttcgagatagtttcttcatttgcttttgtgaaagattggtttatgtgtcacggatcgatcattgatgaataatgtgagaaaatgacttgctctttatgaagagagtaactgaaaacgatttgatattcaaacaatatttcaaaagttatgtttctcttttgattatgatctttataacaaacaaccaaataaatatccgatcagcttttcttgttcaacaatattttgatctatatacaaatactatcattcattgataaaatttaagatatgtaatgaactatagtatgttctattgttaggatcctacatctaaagttagatggaatctaaagtaatatttaaatgagatacactaattcattaattgttatttagttttgagttagggtctctattaaacttgagaatctaggttattgatccgggtggagtaacctaagaatgatatgttgcatgtccaatcttgagatttggttccacatgaagggatgagaattattgtcttgaaagcatgttaaattttttacaagatgatgcaaatagtaattaacatatcatgatcaaatcttgtaaattgaaaaaactcaaccttttgaggggaaacagctacaatatatactaatgattatctagctactcgtctaagaatataaatgtttagcatttaggtgaccaatatcaaactccgagctacttgccttacgttttacccttgcaagtaagtcaaattaaatttctattcattactaatcacattatgaaaaagggaaaccaaaacttgctgcctacttcattctttttcttgaatctttcgatttttcttaaaaattattattttgataaatatttcttccctatcttagtgttcacataaagtgtgaccgtaagatgggttagctttctcgtggtttgaccaagtcattcaaaaactcaatatactcaatgcctgaatggtcgtgcagcaacatatatgaagtctgctggctacatatgttaaagttggtttcgagtatgtaattttatatataatcttttaatttgttgaaataattttagatattttatacaaaattacaacctatacctcaaactatatattatactatatgcattttgcttgtagtcctatgaatatgagatttgtcttagagtcttcaaaattttatatttcatgaccgatcaacgttcaataaagtcgccgcttctttaaaagaaaaaatttggttgccaaacctattattattatagcttgagatataacttatgatcctacttttaatgcagtttcgaaattattcttctccaagacgaaaagaattgagaaggttggtccataatctttataacttctaagactttaacgtacaaatgatatatcgtcgttggttttttgcatttaaccagaaccagtttcttgtttatttatattttaattaattaattacaaacccctgaacagtaaattaatattggattttaaaacgttcaatttctgtagagcaataatatttcgaatttgtaagatacacgacaatcgatttgaaaaatagacaatagtagtgggatgtcaacgtcatgaacatgtaaggtcatcggacggcagcgatctcccccatatcctcggacgtatgtgggacaaaataccaccaaacaaaaaaaaaaaattgttgctgcatttctttaataatttgcgttatcataataattaattaacaaaaaaatatcaaaatatttccgataaaaacaaatcttcaacaaaatatttaacaaaaaaaaaaaaaattgcgcattttaatgtagtttatgtagtatttcctagtcacaccattatttacctgatataaacaaaaaatagtataaaaacagtaatattatttatcaccatggtttagtgaatgtacatgaaaaatttgttaccataccaatgagttttggaaaattgaaaattgactcagaaaacatgaaaatacaattttgtgatatttgttttgattcctgaatgaatttaataagctcacaaaattaaaattgcgaaattattcttaataaataaatatttcttactaaataaaaggaaacctacggaagagcaaaacataattttcatggcataaagagtgagagagagagagtcatagacaggagacgtttgagattgatgaacagcgaattcgaaacaaatcacatggaagaagagctctctttcgctaccgttaccttctccacttttctccttcattagggttttctctcttatttagctgcgcagctctctctctttcttacggattcacttcttaaaactcgttaatttcttgtgggtttttgtctcttttgcgatctgattccgaaagttgagtgagagtgagagaatc

SEQ ID NO: 9551 - DNA, 3000 bp, Unknown
  misc_feature (1)..( 3000): cDNA_ID_2183508_gDNA_ID_1972144_Annot_ID_179337 3000 nt of promoter + ATG
actacttgtgcaaaggagagtgtcaaagcaagtgtaagcaataaaattacatcttccaaacactccggggtagtatctgctttaaaagtaagtacattagtatatgttagatctttatttgactatccatatcttcctgtgataccagttaataattgtcacaggatattagcaaccacggcgaagcaatcattgggcagcggattaaattactctctcccacagatggatggtaaaaaatttcttatacttggccaaatatatatgctggagcttctgtaatattttttttgtccttttttaccagtttctatcctggcactgttgagaagtttaattctaaaagcaactctcacaaggtatccactggacttcgaagtccttattttgttttttcgttgttgactcttgatccatttgtccccatgagttttaccttactattgatcaaatactgtacttatattataaatttttagtgcggaatatttctgcactgcatatccatggcatatgatgagatgattgacaagacttattgtcttgtcattttatcttcctttgtgctaatttcagatgacactgaattcatgttgactttgaacatgctctattgagttcctttgcttgaaactcaatagtatgaaggcatcattagtatttttttccatttaactatttgattctatgtgctgggttatggtagaagttggtcatatagaactcgaatagcgtacatctttgcagctagtttcattggccccttctctgccttctttctgctgcgctatttgccatggcttctgttttgctttgttgcagattattttcgacaatggggatgttgaattggtttgcttggatagcgagagctgggagaccctgagccatgaatccatggggcaacaggtaaatggaatgctttatgtgtaatccatgatacaaatgctaccatcttggaacccaaaatgaactcgacaccagtacaataggtaacatctctgtttgaattttctttattcaggaacgattgggaaaggagacagaatcttatggttctcggaattggtaggttacgatcaaccaaatttctttgaactactgaatctctgattgtattaagaaacttacatgattggtgcttttttttgttcctttcgctggatatcattaatttttttgttgacgctcatttcctgtgtcatctgtaataatcttactttctgcagcgtccctgaaattagtcatacgcttgcaaaggttactgcccaaaagcagacaactacaacaaagcagcagaacaaaaaggtgcctgccaaattgaatcctccagctggtaaattgttgcaaacttctcaattatttattgacgctacttcagttgtcgatttgagatatttagctcgttagtggctgagtccgtctggtgcaagtataaacacatgaggcttcctttaatatatctacctttcacaatgaatgagtctccatagaatggggaacagtttcttcttcttctcataaaagaatagaaatttcaaatttgttcagattttatatgtgctaacatttttcatgattgcttttggatttgaaatctaaccaagagtgccatgtttcatgatgtcagcaaaatcgaaaaaaggaaattcggattctggagaaggatcagtttcagaagtgaccgacacaagtgacaatattgtaagcgtcgtctcgtttcaaaatttgttattagagaaatccttccttcactctttctaataattgctaatatgaccaatgattataactctattcagaaatcagaatgccgtttgattaaaaagtctattgctcaattttcagggaccaagaagaagtcggagacagagaatttcgtaggaacatgatcctgtttaacgacggagttcctcctaaatatgttgataatctcgtacaaaataattagcgaatccttgactagagttaaagtgttgatgacccacaccgaaaagaaaattaataaaaagaaaaagttggtcactttttgttggtttctcgacttcataatcaaccaggtcaattagttttaaacttgtctaaactcaaccaaaatcttcctaatttcacataaatccattttcttttagttgcaaaatttgttcatatttgatgagaagaccatgttattaggtttaaatgcagttcgattggttgtgaaattaggtttgaaattgacaaataagagcgttttgtgcaatgagaattggcgtaccaacaggaaagaggttatttgcatggccgttgtcagattgatgacctaacaattacacacatccaacggtccatatcacctgactatacctccacgtatttatttcctcatccaataatttcaaaataataataaaaaactaataactttgttttcttcttatatttttttcgtttcgtctttccgcctccacagtcctctcgacgtctccgctaaaagaccattataccctttactgttctctctgtcttcctcctctctatatttgagcctcgctgctgttttccattttttattgttcccgacgacgtcttctctggttccgttctgcttcgatcacggtatattccatcttcctctctttcttatgcttcacattcccgattacattcttcgaatgtgtttgtttcatggaagtgtgtgtgtgttttttataaggctagattagtttgttctacactcgcctttttctcagatcttttgaaagttaaactcaattcctccgtcgatcaaacgaaatgtagtaaaattagttctcgagggggttcttcttaacgaatatgatttacttgagtttatttcgtgtagctcttctctgtaatacatacaactaacgcgtgtattaaagttggttttattgaaattgatttatgttattaatattgtgatggggttttggttgcaggaggtggacgtgttttattagccatataattctttgtttgggggtttagtgaaagatg

SEQ ID NO: 9552 - DNA, 3000 bp, Unknown
  misc_feature (1)..( 3000): cDNA_ID_2183504_gDNA_ID_1972144_Annot_ID_179336 3000 nt of promoter + ATG
gaggtcaaatccgctatttgctctctggtggtgcccctctttctggtgacactcagagattcattaacatctgcgttgggtaaacgaatccctgaatatctccttgaggcttgctactctccaatatatcttttcgtccctttccatttctatgatctaacactgatattcctcagggctccaatcggtcagggatatgggctcacagagacttgtgctggtggaaccttctcggagtttgaggacacatccgttggccgtgttggtgctccacttccttgctcctttgtaaaggtaacctctttacctgatttgtccacttttaatactttgttagctatttattagtttgtatgtcgtagtctcttgtgatcatatgcttatatcttgtttcagctagtagactgggcggaaggtgggtatctaactagtgataagccgatgccccgtggtgaaattgtaattggtggctcaaatatcacgcttgggtatttcaaaaatgaggagaaaactaaagaagtgtacaaggtggcaaatcaacattattggtttcggcaatgttaaaagaattggttggtttggttcttcctctaaccgttttatacacttgaatgttcaaaggttgatgaaaagggaatgaggtggttctacacaggagacataggacgatttcaccctgatggctgcctcgagataatagaccgaaaaaaggatatcgttaaacttcagcatggagaatatgtctccttgggcaaagtatagttttctcaatccgaatacccttttttgtcttcatcactcaattctccggagaagcttcttaaaacattcttttttttcgcaggttgaagctgctctaagtataagtccctatgttgaaaacataatggttcatgctgattcgttctacagttactgtgtggctcttgtggtcgcgtcccaacatacagttgaaggttgggcttcaaagcaaggaatagactttgccaacttcgaagaactgtgcacgaaagagcaagccgtgaaagaagtgtatgcgtcccttgtgaaggtatgttcattgctactcattaccaagctatttgagtcccccagtcatttccttataacatctgtgttatgcaggcggctaaacaatcacgattggagaagtttgagataccagcaaagatcaaattattggcatctccatggacgccagagtcaggattagtcacagcagctctaaagctgaaaagagatgtaattaggagggaattctctgaagatctcaccaagttatatgcctaaatttttcttcttcctttactttttttttttttacgtctcgatgcattcgaaagacttaacagatgcacaaaaacttaattctaagaatagttatctcttttctcattgatgtttctgtcttttcgtgtaatttgtgtgggaactaggacgagacagaaaaaacagagtaatgggtctcttactctcaacaatctttttaggctttgagaccatgtctatacaacttaatgggcctttatcaaaccacgtcattaagcctatgcatatagtttttagtttatttgtttttgggactcgagataaacgacaaaaggaaagagactatcaattgtaatctggagtgaaaataaagttaatcttaccaactaccaacaattaagaaaagataaattggagattagtgtataaattaattatattgtacttaacagaaaaaaaaaaaaaaaaaagtagaaagcagagtgagagatgggagcaatctaaaccgtcggataaattgtgaatctcactgattttgtcagtgaacccaatgaccagagtcagcgagacgcgtgagctcttctttaatcacattattattattaaaaccgttacaacttccttaaattcaaaagctgctttctaaattcgtaatttaattatcctaaattattgtcaataatgtattctcgggcgggaattgttataagcactttaaatgtcaataattcaaattaattagtacgaaattacgttttaacttttaattccttacatttatatacacaaaaataataattccttaaaaaaagctgaaaaagttaagatttaaatgttttttgagttcacagctccacatacagaagatcacatgctctatctctctttctatcttttgaattaaagaagaaaaattagagaaatatttcaaaaatagcaaaaaacaagataaagagaattctctcttctctctctctctctctctctcacgctatatctctgccttgtcgctgttaataaatcgtaatagtgtttcagacagtagtagaagaagaagaaagcttcttcctttttgcttgtttaatcgctgatttttttttgtttccattggggcattttgggatctcaaagttcttcatacagtccccaaccaaaaggtatttacttcaccaaacatttggtctctttcacaatattctcttcctttgttcgtttttttttaatttatctacttaagtgttctctgaaatagaccaatgtttggagtgtagtttgagacttacttatcactgttccattaccctcgtagcttttatttccttctcttggatttggggttttggtagattttcccttatgcctcaacgagtttcaaatttaaagtttcaagcttttgttctttgtcttgtagctttctcaaccgttggtttttgattatgaaacggacatctggaaccacatttgttactataaagacaaattcagttcctttaaatcatttctaatactttgtgttaaatgattggtttattcaagattttctcttatcttgcatgtttgctgattggttcagtttacttcatcttaaagtttgtttcttctttgactatgtttatgtatgtttcagcatttttaaagaatccaatgtatgtgtgtgtgtgtgtgtgttttctctctcattcagatcctgagactgttatgtgctgattgtgatcttggaaactataaatg

SEQ ID NO: 9553 - DNA, 3000 bp, Unknown
  misc_feature (1)..( 3000): cDNA_ID_1395753_gDNA_ID_1972144_Annot_ID_179330 3000 nt of promoter + ATG
gctgtaagtgtctctaatggatcattttttcttggtttcttttccattagtattgcaggcactaatgtctagctctgttgtcttaggttggagtgttccctaaattatccggggatgagtttgattctttcatggcccttgctgagaaattgcgtgctgactatgatttcgcacacactttggatgctaagtttcttcctcgtggagagtctgtggaaggacctgcagtgaggctgttcaagccttttgatgaattgtttgttgactccaaggtaaaggggaaccttttcattttgtacattacatcaatgagaagtcaagttttatgcaataatgtttcaaattatttatttgatttgcgaatcatggattcaggacttcaatggggaagctctagagaaatttgtcaaagaatcaagtatcccacttgtcaccgtctttgacagtgatccaaacaaccacccttatgttgccaaattctttgaaagccctgccactaaggtaattctcagtaaagttattttggatctcactgcagtgcaatacattaatggacgttttcagttatgccttgcatttttactggacaagtattttagatttctgaagatggtagtttagtaatttagtatgtgcttgaaggttaaaagcttttctttgccggtggtagtgttaactatgacaaaagctgtgatatcataaagtagtgattgaatttgggtaatagcatcatagttctctagataattgtaaaagcatttgttctgtttctgaaatttcaggcgatgatgttcgttaacttcactggagcaacagctgaagctctaaaatcaaagtaccgtgaagtagctacatccaacaaagatcaaagtcttgccttccttgttggtgatgcagagagcagccaaggcgctttccaggttactacacatttaagttttgtctcttattatcattttctcatgccaatgttaacacatctctaagaaatttttttcttttcatgtattggtttaacagtactttggactcgaagagagccaagttcccctcatcatcatccagaccccagataacaagaagtatttgaaagtcaacgttgaggttgaccagattgaatcatggttcaaggacttccaggtttcattctcttttgcacacattcacacaaggttttatgaaaaaagaagtacgtataaaatcaatataacctaaacaaacaacatgttttcttcaggacggaaaagttgctgtccacaaaaaatcccaacctattccagctgagaacaacgaacctgtgaaggttgttgttgccgagagccttgacgacatagttttcaagtctggaaagaatggtgagtacattatttgaaaactctaataatggtttcaatttttttgcgaacgcaagactgataaacatcaatttatctatcagtcttgattgagttctatgcaccatggtgtggacattgtcaaaaacttgctccaatcttggacgaagtggctttgtcattccagaacgacccaagtgtgatcatagcaaaattggtaagcctctcttttatgttctttacatgtcaaactataacttgatatactcctcctggattgacttaaccgtgtctgtgtctgtgcaggacgcaaccgcaaatgatatcccaagtgataccttcgatgtgaaaggattcccgaccatttacttcaggtcagcgagcggaaatgttgtagtgtacgaaggagacaggacaaaggaagacttcataaacttcgttgagaagaacagtgagaagaagccaacttctcatggagaagagtctaccaagagtgaggaacctaagaagaccgaggaaacggccgcaaaggacgagctgtagaaatctcatgagttttgtttcggaatttgagtaggagcgtttctcttcttcaccatatccaacagaatcttcttttttctttagcagttttacagttttatcttttttgctctcttgttcgaacccaaaattatccccattaataaaaagttaaacctaataatcatttaatctgttttatgatttgaccatagggttggttagtttggtacgtctatcatttttggtggactgttcggtaaatcgtcctgttgattttgttcgttcaccgatagagccaaactctcaaatctcaatctctgagatagaatcaacaatgtggtcaaatatataacaagtatataaatatgaaaagttcagtttatatacaatgtgattaataggaaaagttgcagtaagaatatgaaaattttagttgaatatctttaaaacgttacttttgaatttaatactgtgtgtgagtgtttctcccttaccaaaagatattcaactaaccttcgaggttaattaaatttgtataggtaaagggcaactttaatccgaatcatatgacaatgacatgacaaatgatgatcgcaatatacataccaacaaatgataaataatttgatatatatattcgaagatagaaagacgacaaatatctactacatattacaccaatgaactagctctgatggctccttaaagtgatagcctgattcatgtggtttcgtggacccaatggtcctgttaatatactacatgatttatttgtgtgtccaagcattgtgtatatcgtatttgacagaattaatagctttcgctgatgacatgtataattttttctaatcatcggaaaattttggattgaagtgtagacatatactgatcagtgcatgttaaaaatcatatattttgaatatgtaaagtgttcaccataatcaggcatatatagttgcaatcgtaaagaagtacttgaacccatcccaacaattcatgatatgtatctttcatttatttcacgaattcccaaggaaactaaaatagtatacgatacacttggcttcagattgtttccctatataatggcactaactctccatgttgaaaccacattaatttcttataaccaacaacaata

SEQ ID NO: 9554 - DNA, 3000 bp, Unknown
  misc_feature (1)..( 3000): cDNA_ID_2183480_gDNA_ID_1972144_Annot_ID_179328 3000 nt of promoter + ATG
tttatggactaattgaaataacgaggtgaaatatgctatgtttagatgctggacctccttcaccagctgatcatttgagagatgttttctacagaatgggacttgatgacaaggttattttgattttgttctcttttgtgttattcatgtcaaacgtgaatatttttgttattctgaatattctttttgacaaacaggaaatagttgccttgtctggtgcacataccttagggagagccagaccagaccgtagtggttggggaaaacctgagacaaagtacacggtattaataaacgacaaactgaagctaccttatatatagttctagggatgatagtgtagagagatgttatggaaacgttcaaaatggcagaaaactggacctggagaagcaggaggacagtcatggacagtgaaatggctcaagttcgacaactcttatttcaaggtctatctctctatctttcttagtaacttggtttgggactgaaaaagagttttctatgaagttttctaaaaatagttttatcaaccattgacttctatgactttgcaggatatcaaagaaaagagggacgacgatcttctggtgttacccactgatgcggcgctatttgaagatccttcattcaaggtttaaacaacagtgattgctaataagatgcctcagaattagtagttcactgttacttaagaggaaatgtttttaaaaacaatagtttcttacagaactatgcagagaagtatgctgaagatgtggctgcatttttcaaggactacgctgaagcccatgccaagcttagcaatctcggtgcaaaatttgatcctcccgaggtacaaggaaaggggagaaaatctaatatctatgcacttgtgtataccattataaaccatacgtttaaaatccagttcagtgacttaaaatctaaaactgctaatgtgtcactatgaaactaatcagggcatagtcattgaaaacgttccagagaagttcgtagctgcaaagtattctacgggaaaggtttgtccttacaaaacaaaaatgcgcttgtgtagcttattctaatataggattcggttcttgtttttaatctctccggcaatattttgcagaaggagctttcggattcgatgaaaaagaagataagagcagagtatgaagcaattggaggaagcccagataagccattacccacaaattacttcctcaacatcataattgccattggcgttttggtcctcttgtccactctctttggtggtaataacaactccgatttctctggtttctaattgacaaattatatattttgatttctcttacctacatacataattacgtggtgatcatatattccttgcaaacaaaaacatcattgttaaagtttgcttgaataaaatcaccttataaataacattgtttatttggtttttagaattttgagattagtgtgagtttcttaagtataggatactaaaataatgtgtgtgaatcactgctacgcctttgcacgaatagattcaaaaattaaaataagtttttttgagattcattaaagattcttctctttttgtaaagaaagaaaagtcttgtcgcttggattaggttaaccatcgaccatcgtacttgtttccaaatctatacaaacaaaggtgattatttttttcatgaacaggtttagagaacttttacaacaccacgtgtgacataataaacgtgcatagttatgcttgatcggtccttctcttctcaatttttttaatacccaggaagactattggctaactaatatttagtttgttgggataatcaatgtgtacttaacaacaaccaactttaaatattaaattctgaatctagaaagatgtatgaatttaggttggtatggaaaatgatgttccttcttctagtgacgcaagaatgcttacggtgaaccgatgggattggtcagactcaatcaatcccattgttctaatcgatatttgaaacttttccctcttttacttttgtatatatgattgagcttatgtttcctctgtattttatgacgaaactaatttcatatagtatattgcaatcatgttagtattatattgattttgaggaaacattatgctatggatttggctgtttggtgattgggataatgaagtgcatgtgagcttgattttggtagcacatgtcctactttttcatccaatagtcttaatgtctcatgttatagatgcattattttgttatcaacgacattatgatatgggaaaaatgtgaaatttattaagagaactttttttacatcatggtgcgttgtactgctgttgtgtcatgtgtgcacaaaaatagaaataatgggcaaaattagtagggaccaaaactaaacaaatcttaatctttagggaaaatatcgtaaaaaactaaattcccgcgtcaattgtgaaaatgacaaatacacgtagacgacaaaacaaaaaaagaatacacgtctccttcgttgacagtctctcccggtgaattgcgaagaatttcagatattaaaatcttttttcgttcctcatcgcggccactttcttcttccccaattcaatatgcaattaatatattgcccagatcccctagctttcttcttcgcacatctttatccattaaatttactaaaaagttgaaaatttaattgcaagacgacgactttgaaatttccttttttgttttctttcatttgtctttctcctctgattcatgttttcacgttttcatataaatcagcaaccatggattcttctgctttttcctcctccatcactcgtataaaactcgttttcacgaaaattcttacttaggttcttcaaatcacaattttgctctgttccttagaaaaagctaaactttgctctgtttcttcaacaaaaaaagtgaactttgctctgttccgtccatgtccgatgatgatcggagtggaagcagaatgagatttgaagcaaacgtctagagttccgacgtt

SEQ ID NO: 9555 - DNA, 3000 bp, Unknown
  misc_feature (1)..( 3000): cDNA_ID_3042319_gDNA_ID_1972144_Annot_ID_179324 3000 nt of promoter + ATG
ttttttttgccgttagtgtacgctaaatcatagacctcttcgtggttataaagaaagaaacttaatttgtctcgaatttgagtttggatgcgacgttttacgtactagttttataaaagtaaatgttatagaccttgaatttcaaagtggaatgtattttacacacacaattgatacaccaacaattgtggaagcaaggatatagagtatcgatctttaatggagaagaatatatccttaaagtaatcattactttttaattacggcggaaagagaatagttaaatttacggcgaaaagaatgttcattaatcaattgatgacgttcgtttataatttcaaataagatcgaaaataacaggtgaacaaagaaaaaatagacattaaaaatagtaagatcgaaaatacaacccttaaaaatctcacgaaatcaatgagagaaacaattttgagatacggtcaacgtttggtctcctttaggaaagtacacgcataagatcgaacgtgtcgattcttattgctcgttcccaaaatcgacatgctctcggaccgctacattccaaatagtctgacgtaagcaatgacaaaactcacctacattacagtctgccacgtgtccctctccatctacttcaaatgaatcctccactatacagatttaaccatttttctatttttgtttgagattcctttccaccaacacaaagcccctgtctatccgccatgtgtccacgacctttcttatatatatagtcatctttcttctttgctcgagagaagtttcaactttcaaacatatctttacagttctttcttgctaaacaacaataaaggggaaaataggttaattatgatgaaatctggggctgatttgcaatttccaccaggatttagatttcatcctacggatgaggagctagtcctcatgtatctctgtcgtaaatgcgcgtcgcagccgatccctgctccgattatcaccgaactcgatttgtaccgatatgatccttgggaccttcccggtacgtttctttcttttcccctttaaatcacactatacactaacagtaacaggattctataaaatcggtctaagaattaataaaccggtttacaatttacagacatggctttgtacggtgaaaaggagtggtattttttctcaccaagagatcgaaagtatccaaacggttcaagacccaaccgtgcagctggtactggatattggaaagctaccggagctgataaaccaataggtcgtcctaaaccggttggtattaagaaggctctagtgttttactcgggaaaacctccaaatggagagaaaaccaattggattatgcacgaataccggctcgctgacgttgaccggtcggttcgtaagaaaaacagtctaagagtgagtgaatttatcagttcaaaccgaactttgaatatgattttgaatcggtttagttaaccggacgtgtttttgatattcttgaacagttggacgattgggtattgtgtcgtatatataacaagaaaggtgtcatcgagaagcgacgaagcgatatcgaggacgggttaaagcctgtgactgacacgtgtccaccggaatctgtggcgagattgatctccggctcggagcaagcggtgtcaccggaattcacgtgtagcaacggtcggttgagtaatgcccttgattttccgtttaattacgtagatgccatcgccgataacgagattgtgtcacggctattgggcgggaatcagatgtggtcgacgacgcttgatccacttgtggttaggcagggaactttctgagttgtcacgtgcgattagagttagtggaaagtggaaactatcactgtctgttttcgcacgtgtcgggtagccgtcttgaaacccgctagctgatccagaagtgacctcattgggcttttcaacaacaattgggccttagcctttcttctcccttagtaagacaagctactgtattgtgttgttattttcaggaagcaatataaattcattttaatcacttatatattctttacatttttttttcactcaaaactacaatctagcttcttctttttttttttttttttttgttatggttgtactacaatctagctttgttatatatatatataagttaaaaatagtaactaaattacaaactaaaataaaataaagaaattggaagatatcactagtgtttggggtattagggagggaggggagctcgagatccgattttactgactgcatggtatcgaaaaagtgtcggtaatggtagggtctgacagataacagtcttatcgttgcaacttgcattcaaacaaatctcattgttcgctttaatttctaattaatttgtttttgtcttttgtatatttatttgattttgacacgagtttgtctttcctaataagaccgaggcatgattagtttaaccggtttgaattgtttaggttaaatcggagtccaagtcaaatacatcgctatctaacgaaaacgacgactgaaatttcgtaaagttccttactataaaactgatctaactatcttctacaagaacaatataataaatttgatgcattatgaattcacaagttttaaatctttatgattttgtagctcatgaaattgaatgatgtttcttttattatcacatgtcattaaataaaaatagttatgagtagatgacataaatactatttcaaataaatttatcctccatctaattgttatgagatgattatttcctataacatggtatctactatatggccgtctaaattaagtatcaacgtttaaactgcgcaatgctcaagttttcataagatgtgatttgttagaggttaattaagaaacttgcgagtgtatatgtggtctctaatctatattttaatctataaaaagggaagtgaaaatcaagattaaaagcttggatgtcatagtataaaagaatagtaaagtaaggggaccagacatatttgttgcgaactggaaaaaa

SEQ ID NO: 9556 - DNA, 3000 bp, Unknown
  misc_feature (1)..( 3000): cDNA_ID_2183469_gDNA_ID_1972144_Annot_ID_179325 3000 nt of promoter + ATG
aagttgcacgaaattgagtgtgagagagatcagatatataaacaaatactcactcctataagggagcagcaattctacaaagaaaaagcctcctttttgttgccctgtgtcaaaaaagaaacctttttggtgggatttggtttcgctttcttgggggccaaaaagaggagatgatgaatccgaataagcagcaaagaagaaacctttacttcttcttcgtcttcgtcttctatgtcttcatcctctgtgctcgctttcaaacctctgaagctactaaagactcgtcggctcaagtgaagttacagaatcgtcgacttagctccaccgtcgtgtttcctgtctccgggaatgtgtatcctcttgggtaagtgccaaatttcgcatctttttgtttcaatttctctgttttatgctacttttcagtgacccattcgtgggtttgatcttgtttctttgattttccttaacgggattgtgttgacttatgtctggattttgaattggtgcggatactttgttggcttctcttgcatctgtgtggattcttcacttgtaatctatttcattgcttgacaagatgtgaaatcttcattctattgatctttgagatgatttcaaagcttgctactttcacgaattgaagattttgggcaatgttgattctgattttcaccttgtattgaaaacgcccaatttgattgttgaagtaattaacgaattcatctttgcaggtactattatgtgttgcttaacattggcaacccacctaagctctttgacttggacattgacactggcagtgacctcacttgggttcagtgtgatgcaccttgcaacggttgcacaaaggtaagcgttgatatgctttttagtgtgtgacataataagcaaaggttctatcttagaatttctttctctttctttgcagcctcgtgctaagcagtacaagcccaatcacaacactttgccttgttcacacatcttgtgttctggtcttgaccttccccaggacagaccttgtgctgaccctgaggatcaatgtgactatgaaatcggatactccgatcatgcatcatctattggtgcacttgtaactgatgaggttcctctaaaactcgcaaatggctccattatgaatcttcgtttgacatttgggttagttttattctaccttttttcacacattagaaaagaaaaacactaaatttgcggttgtacaagttcctaatttttgaatcaaattttcttttagatgtgggtatgatcagcagaatcctggtccacatcctcctcctccaacagcgggaatacttggccttggaagagggaaagtaggcctctcaactcagctaaagtccttggggataacgaagaatgtgattgtgcattgcttaagtcatactggtaaaggctttctctctattggagatgagcttgttccttcttctggagttacatggacttcattggctactaattcacctaggtgagcaatctttgagcattatcttctttataactgccacttgtttactcacacttttataattgacaagttgaaattatggtgtgaattttttctgtagtaaaaactacatggctggaccagcagagcttctctttaacgacaagaccacaggtgtcaaaggcattaacgtagttttcgatagtggaagctcgtacacttacttcaatgcagaagcataccaagctattctcgatcttgtatgggataatttcttctctggaaaaaaaagattagcttcaccgtttatgtttttccacttttttatgactaatttggtctcctacagataagaaaagacttgaatgggaagcctttgacggacacaaaagatgataaaagcttaccagtctgctggaaaggcaaaaaacctttgaaatcacttgatgaggttaagaaatacttcaagacgattactttacgatttgggaatcaaaagaatggtcagctatttcaggttccacctgagtcgtatctcataatcaccgtaagtcacacatatactggcctagatatgacttgtatctccataaaaatctatagctgagaagtctgtttcttctggtttgttttctcaggaaaaaggaagagtatgtttgggtattctgaatggaactgaaatcggtctcgagggctacaatatcattggaggtacgtatatatatactaagtttttctcaggtttcttttgttcataacttgacaacaatatctcgtgtctatgtgtgtgatagacatatctttccaagggataatggtgatctatgacaatgagaagcagaggattggatggatttcttcagactgtgacaaacttcccaagtctgaacctttattcacctctttttaatatatcatttgatttgatttgtatcgtcttcttctgtttcatcaaatcaataataaaatttctcttttcttcttgtgttgccttgttgcctctgaactattctgttaacagtgtgaatcacgactatggaggagatctgtcggaggaagcttatccaataggatttggtttgataaaagagcttttctcaggaagtgattcttcaaagaacaagaacttggtctcagatggagagctttgacacaagagaagagtcttttttaaagtggtgtagtaaaaagattttgaggtttttggtttttggttttgttgttatcatagaaacaaggaaaatattttgtgaatatatatatcatcatataatagcaaaatgcaacagagtttaagcaaagattcagaaattttcacttgttggggtgttttttttatgtaaccggaagctttacgaaaatgaccccagcataagctacatttcttgggggtaaaatgggaattcgacaacgaaggtagagaaaatggcggaaggaaagagccttgagggtttggcgccattaccggggagagagtgaaattagggctgagcgagagagattctgaaataatttcttttacggcggtgaagatg

SEQ ID NO: 9557 - DNA, 3000 bp, Unknown
  misc_feature (1)..( 3000): cDNA_ID_2114103_gDNA_ID_1972144_Annot_ID_179327 3000 nt of promoter + ATG
aagactcttctcttgtgtcaaagctctccatctgagaccaagttcttgttctttgaagaatcacttcctgagaaaagctcttttatcaaaccaaatcctattggataagcttcctccgacagatctcctccatagtcgtgattcacactgttaacagaatagttcagaggcaacaaggcaacacaagaagaaaagagaaattttattattgatttgatgaaacagaagaagacgatacaaatcaaatcaaatgatatattaaaaagaggtgaataaaggttcagacttgggaagtttgtcacagtctgaagaaatccatccaatcctctgcttctcattgtcatagatcaccattatcccttggaaagatatgtctatcacacacatagacacgagatattgttgtcaagttatgaacaaaagaaacctgagaaaaacttagtatatatatacgtacctccaatgatattgtagccctcgagaccgatttcagttccattcagaatacccaaacatactcttcctttttcctgagaaaacaaaccagaagaaacagacttctcagctatagatttttatggagatacaagtcatatctaggccagtatatgtgtgacttacggtgattatgagatacgactcaggtggaacctgaaatagctgaccattcttttgattcccaaatcgtaaagtaatcgtcttgaagtatttcttaacctcatcaagtgatttcaaaggttttttgcctttccagcagactggtaagcttttatcatcttttgtgtccgtcaaaggcttcccattcaagtcttttcttatctgtaggagaccaaattagtcataaaaaagtggaaaaacataaacggtgaagctaatcttttttttccagagaagaaattatcccatacaagatcgagaatagcttggtatgcttctgcattgaagtaagtgtacgagcttccactatcgaaaactacgttaatgcctttgacacctgtggtcttgtcgttaaagagaagctctgctggtccagccatgtagtttttactacagaaaaaattcacaccataatttcaacttgtcaattataaaagtgtgagtaaacaagtggcagttataaagaagataatgctcaaagattgctcacctaggtgaattagtagccaatgaagtccatgtaactccagaagaaggaacaagctcatctccaatagagagaaagcctttaccagtatgacttaagcaatgcacaatcacattcttcgttatccccaaggactttagctgagttgagaggcctactttccctcttccaaggccaagtattcccgctgttggaggaggaggatgtggaccaggattctgctgatcatacccacatctaaaagaaaatttgattcaaaaattaggaacttgtacaaccgcaaatttagtgtttttcttttctaatgtgtgaaaaaaggtagaataaaactaacccaaatgtcaaacgaagattcataatggagccatttgcgagttttagaggaacctcatcagttacaagtgcaccaatagatgatgcatgatcggagtatccgatttcatagtcacattgatcctcagggtcagcacaaggtctgtcctggggaaggtcaagaccagaacacaagatgtgtgaacaaggcaaagtgttgtgattgggcttgtactgcttagcacgaggctgcaaagaaagagaaagaaattctaagatagaacctttgcttattatgtcacacactaaaaagcatatcaacgcttacctttgtgcaaccgttgcaaggtgcatcacactgaacccaagtgaggtcactgccagtgtcaatgtccaagtcaaagagcttaggtgggttgccaatgttaagcaacacataatagtacctgcaaagatgaattcgttaattacttcaacaatcaaattgggcgttttcaatacaaggtgaaaatcagaatcaacattgcccaaaatcttcaattcgtgaaagtagcaagctttgaaatcatctcaaagatcaatagaatgaagatttcacatcttgtcaagcaatgaaatagattacaagtgaagaatccacacagatgcaagagaagccaacaaagtatccgcaccaattcaaaatccagacataagtcaacacaatcccgttaaggaaaatcaaagaaacaagatcaaacccacgaatgggtcactgaaaagtagcataaaacagagaaattgaaacaaaaagatgcgaaatttggcacttacccaagaggatacacattcccggagacaggaaacacgacggtggagctaagtcgacgattctgtaacttcacttgagccgacgagtctttagtagcttcagaggtttgaaagcgagcacagaggatgaagacatagaagacgaagacgaagaagaagtaaaggtttcttctttgctgcttattcggattcatcatctcctctttttggcccccaagaaagcgaaaccaaatcccaccaaaaaggtttcttttttgacacagggcaacaaaaaggaggctttttctttgtagaattgctgctcccttataggagtgagtatttgtttatatatctgatctctctcacactcaatttcgtgcaacttgcagcagaggtttctttgagttcccgtaagctaaattgagaaacttggcatttggctaaaagaaactcaacgcccaacgctcactacacttagcgtgtaaagcacgcgccaaccaggattgactcaaaggcctaacgatcttcaaatgtacagggcccaatatactcggcccataaactctaaaactattcaaatgttaggcgcgtgacgttcacctgtgaatcagctgatagaaatcattatccaatatccagttatgagtgggtgactccaaatagatccaactggcaacgcattattgacacgtgtcttttcatttctcttcttccggcgttttctctccgccgtttcgccaccgtacgtgaca

SEQ ID NO: 9558 - DNA, 3000 bp, Unknown
  misc_feature (1)..( 3000): cDNA_ID_2990097_gDNA_ID_1972144_Annot_ID_179322 3000 nt of promoter + ATG
acaccgcgaaatacaaatgaatacatcacaagaaatctgcgtgtatgatagtcttgatgtatgagcttaccttggcagtgttgaaggctacattcttgcagtctggcaggacacttacagattttggagacaaacgatatgaagaattacgaaactgtacagtagactcgcatttgtcttgattcaccagaatggcagcgcataggttcgccttcttcccaaacacaaaagcctgttaaataagacgtaaagatcactattacaacattcttcatgatatcacgatactgttagaattttcttacagtttgtagcttccccaatgatattgtagtttgcagtcctgaaagtagaggctcttcacacaacttaactgcagcatgtaattccttaaggtgtccccattttggttgcctaagtaaccctgcagcaccaaccatttatgttgtactttcagatgaacatctgattttgactgtgaatggtttgaaatattaccatattcatcaagtggagcctgatcataataactggtgattacgaactgtgaagcatttctcccgaagttggttcctccatgatactaaaataagatacaatgtcaaatcatcattattcttgcttctcttatacattagagatttttttagtgagactggaaaaggtaccatgtagtagtttacaaagcttccattcttagcgatgaaaagagcaacatgaaacgctatatcctcagctgaccttatcaatggttcctcaccatatgtttgataactatacaaaggggtcagctgaaagttagtagtttatatctggggattgggaagtacacaataatgtagtgaatttgagtgaagaccatacaaactcgtccagttctcagtccatattgcaggtttgttgggtgaattgggtcctttgaatgtttctccacattgcctcccattgcaagcattaacctgaggcaccatagaaacaataagaaaactaaaaaaaacggattcagaagtggaaaattggcagatgagccacattgcaggacaaacataaaaaccaaccaaaggatcaggggcatcatcttgcttgcacataacccatggcactcctgtgtcaagctcaacagccaattttgctgtccatttgacatatgatttcccttcttgtcgaaaagctctaccaaccatcccatactcgttctcaatctgttttgcacataactttaagatcattaaaaaaaaaaaaaaacttcgaaggaaacatacatgaaaaaccataatgtaaacctgtgagagtatgataggtcctccttgggaagcatacaagttttccgatttcatcagcttaacaatcattttcgcatatctcttcatgtgatactgcaaataaaacgtaatcttctttagaccatagaagtaaggaagccatctgagttcagtaaattaattaccttgaatggctcattatctgtcctgaagacaatcccttggacattatgcaaccagaaaggcaaacccctgcaatgtgttattgaaaaccctaaaattccacgaacattgtgttttaccatatcggaaaatctcaacgatctaaagacggaaagagtttacccataagaccattccccttggataaaaggtccaatccgaagacagacatataagccatgattttttacttccttgataaacttcacgatatcacggcttccactgaaatcgaactgtagattcacaaaaaccatcaatcgcataaatacctaaattcgtctgtatagggtatagagacggagagactgacctggccttgttgcggctcgtgaacgttccagaacacatatgtgtctactacatctattcctccagattttgcctttgctatcaaggacggccacatctgcaagttcgatttcccattaatatttgcagaagaagaagaagacaaagagatcccgccaaattttattggaagtttcatacgtttcagaatgtttggggtcgaataataataaatcagaaaataagagcacttaatttcacgaaatccataaaactaaaaccaaatcagaacgtttggggtcgcataagaataaataagaaactaagagtacttaaactcgcaaattcgataagttcaaaacggcctagtcggaaaagacgattttatcctctctctctctctactcttaacggctcatgtgtttcgtattagcaacctgccgccgacttagtgtgctaattcacgtgactgatcggcgcgatttcgccgggaaattgcagaaattaaattccggcgacgttacgaaacttctagatatagacggatcggtgagaacggagagagaattacctgaggagtgctgcgagtataatggattgagccggagaaaaggatcttatgttcgccgtcgatgatcagcgagcgaccgtcgtatgttacgtttgcgacgtctccggcaactataaccgccatgagaacgagaaaaactagcgagtactgaaaagtcgtcatttcttatgtaaacactgacgtttgaagattctagagagtttttatagtttgggactatgcacaactaactgtgcagtgtatctcaccatcgtctcgaatttatgcgacccaatcataaatttcttctttattttttcttaaatccggtttatatatgattcaatggaaattgcaattataaagtaaaagcccaatagcgtcaaaaaaaagtaaaagcccaataatagtgaggcccatcaataatctggagtcaaacaatggtggataatggaaatctctcaaaatccaaatccggttttagccggttataaatgggtttgactggtttcgggtcacaatcgaacggttgacgtcgatcatcattctggtagttgaaaactttgtcgtcgtcgtcgtcgtcgtcgtagcacgtgttgcacgtgagaaatttcccgcacaaaatcttactcttttcgtcttcttccccaatctgggattgaatctccagaatcc

SEQ ID NO: 9559 - DNA, 3000 bp, Unknown
  misc_feature (1)..( 3000): cDNA_ID_3042454_gDNA_ID_1972154_Annot_ID_179403 3000 nt of promoter + ATG
ctaagagagacccaaaaatttgaattcacatatcttactgttagttaagagtgttaccgtctcactagtacgttgcagagaagaactatcctttcattgggtaaaagtgacgacacaatgccaccaactgtgttggaagcattcttcttcctctgctcaaatgtatctccgttgtcatccatcacacgaccagttcgacttggcttatattctttacattcaagcacagatttcaccatcaccatacactgaataaaaaaatcttcaaatggcaacaatgcctgttcggggtccgttatcttgtttaagcagaaatccactacaactggaagagcacatttatctccaaacgaaaatggatgcctgctttgaatagcacctaacaccttcatcagcttgacacatgccttctttacaaactcccagaatttaggatctcgattttgaaaagatgaatctgcatggaggctccacacaagttagcaatacatacatatatatgtgtgctgacaggtcatatgcatgaaaaagagtttccaccacacaaaaaaactcacaatatggaagaaaggattgagccgcattcaagagcgcaggagagacttctttcactggttgtatctcctgagagaaacgagttagctgtatattcttttatctgcatgaagagcatatgccggagagcaagaaagatttctctatcccgatgtagtcaaccaatctattaaggttatgatttcaacttaaccattggaagatagcagaagaaatggaaagtgcggggaacggaacacatatttggcgaaactataccacaagttcatagaagggagatagctgaaggtgaatgtgataatgaactaaaaagattcatgaaaaagtatagtgtatctacctgtatattattggcatcgcttagaaatcctgaaattatcagttggcgcactattttcaaacataaaaaccacctctcacaagtcagaaaaagctcatcgtgatgctgctcggcactatttgaaccatagctctgaaccattgttgaaaagccatgtagaattgtttggacatcagtttgccaaaggtgccaactaaagtcgaagaattgcgacgagatctgccaacaaattaaactggaccttatccttaactaaagcaaaaaacgaagctttggtccaacaataaattcattcaagaggagaaaggaaactgataaggggttgatgttagtagcagactcacctcagcgaaggtcttctgatccgcagtgagacgtttagtagacaattcctttaaggttcgaaaaagaatcagaaagattctgtgagaagccagaacgtcagctgagtgaagctgttgcgctagtaccgaaaagagatcaggcctgatatcatgaagcacgcaatgcataaactcagtaaatcaaggaagatagtgtccagttaatatgaattaagaagggaaaatgctgaccattccctaggataatcaaaacgggctatcttcgatatgagaacagccaacatttccgctatctgcaataaagcaaacaaagtcagatagatatgcttacaaagtatatgcctcaaatggtgtagtcaaggaaaaaaatcaaaagtaaatgctacaacacctggtagttctcttctctcaagtgagacaacaatttctgcctcagatgactcttttcctcgttgctcatactcctgtaagaattgccagaaagagtgtcaaggcctaacatacagggtagtatctttgcagagcgaagaatctaaacgagccagctaaaaagaattataagtagaattgccgattccggaaacaacttgaacttaccatgaatttcttctgctcttccaatgacggttgatactgttcttgaaatacactgaggccattaatctaacgtccacatgggacaccaaatccttggatgcaattacttcctgcaaccaaaccagaggaaatgagcgagtaaaatcaagctgacatttgcagaaaccacaagacacatagattagaaacgctaccataaggcaagaacagaaaccaggtctactctccgacagagatagagccgcctccgccggccgccgaacggtctcgtcaccgctcattgaattagctaatagcgtgtacatcgccggcaaatcggaagccgataacgccatcagatccgacgatattgttgacctaattaaccaaggaaacgtcgaggatgaaccctagaggtttgttacgacgacgataaaatctcacggcgaaggaaggaaaacgcgaagctagtagagacagagaagagaagaaagatcgtcttcttcttcctccgtctttcaacttctcttaagctcttgaaacgtaacaatgtcactagtgaaaatgatttcctcttttttttttaacagtcgaagaaaaaagaaatacttaccgtcgctctgatcggattccgatcacccaaccggagactttcgttttgggctaactacagattattgggcctataataaataagcccaaattaataatcgcgcgtgatcttaacggcgcgtgaacgcaaataaacaacgatcgctcgtgtttgctaaaatcttattggtggagatacgtgggattgcatcaaatttgccacgtatgatacccgccttaaattgagaacgggaagcaaccggaatttattttcaggaaatacgaaacaacccctgctagtttttgaagtgagtaattgcccctaccaatttcttaatccaattgacaattttggtgtcttttgtaagactattaaatatggggaatactctaaattaattaaaatatatatgtcattcgagaaatttcctttttttcctttaaaccctgcgaacctatttaatgatgtccttctcgatttttctcgaagcgttgagtttcgtgaataagacacgcttagaagaggaagaagaagattcgttgacaacaaaacaataaaagagaaaaagattgagaggttgtactttcgggatg

SEQ ID NO: 9560 - DNA, 3000 bp, Unknown
  misc_feature (1)..( 3000): cDNA_ID_2105368_gDNA_ID_1972154_Annot_ID_179420 3000 nt of promoter + ATG
cttatccaattcggaacgtccggtcaagtcgccggtttcattggcgaatcaatccaggcgagattaatttgtacttatttcttatatcaaaaaggtatttatgattatgataatgaatatgcatgtaatgtagtctatatcctgtaacagggtgttggaggaatcgtagagcttgctcccggatacttaccggcggcttacgacatcgtgaggaaagccggaggagtttgcatcgccgatgaagtccaatccggttttgctcgtaccggaacccatttctgggggtttcaatcccatggtgttatccctgacatcgtcaccatggccaaggttcatcattatcatgattcatgcatcgttatcaatttatcatcatcaattctaatttggattttgcaggggatcggtaacggtataccacttggagcggttgtgacgacaccggagattgccggcgttttaagccgtcggagttactttaatactttcggcggaaatccaatgtgcacggccgcaggacacgcagtacttagagtccttcacgaagagaagctccaagagaatgctaacctcgttggctcacatcttaaacgtagacttacgctactcaaaaacaaatacgaacgtgagttacttcttgtccaaattaaaatcaattttaaaatttttctttattgaatatcttatcctttctctaatttgtttagtcattggagacgtgagagggagaggattgatgctaggagttgagtttgtcaaagaccgcgacttaaaaactcctgcaaaagcagagacccttcatttaatggatcaaatgaaaggttagttgtgttcaatcctaaaccaagtgaaattgatcactctcatcatataaagttgatacttatgcatttaagatagtgtttaatacaaatcttttggtatcaagaaatgggagtgttggtggggaaaggtggattctatgggaatgtcttcagaatcactcctcctctctgcttcaccctctccgacgctggttagctccttagtttaacatatatatcttcaaattggtttctttttgtttcatttttttattcatgatttatgttgtttcaaatcttgtattttgtagatttcctcgtggatgtgatggatcacgccatgtccaagatgtgatttactatctttatccgttctctaatgatcactcacccttgtatgtgtatataaataacacaatacatcataaagtagaattacaattggtgtttaccgaaatatatcacagatgcaagtatatgtaactaaatgtacagtactgtatacacttgatagaatctacaaataaataaaaaactcgctgctaatgatattccacaaatacatatattgatccgaagtttcgagtttagagtaaaacttgaatgatacacctgtggggcaaaacagttggtcatcaaagacgaggaagtggtagaaatggcggcgccgcggcggagtaggaaaacgatgtccggagagctgtcctgatcgcggaaacgagactcgtcagcacgaatataagttcttcaagtatgcatagtgtctttcttatcatcgaatcttcttgttttctcgatgcgagattcccaagtgagagagagggagttgtgatatttttctgctgacttttagatatatatggcctttgataatgttattcagacaaacaaagtgtcagcttgatgtttgtgtccaaaattgataatataatggaataattgcaaaacggaacctgaagttttgattaacatggaatttgaacccaatattttttccctacaccaaatttttagtttttcggttttcatttttttaccaactacaataaaccctagatgaattcggtttagaagaccagacattgctatgtaagagtagaaaaaccgttggtgtttagattacactaatttaaacgttataacacaaaactgattaaaacataaatatacttatgaagcgtgtgcaatgatgatcccttcatgtaccccgttgtacggaatcctagaggtgattcgaagaatttatggtaactcacgtaacaaagtgtcagctaagtaatttatggttacgaaaatacaattgtctcgtttaaaaaaaaattaatatagttttaaaaaatctaatatcgtttttaaatttaatatcatttctctgttactagtttagtagcttgaatttttgttttcgtaattaaactagactgattttttaaatttagatttagaccgtgattagaataaaagtgagttttaagttgcattttaatcaaagaatcagattgaatttgcgattaacttctcagttaattagtcgatccattgatggtgttctttgaatttgtttctcaatgatgcatacaaaatttcaatttccacattttaaacataaattaattttaaaattatagatatttagtatacctctcaatcttataatattagtatttaataacattgcattaaagttagtaattaattagagtggatttttgatctgaagagggtaaaactaaaaacggaaaggagaaaaagaatgaaagagaagtggaaagaaaacgcaaatgcattgaagactttccctttgtctctctctttgacaaaatcccaattttcgcatcctcactttctcctctgccttttttttttctcttctgccgccaccaccaccaccactgttaattcgccgccgcttccacatcaatcgccgtcgtagccaatcatcatcgttcttcatcctccgcttctcctgattcttagggtttccgcttccgcttctctgtcgagggtttttcgagctggattctctgctcctgcgccgctggtgcagcggctttgttgattgatctggatttctccgtcttcctttctattttattttctgtatctcgcacaatccaaacaaaaaagctagggctgaggatttgatttgcgtgatttctgggggtgtgttaattcgggggtgtgttctccgatttgg

SEQ ID NO: 9561 - DNA, 3000 bp, Unknown
  misc_feature (1)..( 3000): cDNA_ID_3042424_gDNA_ID_1972154_Annot_ID_179421 3000 nt of promoter + ATG
ggagttgtgggcacttttctaagccacttcttggtggtgcggatgctagtcaagagattgcagccaaaagagaagagaaagaaaaattcgcacttgagcatattgcaaaatgccagcactcttgtaaatagttttgtctgttatctctggtttgttctatacctatactagtcgcctgaattgacttcctacattttaccttgaccagctattagcaagctcaacaataatcctattgccaactgggatacaaggtttgaaacgggaacaaagacagccctccttcacccattctctcctattgtagttgctgcagacgagaatgaacggatcaggtatgcgagtttcatcagagcatcgttaaaattgaatgttagaacaacttcttgcattcaggttaaccctctgttaggaaaagtacagggtagttcccaatctattggattaggtctcggtttagtttagtcatttagaaaaagcttccctttgaaacttatcttaaactttgatgttctctcttgggacctctttttatcgagaagccttaactgcactaagtatttcactttatttctcttagagtgtggaactatgaggaagcaactcttctcaatggctttgacaatcatgattttcctgacaaaggaatttcaaagctctgcctcatcaatgaacttgacgactctctgctacttgttgcatcatgtaatgttcacaactcttgccaccaagtctttcagatgtttgcaagttgattgaatatgggtgttgagtaatggtatctatgtcttacacatgcttttgggatttgggtaggcgatgggtcggtccggatatggaaaaactatgcaactaagggtaaacaaaagcttgttactgggttttcttcaatccagggtcacaagcccggtgcccgtgacttgaacgctgtcgtggactggcaacaacagtccggttacctggtttgtgatttcttcaatcatgctatgcacgatatttcttcttagttttccaagttacgaagcctgatttattgttatttacgggttactggtatttaacagtatgcttctggggagacgtcaacagtcacactttgggacctggagaaagaacagcttgtcagatctgttccctctgaatcagaatgtggagttacagcacttgtaagtctgcatgaacaaccttctgtttaaaacatagaaatgctctaggatgtcatcatttgctacaatctgatgaatcgaagagatagtatgcataagctatcgtcttatagttctttttgttgttttggaagttcatggttatcatgcttttccttgatcaaaacatttttgaattacaaaacatgtgaattttgcttactttatgttatctttgtagtctgcttctcaagtgcacggaggccaactcgctgctggttttgctgatggatctttgagactctatgatgttcggtcacctgaaccgtaagttggtttaaactttaatgttcattctttaacagaactcctcaaaataatctaaaatgagagcaccaaaaaatatttttgaatacatcacttaatatcatttcttctattgaaggcttgtctgcgcgactcggcctcatcagaaagttgaaagggtggttggcctcagttttcaacctggacttgaccccgcaaaggttgcaaaccaaaattgatctatgaactgtcagctttcatacctttttttatagcatatattggttcgggtttgaagaatttcgtcttggtttggtttttaattctcaagagtttctcaactctttgtcgttttcctggggccaatatctattctgttcttatcttcaggtggtgagtgcatcacaggcgggtgacatacagtttcttgaccttagaacaacaagggacacatacctgacgattgatgcacacaggggttcactcacggccttagctgttcacagacacgctccaataatcgcgagtggatctgcaaaacagctcattaaagtattcagtcttcaaggggaacaactagggataatccgctactacccatccttcatggctcaaaagattggatcagtgagttgcctcacatttcatccgtaccaggttctgctagcagctggagctgctgactcatttgtctccatatacacccacgacaactcgcaagcaagatgagtcacaaccgtaagtgaatatgttgcatttagcattgctcttgtgataaaaagaaaagcataaatcagtgcaggtcgggtcggttttgggtcggggtaaagtgggtgtggtttatagtattcgttagcctccgtccaagataaaacaagatctaagttaacactaaagaaggaggcttcaccaaataagttatatctctacctatgcaacaacgcacgtaaatggtgtctgtaaatagtttccctgttttgcttttcattttctcatctcttgggtgtgtgatttcctttttattaatcttttaagtcattctgtttcctaatttgtttcatgtgtaaaaaaaatggtaaaagtaatggtggaagaaaatttgcattttcgtgacgatgctttgaaatgttgtctgttgtttgttcaagttgggatccgttggaaataggcttgcaatttttcatgctacgcatctctatgattggtcaaataccagtttatgtcagaatccaagtaattatcgaaaaatctgatcactcactaggatttctttggttatcaataaagagatgactaacaatcattaacaatcataatgaatgacgatctttatcattttggttaataacaaaatctacgaacaaaaatccgttaggacattttttactgacacgtgcaaagcaaagctctcccgcgtgcaacaaatgaaagctttttgtttcgatgactgttttactgacttgtgagttctgactgacgatgaaaaaaataaaaagttcctcaaggaggtgtaaagattattgtacggagaattaagcttcctttggag

SEQ ID NO: 9562 - DNA, 3000 bp, Unknown
  misc_feature (1)..( 3000): cDNA_ID_2183772_gDNA_ID_1972154_Annot_ID_179417 3000 nt of promoter + ATG
cggcgcagacagaagaggaaaccacatcggtcttaatttcaacaacctctcctccaatgtacaagaaccactcatttactacgacacagaggatcgaaaggaagattttcagctcgagagcggcgaaccaatccgagttcttatcgattacgacggatccagcgaaaccttaaacgttacaatctatccgacgagattagagtttaaacccaagaagcctctaatctcgcgacgagtttcagagctgtcggagattgtgaaggatgaaatgtacgtcggattcaccgccgcgactggaaaagaccagtcgagtgctcactatgtaatgggttggagtttttcaagctgcggagaaaatccaatggcggattggctcgagatctcgcggcttcctcctccacctcgcttgagtaacaagaaaggttacaattctcaagtcattgttttgattgttgctttatcgatcgtcacactggtcttgcttgtgttactatttatatttgtgatgtacaaaaggcgaatccaagaagaagatactctagaggattgggagattgattatcctcataggtttagatacagagatctctacttagcaacgaagaaattcaaagagagtgagattatcggtactggaggatttggaatcgtttacagaggaaatctatcttcttcgggtccaatcgcagtgaagaagataacctcaaatagcttacaaggtgttcgagaatttatggcagagatcgagagtttaggaagattaggtcataagaacctcgtgaatcttcaaggatggtgcaaacacaagaacgagctcttgttaatttacgattatatacccaacggaagtctcgactcgttgctgtaccaaacgccgagaagaaacggcatcgtgttgccgtgggacgtgcgtttcgagatcataaagggaatcgcgtcgggactgttgtaccttcatgaggaatgggaacagatcgtggttcatagagacgtgaaaccgagcaatgttcttattgatgaagatatgaacgctaaattaggcgattttggactcgcgaggctttatgaacgcggaacgttaacgcagaccacgaaaatcgttggcactttagggtacatggcgcctgagctcacacgtaacggtaaaggctcaaccgcgtctgacgttttcgcgtttggcgttttgttgttagaaatagtgtgtgggaataaaccaacgaatgcagagaacttcttcttagctgattgggtaatggaatttcatactaatggtggaatcctttgcgtcgtggatcagaatctcgggtctagtttcaatggcagagaggctaaactagctcttgttgtggggttactatgttgccatcagaaaccaaaatttaggccatcgatgagaatggtgcttagatatttgaatggtgaagagaatgttccacagattgatgaaaattggggattctcggattcttcgagagacgatcataaatcgaatgttgtaggttatgtttcgtctgatagagcctcgagctcgaatactttttcgtctttctccaatgtttcttcaagctctatcgttagtggtagatagtttcatagcacttttagcatagcttatttattttctagaaacagaacattttgtatgtttttactatttatgctaagaaggaactaaatgtatgacgtgtgtgtcgattatgtcttattatggaccagtgaacccattacccatattactaagtgaatgatagatacaacttgtacaatacaagggttcattgtttccagctttattaggtacaatattatttttgcattactaaaaacagacttttcttttgtctaaacatttttttgtaaattataacataaaatgcaaatagcaaacaaaatatattttcttattccaatgcaaacaaaatatctttcttattccgttttagtttgcttttgttatcaactcaagactttgatcggtgacttaaaacaaatgttaaaaagacgatccaatccctcatatatgattgaaaactttgatacaaaatgagattgacagaagataagactaacaggtccgttctagattctttccaaacgtaacagcatgattggatcattttaagcaatttcaagtggagaaaatagaaaaatattgtgtgttgcccaattatttcaatcaacaattcaaaattattatgatatgggcttggtaggttgatggtttcactttcataacacaacgacaagtgaactacgaacctatgcctcagtttgtgtccaggttcatgatggacatgcctataattagaaacgtgtattgaaagaaagcgtctaaactttgcaattggctacagaagttttaaaacaatgattgcgttgtgaacattactgaattttcataacaactcaaaccattttttacaaatattacgacacagttgttttgttactgtgatatctgttgtttctatgctttaaaatttaaataaacaactgtgattcgttgtatagaaccgtgtatcagactatcactatcctacaagttaattaattacgccaaaaacaagttaattacgccaatcaaactaaagaaaactataataatagcgtgactctatggtttggtactttggttaatgtgctgcttacttgctcatcttatctatgattagaatatttacttaataagtggagttttaaactgtatttctcatgtattttagtgaatctcatattaacttattaggttatactttttgataaataatttaggttagacttaggtaagataagtacgtattaaactgggatgaagataaaacaatgccaaaacaaacggacacgcttcagctgatgatagatttaattttgccaatagtataaaccagttacgcctttttatagaacaactctgccatacttgataattcatacactctatctcttctctctctcaatctctcaaaagatctccggtaacgttttaacgtcggtgaaaaa

SEQ ID NO: 9563 - DNA, 3000 bp, Unknown
  misc_feature (1)..( 3000): cDNA_ID_3042446_gDNA_ID_1972154_Annot_ID_179406 3000 nt of promoter + ATG
ctgtcatactcttgacggtcgatctcttcatcacagatggaactccagaactcaattgcttggagggcaacgctctcttcatctccctttacagcattcgatgtgagctcaaagagtgtttgtatgtagtgctccagcacctcatagtatgtggatgcaatggacacaaggcactcgaaagcagcttgcctgatctctgcctccttggaacatgctgtctcgcataccatcttcatgatgtaattcctctccatttcattctcaaaatttgtctgagagaaatccaaggcatttaacagtgcctttgttgctgcgagacgaacttcagcagtattttcagactggttcatgccctgcacaactgctgtgaggacagaattcacttcatcttgcacaagatcatggtgtgatatctcttcacagacatagcctagagtttccaaggttgattgcttcaagtgtgcgggactgccttgctgagtcatattgttaagcagcgatccaacaagttcaggccactgcttctgaggaatttcaatggaggctaccttagcaataacctgagctgaagtatgccttgcctctagggcagatgaaccaagagttcttagtaagcgatccttgatctgggatttaagagcaacatcaattgcaaaccattgtttcaccagatgatcttttgtggcagaatctttggcgtccagagaattctttagcagaataccggctagtcgacgggattcagcaggtttatcattgttttcaagctcaaaagacaaggataacaagaacagcggcaagttttgttcttggaactgtctgagactagcctctgcttcagtacggactcttgcatcggctgactgggcagccagaaggaactgtgtgatctccatagccattcttctctctgcacaataaagacatacaccagtatcagcgacaaaacagtagtcaaatagaatcacatccagcacaattctaagcaaaagtaaaagctactgaacaaagtaatggtatgagtatagaaggcaataatactattcaaaccgtacaaaggttcaatccagagagcaaacaaattaatatctatactcagagaaaaccataggagaatctctgctctgagtaattaacaaaaaaatcactacaaacaaattccagtataaaatccgaaccaaagttgactcaacaatgtctttgaacttcgaaaaaagcttaaaccctaatcgtgaagaacacagcgagcgagtaaagaaccaaattaaaatcccagcaaaattaaaaaccctagcagtagtagtgacccaataacctaatcagaaaacatagatccagtaacagatatgcaaatcccgaactcaatacacactacaagcaatagacttacgtggaaattaaggattttttcgcttgagaagacgcgtaaacgctagggtttttcgcttcaatccaaaccctgtgtccctgtcactgcaaagcctatcgagaaaaagcttctccaagacggcgctcgaagcaggggaaaaacctctggtggatcagaaaaaccctagacttgcagagagaaaaagagtcgactgtgtggaaaggaggcagagataatgaggagactgagagaggtgaatgtgaatttcgaatataaggaaggagcgggtggggaagggcaaagcagaagcttaaaactattttatttctaaaatcaccccattaacaattctttattctacgtaacccccttatatttgccaataatttttatttgttacctcgacttcaaaattagaatccagttttggcaaaaaaaatactaaaatccagattaattaaccaagattacaaaaacaaatttaagtttactttagtagtttgtttgtttcataattcaaatttaagtttttctaaagtagtgtggatgtatttagttatgtataatgtatttgaggtttcaaacttaaatgttcatttacttggacccatgactggttatgatacagttcattcacctaaggttgtgccaaaatgaataagcttgcaaatagacgatggttataaatttggataaaagagttatttactcatttgatgtataacaaacaaataacaaaaagtcccaaagtgtgtcgaataattatggtaaacaaaggttatttcagatacaaatacaaagtctatggggtgatttaggaataaagtgtttttagcttttgagccttgcccttccacagttccacacccgcttcttctctgtattcgaaattgaaatttcttttctcatatctctctctccttcgacagtttcaagtacagactctctctctgtctctgcaaactctagggtttggtttttgctcttcttcgagaagctttttgtggatagaatctgcagtgagagggacgtggtgtttaaattgaagcgaaaaaccctagcgtttacgcaaaccttaatttccaggtaaatctcttgcttgaactgtgtattgatctctggatttgtatatctgtttatagatctatgctttcggattaggttttgggtcactagtactgcagggtttttaactttagttttttactcgctcgctgtgattctgccacttatttgtctctcttccttcttagaaattgaactcgtgttcttcacgactaggagaaaaagctttttccgaatttcatagaaaacgctgggtcatctttggttcggatttcatattgggtttgttttcaatgatttttgttgtcaattacaccaagcagagattctcatataattttctcggagtatggatatatttgctcataatgttcaaatgctcttgtttgtaccatctgattgaacttgttgaccgtttgtatagtattattgccttttatacttgtaccattactttgttcagtagctttccctttttttttagaattgtgctgattttgttctattaacccctctttttttttgctgattatggtgaatgtccttgttgcgcagagaccagaatg

SEQ ID NO: 9564 - DNA, 3000 bp, Unknown
  misc_feature (1)..( 3000): cDNA_ID_3042442_gDNA_ID_1972154_Annot_ID_179407 3000 nt of promoter + ATG
aggactgtcatactcttgacggtcgatctcttcatcacagatggaactccagaactcaattgcttggagggaaacgctctcttcatctccctttacagcattcgatgtgagctcaaagagtgtttgtatgtagtgctccagcacctcatagtatgtggatgcaatggacacaaggcactcgaaagcagcttgcctgatctctgcctccttggaacatgctgtctcgcataccatcttcatgatgtaattcctctccatttcattctcaaaatttgtctgagagaaatccaaggcattaacagtgcctttgttgctgcgagacgaacttcagcagtattttcagactggttcatgccctgcacaactgctgtgaggacagaattcacttcatcttgcacaagatcatggtgtgatatctcttcacagacatagcctagagtttccaaggttgattgcttcaagtgtgcgggactgccttgctgagtcatattgttaagcagcgatccaacaagttcaggccactgcttctgaggaatttcaatggaggctaccttagcaataacctgagctgaagtatgccttgcctctagggcagatgaaccaagagttcttagtaagcgatccttgatctgggatttaagagcaacatcaattgcaaaccattgtttcaccagatgatcttttgtggcagaatctttggcgtccagagaattctttagcagaataccggctagtcgacgggattcagcaggtttatcattgttggcaagctcaaaagacaaggatactaagaacagcggcaagttctgttcttggaattgcctgagattaccctctgcttcagtccggactcttgcatcggctgactgggcagccaacagaaactgtgtgatctccatcgccattctggtctctgcgcaacaaggacattcaccataatcagcaaaaaaaaagaggggttaatagaacaaaatcagcacaattctaaaaaaaaagggaaagctactgaacaaagtaatggtacaagtataaaaggcaataatactatacaaacggtcaacaagttcaatcagatggtacaaacaagagcatttgaacattatgagcaaatatatccatactccgagaaaattatatgagaatctctgcttggtgtaattgacaacaaaaatcattgaaaacaaacccaatatgaaatccgaaccaaagatgacccagcgttttctatgaaattcggaaaaagctttttctcctagtcgtgaagaacacgagttcaatttctaagaaggaagagagacaaataagtggcagaatcacagcgagcgagtaaaaaactaaagttaaaaaccctgcagtactagtgacccaaaacctaatccgaaagcatagatctataaacagatatacaaatccagagatcaatacacagttcaagcaagagatttacctggaaattaaggtttgcgtaaacgctagggtttttcgcttcaatttaaacaccacgtccctctcactgcagattctatccacaaaaagcttctcgaagaagagcaaaaaccaaaccctagagtttgcagagacagagagagagtctgtacttgaaactgtcgaaggagagagagatatgagaaaagaaatttcaatttcgaatacagagaagaagcgggtgtggaactgtggaagggcaaggctcaaaagctaaaaacactttattcctaaatcaccccatagactttgtatttgtatctgaaataacctttgtttaccataattattcgacacactttgggactttttgttatttgtttgttatacatcaaatgagtaaataactcttttatccaaatttataaccatcgtctatttgcaagcttattcattttggcacaaccttaggtgaatgaactgtatcataaccagtcatgggtccaagtaaatgaacatttaagtttgaaacctcaaatacattatacataactaaatacatccacactactttagaaaaacttaaatttgaattatgaaacaaacaaactactaaagtaaacttaaatttgtttttgtaatcttggttaattaatctggattttagtattttttttgccaaaactggattctaattttgaagtcgaggtaacaaataaaaattattggcaaatataagggggttacgtagaataaagaattgttaatggggtgattttagaaataaaatagttttaagcttctgctttgcccttccccacccgctccttccttatattcgaaattcacattcacctctctcagtctcctcattatctctgcctcctttccacacagtcgactctttttctctctgcaagtctagggtttttctgatccaccagaggtttttcccctgcttcgagcgccgtcttggagaagctttttctcgataggctttgcagtgacagggacacagggtttggattgaagcgaaaaaccctagcgtttacgcgtcttctcaagcgaaaaaatccttaatttccacgtaagtctattgcttgtagtgtgtattgagttcgggatttgcatatctgttactggatctatgttttctgattaggttattgggtcactactactgctagggtttttaattttgctgggattttaatttggttctttactcgctcgctgtgttcttcacgattagggtttaagcttttttcgaagttcaaagacattgttgagtcaactttggttcggattttatactggaatttgtttgtagtgatttttttgttaattactcagagcagagattctcctatggttttctctgagtatagatattaatttgtttgctctctggattgaacctttgtacggtttgaatagtattattgccttctatactcataccattactttgttcagtagcttttacttttgcttagaattgtgctggatgtgattctatttgactactgttttgtcgctgatactggtgtatgtctttattgtgcagagagaaga

SEQ ID NO: 9565 - DNA, 3000 bp, Unknown
  misc_feature (1)..( 3000): cDNA_ID_3042438_gDNA_ID_1972154_Annot_ID_179408 3000 nt of promoter + ATG
tcttttcacggtatgaccattgttctttcatgttgagaagtgcattgtttgctttgaaaggatttaatctgtcttatattgttgattcttcattgactaacacaaactctcaacagatgagatgcatggcaagatataattctgtatccattgaagtaaatagatgtttgatttatacatttcagtaaaaaaaatctgataactaattgttctctcaaatatttctagatatttggtggtgttggtattgcatgtctaccattaggacttatcactgcattcatcaggcgaccaaaggctgttatcactcgatcacaatatataaaggtctggttattgttctcctctggaagcatctctctagatcttgagtcaatccctctgtctcttgcatgattaactccataaatatattacaggaggcaaccgaactaggtaaaaaggcaagagaactaaagaaagcagctgatggacttcatcaggaagaaagaagtggtgctaagggcaggaaatggcggaaaaatgtgaaagcagttgaaaaggtacctcatatatctcaaggttcagtatcttatctaaattttgtttcataagtagcaacttggaaagtttgcctattcatactggtcccttgtgtgtaaagaggctttggtcgtctgtggagttatgagaatgacaacttgtagtgaaaagctagtgagatagtagaattggttattgactttattggtagcttttctttgcttggttgtggatttaagctgtgtcccctcaatcctataattgaatgtggtaaccctgcaggagttgctccaattggaggaagatgtgaacctcttagaagagatgtatcctcaaggagagcaggtaagacgagtgtatcttagaacttatactataatatttttcttgttcaactattttattccctggtacctttttccaggcagaaactgcatgggctttcactgtgctcggatacttggccaagtttattcttggaatcgtagggttagtacatctaagcagaaacctcctttgcatttttttttgttacatgttgtataaatcatgcataatgcatacagttcttgcatatttaggtttgcactcttaagctcccgagctaagcgtctttttaaatggcaaatttttaatgtctttgtagattgatcgtttccattgcttgggttgcacacatcatcatatatctactcgtcgaccctcctctctccccttttcttaacgaggttttcattaagcttgatgatgtttggggtaagttcatacttttgtccttgttatcctgtataaggtttcttctttgtttctaactgactccatgctggtacgtgtggaaatctccaggtcttttaggcactgctgcctttgctttcttctgtttctaccttctacttgctgttatcgctggggcaatgatgctgggtttgaagctggtcttcattaccattcatccaatgaagtaatccatctaaccggtttcaacattatttggctattttccaaggtcattcattaccttctcttgattgctgattggccatatcaacttatttcagatggggagctactctaatgaactctttcctcttcaatgtcggcctcattcttctttgttcaatcaggtaagtctctctggtctcttcttctgcctttgtatctgttgggatcaagtgcactctgataaacggatctagatcaagcatgtttatgtgcatacattaacttatcagtgttttcatgccatcactaaaactaatttcctttccggcgaatgcctgaatcgaagtttatagttactttactcatgcacttgggtatcctttgtactctattagatgtcaaaccaagacttttaatatacagctgctaccctcacaattacatgttaatcctcacagtctgagtaatgtggttcatttaaaatgcagcgtgattcaattttgtgccactgcatttggatattacgctcaagccactgctgcccaggagatatttggccacacattgcagtcccttagaggaattaagtacctttacaagtaagtagaagtggtataacatatagcagtcatatgctatatccgtgatgcgtcttattgaggttttatatttcaggtacaatgtgttccaaatcgggtttgttatcctggctggactgactttcctatattacattgcctttgtaagtcctcgttgatgttactcctcgggttttctcttctgtattaagtatttgtagaatcatatggtctttggtgttttggcagggatggagaagaaaaaaaactagtggccgtttccagctctcttcttaatgtaaaacgttttcacggggatctgattgagtgctgtcgacaaagtttctacttgtttctggatcatcatcgattccagaagtatctagagactctgcttctgaggtttattttcctgaatgtattattaaatttcttgtgagtgtgctgtttggttgcgcaacagttagctgtcctgtcttggtctattgtactgtctcggatgcgatcatgtaatcatattttcttaatgagaagccttcttcgaatttttacaagacagagacttcctttgtggtttgagacaattgtaaccgaacctaaccggattatcaatattcttgaatttgtttagtatgcaaggcatacaactatacaagtggacatgtgctgctgaagtgacaagtggcgttgctatgcgattcgtcaatagcttcttttgcccaatcagcttgcttgcctcatctaactctaaaagacagacaggatagataacgcgagctttttatagataaggctgattttgtttcctaccgtcagatggatttgtttctccatctaaccgtcaagattcgttctctgagatctctcccacacacataccgccacttaaaaacgccatttgcttcagataagttacaaaccgcaaacgcgacagaactaactaacgacgccggagatg

SEQ ID NO: 9566 - DNA, 3000 bp, Unknown
  misc_feature (1)..( 3000): cDNA_ID_2183718_gDNA_ID_1972154_Annot_ID_179404 3000 nt of promoter + ATG
tttgacgatctgaaggcaccaatgatacaaacaggagtgttctccccacaaatggagtcaaaatttggtcttgacagaagaggtatcttttctgaggactcgttaggggcttggcccgcctgactcttagaagagaccttcttgttcttcttctctaatccttcaagcaatttaccaagttcctggacagctgatttcagatttttcacagtgatacctgttttcaagacttgcttctccccattcgataaccaaccaactattgccggaaacttgtctacccccaacttttgtatctttggatcagaagtatcatggacctacaagatcatgagaaaaaaatactttagctaaaaagatttcatgtctaaggaattctaataattaagttcaaatttgctgactcgtcattaaacgtggaccagggaaccaccccataatttctacgaccatcagactctcgcagtaacaataattgtaggaatagtgatgtaagtggaaattaaagccaaaatataacaaacctctgtgttgtaaaagacaaatcgtccattgtacaagccacttagaacccgccagatgacaggagtgtctttctttgttgacagaagcaaaactttaggagtcttttgtgagctaacggcagatacatcgaatgtattcagatcaatcttttttgagaatctcggtagatgttcctggcagaagcttttcaccttctttgcaacaagctcttcagtatattctgctaaggtagctttgccacttgatgtgtatgaataaacaaacatccttggagccctacgaggaactatgcctagttgtttgcaaagagaggattctgtttcacaatttaatcgcccaacctgtaaacataaagttaaatcacgtaaacaacaaaagaaactacacttcttcttttaagaacgaaacagaaaacccaaaatcaactaacttgacaagcatatgttttacctttaaagctccttgcaacgactcagcaacttcctctatgatggattcatggtactggcttcccctctgagatggaagatacgacaacaaaagccaagtcatcccttggtccacaacgtccttcttatagacctgagagttaatggttttgatagctgctacagtactgctctttgatttagattcagcattcgatgagctaccaaagccaccaaactgctcctttcctttagaactaccgcccgaaaacatggaaaagatatcatccataccaaaaccaaaggagctttcactaggaccgccaaacgagaaagaaaacgatttggaacctcccccaccgcccatattttgccaaccaccaggccctccaaagttgaaaccaccaccacttgaggagtaagaatacccaccattacctccgggaaaccccgaatcaaatccaggctgtcctttctcatctccataaagatcatagtttttcctcttctcttcatcagataagatctcatacgctgttacacatagataagggtttaaacttgtcaaagccagatcaacaaaaattcaatttgtgccacaaacacatggccatagaacaagaataatcttataatatactaaaagattcgattacaggacacatctcctagggaaatttgatacctaccattattaatctcagcaaacttctcctgagcacccttatctttgtttttatctggatgatatttcagagattgcctgccaaaaaaaatcacaagctacatgagtaaactatttgttgatcatcattcgaattattagcttaatcagcgactagaaacgaagggtgcttacttgtggaaagctttctggatttcacgctgctttgcatccttagatactccaagaacctgaagatgcattcattagttaataatgtttataatcaatagcaaaaactactgagcaaaacctaatatatcaaaaatccttcttttctataacacccacaaatttgtcagcccaaacttcaatgagaaaggggacaatcaaaagtaatcattatttccggccccaatcaaaagacttgtgaatggaaagaaaacaagatgaatcacaaaccgtaccttgtaaggatcaacgctcttcgctttcacattcaacaacaacaatgtcgacacaagaacaacagatatcgccaatcttgttctcaccatcccgaaagtacaacctctcaatctttttctcttttattgttttgttgtcaacgaatcttcttcttcctcttctaagcgtgtcttattcacgaaactcaacgcttcgagaaaaatcgagaaggacatcattaaataggttcgcagggtttaaaggaaaaaaaggaaatttctcgaatgacatatatattttaattaatttagagtattccccatatttaatagtcttacaaaagacaccaaaattgtcaattggattaagaaattggtaggggcaattactcacttcaaaaactagcaggggttgtttcgtatttcctgaaaataaattccggttgcttcccgttctcaatttaaggcgggtatcatacgtggcaaatttgatgcaatcccacgtatctccaccaataagattttagcaaacacgagcgatcgttgtttatttgcgttcacgcgccgttaagatcacgcgcgattattaatttgggcttatttattataggcccaataatctgtagttagcccaaaacgaaagtctccggttgggtgatcggaatccgatcagagcgacggtaagtatttcttttttcttcgactgttaaaaaaaaaagaggaaatcattttcactagtgacattgttacgtttcaagagcttaagagaagttgaaagacggaggaagaagaagacgatctttcttctcttctctgtctctactagcttcgcgttttccttccttcgccgtgagattttatcgtcgtcgtaacaaacctctagggttcatcctcgacgtttccttggttaattaggtcaacaatatcgtcggatctg

SEQ ID NO: 9567 - DNA, 3000 bp, Unknown
  misc_feature (1)..( 3000): cDNA_ID_3042522_gDNA_ID_1972155_Annot_ID_179440 3000 nt of promoter + ATG
ttataatttaaaagtaattttgatgcctttactaaaatcatagaaagtaaataaattataaacaagtgctaaagagtttttataatcttgttattagttattctataatttagtgaagtttctcaaacaatatatctatttgatgattttttcatgattttattttgtgaagaaaaatgtataaaattataaactaataacacaatagtttaattcattaacaatcatacattttttttaattaaacaacacaaaaaatttattgactttattaaattttgattctaataaaatcagatttatgaaaattttaaaagacttttaatttacaaatcaaaaactaataatacattttaacagaaattaataaagttttgattgaataacaagagtcaaaagatctactaaagtttttaaaacaatatttcaatcacaaaccattttaggtgattttatttattttaatataatttctttctataggcagtagtgtggaccataaaattactgttaatttacttcctaaaaaggattatttaattgcaagattctaaactggattattcccacaatacacctttgtaaataaaaaccattaatccttcacaaatacagagtcgtgaacttaacgtctctctctattcctctgcttctctctttctccctgtgaaaaaatggactcggtggctctctactgcaccgctggtctcattgccggcgccgtctactggttcatatgcgtcctaggtccagcagaacgaaaaggcaaacgagcctctgatctctccggcggctcaatctccgcagaaaaagtcaaagacaactataaccaatactggtctttcttccgcaaaccaaaagagatcgaatcagccgagaaagtacctgacttcgtcgacacgttctacaatcttgtcactgatatctacgagtggggatggggacaatctttccatttctctcctcatgtccctggaaaatccgacaaagacgccacaagaatccacgaagaaatggccgtcgatctcatcaaagtgaaaccgggacaaaagattcttgacgctggttgcggcgtgggtgggccgatgagagccatcgcggcccattccaaggcccaagtcactggaatcactatcaacgagtaccaagtgcaacgagccaagcttcacaacaagaaagctggacttgattctctctgcaacgtcgtttgtggtaactttttaaagatgccgttcgatgaaaacacgtttgacggagcttactcgatcgaagctacgtgtcacgctcctaagctcgaagaagtatactcggagatcttcagagtgatgaaaccaggatctttgttcgtgtcctacgaatgggtcaccactgaaaaatacagagacgatgacgaagaacacaaggacgtgattcaagggatcgagagaggagacgcacttcctggactaagaagctacgctgatatagccgtgacggcgaagaaagttgggtttgaggtagtgaaggagaaagatttggctaaaccaccgtctaaaccgtggtggaaccggttaaagatgggaaggattgcttattggagaaaccatgttgtggttgtgattctttctgctattggggttgctcctaaaggaactgttgatgttcataagatgttgtttaagactgctgattatttgaccagaggtggtgagactggaatcttctctccgatgcatatgattctctgtagaaaaccagagaaagcttctgaatgaatgattgagaatcttcttccttgttctcgtttttcttcttctttctttctaagttcatgttttgccccttaagaatctctttgtcgtcgtattaatgttatcactttgttgtttattgtatttttttttttcaatttgatttgtttaaattgatgatggatcactggaaattagtttttcgctcttcttaaatagtttctgaaagaattagccgggaaattctattggagtgatcctttacctttttaaaattttgtagagtttacaagtctctgtttagttttaatttctaagatcaaactcggaataaaccggattagcacgtctatagagttgcataaacttttagtatcatcaatgagggtagtttggtaagtccttaggtgtcacattgtgtctgtagtagtgagtcgggagtggtcgtgtgggattttgtgggctgtccgatatgcatatgttattgtcgtcaactgtctgatatattaatctatgtatcttttaaagatttgattttgatttattttaggcttatggtttgtcgcattgcggtagtgggtagcagcgtggtcgcacgaactccggcttaccttagaaaacgatattttatttagttatttagtttttttttttccaatttgttttgtgcattactaaaaagattgtgtcatttgtgtgtaaaagtttactaaaacactgggtcatttctatagtgggcttttataatgatgggcttaaggccaatttttattggtttacctcacttccagttccaccgggagtggatatatgcttatattcgtacgtgacatcaacaataatacgcgtatacatgtgtaagtcaatggacaatttgggtcgaagctgagaaaattgtccaaactatgagagctgacgcaatcttttgttttcttttggccgatacattttccgcttaccagatggaaaagaaaccacaatgtcgaatttatccaaccggttcaattagtcttacttggatgctggtggaattttccagaatgacaacaacttgaacaaaataaacttgaattgcttttagaaacagcaatctcaccaagttcacatattccttttatattcccacgaaaaaaatctaatcaacagtgaacacaatccacacaagttaaacaagtggacataaaagtcttggacccattttaaaacatctatccacattaaatcattcactgatctctaaccaatcccacacacactaccacaaacaatg

SEQ ID NO: 9568 - DNA, 3000 bp, Unknown
  misc_feature (1)..( 3000): cDNA_ID_3042490_gDNA_ID_1972155_Annot_ID_179465 3000 nt of promoter + ATG
catgagaaaataatggattaacaaaataataataataatataacagaaacaaattactcgatgttaaaatgctagttttactagactacttatattatcatgttaaaatcactttttcaaacatgaaatgtcaaaatgttctaaaatgttatgaataatatcaactcaataaacgtaaattgatactcaacaaaagtttataccaatgtatatatatatttataatacttaatgccatactgcgcattaaccatttacttgataaaaaatacacgaaaaagcttacggattcacatcatcaccacgccacacattagcatcatcatgccacgcattagccatttcgtaaaattattaccataaattaaaaaaatacaagaaaaaacagaatacctttttccatacaaacaatatactatgtgaatttacaagctgtcagattaatcaagatcttctttatcaggaaacgtgggtccggataaggtaaggggtcaatttcagtctcggactagtcggctacaaaatcttgcgagttgctaaacaatagaaatttcaaagataatcataacttcaatctcaacctaacagtctcatactattaactatagaacccgaatcgagaaagaggcaataactcatagtattaacaaatatagtcaacaattaattgctatcacacccatatcttagagacatccgttaatacctttagaagcgtcatttttgaccgcaattttgttataaagtaacgaggaaataaaaaagaatatcatattggatgggattgtgacaacatcaaataccaaacccatcatcaaacaaaaaatcccttcacatgagtaacgtacggatcaagaaacggttacaccaaccctaaacctctccaactaaacggaggtccccgctcctgatcactttcttatccttaattatatattcccgaattttatgcacttaaaaatttaatgtaatactccaacatttaattaattgaaagttagtgaaaagaatttataaggtaaggaagttcaaaagagtcgataaattaccttaatgccattgggcgaattcataggtgtgaggactcgaaccatcggctcagtctcattgattggcttaggctcaaagatacgaacccaagcaagtcttggtgcgtccttaagtaaccgaagtttgaaagaatttttgtcgagaggactattaagaaacaaatcagcattaggataaaccctcaagatcttctccataatcgacggtccggttaactcaaaccgcctcgctcctcctaccaaacacaccgcaatcttcgacttaaccaactcctccctcttcctccgccgtcgattttccatctcctccgcttggataacgtcgttagggttcgaatctgacaattcgacggtgaaatcggtgacggttagggtatgagtgtagattaggttacgaagaggggctagagttggaaaaggatcaagtgagagagatgagaaagagattaagacgaggagggtgagagatgggattatgagaaggaggagaagacgacgatcgacgtcggagattctcctggaaacgtacataacggcggcgtaagtgatcgtaaccctaatctgtgagaataaccaccaccgtggattgttcacacacgtttcatttgccgagagagagatttttgtatttatagagttttgattttcttcaaaacttttgaagtgattcggagaggcgctggtttgttggagtggaaggtgaaatcaacattacgcgtgggtttggttttcgttttctcttttcttctagagagagatatgaaatatctatgtagctctgtataaaaccgatgcataattaattaaaatatacgtatttgattacgttttcaaaaaggaaatgatcaatgttacttttgtttttttcacgtttctttgtttgcttagtaaataatttatgaatgtttgaaatactttggtgaatagttttagtgctcgatcgttacagtaatcaattcgaataaactcttcactaaatatgctcgttacagtcttcacgtttattgtaactgttagacccccactcattgtgtattaggggatgttgacaagtatattgaagagattgatatcttgaaaggcgtacgtggactagtaaagaaatggatagtttgggttgcaagaaaagttttactttttgtattcaacaaaaggaaaagaaaagtattttttgttatccaagatatgactttatgtagtatattcatttgagagcattgtattaattagaatgttcacatatatcaatatataattatatatagaatttgctcttcaattgtaaagaagaaatgaggttccaaatttgttattagtgctctaaacatatatttttattaccttagaaattaatatataatatttctttctttgctttcccatgactttttactgtttttggtaacaagataatactttccctagtatataagatttttaaagcttttttgttgttgttcccaattagtttttctctagtttctagtcataatttatattaattccatagtttatgattatttaaattatgcagtattttttattggttaaatttttattaatgataaaacatgtgattttagccaaaacatctaataaaatgggacatatggagtactacaatagtgatagatcttttatttacctgtttattatatatgaatctattcaattttcatttatttacatgtttatttaaattatttatttaatttgcatctaaaatttgcaaaactattgttgggccatgagtgtcaactgtcaaatgtcaaccatagaagcaaaaataaaacagtttatgattcagtttgtaaaagtgggcttatttaaatgaatattggcccattagtatcatcttcacgaaacccagcaaaatcagagagcggcaaatcgttgaagagagatcttcttcttcctgaatccgtaacgttagctcaggcgtaagagcata

SEQ ID NO: 9569 - DNA, 3000 bp, Unknown
  misc_feature (1)..( 3000): cDNA_ID_3019521_gDNA_ID_1972155_Annot_ID_179467 3000 nt of promoter + ATG
tataaatactccacaatttttatatgattttagtagctcaatagagaataacaatagaaaagaaatggaaggaacaatgaggtgctcagcgaattacgtcccgctttctccgatcagctttctcgagagagctgctgtcgtcttcggctccagaacctctgtcgtgtatggtgatattcagtacacgtggcaccaaacacgtgaccgttgcgtccgccttgcatctgctctctctgaccttggtctctctcgccatgacgttgtaagtggttaaacgacttttatatattggtcatacttttttcttttgtttaaactatttcttttatcaggtggctgctttagcgccaaatgttcctgcgttatgcgagctttattttggagctccgatggctggagcagtactttgcgtgttgaacacgacattcgattctcagatgcttgcgatggcgctggagaaaacgaagccaaaagtattcttcgttgactctgagttcctctctgtcgctgaagaatctctcagtctcctctcaaacattgaagaaaaacctctcatcatcacaatcacagaaaatccaacagagcaatcaaaatatgaacaatacgaggattttctctccactggaaaccctaatttcaaaccaatacgaccagttgacgaatgtgatccaatcgccctcaacttcacatctggaaccacatcgactcccaaatgtgtcgtctatagtcatcgcggtgcctatctgaacgcaactgctgttggtgttatgaatgagatgaaaccaatgccggtttatctatgtacagttcctatgtatcattgtagcgggtggtgctatatttggacagttacggcttttggaggagtcatcgtctgtctcagggaagtcaacgacgaagttatatttgatagtatcgtgaagcacaaggtaactaactttggtggctcgcctccggttctcaacatgattgctaatgcaagagactcggtcaagaagtcgtttccatggaccgtacaggttatgagcggaggatcctctcctcctgaggtaaaactaactatcacagagttttgaattacatgtttgttcaatcaggcttatttggttgaacttccatattttgaggttatatataatcaatcccttgctttatacgttagctccgtcacagtacattaatatttaacatagaatcatagtaaagatattaatttatttggacaggtcatgttgaaactcaagaagctaggattcaaagtgatgatggcttatggatgctcggaggtgtatggactaggaacagcttgtttgtggatgcccgagtgggagactctacctgaagaggagagtttaaggctcaaggcaagagatggtctcaaccatttcgccaaggaagctgtcgatgtattggacccaaccaccatgaaatcggttccacacgacggaaagactatcagggtaattgctctccggggaaatacagtcatgagcggttacttcaaggacaaggaagccactgaagcggcttttcgaggtggatggtactggagtcgcgacatgggtgttatagatcctgatgggtaagtaaatgaatcatgcattactttgaatgtattactttgaatttatttatgcttatgatgtttccacatgcgaagctacatacaatttaaagataggtcacaagatgttataacatgcggaggagaaatcgtgggatcaaaggagatcgaagggattctctatagtcacccggcggtttatgacgcaggggtcgtgggtcgaccggacgaaactttaggagaatcgatgtgtgctttcgtgaagctcaaagaaggagctgaagcgagagaggaagagatcattgagttctgcaagagaaagcttgggaataagaacatgaagatgattccaaagacagtagtcttctcggatgttcctaagactcccactgggaagattcgaaagaatgttctgagaaagatggccaaggatatgggttatgttcaattgagagctgtggagtaaatgaaatgataatttatcaatgcatctaataaagttataaaaaaaaaaaaaagtgtaaactttaagctttagtttatatgttctgatgttctatgttattttgacatttataaaaaataatgaagtctcatttctagtagactgatcttaacataagacaaaaatatatatatcagtagatgataatgggtatgactcggcaagtattattctcttgatactattatgtagtttcattgtttaagcacactgatagtttaatactattatgtcgtttcattgtttaagcacactgatagtttgatatttttgtatcaggtgctgttgattgaattatgtttttttttgttcttgatttactttttattggggtagtattcatgatgattaatggagactatgttatgtatataatgttagaaacctggaaatatctttcacaagttttcacctttaagcaattcattttgatagaaaaataaatattatgagattaatctttcttccatggatcaaggcaagctaatagctatcatacaaacttataccagcccagatcaaattaaaccggagagaaattggaatgcccaatcagaaatgcataaatgggccaaatgtgaagaatacggcccaataattgttttttccatcagaatgataaacctgaaatgttttcttttcggcaagcttctctcctcttctaacatggtcgcatctgctagaaccagatacacataattgaaacgagtttcgataaatggaaatgttcgcttactgatttagagtttagatttttagtttgtgaagtaagttttcgccttttctaatctcgaagaacctcagaatcgagcctggaaagccatgtacagagctctgtaagttgttttggcaatttttttttttttttttgtgttgcctactatttcaataaatgttcattgacttgcttcgtgtttgtgcaatgaagatg

SEQ ID NO: 9570 - DNA, 3000 bp, Unknown
  misc_feature (1)..( 3000): cDNA_ID_2037860_gDNA_ID_1972155_Annot_ID_179466 3000 nt of promoter + ATG
cctatgaactgctcttttccttatttggtaatgtaaatgcaccatatgaagagggcaacatgttgtcccaagtagactgttgtaaaaggattaacgctatagaaatggacatgatgagaaatggttttcagcacagtcctatctcaaggctgaatgtggttagtttctgctccatatagataggtcttgacctgttttaagcagattaatcaaatgtaatattaatctggaaaatcccttttaaggcgatactatcaatctttacttcttcattgtgtatgtttgtgttatatatcagaacaatggacttatcgtttacactttcctttttctttcccagcttagagctctcggagctgaaggtatggtgaatgagatgatccgacacctgcaaaaggctgagaacctcagtgctcacagcaatatgtatctaggaacgcctacatacaacatagtgcttcattcacttctcgaggcaaacgaagtaagttttcatggtctaatagctttatcaaatttccactggaccagcatatatagcaatattgatcgctacttaaattacatgcagactgacatggtgatcaatatattcaaacgtatgaaatcatgtggctgccctgcagacgttgctacctacaatataatgattgattgttgcagccttattcactcgtataaatcagcttgtgccctagtttccatgatgatccgtgacgggttttctccaaaagctgttacatttactgctctgatgaaggtaataacaaagtatctgattacaattttaaaagtttgctgccattgtttctcaagaacttgctacaagtaagtattcagttcaggatgaaagaattctacacacagtacagacacataccaaattttcttgaaccatcgctcacgctcagaacttccaattttttttttggaatctagcagcttattgctgttcatttaattttaattaactaaagctgtgtatcctcttagattttgttgaatgatgcgaatttcgaggaggcactcaatctcttggaccaagcggcattagaagagatacatcttgatgtcttatcatacaacaccattttgcgtaaagcgtttgagaaggtaaagatatttgttgtaaaaacgcttaaagtaatgaaagtgaataaactgctttagtatacacataacttttgtctgcagggaatgattgatgtgattgagtacatagtggagcaaatgcaccgagagaaagtgaatccagatccaacgacatgtcattatgttttcagttgttatgtggagaaagggtatcatgcaacagctatagaagctttgaatgttctgagcttaaggatgctcaacgaagaagacaaggagagtcttcaggacaagaaaatagagctagaggaaaatttcgtcatgagcgaagaccctgaagctgaaacaaagataatcgaactgttcagaaaatctgaggagcatcttgctgcagcacttctgaatctaagatggtgtgcaatgctcgggggccggataatatggtcggaagaccaaagcccctgggccagagcactctccaacaagtacggttaataggtagaatgggaagtgttttcctgaataagagctggtgttgattatctgccatttcactaagctgctccgttttggttttgtatcctatacaaactagttagtgacaacacagttttggaggtcaccaatcgattcggttagatgagacggatcaacaatacggttagaagcatttttaagcggctacgaaccacctaaatacaaggcgacttgcgaaccatcaaatgcgagttttgttatttactttagattcttactgtaacttttgtttatttttacctttcaacaactgtgtatcaaagaattagccaaagatattccaattgcacctggttatacaaagttataagtatgttttctgaatatggatttaaccacttttgaaataaaggtaacaagtgcaatgcatatgatattgaaacttgatcacttgaaacaaagaagagaatatttactgagaaaacataaaggacagatggaaacgacagaaacaaacttaataatgttacaacttgctcctgtttttcttttgtagtttactcatccaaatacaaatcactgtccatagatagaggaccaatcctttacttagctgatttcaaaccatagaataccaaatttctaactaaagtatattgtacaacaatgcaaaacaaaaaataatgatactttcctaaattttaaataaataaaaagaagaagatattttctcttttaaccaaaatgatttatgtttgttacttaattacattactcactaactattatcttttacttaataactgaggccaattctcttcttctttgtcaactattagggacatttgttttttttttggccgacttggggacatatatctttgagtgttatatgtatgtgtattccattgattcatataaaggccctgataataatgtttttatcaatgtgataacaactaaagttaggcaaatatgagtttaaccgaattacgtataagctaatactcaatttaagactagtaaaaaaaatcaatgctgccgactgccgtcattaaagattttgatattaatctttgctttattttaccctaaatgtataatgtaagctaatatatatcaaataattgttagtcaaaagtcatcaaaattaacagatttttattaaacagattgtaataagatggaaacctctctataagaagtgctcaaaaacaaaggaactcaatttctctctctctctgatgattttgtttgtttgaagaaaagagaatattgttgtttgtctctcgtgatcgaaacaatgctttgtgattctcaaatacagtaacattttcaacatgctttgattccaaaaatccaaactttcattctctctctcaatctctctatatctccgagcagcgaggtagttgcacggcggccgccatg

SEQ ID NO: 9571 - DNA, 3000 bp, Unknown
  misc_feature (1)..( 3000): cDNA_ID_2036400_gDNA_ID_1972155_Annot_ID_179463 3000 nt of promoter + ATG
agcacacccagtagatagactgctgaaactgtaaacaatgaactcaccaattaatcttaccaacatgtgcatcaagggaagcaacacattccaatgttgaagaattcgattgaccatatggctcaggaatctgccatattgctgctccatatgagtcgccttgaaattgaaaacaacaacactgtaattctcctctgacaacactgtagtttcaatttctgaaactttatgcattcaatcggaaaagtccgattttttttacttcaaatcaactcaaaattagaagtttcgagatgatgagaattaccagtggagaagacagtagagaaaatgcgttgatcaaaaggggaagaagcaaggtcccaaatttcattaggatgcgagaacaatccctcacataacagctcagatccaccagaagacaaacgaagcaaatgaaccttaaaatttaacaaagtcagaatcttccgatccagaaatagaacgaaacagatcttaagaatcaatcacctcattttcttctttcaagcttagggttccagtgaggaagctagtgtgatctctatctgctttaacatccgatatacatctggcctgaaaacagcaaattttccaccattaagaaagctcgtaaattgacaaaggatcgggcatgaagaagatcgtgaactacctgatacttcaaaccataaccaatacccgatgatcctccttgcattatgctcttacgcctgagctaacgttacggattcaggaagaagaagatctctcttcaacgatttgccgctctctgattttgctgggtttcgtgaagatgatactaatgggccaatattcatttaaataagcccacttttacaaactgaatcataaactgttttatttttgcttctatggttgacatttgacagttgacactcatggcccaacaatagttttgcaaattttagatgcaaattaaataaataatttaaataaacatgtaaataaatgaaaattgaatagattcatatataataaacaggtaaataaaagatctatcactattgtagtactccatatgtcccattttattagatgttttggctaaaatcacatgttttatcattaataaaaatttaaccaataaaaaatactgcataatttaaataatcataaactatggaattaatataaattatgactagaaactagagaaaaactaattgggaacaacaacaaaaaagctttaaaaatcttatatactagggaaagtattatcttgttaccaaaaacagtaaaaagtcatgggaaagcaaagaaagaaatattatatattaatttctaaggtaataaaaatatatgtttagagcactaataacaaatttggaacctcatttcttctttacaattgaagagcaaattctatatataattatatattgatatatgtgaacattctaattaatacaatgctctcaaatgaatatactacataaagtcatatcttggataacaaaaaatacttttcttttccttttgttgaatacaaaaagtaaaacttttcttgcaacccaaactatccatttctttactagtccacgtacgcctttcaagatatcaatctcttcaatatacttgtcaacatcccctaatacacaatgagtgggggtctaacagttacaataaacgtgaagactgtaacgagcatatttagtgaagagtttattcgaattgattactgtaacgatcgagcactaaaactattcaccaaagtatttcaaacattcataaattatttactaagcaaacaaagaaacgtgaaaaaaacaaaagtaacattgatcatttcctttttgaaaacgtaatcaaatacgtatattttaattaattatgcatcggttttatacagagctacatagatatttcatatctctctctagaagaaaagagaaaacgaaaaccaaacccacgcgtaatgttgatttcaccttccactccaacaaaccagcgcctctccgaatcacttcaaaagttttgaagaaaatcaaaactctataaatacaaaaatctctctctcggcaaatgaaacgtgtgtgaacaatccacggtggtggttattctcacagattagggttacgatcacttacgccgccgttatgtacgtttccaggagaatctccgacgtcgatcgtcgtcttctcctccttctcataatcccatctctcaccctcctcgtcttaatctctttctcatctctctcacttgatccttttccaactctagcccctcttcgtaacctaatctacactcataccctaaccgtcaccgatttcaccgtcgaattgtcagattcgaaccctaacgacgttatccaagcggaggagatggaaaatcgacggcggaggaagagggaggagttggttaagtcgaagattgcggtgtgtttggtaggaggagcgaggcggtttgagttaaccggaccgtcgattatggagaagatcttgagggtttatcctaatgctgatttgtttcttaatagtcctctcgacaaaaattctttcaaacttcggttacttaaggacgcaccaagacttgcttgggttcgtatctttgagcctaagccaatcaatgagactgagccgatggttcgagtcctcacacctatgaattcgcccaatggcattaaggtaatttatcgactcttttgaacttccttaccttataaattcttttcactaactttcaattaattaaatgttggagtattacattaaatttttaagtgcataaaattcgggaatatataattaaggataagaaagtgatcaggagcggggacctccgtttagttggagaggtttagggttggtgtaaccgtttcttgatccgtacgttactcatgtgaagggattttttgtttgatgatgggtttggtatttgatgttgtcacaatcccatccaatatgatattcttttttatttcctcgttactttataacaaaattgcggtcaaaaatg

SEQ ID NO: 9572 - DNA, 3000 bp, Unknown
  misc_feature (1)..( 3000): cDNA_ID_3042504_gDNA_ID_1972155_Annot_ID_179452 3000 nt of promoter + ATG
aaacaaaagatgatgctaactttctattcgttctaaaatctaaatctttagttttagtttgtttatgtccacgatcatttctttgataatacttttggcggattcacaagcgcaaattacccgtcttattgtagcattaggactaaaaatgagatccggtagcattgcaacaacaccttcctaatcgattgagccaatcggacttatattacttgttggatttgtttttttttttgtttagagtatccaagatcatgtatttacaatttcaaagatcatgcgttactagattggcctcttcaacatgtttagtgaataataagttaaaataacacctaatcgttgaggattcatagcgtgataagaattaaataaccaagttcttattggtttgtttgtattttgtaacgcatagaatagaagaaagaaaaaataaggaacgttataaatttctaaaaaatcatcatttcttctcgaacaagcttgttccagcgtggcactagtcaataagtcaagtggacccacgtaaccgacatcacgtcttttacgccaatcagtacatactattgggtcctacaaaaggacaacttcccatgttatattgacacgttttaagatgtaattgattaatctaaatttctctctgactcttttctttgtctacatccgacgttccatttctgactatgagctccgtcgtccgatttgcgctaatgcttgacacgtgtcttccaatctatggtgcattaaattgttaatcctttcaaaatctgtaatccatttttggaatttgcaagatggttcctatatttgtgaatatatatatatatataagaaagcccgaaactttaagaacaataatttatagggacatcccattctttaaaatctcttttgcgttgtcaaaaataaattatttttgctttcagaggaaatgaaaaaacatttttgcttattccatattattcttactctatttaaagtttgaatcagttttctttaacttgataaaccgatcattgaactacaaagtccacataacaagtattaaaacaaacaaaaaaacttatgaaagtctaatatttaaattaaaaacagtacacgccttgaacaaaccatttagtttgttttcactacttttgaaaaaaaactatctagttgccattcttatccattattttttattccactaaattgatatcagatcacgtaagcaaactattaacaattaattaatgaattcttcttaatccaatataactttatctaattaacagaaaaatgataattaacgtggggacgaaggagaagatgccataaaaagcgggtcattttgtaatttcatataattagatatatgtttttaaattgcaaaaaaaaagtgtacaaagagcgtgaaatccgcggtggcttggacccctcccgagtcctcaacactatataacacactttcttctctaatctccatcacctcttattttcatctgcttttgaatttcaaaccttcacataaaaaaaatacttttgaatccgtgtttcattcatcgaatctttttccgataactatggctgaggaaatcaagaatgttcctgaacaggaggtgccaaaggtagcaacagaggaatcatcggcagaggttacagatcgtggattgttcgatttcttgggaaagaagaaagacgaaacaaaaccagaggagactccgatcgcttcagagtttgagcagaaggttcatatttcagagccggagccagaggttaaacacgaaagtcttcttgaaaagcttcaccgaagcgacagttcttctagctccgtaagtttagatctgatctgttgatgataaactataacatgatcgaatgcttttcttatctaactatatgggtctgaatttatacagtcaagtgaggaagaaggttcagatggtgagaagaggaagaagaagaaggagaagaagaagccaactactgaagttgaggtaaaggaggaagagaagaaagggtttatggagaagttgaaagagaagcttcctggacacaagaaacctgaagacggttcagccgtcgctgcggcaccggtggttgttcctcctcctgtggaagaagcgcatccagtggagaagaaagggattcttgagaagattaaggagaagcttccaggataccaccctaagaccaccgtagaggaggagaagaaagataaagaataagaagattatcattaaagatattaagaataatgatggttgatttgctttgtttttttttttttttattgtgatgattgatcatcttttgcttttgtgatgtgtaagtttgttggcttttttgttgattacaatttcttattttctcttgtatatggtttttaaaaacaaaagatctcaaggtattttaatggtatgaatattttcatttgattaagtgatatggatgatataattttatgtattgataatcttcaactattgctcaaagccgtaaacatgaccccagtttgattagcattcaagttcgtatgtaggaaattaaatgcgttggtatagaagaaacatgatcgtgtatactcttctttttagtgattgatttggcattgcggtcgacacaactactcaaaacgtgtaagaaaatggaccaacttagatatttttgtagaccagttgacgtaacgtttccctaatatgctagttatgataagatcacatattcacatgagatccagctaatcacaaaacatttccattaatggaccacatccttagttaataatgtctttaacgctcatcattgtgggtatatctaattatctataatcttgtatgtgggattttaatgttgggtaagaaagcccaatgggcccattaataactaaaacaattcagataccgaaatcaaatacgacggtgttctgtggatataactccgagttaggtcgtttttccggttaggacaatttaccgccgactagtaaacttggagtttcattcaccggtggagatg

SEQ ID NO: 9573 - DNA, 3000 bp, Unknown
  misc_feature (1)..( 3000): cDNA_ID_1442644_gDNA_ID_1972155_Annot_ID_179453 3000 nt of promoter + ATG
atcacagcagattaaaaaggaaaggataagccggagatctctaacctggaggaagagaaattggaggtggaagagaagaaagaaacggaggcccaatcatgctttgatctaatctgatattccctgagctgttctgctagattcgatcttgttatcatcgcttcttctccaccaagtcccgatcacagtcccgattcgacgaagagctcaagaagcgtttgagaatcacgagatgtaggaaaaatctatcaccaacatataactagaatctagaaatccaaaacaatggaaaaacaaaatctgtgaattggaaaatttcgcatcaaaattttacagcgacgaaacggtgtccgattcgttaggaattcggcgaacgttgcgtggactctctcggtgtcaacaaccgggtcgggttatagatccgatctggattcttaagcccattttatgggtattgggcttttaccgttactcttttgttttgagttgtcatcatatatgaaaactttgttccgatgccatgaaatttgggcttttaagaatcatgaaaactttgttctaacagaaatagaaacatcaaagaaaaagaaataaaacagcgatgcatcgattgattctcatgtcccaccaagtaaagcgagtgctaaatattgttgaatattcctgatttgaccacaataaggaaaatatcacgcccataaaactcagacgggcggtgaaaaagaagaaatcgacagaagaacaaacgcatgacgttcattacttagcactaatctgaaactttcgaattatagtatttgatccatatgtattctacgtttttcagaaaactttgttcagatatctcaaactttcgaattaattaatattattttaaaatctatagtttagttgtgaattctaagtgtcggctacaatttgtcggttcgctatcaccgaaaacattatccaaagaataagttaagagctgagcttcggtgtatatgacaacaagaaccaaaaagacgaataagttagtattgaaaaagataggtttgtttgatatgtgtgttgatacgtcacggttcgtgctacgtctttgttaaatttagagaccagagattactgatgtggcacgtcggttcattttttttattttaggcgaattttaagagatgatgcatttaccgattaccatctgtccttcattaatatttttagtatatctttttcaataggtcgaaaatgacatcccacacattaacatattaattcataagaaatccaagtcatcttatgctcatttgtctactcatgatttcattatctacatctaagtttatctttaaaaactgcatgaaaacataaccatttacgttgaaaaaatacatacacaaacccttttcccataaacgagattacgaaagattgttttatgtgccccaaaaatggtaaacaaaagatgatgctaactttctattcgttctaaaatctaaatctttagttttagtttgtttatgtccacgatcatttctttgataatacttttggcggattcacaagcgcaaattacccgtcttattgtagcattaggactaaaaatgagatccggtagcattgcaacaacaccttcctaatcgattgagccaatcggacttatattacttgttggatttgtttttttttttgtttagagtatccaagatcatgtatttacaatttcaaagatcatgcgttactagattggcctcttcaacatgtttagtgaataataagttaaaataacacctaatcgttgaggattcatagcgtgataagaattaaataaccaagttcttattggtttgtttgtattttgtaacgcatagaatagaagaaagaaaaaataaggaacgttataaatttctaaaaaatcatcatttcttctcgaacaagcttgttccagcgtggcactagtcaataagtcaagtggacccacgtaaccgacatcacgtcttttacgccaatcagtacatactattgggtcctacaaaaggacaacttcccatgttatattgacacgttttaagatgtaattgattaatctaaatttctctctgactcttttctttgtctacatccgacgttccatttctgactatgagctccgtcgtccgatttgcgctaatgcttgacacgtgtcttccaatctatggtgcattaaattgttaatcctttcaaaatctgtaatccatttttggaatttgcaagatggttcctatatttgtgaatatatatatatatataagaaagcccgaaactttaagaacaataatttatagggacatcccattctttaaaatctcttttgcgttgtcaaaaataaattatttttgctttcagaggaaatgaaaaaacatttttgcttattccatattattcttactctatttaaagtttgaatcagttttctttaacttgataaaccgatcattgaactacaaagtccacataacaagtattaaaacaaacaaaaaaacttatgaaagtctaatatttaaattaaaaacagtacacgccttgaacaaaccatttagtttgttttcactacttttgaaaaaaaactatctagttgccattcttatccattattttttattccactaaattgatatcagatcacgtaagcaaactattaacaattaattaatgaattcttcttaatccaatataactttatctaattaacagaaaaatgataattaacgtggggacgaaggagaagatgccataaaaagcgggtcattttgtaatttcatataattagatatatgtttttaaattgcaaaaaaaaagtgtacaaagagcgtgaaatccgcggtggcttggacccctcccgagtcctcaacactatataacacactttcttctctaatctccatcacctcttattttcatctgcttttgaatttcaaaccttcacataaaaaaaatacttttgaatccgtgtttcattcatcgaatctttttccgataactatg

SEQ ID NO: 9574 - DNA, 3000 bp, Unknown
  misc_feature (1)..( 3000): cDNA_ID_1024170_gDNA_ID_1972155_Annot_ID_179455 3000 nt of promoter + ATG
tgctcaaactctgaagcgatcggagtctcctctggttttgtttcgtctttcttctttcccaagaaatcgaacaatccacgatctgtaacctctgccgatgattcctctgttgctacctttggcacctcctgttcaggaacattcttgatttcctcagccatagttatcggaaaaagattcgatgaatgaaacacggattcaaaagtattttttttatgtgaaggtttgaaattcaaaagcagatgaaaataagaggtgatggagattagagaagaaagtgtgttatatagtgttgaggactcgggaggggtccaagccaccgcggatttcacgctctttgtacactttttttttgcaatttaaaaacatatatctaattatatgaaattacaaaatgacccgctttttatggcatcttctccttcgtccccacgttaattatcatttttctgttaattagataaagttatattggattaagaagaattcattaattaattgttaatagtttgcttacgtgatctgatatcaatttagtggaataaaaaataatggataagaatggcaactagatagttttttttcaaaagtagtgaaaacaaactaaatggtttgttcaaggcgtgtactgtttttaatttaaatattagactttcataagtttttttgtttgttttaatacttgttatgtggactttgtagttcaatgatcggtttatcaagttaaagaaaactgattcaaactttaaatagagtaagaataatatggaataagcaaaaatgttttttcatttcctctgaaagcaaaaataatttatttttgacaacgcaaaagagattttaaagaatgggatgtccctataaattattgttcttaaagtttcgggctttcttatatatatatatatattcacaaatataggaaccatcttgcaaattccaaaaatggattacagattttgaaaggattaacaatttaatgcaccatagattggaagacacgtgtcaagcattagcgcaaatcggacgacggagctcatagtcagaaatggaacgtcggatgtagacaaagaaaagagtcagagagaaatttagattaatcaattacatcttaaaacgtgtcaatataacatgggaagttgtccttttgtaggacccaatagtatgtactgattggcgtaaaagacgtgatgtcggttacgtgggtccacttgacttattgactagtgccacgctggaacaagcttgttcgagaagaaatgatgattttttagaaatttataacgttccttattttttctttcttctattctatgcgttacaaaatacaaacaaaccaataagaacttggttatttaattcttatcacgctatgaatcctcaacgattaggtgttattttaacttattattcactaaacatgttgaagaggccaatctagtaacgcatgatctttgaaattgtaaatacatgatcttggatactctaaacaaaaaaaaaaacaaatccaacaagtaatataagtccgattggctcaatcgattaggaaggtgttgttgcaatgctaccggatctcatttttagtcctaatgctacaataagacgggtaatttgcgcttgtgaatccgccaaaagtattatcaaagaaatgatcgtggacataaacaaactaaaactaaagatttagattttagaacgaatagaaagttagcatcatcttttgtttaccatttttggggcacataaaacaatctttcgtaatctcgtttatgggaaaagggtttgtgtatgtattttttcaacgtaaatggttatgttttcatgcagtttttaaagataaacttagatgtagataatgaaatcatgagtagacaaatgagcataagatgacttggatttcttatgaattaatatgttaatgtgtgggatgtcattttcgacctattgaaaaagatatactaaaaatattaatgaaggacagatggtaatcggtaaatgcatcatctcttaaaattcgcctaaaataaaaaaaatgaaccgacgtgccacatcagtaatctctggtctctaaatttaacaaagacgtagcacgaaccgtgacgtatcaacacacatatcaaacaaacctatctttttcaatactaacttattcgtctttttggttcttgttgtcatatacaccgaagctcagctcttaacttattctttggataatgttttcggtgatagcgaaccgacaaattgtagccgacacttagaattcacaactaaactatagattttaaaataatattaattaattcgaaagtttgagatatctgaacaaagttttctgaaaaacgtagaatacatatggatcaaatactataattcgaaagtttcagattagtgctaagtaatgaacgtcatgcgtttgttcttctgtcgatttcttctttttcaccgcccgtctgagttttatgggcgtgatattttccttattgtggtcaaatcaggaatattcaacaatatttagcactcgctttacttggtgggacatgagaatcaatcgatgcatcgctgttttatttctttttctttgatgtttctatttctgttagaacaaagttttcatgattcttaaaagcccaaatttcatggcatcggaacaaagttttcatatatgatgacaactcaaaacaaaagagtaacggtaaaagcccaatacccataaaatgggcttaagaatccagatcggatctataacccgacccggttgttgacaccgagagagtccacgcaacgttcgccgaattcctaacgaatcggacaccgtttcgtcgctgtaaaattttgatgcgaaattttccaattcacagattttgtttttccattgttttggatttctagattctagttatatgttggtgatagatttttcctacatctcgtgattctcaaacgcttcttgagctcttcgtcgaatcgggactgtgatcgggacttggtggagaagaagcg

SEQ ID NO: 9575 - DNA, 3000 bp, Unknown
  misc_feature (1)..( 3000): cDNA_ID_2037218_gDNA_ID_1972155_Annot_ID_179450 3000 nt of promoter + ATG
tggttctctggcttagtggtggtcctggttagtgatgtttgaacctgcagtattacaccatcaatgacctcaaccactagctgatcaacctaactcatttcaagtcaacctggttttcatgagtaataatagacacttatttgacattgaaacaatcgcttaatttgtctaattgttcctttttaacaaagagactgactagttttactagttttctatacaagcaaatatgtagtagtactatgcaaaatgcacctactatacgatgtcgtttctggttcttatcaatgtactaagaattcgaatgttgttgtccacacatggaacacctaatccatgtgtcgttattacattttacagacaccgtacgcgttttgtatcttttttggtatttttatttattattttctctcttttttgttggtattattgtgatcttttcaaagtgttgtcatttatacaggcctatctagatcaacactttattctataatctaggaccccacggcaatttcaaattgctctgacgcgtcgcttactcatccaatcataatcttcttctatcaaatttgaaatttctctaatttggtagttagacgttctattttttctcccatatactttaccttaattttgggagagttaggcttttattaaagtgctaatgactcataccagagaaaagtctgagtagtgagaggcgataaatccggaaatataaacgcatgtcaagttaatgttttactttttgataactacacgtaatgttttttccttctgagtacttttggatccttctacaatatttccttctttttttgccaaatgagtagggattcattaaaagccaaaaactaagaattaccactgaagttatgtttctgctcagaaattaaagttacataaaagagaaaaaaacattcgaaaatgccaaagaaattgaattgagcttccaaacgaatttgatattaccaccaagaagggtcccttgtttatcttctagcaactttaaaggacatatacatgatacaacaacccaaaaaaatgaaaagataaaaagaatattattctttattcgaacaatagaggcatataatttaccttttgatggccgatttttttgcttgtgattaccttcgttacgaagttttatactattgaatctaggctgtttattgaatctaagtttttttgcttgtgattatcttcgttaagctttgtttcttttttccgacgtgagcctgatttttactaattaaatagagaataattacgctaggatatatgtatttctgtctcccattcaattattagaagaccttatcttcggttctttaatgcacatgtgacatttgacttaaaaacttatacagtaagaaagacttaaatccaactatacaaacaaatatatatggtattagtattactagttaacactaataaaaaaaagaagagagcaaagtttctctacactaagattttatttatttctgaaaatgtcaaaaaaataactaaaagagaagagttatttcaattattctcttatgaaaactagatgaatttttgtggaaaaaaaacaaaactagatgaattcttttcctttaacttgtttaaccagtcacacacgacacacatatagtaatctatttaccactgttttttatacagcaaaagtattcagagaatgaaatcttacaatccacaacaaaataaatccgctatttttgcacagattttttttgttaaggatctaaatgttaggataaatcctaaggtgtgttatatatacttccctttttgttatgatatagtaatataaggattagttgtgattagagtatattctaagatatgtataaatatatgtttgtgtatacgtttaatggaaatacaactttctccaagtttttctctgctttatatttttctttccaagacagtatgtaatcactaatcaattacaaccgaggattataaattacaataatcgaaattagataaagatctacgctgtgcagcgtgggaatattaaataaagtttttacaaattcaaattgtaaagatatgaaaaattcttgcaaatcaagtttagtacaaaatatatgaattttttttctaaattattgaatgtaaaatatagtgaaaataggttgcatatattttaattgatattgttttagaagatagtgtgaaatctttgatatcataaatttaaaactaaacaataattttatttcactaaataggtttttttaatataacaacaacggattttcgaatttatcatatatagatgctgaatatttaattttcacataaaactcaaatctttgccaaaaatatacaaaaattaatgtttaaatattaataatattaaaatatgtatagataactaaatgaggatggagtaatacaaattaaaaatgagaaatgttgatactcaggaaaattcataaattcatagaaactaataatagcaaatttagagaattaacaggaaacatgatatacatattatgtttgattatgaaatttaaatatatgaaaaatatgattttcgtcattttaaataaaagtagttaaatgctacctaattttttttaatgatatatcttgtaatatctcaataatatctgagattgtaatccaatatcttacaaagcttatcttacaccaaataatcgtttgtttctaattaaaatgtttttagggctcataaaaaaaatggcaccaagttgcttagccatgtggattgtgggacgacaaatacagatttcaaagtgaacacagagtcgctcgtgggtccagccaccgacactgacctttgttttcttctctcttattcgttttctcttaaatctctctctctctactctttttaatacgtgccgactcttctctacataaactctacacttaaatctgtgtcttagagttagagagagagagaccacgccagatatacctttcttgtttcaccggttttcatacacaaaaatg

SEQ ID NO: 9576 - DNA, 3000 bp, Unknown
  misc_feature (1)..( 3000): cDNA_ID_2183928_gDNA_ID_1972158_Annot_ID_179490 3000 nt of promoter + ATG
ctgattgacaaggttttctcttgatttatgtattgttgttttgtgttgttgaaatgaatgatatttgggattcagattcgtaaagctttaaatctttatgtgttcttttcttggtaatggatttatttattttttgtatcgttgtttcagaggctcttgagaatggaagcagaaacgtcttggaccaattatccgtacagctacattacatatgtccctgaagctgaatcataccgtgagcagagcgacgatgaagccaaagtcgaaaccttttcaatggattctcttctccctgacgatttattagaacgaatcctctcgtttctacccattgcaagcatcttcagagctggtactgtctgcaaaagatggaacgagattgtatcttctcggaggttcttatgtaatttctccaacaattcggtttcccaaaggccttggtacttcatgttcactaccacggatgatccatctggttatgcttatgaccccattatccgcaaatggtacagtttcgatctcccttgtatcgaaacatccaattggtttgttgcttcctcttgtggattggtttgcttcatggacaatgattgcagaaacaagatttatgtctcaaatccaattaccaaacaatggaggacgcttattgaacctcctggtcacaaatcgacagattacacggcaatgtctacctccgtaaaccgagcgaaccaagcagtaaaccgcgcaaaccggagttactcagtctcgatagtgaaatcgaagcaagttccagggaatttcttccaatgggatctctctattcatctctacagctctgaaacaatgacttggacaacattagtaaacgatgtcttatccggatggagaggagggaacgagagtgtgatctgcaacaatgttctttacttcatgatatactcaacgggaggctcagatcatcgccacggcttgatcgcttcgaatctatcctcgataggatcaccgtcaagcggaatcttgatgaggagtttcattccaatgccgtgttctttaacctgcgggagattgatgaatctaagagagaggcttgtgattgtcggaggaatcgggaaacatgatcgaccagaggttataaaagggatagggatttgggttttgaaagggaaggaatgggtagagatggcgaaaatgcctcaaagattcttccaaggttttggtgaattcgacgaggttttcgcgagtagtggcacggatgatttggtttacattcaaagctatggatctcccgcgcttctcacgttcgacatgaatctcaagtattggagatggtctcagaaatgtcctgttactaaaaagttccctcttcagctctttactgggttttgcttcgaaccaagactcgagattgctccttagttgcaatgaagaagcaaatgggtctgtgaaagtcttggtcttttggattgtttttgcacagagaaatcgccggcggctttatgaagatgatgatacggtaatgtttttaaattttagttactggaaatgtttttcaggaatattgttatttgcaatttggtactctgttaattataaatttataaaatgaggcccagatacttttatttgaacaaacgaacccttctctatctctcagtgaaatataagaacatttttcaacatgtggcccacaatatctcatgtaaatgggtcggattctgaaactggaggttgtcttgttgctgttcctggtggataaaaataatgattttgttccttttttttccacatatattcataatgatttttcatgttttattaattaattattgttgtaaattattttaaagaattatgtttctgtacttgtataaaattgggacctattttcgtgatgggatttgtcaggtttggcagtgttaggtttacgggtaatggacaacagctattttattgtgtattttatcattttctcaagggtcacttattttcaattttcatagctataataatttactaaattttaaaatataacaaaatgtcattcattagttataatcgtataaaagttgacgaagtgatatatagattctacatactaaaaacaaaattaatttgtgtcattatgccaaaatgtcaaaaggaaaagaaaatttagacaattactctgacacatcaaatcagctaaaacctaactaaatataccaaactagcaacacatatttttgttattaaaagcatttataatgataaatcatgatcagaatcatagtaagcagattcgaacactagtctctcaaatttcggtagtaaagttttcaaccattagaagacaaatacgattttaacatcattagtattgttttttcttttttaatttaagcgttggctttccaaaatgaaatagtaacaagcattaacgagttaagttgtcaatgggggaagttaaaactctttaaaaccaaaaaattgaccacacaacacatatagtgcccactagttctctcaaacgaatatggaatactttaaaacccacctctattctcaagaattaaagcccagaatttcaacgttctaaaaatagttttgaaagatttgtttttcacgggtttttcgtaaaataattatgaacaaaacaaataaattcaaactaatttttacacgtacaaatctgactcctagcctcctagatgaaattcaaaattttgtaccagcagctcaaagctactaggtaaaaaatgtcacgagagaaaaccggaggaatattggtggttcatcaatacgaatcaaaccgaaccaagtcataaaccggttcatagaaagataagaagacagacaatcagtcatcactttggtctcgttgagcctttcgtctatctctcacctgaaagaaagacgttcagctttctctttccaaaatcaaaagctctccgatcagtttctccggcttaggaaattaattgaaggaaggtgatgagaggtactactgagaatacggatctgttcgatcccaaaacccaa

SEQ ID NO: 9577 - DNA, 3000 bp, Unknown
  misc_feature (1)..( 3000): cDNA_ID_3016298_gDNA_ID_1972158_Annot_ID_179507 3000 nt of promoter + ATG
cagaaggagaagcatattggttagtccttgaattggatccatcatactctcttcttagtcatgttaagatgttgtacagatctttgactttgaagtacttcatttgctgatcacagcctcattttgatctcgttttgacactgtcattatagattggatgcggataggtgcctttgttcttgactctcgaacttcactcctgactgagagtttgagtggtcgtctgaaattcccaagggaaggaaccatagaacggatgttacaatccagtggttcatgtcttatcaacgacatcaaaagcggtatttggattgcaggtaagaacaatttctttagaaactttatctactgcagaaaaagaaaactataacatggcttatctcatgttccagatttacagcttgtacgttgccctgtttgtgacctcagtacctgtgatggtaaaagacactaatcaacttctagtctgtttctattgatgttagtctatgaaataactaaattgcaactaagagagtttctgttttactatgtataggaacaatgcaaactcttgatgctaggcacattgaactcttccttagtgaaggctacaaagatggaagctgggattacaatctgatcggatctcataagttgcagaaaaacgcaagtgcagcttgtggagccatatttgacctcaaacaccttaaagaatcttcatattcaggtaacttcaaatctacattacttttctgttcctttactcctcctctttagatcattctccttgggtctcatacattttcacatgaataataggtattctcaacctcaagtcttggaccggagagtcaaatgattcccaacctaaagcagttatcgcaccccacgctgttgctgttcacacaagactgcaagaaaacgaaggtacatgtccaaatcactttgcataatcaaccatctttatctagcaagtaagaaacacaattacaattcttttacaaatctaaattgcaggaatccttgtgaagtaccacacaatgaaagcaggaacagacggtgacattgtttccatcagaatctcccagcaacttctctgattccttcacagtgcattgtctcaaagtcacacaaagctttaagcatttctagtattcaaatccttttcctcttcagtaacatttatttgtccccagaatatgttgcaagaataatctgactgaatattgaacttatatacacaacacaaacccaatgaatatttaagaagctttagtgttggaccattctataacgaaattagactatttgctgtttggcaagatgatgacttgcgctttataatgaatgagatgtaggaaaaatgagctggtttgccatgcgtccatagcatcctctaagaaagaagactctgtttttgctctctcaattctatttactctgtttttgatctagctctgtttctcttattatcaaaatatcaaaaaagctgatgtaaaaagtatattttttcttttgagtataatttgacattttattcaaaaaaaaaaaaaatgagctggtttgatgttccggttcaataatgggaagacaaaaaagacgagaaaagccaattgttcaacaagccatggttgcaaccatggttcaggtttaaagagaaactctattaagaatagtcataataagaaaacagaacaaggatatcaatgacaatgcaccggttttaatggtggtttttaagcttccatcgggagctctccgcaggcatagattctgcaacctttctcctgggattcaagtgtcctcacaagcttcataccttcaatgacttgtccaaacacaatgcatgttatctaaccatggagtctgcacaaagagtaagaaaaccaaaataacaaagtttacagatgatgccaagggtgtatgaatcttttacctttacggtgaaaatgaaaagtagtcctttctagtattcaccacgggcgatgaaaagagccatcaactcatataaatatttgaatttgagccaaaatttagtctaagcacatattattagttagaacacttagtttatcactataaaagacattcgtcaaagcagttgcaacacctaacttttgttagtctaaatttacaaatctttgttttgtatgaacatttaattatggtttcaatataaccattttaattgttttgtatttaaatgcatcaatgccagtttatatattacaagttttgttcacattaattctagtttattatttgaattattttttctggtaagtttaggattctataaatgtgtttggcaattggtgttaaaataatcagaataggtaatatcaggaaatatatgtgtttggcaaaatttggtgagaataaatgtgggcttaccacattaggcctaaattaatgagcttcaaacaaaatctgaggcccacacaattgggcttgaaataatatgggcctcatatccatttatttctactatccttttttctcaacttctgctcattaatctactatgcatggttcagacactgttcaaaggttcttaccaaaatttcctcactcttcagttttctttggccaaaaagagttgaatccaattttttttgtttcagttgtggaaatccaatcagtattgtggcatctgcaagagtctctttgaccatgctcggtgaaatactgacctgagttataaactattacatctacaatatgtagctgacgtgatttgatgtattacgtgtgttgtgatgggcgtaacgtatgggttcatgctgggtgcgacatcattacgaatgagcgctttaaggtgcagttatacatctccgtgcttcttaacttttgattctaagtagttaggacaactgccgaatgactgacagttgtaatttggttatcgttttaaggaactggagcacaacaattactattgccctgattgtaaagtcctagagagtctcttcccagatacaacacgcagtggttgcacgcctctctggatccgtaatg

SEQ ID NO: 9578 - DNA, 3000 bp, Unknown
  misc_feature (1)..( 3000): cDNA_ID_2183987_gDNA_ID_1972158_Annot_ID_179513 3000 nt of promoter + ATG
atgaagataaatatgagaatctcactaaagaatggttagtgaatatttaacagtccctaagtattctaaatgtttggagatttcagatacttgaaggaaggggatacaaattaaggtatccttgggttggtgttgtaaaccggtctcaagctgacattaataaaagtgttgatatgattgctgctcgtcggcgtgaacgtgattacttccagactagcccagagtacagacatttaactgaaagaatgggttcagagtatttaggaaagatgctctctaaggtatataattgaggagcttggtatgtatgaagattttagcataaaagattttgtagttgctctaaaaccagctataacttttcagcatttggaagttgttatcaagtctagaatcccgggacttcagtctcttatcacaaagacaatttccgagttagagacagagctaagccgtcttgggaagcctgtagcagctgatgctggtgtaaggatcttctgtcttaaggaccttttagcctttcattcttcggtttcttgtctcatttcacatccctccttcgttaatactcattctcctgaatgcagggaaaactttatatgatcatggaaatttgccgtgcctttgatcaaacttttaaagaacacctggatggcacgtaagtcatccgcatgtttctggattgttgctaattcaattttctagctttataattgataaccactaacaaccttacaggcgttcaggtggtgaaaagataaattctgtgttcgacaatcaattcccagctgccattaaaagactgcaattcgacaaacatctctccatggacaatgtacggaaactgatcactgaagcagatggatatcaacctcatctcatagctcctgaacaaggttatcgccggctcatagaatcatgcttagtctccattagaggccctgctgaagcagctgttgatgcggttcattccattctcaaggatcttatccacaaatccatgggcgaaacatctgtaagaatatctctgctcaaagtcataaacccaacaacaacaataacacttatgagttttgaagcatgattatgtgttttcatcatgactacaggaactgaagcaatatccaacactcagagtagaagtatcaggtgcagccgtggattcattggatcgaatgagagacgaaagcaggaaagcaactctgttactagtggacatggagtctggttacttaacggtcgagttcttcaggaaactcccgcaagattctgaaaaaggtgggaatccgacacattcgatattcgacagatacaacgatgcttatctccgaagaatcggctcaaatgtgttgtcatatgtgaacatggtctgcgctggcttgagaaactccataccgaaatccattgtttactgtcaagtccgtgaagcaaaacgaagccttctagacatcttcttcaccgaacttggccagaaagaggtaacaataaagatatactaaaaaacctatatgagcaaattgacaattgtataagatacgagtaagaatgttaaaatggtttggtgttaaaaattatagatgagcaaattgtcgaaattgttggatgaggatcctgcggttcagcagcgaaggacttcgattgcgaagaggctggaattgtatagaagtgctcaaacggatattgaagcagttgcttggtccaagtagagagacgagaccctctcttcacactccattttttgtttctttaggatacgtttccttctacatttttttgtctcttttttttttccatttgtcattgtattcggtgttcgagttatcattgtttctgaataaaagtttttgtaagacgatggttggcgcagtagaatatggttgaccaaattatttttcaaaaaataaatagatttcatggactgaagaaacatatgacgtgatctcctctctgttttaaaccaccggaaagagagaacaaaaggagcaagcaaacagaagaagaagagcaaacagaagaagaagagcaaactaaaattaaaaaaatcaacaaaattggagatgcggggaatcgaaccccgtgcctctcgcatgcgaagcgagcgctctaccatatgagctacatccccatattggctaacttattatgttaatcccttttattatgttaaagttgaataattttgaattatgatatcgattacataaaacgcttagtcgttgactgataccgatcccgccatgcgtaatagtaatactgtttaaattgttttacattaccattttgcaattgcaacacaataccttttttctcatttgagtttgtgttttacaacgaacaaatgaaattgtttgtttgtgtgattggtactcatggaagctgtaaagctgtactcattggttaatttattattgtttactttgtttccaagttcccttccaatatctcctccaagaaaagaaaagatgatgttgatcgtggcactatcctgaccaaatatacctaatgagtaatgattcagactaagactgatccacttcccactatggtccagtttacgaccccactctctcgctcccatctctgtcttcttcttctttttttccctaaataagcaaagtaaaaaactccagattgtccatatcttaaaaatctattcgtaatttctcaacctcaaatagcaattgccaattgttttaactggcaaagaaaaagcaataatttcatagcatcttggtatttttctgtcggttcacgtgtcgatttagtgacagaggggacataaattgtccgatacttaaccagtgaaacatcaactccaagtatctttctcaaaatccaaccggagctgatttaaaacaatttgatgattatgattgatctccatctccaaccactttcaccaccaaactcaatcactcttcttcttcttcaagtaaccatcacccaaaaagcttccattgttcctcgctccttctcgtctctgtttcgattccaaccatg

SEQ ID NO: 9579 - DNA, 3000 bp, Unknown
  misc_feature (1)..( 3000): cDNA_ID_2183981_gDNA_ID_1972158_Annot_ID_179510 3000 nt of promoter + ATG
aaaaagcaataatttcatagcatcttggtatttttctgtcggttcacgtgtcgatttagtgacagaggggacataaattgtccgatacttaaccagtgaaacatcaactccaagtatctttctcaaaatccaaccggagctgatttaaaacaatttgatgattatgattgatctccatctccaaccactttcaccaccaaactcaatcactcttcttcttcttcaagtaaccatcacccaaaaagcttccattgttcctcgctccttctcgtctctgtttcgattccaaccatgaaaactttggtcggattttacatcctctgtttcttaatcggacaagatctgcctttcttagctgcagatgacgtcaatgtcataaacgattcgacccagaatctctgttttgcaaaccgattatccgatttcctccctccaccgtacagcaatatctccgataacatgccctgtactcctctttggaacacgttcgtcttacgggtaaaccgaaaaacataaaccaacttttcctaaaacccataattttgattttcaacgctgcttgctctgttttgcagtactcagaaaacagagacaatgtgatgacgattatagtatcggctttatacacaaccgggtgggttgggattggattctcgaaagaaggaagaatggttggatcaagcgcgatgatcggatggatttcgaaaaagggtcacgccaaaatcaaacaatactatctccaaggaacggagagagaccaagttgtgccggatcaaggagaattgcaactacaaaaagtcccgccggtggtggctcttcacggagcaatgatttacttagctttccaggtgaaattcgccgttagagttcctcggagagctgtcattctagcgtttagcactgcttatccttccaagctaggccgtttgactaagcatgatgataaaactacagtcatcgtcgatttttccaaaggtaatataatgtatatactagtctaatctatacatgttaaaaacaggggagagttcaatagttgtatgttcttggtcaatgcagctagtggagcaacctccataaagacgacaacttctacggagaagacaaaacatggagtaatggcgatactcggatggggtttcttacttcctgtaggggcaatcctagcaagatatctaagacataaagaccctctttggtactatcttcatatcggttttcagttcacgggctttatcttcggtttagccgcagttattcttgggattcagctttacaataggatccagccggatatacctgcgcatcgaggcattgggatctttcttctagtccttagcactcttcaggttttggctttctttgcacggccacagaaggagacaaagatgaggagatattggaattggtatcatcattggattgggaggatctctctcttttttggagcagtgaacattgttcttggaattcgaatggcggataatggaggagatggatggaaaattggatatggatttgttctgtcagtcacgttacttgcttttgttgttcttgaaatattcaggattcgtggcactatcggctcaccatcttctcgcagccctccctcttttgagacacatccaagttctagtactagtgtttgattcaagatcttctgttttttttttcttgtacataaaggtactttttttgttttccccataatcattggtcactgattttatagtccatatgtgttgtaattttttttttttttttttggttcggcaatatgattttcaagtggaaatcggtcttggtttagactttagagcaacatggtgatatttgtttttttaaggtttgtttctttttggatctcaatttgttgtcatgtaagttgagttttgaaggttgttgttcctggaaagtgaaatatacgtaattctttaattccttatgagtttgtaaatgtgcatagacgtccctagaccctaaggctaacattatggagcgattaacaaaaatatggtccttttgtatgcaaatgcaatctctcatctttcatataaatcatgaacgtataattggatgataagttttgagtcttatttgaaatgaaaaaaggatcatcttcctccattgtctggtaatgtcaaaatgttgttgcatgagaaacatacagtgttcatattgggcctaactcgaagttgtttcttttattaattgtcaaaatgttccacgagaaacatcgtaggcccaatatgtagcccaacaagcttcgatttttctaaataagttgtgtgacaagaagaaaaacgagagagttatttattgatgcgccacgtcagatttgatgaaaaggaagatttcgacttggcgctctcgtacgcctgaaaattcgcagtcttccctcgtccccaatccctggagccaaacactgttccattcaaccgccacgtcagcatattcgttttttttattttcgtttttattatttgtttaggcgaattaatttcagaattaaccataaaataataataaggagaaatatataaaccgacgacggacggtgtgtgtctccttcatcagaacacaaagatccttctcctcctcttttgttttcccttgccgtcgattttaaggttttatcttctccgtactgaaaccgactgataattttctccagggaatctacgaggaggatttgttgtttctccgtcgttttagagtttaacgatttctccgtcgtttgatttcttaattctatcctgttgagggaaacgagaatttggttttcgttttcgaatttagggttagagaagcggtttcgcattgggttcgttgactattgagccaatttgcgagaggaatttaaacgttacgagtttcttctttttccttccggaggtccgaagtgcgaaatctgttttgtttgatgaaattagggttttggaatcggaatttggatagtcgtttatgttgaataggcgaggattgcttaggtaggatatg

SEQ ID NO: 9580 - DNA, 3000 bp, Unknown
  misc_feature (1)..( 3000): cDNA_ID_3016285_gDNA_ID_1972158_Annot_ID_179524 3000 nt of promoter + ATG
tgcaatgataagtagtgtactgttgataaccataaccttatagtagaagataggaccatgttggtatttttccacaacttttccttctctttttacaattcataacaaatgaatactgtcgattagttcaatatataaatataagtaatacaaatattcctatattcttgtaaaatgacgtggtgactatgactaaacaggtgattaagtatattatcaaatatatcaatggaatataacagtgattaagaagaataaacaaaattaaaagattttgtggaatggattccactaaaccactacgcaatttaaaaataaaaatacttaactaatgtatagttatttattcccatccatgcgttcatattcactttgaatgatcatattcgtaatcctatttatttattttactatttgaaccttttgtgtgtataaataatttcaactagagagaatatccgcagcagctcgttaaattagtcattgaattaaaaaaagatattcaaattttcacccaagaaaaacgaacgcaactaaaatgacgttcaaatttggcatcatctttaggtgtatattattgtgagagatatgcaagcatgaaatctcatgcaggataagaatcattgttaaatttattttaattccgttatatttatggtaatatcatcctattaccttttctaaaattatgtttcactctttagttcaacctttggtgatgaaattcgattctttcatatctcgtctccgctttgcaaggatttgtccgtacaataatcatatgcactattttaattatttttttgttgggtgggattcaaaaaagttttttttacccctctatcagctagttagagaagtgagactatatatgattccaatcaataatacatcacatctatatttcgtcttgtaacgcggccacataatcttcatcaacgaagcttgaatgttgtaatagtgtttcactatcaacaacacacatttgtaggccttatgtaattagcgagagaactctacagtctacactataactttgagtggaaataaatactcgtatatggtaacataaaaatactatgaacttatgattatacaaacttgtaagtaaaaaagagtggtaaggctatgtaatatcgtcgacgttttctaggtaaatcttaagctataaaaaagattttgaaacccaaatagtatcgagtgatagcattagtctcatcgggtggttacaagccaacattgattcgtgttgcaaattttattaaatacaagggtgtacacaaatcaaaacgcaataatatttttggatcatagtctttcttcactatcattgggaaaaataaaataaaataagaaaaatagcgatagaatttcctctgtaaatgagcaaaattggtaggacaagtcagcatttgacacgtgtcggtcatgaatacgactaaacagcgtggcaatttctcttactctgacgtgtccatgtggggaccactttctcctccgacacttcggcatggctttctcaactttttatcactcttcttcaccattctcatttactaagcgcgtgtctcccacctctatccgatttaattttttaaatttgacgtttcaaaagttccttctataaaagcaattaacgataattatatgaaatccgtaaacatgaatttttcaaataatttcgatttttgatttgctaagattaaaagcgcgtgaaagaaaaaaaagaatacagcatgaacaccagcgactcagaactgactcggcacgtggtaacataaaactcacacgcttcccaagacgctcgtcccataaagagtcatggctgtgaccttgtgcgagtgtgggtgtagccatagcctttgtgggtcctaaataaaaaaaacgatcaatggcataatgtgtaattaactcacattccacagtgttaaataaaaattaaatctgtaacggaaaaaacaatctatctgatgttacacaaaaaaaaaaaataacggaaaaaagaaaatgtggccggggtttaatagagaagccgacacgtttgcctgccacgatccagacacaagacgatgtgggtaacggcaccgtcaagtgctaacggcaacggggtcatcagtaaaaagggcaatttagggatatagagtaaagtcataagcttatttattactatcgtcttgatcggacggctgagatttgccctctcctttaaatgcaccgtacgttttttttttacataataaaatgtaattagttcataagcaattcccaaaacgccgcgtgacccttcgtttgcctttgaatacaatttgttttattttagcgcatttaatatatttgagtttcctttttagcgatgacatgataaaacaaaaaacaacaattttagaaaacatttaattaaatgaatagaaaaatagggagattcaactgaagttactgtgggtggaaatgacaggtctccaggatctgaactaagagaaagtctctctatattttgatatatagagagagataaagaaggagagagtgtgaatatatgtatgtgcatgatactgtgagacttcttcagtaaaggaagcagctttggtttgctgcggatcgggataaaaacggcgagaagtttgtgattgttgaagcaaaacaacacggaatctgaaaggaaaggagaagacaaaaaaaaaaaaagattttaagaggaagagagagagagatcggtttcgtggctgacggaaaaaaaaaggggagagatttagttttatccaacagtgcctgaattacgttctgcaatcaatacggacataaccgtccgttgtgtcctgtttataaagttttgctttttttattttctccattgatgggtcttttctttcttctctctctcgtgtttctttcatggggttaagactagtgtttaccgcgtgaaggtttttttttctttctattttctttcatttcctctccttctacttcttcttctccagttctcatctgggttcttca

SEQ ID NO: 9581 - DNA, 3000 bp, Unknown
  misc_feature (1)..( 3000): cDNA_ID_2184029_gDNA_ID_1972158_Annot_ID_179518 3000 nt of promoter + ATG
ctttgacaggttcgatatctgacgcttttcataatcgacgagctattcatgagatcaaagctctttagaactttgataattgagaatcttgatcagcttttgagtttaagtattgggtttagaagcaatctgcctcttcctgcaccacctgctgttgccactacgttgcgttcaaaggctattgagttcttggagaagtggaatttgtcttttgggtttcattacaaggagcttagacttgggtttgattaccttaagaataccctcaagttaaagttccctgatttacaggctaatgctgcacggattcaacgagagagacaggagagggagatgaagacaaaagagattttgcggaacaagtttgattccttgagagttagttttggactcttcaagtatgagattgaggtaacgataaaggaaatcaaggagtgtatggaaattgttcagtggagaggggatgatggtgttccacttgcgatcttagatgaggaagattttgaggagatccgttgttctcatctgaggcaaattcgtcttgattcactgaaacaatcagaaaaggttgaagaaactggtgaaaacagaattgtatttgatgtgttgagggaacagtgcaagcttctagtgacaaagcatctgatctcggttcaagaagggatctctcttctcattagggttgacgtaagtgataacagaacgagagattccatgttgaaggacttgattgatatcaggaataacatattggcagctaaaaagaaatgggaagaagctggttttacaatgtcaagaatgactgatattcacggtaatgaagaaacaaacgaggaagaagaagatatctgggaggaggatgatggcaaggttaaaactgattcagtcaagaacgtggctcatgtgatgagaactcagcagagtgagaattcatctttaccatcatcaggtgaagcaaagaagtctacatcagaagctaggtccaataaagtgtcgaacactaaaaaagttggaagcagtggaaactctcttagagacaagctaatttctgaagcgcctgtgatgaattggggatcacagttgactaattgggaatcaactacggaagttcgagctaattaccggggtttagagatcgagagccactggggcagggtggatcaagatgctataattccagcagataaaatagcagaattgaatcttcaggcaaccgtgtatagagaagagagaacagagacacctccatgccgtgcttctctaaagaaaggtggtctttgccagagaagagatctcagagtctgtccgtttcacggacccattgtaccccgggatgatgaaggaaacaccataatccaggaatctccattagatgagagtgaaaaccaaacttcttcaacttcagggaccaaccaggatgtgtctatggatgaaacaacttcagattctgatcctaatcagttagctaggcaaatagcgaaagaggctctgaagaatatccgggagaaagacaaagaagtggtgaggaaaagagcaaagcttgttaaggttaaggttaaggaacacaatcatgaagttctgcgtggtgcggcaatagcctcaacttctagatcgaatgctatggatgatgagtttgatagagtttttgctgaaaagaaaaacaagaagcaaaccttttccacaaggcgtaagaaaacaacggctaaagatagaatatcccagagactgtttagtaatcgagtaaaaggtactaatccacagcagttggctcagggcaatgatgaaaagtgccgggatacatcggctaaccagtggtaacaaataactaaaatctttctagttttgatccagtagtgccttaaatttgattgtttgatgcaaataggagtaaaaagctaaagaatatttgatgaatgaataatcagatccgcttgtgatctcttgtagctgtgaaaacagttcttaagtcaagtcccagattctttgaagctttatatttttctcagacaaaagtcacaaaacccaacagaaagataatagtacaattgacatgttctgttaaaaagcaacgacagatcattgaagctggatggatcgttgttgttcgcttttttctttttcttttatgtggtgtgtttaaggatgatatcactcatgagaccgatcactgatgagaagcaattattaattgaataatttgcttttaagattgtgagagtttgcttgagatgaagaagagtaaaatgttcatttacattatcattggtctttgaagtgactttgaacccaagccacatcccattacttattattcctcttatgaatttcatattcttaaaccgtctaattttacctaaatacatctcttaaagtttttgttaaagtaaacagaaagatgagcatgtttttcatgaatctttgaatttagctgtcattttagaagttgaaaatcatttttcttgtacaaaggaaaagaaattgtttgaattaaaagtaaaaaaagaacacacaataatgatagacagaatcccactagagagaaaaacatctagaataaaaaaaaagaagcaatcatgtgcaccatgtacatatttaggcccatctctactggatcatggccctttaattaaaaacaaagaaatcattgagtgagagaggatatactgtacgtatattattagaatatgattatttttcccctatccagtaaattcttctgaatctcttataattcaatttgtttccaaataacattctctctttaacacagccgcctttgtgaccgtccgatcttaaatcagcgtttccggttcatttgacggcaactatctctctctctctctctagagaattgatgaagaagagcatctatcttttttgtttttgaaaattaacaacacttcacgagggttgacctgtttcggtggtgtttcttcaattccggattttgatctttcgtttcgatcgaagatcaatcaaagtctccacctttcttcaatg

SEQ ID NO: 9582 - DNA, 3000 bp, Unknown
  misc_feature (1)..( 3000): cDNA_ID_3016291_gDNA_ID_1972158_Annot_ID_179517 3000 nt of promoter + ATG
gaagctggatggatcgttgttgttcgcttttttctttttcttttatgtggtgtgtttaaggatgatatcactcatgagaccgatcactgatgagaagcaattattaattgaataatttgcttttaagattgtgagagtttgcttgagatgaagaagagtaaaatgttcatttacattatcattggtctttgaagtgactttgaacccaagccacatcccattacttattattcctcttatgaatttcatattcttaaaccgtctaattttacctaaatacatctcttaaagtttttgttaaagtaaacagaaagatgagcatgtttttcatgaatctttgaatttagctgtcattttagaagttgaaaatcatttttcttgtacaaaggaaaagaaattgtttgaattaaaagtaaaaaaagaacacacaataatgatagacagaatcccactagagagaaaaacatctagaataaaaaaaaagaagcaatcatgtgcaccatgtacatatttaggcccatctctactggatcatggccctttaattaaaaacaaagaaatcattgagtgagagaggatatactgtacgtatattattagaatatgattatttttcccctatccagtaaattcttctgaatctcttataattcaatttgtttccaaataacattctctctttaacacagccgcctttgtgaccgtccgatcttaaatcagcgtttccggttcatttgacggcaactatctctctctctctctctagagaattgatgaagaagagcatctatcttttttgtttttgaaaattaacaacacttcacgagggttgacctgtttcggtggtgtttcttcaattccggattttgatctttcgtttcgatcgaagatcaatcaaagtctccacctttcttcaatggatttggatagcatggactgtacatcaaccatggatgtgacagatgatgaagagatccaccaagatcgccattcctacgcttctgtttccaagcatcatcatactaataacaacaccaccaacgttaatgctgctgcttctgggcttctccctaccaccaccagtgttcatgagcttctcgaatgtcctgtctgcaccaattctatgtaccctcccattcatcaggtctttcttttcaatcccttgttctctgatttcgtttccccggatctttaatttgttgattttgtttagggttttgagttaatgatgtgaatcatggatgttgaagcagtggttgtgttgctcttgtaacttgaaatttagttttatccattcactaatggctacaattgaaacaattgtcactaaattttgtcaatagctttgatagtttctaagattcttcttattgtttctttagagaattatggaataacagatagacaattatttgatttccctacagtgtcacaatggacatacgttgtgttcaacctgtaaagccagggttcacaaccgctgcccaacttgtagacaagagctcggtgatatccgttgtttggcactggaaaaagtagccgaatcacttgaactaccttgtaaacacatgtcacttggatgtcctgaaatcttcccttattacagtaagctcaaacatgagactgtatgtaacttcagaccttatagctgcccttatgctggatccgagtgttctgttacgggcgatatccctttcttagttgctcatctgagggatgatcataaggtggatatgcattctgggtgtactttcaaccatcgttatgtcaagtctaatcctcgtgaagtcgaaaacgccacatggatgttaactgtaagtacatatgaatcgtgcttcatagtatacacttagataagttaggaggctttgtttaaagtaataggattatatttgtgataaaatttgatctgtctggtataaactgtaatgtgatcagctgagtcaaattttgcttttgttgcgagttagctttcctagagaaggtccagttatttatctaatctatggttgtgaattgtgaatcttccatctcgctatacatgttgacttgatatactttaatgcttatcaaggtttcctctgttttggttttgtttctggttcaaaaatgaaaatcaggtctttcactgcttcggtcaatacttctgtcttcactttgaggcattccagctcggaatggctccagtctacatggcgttcctgcgtttcatgggggacgagacagaagctcgaaactacaattacagtttagaagtgggaggttatggtcggaagctgatatgggaaggaacaccaagaagcgtaagagacagccacaggaaagttagagacagtcatgatggactaattatacaaagaaacatggctctcttcttctcaggtggagataggaaagagctgaaacttcgagtcactggaaggatatggaaagagcaacaacaaagtggtgaaggtggaggagcttgtatcccaaacttgtcttgaaaattaaaaaaaaaaaatcaaactgattttgaaaacctcaccgatttggccttgtctctgtaaccatggttatctgtaattagggttttctctgacgataaacttggggttgttcttatgtatctctctctgtctttctcatgtcatggaggtttttttattataaaatatatagttcattacaattctgctatatctggaggaaaaacgtaaaatgttgaaccttttacttttatcaactgtagtgttcataaatttatgtaatgcttgtgttgtgtccacgaaacgacgacgtttcatcattgttctgttaaacccagcttttggaacttggaagtgatgagctttatatctggaaaatgtaaaatgttgaaccttttttcaactgtagtgttgttcaaaggcgttagctttgtttaagaaacgacgacgtttcatcattgttctgttaaacccagcttttgggggttttctcactcggaagtgagctttatccctttggtttccatcaatg

SEQ ID NO: 9583 - DNA, 3000 bp, Unknown
  misc_feature (1)..( 3000): cDNA_ID_2183994_gDNA_ID_1972158_Annot_ID_179514 3000 nt of promoter + ATG
tccttttgcctcactaagctgtcctcttccggtttggtcaataggcttgtctccagctgataggcttgtccaaagccatagtgagcttggaatggttagtaacaaccctgatgggttttgatgctgtgctaagataacattgtactttgccgctttcatatcgtgatgatgcaatcttcttgtgagatgtctcccatgattagcatcacatttgatggtgcaggattgtcaaccgccccaaaataaagatctacgaaaatcttcttatctctcccatctttattgtctgaaaccatatatcatcaatcaacgcatagatcaagatctaacgcttcaaggagacggaagattacgaaacgaacacgataaactaattggagcagaatgatcaaggggtttaggatttattagatcttacgggagaacattccgagctaagaaactgctttttggccgttagatctcaagtatatctgtgctatcctctccactaaacacttcagttgcttgctctaatgacgtaaatcttagttattatggttaactttgtgtgtgtgtgtgtgtgtgtgtttctgcagcagtcactgaacatgtcatgcattgctttaaacgctttaaacaaaagaagctctcattgcattctcagggaatacaaaaactcaaaaaaataaaagccacaaggaagaagaaacaagagttttctctattgctgaacaaaacatatgatactacaacatgaatcttagccaaaatcaatgttaagcgatacttaaaacactctgtttttttaggctacccaaatcaaaaaccaaccagatcacttggaataaaagacatcttcttagactgagacgagatagccttggcaacaaaagcaagcaatcacaataccaaccaatgctccagcaagaacctgcgaaggagtgtgaccaagcagttccttaagctttctttgactgatgggatgtccttcgaacaagtccctaatgatcaagttcagaacctgacatcaacaaatacaaaacattgttaatcttatcttacaaagaacaacaaactagacttagactctgtacagaccctctttcaaaactcttaattctctgcaattttatcaagatcattctacaaccaacaacaactatcatcaatatgtggctaatatccataatttcgagaaacttgtattgtgctctcaacaatgcaaaaccatcatctaaaagatttaagaaccaagagcaaacatgacttagactctgtgtgaatcctctttcaaaactcttaattctctgcaattttatcaaggtcattctacaaccaataacagctatcatcaacatgtgcccaatgtccataatttcgagaaacttgtattacgctctcaacaatgcaaaaccatcatataaaagattcaagaaccaagaacagaaatcaacatctaactctccataattccaaatctagtgatgtacttcaattgtgcacacattgaaaactcaagcacgccaacttttacacataaaagcattcacaaaaattcaacaatgtagtgaaagtcgaatccatcaccagattctagtaatacattaaactatacacactcatcaacatggaaatagtaatacattaaactatacacactcatcaacatgaaaatctagtcaacttgtagaatagacaaagcatttaataagaccaaagtcaaactctgtaaaaatctccaaaactcaaaacttgaagcagatttggtttaactttttacctcagcttgcataccggcatggcgtctaacaccaattgcatcatacatgacaatcaagctaaaccctaaacaaacaggaaacaaggaatctgcaactccatgacaaagcgccacagaggtcgtcaaagccatacataaagctgagtgagacgaaggcatcccaccagaagcatagagaagacgaaaatcccatttcctctcaatgaagaaattgataaccattttactcgattgcgcaaagaaccacgcgactacagctgaaacgaaagttggattcgcagagagcgtcgcaacgaaagggctaatctttatcttagcagaagcagtaacgctcaaaagggcaatccctaatccaccgttatgcttcaaatctccagcgaaatcctcagaaaacgccgccgtgtcgtctctgtaagctcgaaaacgagacatccattgcctggattgagaagaaaccaaaccctttattgttcgaatgattggacgcaatacacataaagggtttaacttgatacgacgattgcaatctggtttaggattcgaagatgatttacagcagaataacgataaggtgttgttggaagcttccaacttttggatagaggttagctttacgaaggagaaacgagaagggtaatgagaaatggttttagagaaacaagcgaaggaaggatttgatgtaagagactccatgagagaattaagttgctgctactttgcgacatacagagagattagaacacaaagtgttgtgggagacttggcgaagaaagattggagattttcttcaacccaactgggcctaatcaacgaaaacaattagtttagctaaattaaacacacttttttggtaattaacatcgaaatcgtgtggttgtagagaaaagaagagacattgttttcgtaaattataacggaaataccattcgagtatcgtgactcgaatataccaaaaatgtgtccaaaagaggataactgggctcaaataaagtgggcctttgggcttgctacaaggtttgacttttcaataggggtactttgggtattatgaatctttagcttatatatttttattttctgagaaaaattcaacggtcgcccgaatgatagcaattctcgcggttataacgtttgcgttctcttctcctgctcatacggacccgtcggagaccaaatctcgccggaagattgattcatccgttgattaatcggagctccttagttttgattccgttatg

SEQ ID NO: 9584 - DNA, 3000 bp, Unknown
  misc_feature (1)..( 3000): cDNA_ID_2183969_gDNA_ID_1972158_Annot_ID_179506 3000 nt of promoter + ATG
ccatcaacaactctgttgtaaaccctagtgcccgcatatgttgccccgtcgtcgaaatcactctcgggaactacaaatcctctaccaaaaatctgccaatgggaccaaatatggattggaaccaagtctttgctttcgacaaatccaaaggtgatgtcttgtcggttactcttaaagacggtccgaccaataccgtaatcaacaagcgcaacttcaagctggcctcggaaattccgactagggttcctcccgatgcaagaatcgcaccgcagtggtactctatgcataataccgaaaccgacttttacatggagttgctgatgtcagtttggttcggtacacaagttgatgaggtttatccagaggcttggttttcagacgcctgtgaagtgtgtgcctctcgcgtgatcaacacgcgacctaaggtctacctagccccaaggctctgttatgttagggttacgattgtttcaggtcatgatttgatttccaaggataaaaacaagactccttcggtttatgtgacagctactctaggtaaagtcgctctaaaaacgaaagtttcttccggtacaaacccgtcatggaaccaagatctaatctttgttgcatcagagccgttagaaggaactgtctacattaggttaatcgacagagaagacgaacaacacgaaggatgcatagggacgttgaagaagaagctgacagagatgactccgctcaaagttccaagttccgcaccggctttgttctacgacattgaaatgccgactgaagtcaaaccggctggcgattcgaggaggttcgctagcagactcaagatgaaactagccactgatcaagcttatcacgtcgccgaggaatgcacccaatactcgagcgacaatagagcttttgtaaaagggttatggcccggtctgctcgggaaattagaaatcgggatcttgggagcaaccggtttaaagggaagcgacgagaaaaaacagactatcgacagttacgtagtggctaaatacgggaataaatgggccaggactcgaaccgtggttaatagtgtctcacccaagtggaacgagcagtattcgtgggatgtttacgagaagtgtacggtgttaacccttggaatctacgataatcgacaaatcttggaggacaagaataaggcgaacgatgttccgatcgggaaagtgaggattccattgaaccgggtacaaagtgactggatttacacttgctcgtatcctattctgaagttgggaagcagcggactgaagaagatgggagagcttcagctagcagttcgttttgtttatgttgcgcaagggtatgcacggtattcagctcctttccgttggatgttaccgaaagctcattacaaatctccattgtccatgtatcagatcgacaagttgagagcacaagctgttgagattaattgtgcgaatcttgcgagaacagagccggctttgagaagcgaagttgtgtcagatatgttgaaaccaaagagtaggaacttcagtataagaatatccaaagataattttgataggctttatacagtcgttaagatggtcttgtggtgtgtttcggtcattgcatcggtcagatccacgacagcctgtactccgaaattcattgcgcttggagtcagttttgtgtttcttttttgggagtactacatatattggttggtgacttcgtggctagttgcgtattgcattgtgctttgcattgtggttatacttttacgggaaatcctcaagtccccgaggcaaacatataactggttgttttatcggaacgtcactccgcctcctttgattctcgtcgatttgaagctacggaaacttgactcgatcaacctagacgagttagccgaagagtttgactcgtttccgtcgtcggagaacgatttgaacattcttaggatgaggtacgataggttgaggaagattatggagaacgtcatgttattaatgggggatgctgctacacaaggcgaacggttactagcggcttttacgttgcttgagcggccattcgttttgattatcttattggccctctgttattgctccatgctcgtcgtttgccttggttgggatctacatgttcgtaagtgtttgattttcgtatttatttgctactgggtgcaactaccgtggttccgcaataatttacccgatgggagcctcaacttcttccgaagattgccgagcaacgaagacctcatgttctgagacaattctctagctagggtttttgtttttttcttctttatttatttgttttgttttgcagctattatttctagaccgttgatttttgtttttttggacggctcatatctcttatatacattagtgtttaaaagcccattatttagtgatttgtttttaaaacgtaacgatgatttaattaaattatgaggtctgaggatatacaaacttgatttttatgaggtctcgaggatacaaacttgtttttcttttcttaatgttttgtgtgtgtaatataacaacaacaaaaattatcgtcaatctaatgaaacttgaatagtttacaaactaaactcgtttatgttttaatgtaatcgaagttcacgtgcattgtgaagttttgagcgatagaaaaatatttggaaggcaaaaataacaatgcaccagccgggaatcgaacccgggtctgtaccgtggcagggtactattctaccactagaccactggtgcttttgattaagacatgataattttagtttaaaactataaattccgtgtgagttttgtctacaaatctatcaaggtcttccttcttcttcagtttatcggatttctatctctgggagagaaatctaaaattaggcggtgaatgatttagattagtaacaagcatcacacacacagattgtttggtgtagacaaattcaaaccctaaccctagattgattgcgtacggagtttctctttggttaaaacccccacaaaaactgggagagcgatg

SEQ ID NO: 9585 - DNA, 3000 bp, Unknown
  misc_feature (1)..( 3000): cDNA_ID_3042543_gDNA_ID_1972158_Annot_ID_179497 3000 nt of promoter + ATG
aatggcagagaaaattaaaacaaagtaaagaaatgaaatggcaaacaaaaatataaagagagagaggaaatattcgtaaattaaaaggtcaaagacgacgaaacgttaaattaaagtggtccatgtgtatactttggtggagcccaatgccacaccaaacgacccaacccattcgaagcttcaccacattttctttctcgtgtgtgtttcttttgactgtttttctaactcttttttatgactttcactttaagaaattggatctttatcttactactaagtctaagtgttaaccacagaggaagaagaagcaatttaggtggatcattttacggatttgattttttactttgatcttaacaaaattgcttcttttggtaataaagtaattaaatttataaaactttaaaatgaaaatgtggagcccataaaagatctctgaagttgatggagaaccatagaaacgagagacttaactgctttttgagacaacaattggtaatggattatgcaattatagctattggtctatttcgcattcattttacactttcttgtgattttaattattgtgatttgttcctctcttttctttcttcagcagccttttgtactcttgatgatgtgaattggagtgtaatataacacccctcaatgttgttaatataagtgtttcaaaaatagtctacttatatgatataaactaaagtatatggaggaacaaattcgaagatgctcgttgttatcataagctttaatactttattgaggaagcattttatgttgtaacggctaaactatactcaacaagaaaaggtaaattctaacggaaacaatatagcctttaattctgttcaaagttatagagatgggccgttacagacttttattcaagaagcccatctgcgcatactcaacacttttttaaagagtaacaaattacacaaatttaccaagttcccaagacctaaatcattgactgagtcaagaatcatttgcaatttgcatgttagaatattgtcagaagaatcatgaaattttcaaattgcttcacatgttttgtcctttgttattcacttgaggattttctatgaagttcatatttttcttctgacaccccgatgaactgttagtaaaatggcaattgctaaacgactcctatatcattctatcgctatatatctcatattccccaatgtaaacgttgattgcatgttgatccacgtttcactctttgcctaaacgtttcagagacgtatgatgtgatggatattaaatccatgaaattcttcaacttaaactaattactctgcatttaatccataagtcaataaaatgtatttcccgtttcattacagtttattcgattaaattttcaaattaaaaaacatgagcaagtaatatacttaattattattttacgaaggatcaaacaaatactaaaaacagaaaaagaagatatgaaaatcacatcttcgaagaaccagatcttgttgtagaaatccttatcttagagaggatccgacaaaacatattcttcttcttgttgttgtaattatcgacgacagcttcggtgttttgctttctcttccaccatttggttccaaaagcaccgcacaacagtttaccagtcgtcgaatcagaggaacaacacagatcaacgacggtgttggccccacgattggccttttcttccagatcagacggtcttcgagagcagcaaacttttccggcgccagcaagagaaggtagagacatgaaatggcgttcaatgatgtgagtaagagaaacgagctcgtaggaatcatagagtggacttccacaatcccatagtatacgatcatcatcatcaaccatattcttcgttttctctgtggtctttttcatgaatgatgtttttggaaagtggaagtgtgtttctcgatgtagatttctgacagtgagtgcgtgtcttctattgaaagtgttttaaggtttttgttttcttcctctagtctttgtttttggtcgaatggacttataacagtcaagctggcgagatttgtttatgtttatttgacgattatttacctttaatggaggtttttttttttgttgttaattactcgttaatgaatccggaaattggagaatatagatacactacgaatttgataaagggaaatatgtgattatcattttaccattttagttggtttaaagaatgaactcttccaatttatcattttaccataaagggaaatatgtaatttaaatttttaattttatgttgaatttcaatttaatcataaattttcgttgactaagttggttaagacatgtcgttagaaattcttccaataaaaaatcttagatcttgaaaatagatttccaatttttttttctttttcttcggattcttgcttctttttttaatttaaagtaatttttcgtctctaagtcgacagatagcatcgaaaaagaagaatttgtatctcaattagcttactcaacgagaattcatgattaaattgaaaaacaacataaaattaaggatttaaatcaccatacccaaaattcatattttaaactaacgaaaatggtaaactaatgatttaaatgacatttttcccatttgataatcaaaaaactctaaaaattaatcttaaagttaaaagttattattccatcctttacatgcaaaattcttcctttttaagatttattgggctgaagaaatacaaaacgggcctataattggcccaatatgagtaagcagacgttagttagcttagctgagagagtgtggctttaattagagcatatggtttagtgttaatctatgcaaaaatttatcttctccgtccgcaaaaattctttaaagcattggatcgagttttaaaaaggtatccgcgccagagcttaatttaatcattttcatttcttcatcattcatcatcttcctcacagtctcgaaaccctagttttgtacccaataacaactttctgggtttagaaatg

SEQ ID NO: 9586 - DNA, 3000 bp, Unknown
  misc_feature (1)..( 3000): cDNA_ID_2183953_gDNA_ID_1972158_Annot_ID_179499 3000 nt of
tagaagacacgcactcactgtcagaaatctacatcgagaaacacacttccactttccaaaaacatcattcatgaaaaagaccacagagaaaacgaagaatatggttgatgatgatgatcgtatactatgggattgtggaagtccactctatgattcctacgagctcgtttctcttactcacatcattgaacgccatttcatgtctctaccttctcttgctggcgccggaaaagtttgctgctctcgaagaccgtctgatctggaagaaaaggccaatcgtggggccaacaccgtcgttgatctgtgttgttcctctgattcgacgactggtaaactgttgtgcggtgcttttggaaccaaatggtggaagagaaagcaaaacaccgaagctgtcgtcgataattacaacaacaagaagaagaatatgttttgtcggatcctctctaagataaggatttctacaacaagatctggttcttcgaagatgtgattttcatatcttctttttctgtttttagtatttgtttgatccttcgtaaaataataattaagtatattacttgctcatgttttttaatttgaaaatttaatcgaataaactgtaatgaaacgggaaatacattttattgacttatggattaaatgcagagtaattagtttaagttgaagaatttcatggatttaatatccatcacatcatacgtctctgaaacgtttaggcaaagagtgaaacgtggatcaacatgcaatcaacgtttacattggggaatatgagatatatagcgatagaatgatataggagtcgtttagcaattgccattttactaacagttcatcggggtgtcagaagaaaaatatgaacttcatagaaaatcctcaagtgaataacaaaggacaaaacatgtgaagcaatttgaaaatttcatgattcttctgacaatattctaacatgcaaattgcaaatgattcttgactcagtcaatgatttaggtcttgggaacttggtaaatttgtgtaatttgttactctttaaaaaagtgttgagtatgcgcagatgggcttcttgaataaaagtctgtaacggcccatctctataactttgaacagaattaaaggctatattgtttccgttagaatttaccttttcttgttgagtatagtttagccgttacaacataaaatgcttcctcaataaagtattaaagcttatgataacaacgagcatcttcgaatttgttcctccatatactttagtttatatcatataagtagactatttttgaaacacttatattaacaacattgaggggtgttatattacactccaattcacatcatcaagagtacaaaaggctgctgaagaaagaaaagagaggaacaaatcacaataattaaaatcacaagaaagtgtaaaatgaatgcgaaatagaccaatagctataattgcataatccattaccaattgttgtctcaaaaagcagttaagtctctcgtttctatggttctccatcaacttcagagatcttttatgggctccacattttcattttaaagttttataaatttaattactttattaccaaaagaagcaattttgttaagatcaaagtaaaaaatcaaatccgtaaaatgatccacctaaattgcttcttcttcctctgtggttaacacttagacttagtagtaagataaagatccaatttcttaaagtgaaagtcataaaaaagagttagaaaaacagtcaaaagaaacacacacgagaaagaaaatgtggtgaagcttcgaatgggttgggtcgtttggtgtggcattgggctccaccaaagtatacacatggaccactttaatttaacgtttcgtcgtctttgaccttttaatttacgaatatttcctctctctctttatatttttgtttgccatttcatttctttactttgttttaattttctctgccattttgatttcgtgtaattgatgaatgctataaatctttattctgtcacatcttttaacaaaggccaaaaccctgcttttctttttacctcagtggtcgctgacatagaagctataaagaaaagctattatgtatatggttgttataaataaagcaaaagcaaaattcccccaacttatttattttcttcataatccactaataagtttcaaaatgcatactgaaaaaagataaaaagtaaaaccaaccatttcgtattttacaacaataaaaaacaaaaaagagtgtgtgaaaatggaaaaagtacacatcagcataaacactactaataacggcgtagaagaagaagcagacggaactgagagtttcgccgttaggaagatacggaccattgtggtggttgcgtcacagctcagagaggaataatgaaaacaaataaccaccaagtaacttacagtaaaaacgctcactgtaaaaaacgccgtcgtttcaataaatgttggtagctgctaaaacgacgtcatttattttctgaaagagagagagagagatgttttatactacttcttactctgtgccgtgtggaaaggagcgaaatttgcagaagaaacaaagcataaccccccagagaaagagagagagtttctcccaacaagatcaaacttcgaactctacgagaactactattatccaaaacgcgaaatagagagacagagatttcataaatttcttactttttaaccccaaagttcttttccagacagcgttttcctctgtcctttgctctttgtgggtttactccttcttccggtttggatatcccgagctagtaaagaagggatccagtagcagaagctgaagctaataaacccaatcatagagaaagctctctgaacaaaaggttcagtttttctctctttcttcaaaactgaaatcttctttgtgtgattcattcactaataagtcgtcattctttcttctccttctgatttctgtgtactttttctctgtcagacattttctgggtttgttttaattaaaaagaa

SEQ ID NO: 9587 - DNA, 3000 bp, Unknown
  misc_feature (1)..( 3000): cDNA_ID_1017362_gDNA_ID_1972158_Annot_ID_179505 3000 nt of promoter + ATG
ttgattaaaaaagtatcgtagacctcagagtttcctcttgatttcactaaacaggggaaagtaacatcgatggttgctcaagtttagctgcaataaactcaagaacttagaagaatactgtacgatcacatcactagggtcttggaaatctaaagaaggcaaaaagttgtgaagccgtgaaaggagagacttgatagagctcagaccaatctggatatttctgttcaagtgtggtctggagagcagcaaagaaggaagccaagtcaaaggggaatcggtaagcgacccaagcctggattgttctttgtatgtacactacaatcaagccattaccgcccatgatcatcggtttaatcatcattttcacggagattgctgtttggttttgatagcccagatggatgaaaaaacgcaggaactctttctcagatctagttcggttaggtaacttttctctgttttttgtttcttttcgctttcccttagcattttatttccatagaaaatgtagccttttttgcccacatagaaactaatagaatccagggcttatcgtcaatcttgtttctaaaaattcaagaaagaatttctctactatttttagaaaaagaaaactgtagtacactttttagctgtacctgtagcttaattttggaaaattacggttatgaccagaagaagatgttgaatcatataacttcgtaagtctaaaaaaagtcaagtgtaaaaaaaaagaaaagggaaccataaattcatataagataaccgtttgtaggtattaaactatgaatgatgacgcttattcaggccaggcctaaatagtgtggcttatgttttgggccattaatgggctcgaaagtagtatgaaaatataagtaaaacagtatagcccatcattctttttgtgtagccatgacctgtgactgtgataaattgtacggagaaaatgccaaaactaacaataatttcatgtctcttaaacgtctgagttaatcaaaacgagctcatagttattgttttgttttagagtaataaacttagacgtaaaagagaaataaatgcattgttttggacctaataatagttgaccaaacattatagaatataataatttgagattcatatcatgatggatcttaggctttttctttgaaatatgatgagttgttttgtcacattgcaaattacatggttcttatgttgtttgataaactcggcgagtatggtattataaaagagaaaaataatcaggggaaaaagcaagcaagtcaacattgcgcggaactatatataatcagaagatcttgtttggtgcctattattgcctaatgacacaaaactattttgtagtgttttttttttttttataaagtgtaggaagtcggaccactcgtttatgagaaatcgaatttggtatcaattaatatagagagtaatttcacaaaaaaaaaaatggtggtcctgaagcaatggttgaatattacgtagaaaatggtattcccagaaagttccatagagcgagcaggccatgcccataccctgcctgcgtcttgtctcgtaacgcaacaatcaacaacttgatgaccattacggttatatggtttaattcgatttctttctcttggttcgctttgattttggttgggccaacggttaaatttaaatccaaggttacgtaatttaccattttactgcaaatattgtcttttacatatttactacagatgggatttttatttaataaaaaagggaaatataaaatagaaaagcgttttctttttttctttctttctacagtctactctcctgtttggtctctctctctctctcttttttttttactcttatctctgtgcaagcaacttcgtctctctcgataatggcgttccgatatcttctcgctgtctccgtcttcggagtttttgtttgaattcttcaaaggacagtcggatctttgttttacactatcttcataatctttgttggatttcatcagacttgtcatttattaatccatcgcgtttctcagtgtttctagttcgccaatttcggtttttatattggctattaacaattcgtcgacataactttgtgtgttttcgagtgtgtgagatttttagggttcgttcttcaaaggcttcagggtcgcgggaaggtgagattcgattggatcttttttgttgttgtttagtttgttcctctcctcattgtatatatatatatatatatatatatatatctaaacttttctgcttttttgattttattacaatattatttttcaaagtttctgttcatgtgggttttttttgttctttgttcttcttctgtttttatttttttaagaattatattactctctcttttattcatcaatctccggcaatttccctcaatctggagttgatgaactcactcaaactctgttccacgttctttacaatcaatgatttcaaattctgaaaatcaaagcttgttttgttgtttcataaatggcaaaaagattctggaattaggtttcacacatactgcagtttgttctttatctgggatttttgtttaggttttggttttgtgtttaacttttttcttatgaaatagtttttttttaattagatagattctgtagagtgcttacttgggatctgaaaccttattaaacaatgtttgagagactcacttttcatgattttttgattaattaaactaatcactgtggaaaatgctttcactttatactactactattctcttctttttagcttcctaatatattttattgctttgattgtttgttgacttgtgctactactagtactgtagaaaaactaactatggccatcggctaactggttttcttttgttattcaggtttatgtttgcttgaaaattttgatacaaattgaccaatatgttgaactctatggactgcattgttgtttttggtgctaaagagaacacttctgattgaaggatgttttcactttacattcagcagta

SEQ ID NO: 9588 - DNA, 3000 bp, Unknown
  misc_feature (1)..( 3000): cDNA_ID_3042532_gDNA_ID_1972158_Annot_ID_179502 3000 nt of promoter + ATG
gatacttagagagaaactagagcaagatccaacacatgtccctgttattacatccccggatttagaatccgagaagcagtctcaacgatcagcttcatcttctgcttctgcttacaagattgctgcttcagctgcgtcttacattcactcttgcaaagagtatgatctttcagaaccaatttataaatcagctgctgctgctcaggctgcagcgtctaccatgaccgcggtggttgctgcgggtgaggaggagaagctagaagcggcaagggagttacagtcgctacaatcatctccttgtgagtggtttgtttgtgatgatccaaacacatacactaggtgctttgtgattcaggtaatatgtgttcaaagttactactttcaagcaaatcctctgtttcctcacatcatgatccttgaatctgctagctaattagtgttatgtcgttgcagggatctgattctttagcttcttggaaagcaaaccttttcttcgagccaactaagtttgaggtaaagatcttgatcttggctagggatgtacatttggtttttgattcggttatttaactcggtttatccaatcgcttaggttacattacaattattttggtttgtgtttatcctagagaccttaagatattgatatgaatgtcgcaggacacagatgtattagtccacagaggaatctacgaggcagcaaaaggaatatacgaacagttcttaccagaaataacagagcatttgtctagacatggagatagagctaagtttcagttcacgggtcattctcttggaggcagtctctcattaatagtgaatttgatgcttatctctagaggactcgttagctctgaagctatgaaatccgttgtcacgttcggttcaccgtttgtgttttgtggtggtgagaagattctagcggagcttggtcttgacgagagtcatgttcactgtgtgatgatgcatagagatatcgtcccacgagccttttcgtgtaattatcctgaccatgttgctctcgttctcaagcgtttgaatggctccttccgtacacatccttgtctcaacaaaaatgtaagtcttactataatttcctttttggcttaacgttttgaacatcttaaattaaaaatacggatgttgaagttttttggttgtgtttttgcgttttgacagaaactgttgtattcaccgatggggaaagtatatattctacagccgagtgagagcgtctcgccgacgcacccatggcttccaccgggaaacgctctgtacattttagaaaatagcaacgaaggttactctcctacggcgttacgagcatttttaaaccgccctcacccgctcgaaacgctgagtcaacgcgcagcttatggctcggaaggttcagtcttgagggaccacgactccaagaactacgttaaggccgtgaacggagttctcaggcagcacacgaagctcatagttaggaaagccaggatacaaaggaggagtgtttggcccgtgctgacatcagcaggacgtggattaaacgagagcctgacgacggccgaggagatcatgacacgtgtctaatgaaggaaaatgtacggttgtatataagtggaatcacttctgattatgcgtttatttacatttcttgtgggtgagccgaaacaagcgaataaaatattgtaaagaataaattattctaaacttctaaaatattgtaagcaaattatggttggtggagattggaaaatttggttttctccaactccatggatcactcactcccattcgatgcacaccgttttacaaaaatgggcatatattagcaagaaataattaggcccaataataggcttatgcaatttgaaatcttcttttcgatagtaaggcccactaattaaaccaggcgtatttattaaaaaagaaagaaaagaaccatcctttaattttgttttttttaaaaaaagggttttctttttagttttatcaatgtctcatatatattcattaatccataaatacaacattcgtataggagatttggtttgaagaggcgattctcatatatatacgtacacatcaaaattaaatcaacgaatgacttcaatgtcgtttatggaatggtttcattttgggccatgagaaattagtaaggcacgtggaaaatttgcgtactcaaaatagaaaacacgtacattttatcattttaattggttttattattgataaaaacagaatatatcattattgcgttgtttgtgtgtgtgactttacaattattttgtaaggcatagttttaattaaatgtcaataagctatttaaattatgatacaatgacgaaaacgcccatggagaagctgagattcaccgggattgcctatcctcgtcaccaaacactcccactttttcctcttcctcccagaaagaaagaacgaaagaaaaagaataatatcatcaacaacagaagaagaagatattaaaaaaaaaaaaaaaaacctaatcaaaatatatagatgttcatttttggtcatgtcttcttcatcatcttcttccgcacgatttcagtccgccagtggtaaccttgatcaatctcgcatttgcctctcgattcgtcgatactgctagattttctctcgatttatcctctagggttcttattgatttccgccacccactctctgtttttagaatctaactcccgtctccttcgtttcctcctcctagggtttccttcttcttcaattcgatttccccttctccgatttcgatttgattctttacaaatttgtctgtttggggttattggattagccagatagatccaaggttctttaggctcgtagctatttgatttgttttccccatttccggtgactttgaagctacgattcatcagggaggttgcttattagcaaccgttgaagaaaacgtaacggttggtttaaggtctttgtttggattagaggggtaagctttcgtcggtgactgtcacggcagagatttgc

SEQ ID NO: 9589 - DNA, 3000 bp, Unknown
  misc_feature (1)..( 3000): cDNA_ID_1379239_gDNA_ID_1972158_Annot_ID_179496 3000 nt of promoter + ATG
cagacaaaaaatatcatggtttcgtcttatgctagaaacaaagaagctagtcaggcaaagtatatatcaatattgaatataattcaaggagaagtcgatcccactcaggtacttttacctagctgttttttgatcggacacattgaggatgaattggttattctttcttgctgatgtaatctgctctgttatttcgctacttgatactaggtgcatgagagtttgcagaggatacgagaaagaaagcttgttaatttcattgagtggggacctgcaagcatacaggttctaacctaattgtgtctgcaaattagttattgcttttggcttcaccatggacttgaatcataattttttccatatcttactctcaacaggttgctctttccaagaagtccccatatgttcaaactgcccatagggtaatcttatatcactctatatctatctgtcatactgagagttgccgctccttacagttaatgtcttaggctgctagttcctgctttagaagattcaacaaagactcttattttatggtgtatttgatatttcaggtcagtggtcttatgttagcaagccacactagtatcaggcacctattcagcaaatgtttgagccaatatgataagttgaggaagaagcaagcttttctagacaattaccggaagtttcccatgtttgctgtaagttgactgctcaagtataatggctttgtttggctgatgtttagtgcaacaaacccagctttgacagttacatgttgatatgaacaggacaatgatctttcagagtttgacgaatcaagggacataattgagagtttggtagatgaatacaaggcctgtgagtctccagattacatcaaatggggaatggaggtatataagcttttcccatcaataatcttacttatggatgaactcgaaatgataactgtatctgtgtctgtctcaggaccctgaacagcttatgactggtgaaggcaatgcttcaggagttgttgatccgaagttggcgttctgattattatataaaaacaaaaaccagagtaagtcgcatgaagtttcacttttaactgagatatttcaggtgatcataggattacttaaaaatgggttttggtaggagcagtagtaagtgttggcacgtaaaaccttggaatagtggtatgatgtggatgagttttttagtctgttagatgaatgtgtgtttcctgggattgagagcacacaaagttgcatctcctcactcctcaggagaaggaatctagaattgtaatatttatgggtgttttagctcatgtctctgtgatcggagtatcatgttctccatgtgtggttaaaagactcgaaaactctagaaagcaagaagcatgttgtgttgatgaaggaattgggtttaatggattctattttctttgtatatatgctgtgatctaaacttttactagtgccgtgttgatcatagtaaattctatcggtcaactctcctttgagtttctttttgcatacgacgccgttctggaagcaaatcaaacttaaccaacaatataaaatcatatttataaaaaaaaacctttgcaagttgaattgaatttacttactatataagaatttaaatttcgtggacctcatattttataatataatgggattaggtaacaaattacactaatgattttccaagaagtcgttttagacgcgagtatttgtaaattagtaagcaaataataaaaagagatgttgacaaaacgataaacaatccgacatcaactgcgatttatttggccttatgatgaatagattttactttttagatatcgaaagtgtatgttactttgtttgttagctaagtccttatctttcttcttattttgaaactaagcataatcttacgagtaaaaaccaaaatctgactaaagacctataacaacacttacttactagccgttacatatgtttcactcaaagcataaatttttataataacaatttgtttttattctcgtatcaataattttttttaaaaaaaaggggaacagcttggcgaattattccatttttttaatttaaaagtaaagaactgaaaaagggggaatctcaacatcatcacatcacatggcctctttcttactattatgtaactcaattattccctctgcaatgtttttctggtccctaactataaacatcttttgtgatgtttggtactaaatgatattttatttatttacaaatagataattatgctagtagtagtaccatactagaatttaaagaaatatatgtggaggctggagagagaattacaatttggttttgcataattatgtagaaaggtttagaaaatatctagtaaggtgaagttttattgtcaaaatattagtatgagttttggaacaaaaactagttgatctcttgtgtaattaaagcgtgttgtagtaatagtaatagtagcaaaagaaaagagatttcaaatgggagatgcacatatggacacggattcgtacaaaggttagaagaaacacatgttaaggtttcaaagaataaaatccacccctgtttaatgctcctatacacgaaagagctctcaacgcgtaatatctgtcaaattttaattcagaggacgtgttaaattagccataactttagtttaaagctaaatttgataataattacaataaattccaattccatttgttgagggaatagaaagaaattaaacgaaccaactaggaacggtcatttagccagaaaatgacacatgtcagttaactcctttgaacaattgacagaaaagttctagagtggattaccggctatacccggtaaacagtcaattactataaaaacgcgttatagccatatatatgatccaaaggggtttttggttgtccgtgtcgttcgtcgtctctctcgccggacttgttcattcagatttcgtctctctctctctcgtactcttcttcaattttgtcctccgtaaaatcttgagatg

SEQ ID NO: 9590 - DNA, 115 bp, Unknown
  misc_feature (1)..( 115): cDNA_ID_3042610_gDNA_ID_1972159_Annot_ID_179533 3000 nt of promoter + ATG
tctcaatttcggaagcttgttgtgatacttccgtctgggtttccatttctagggtttatggggtttagtttctaaattagggtaaaatttggggaagaagaagacaacaaagatg

SEQ ID NO: 9591 - DNA, 3000 bp, Unknown
  misc_feature (1)..( 3000): cDNA_ID_2184068_gDNA_ID_1972159_Annot_ID_179543 3000 nt of promoter + ATG
caagtagacgagcacgtcccaagaggtcaacaacgcagccatagtgatgtaaatttggctttatcttaaattcaccactcctcattctatcgaaaaacatcattccttcagcgaccagcccggaatggctacaggcagacaataaaccagtgagtgtctgttcctctggagagattccaaacttcaacatttcgttgaaagcttcaatggcttcttttccaaacccattcatagctaaacccgagatcagagccgtccacgagactacgtttctttcacgcattccataaaatacttggtaagccttatccatagacccgcaacgtgagtacattgaaaccagagtgttactcaaattcaaagcaccactgagtccattttcatcgataaagtcatgaacttgtttaccaaaatccaacgcccccaagttagcacaagcttgtaaagctaacaaacatgttacaccatctggttttacacaaccatcgacatcgttcttcatcttatcaaacaaaactaaaacatctctcgtacgtttattccgcagataacacgaaaacagcacattccaagaaacagtatctctcttgggaatttcgtcgaacactttacatgcatcagtactgttttcgcaagtggagtaaagatccatcagagtcgtcataagaagactatccgagagaaacccatcactgaaaatcttgccgtgaatctgcaaaccaccgagtaagtcacctgatttgatacaacacttgagagcaaaagaagacgagagcggattagcaggaagagagctgtttcgtcgaagagatcgaaacaagcgaaacccttcgcatggagtttggctgagagagaaagctctgatcatggtgttgcagtgagagagagttgggttcaatctctgggagaaaactcggcatgagtaattgatgtctcgaggaatcagagagagagcgagacgagagaggaaatggtggaaaacgtcagagtttctgattaaggaagtgcggagtaagagggcgtgaatctgccggagatggagttttccggtggaagatacgatcagagaaagaagatgatcgtcgccgctgctgctgcttatggacttcaacatagtcttctggtgaaaagaaagtatactaagctttgatttaaaaggttttactaattttatttcgttttaagtattaaaacttgaagttttgatatatgcaagcacatgatgtaaaacagttttatttttggttttgaataaatattacattcaattcaaaaaaacattatgagcaaaaaattcaaaagattatttctaattgattatatgtcacaactttaggaaagtaaatgaggtttacataaataatacaaatagaataaaaaagagttgaaacatattcaatcatctgtattaccttttattcaaaaaatcgctagatgctaatattttattaattatatgtatttttgtataaaatcaaataaattagaaataagaacaaataaatagaaaagaaaaattatatatttatatttaatataagtaaaaagagtttagaaaattaactattaaataaatatagttcaataaaaaaataaattatattaagaatataaatttaagacaatgagattatatgtcacaactttaggaaagtaaatgagattttatagggactaaaaactaaataatatttattttagagatttttgcctcataaactttacaaaaaaatatatagatggaaaaaagacttccaaaaaacttatttcccattcacagcgttacattttgatttgttgtcttttttctatgcccattttgttattttctatttggttttcagttcctaaaagacggaagttatattatttttatttatttttagtatcattccgcaagtaattaaatctatacatgttttagattttaatataaattctgattgaaaaacatactaattttctctgaacgaaagttcattaaacaatgttggtgaaaaagaaagttgataaaaacaatgcattgtttgatgttaccatactaacagtacaacggcggcgccaaagtcttttccaatatactagtttcttttgacatcaagtgattttattaatagatggtaccataagaggttacaacccaaatttgtatcaactaccaactaaacctatttaaagagtaatgccgctttactctcaaacatatagaaataaaagtaaaaacttagcccaaagtttggtgaaagaagctcaacttaaagagcttaggaaagatcctacaaatgatattctatcataaaaggataaatccccgatgtactatttgaatcgactaaactacttttaaaaccagttaagaaactagaaactaaccctagaagaacctcagtcaagcttccttgttcattactgtaggataggcccatagtttaatctctttttaggtaggatcgacagaaataaaaaacagatgggcaaccatgcatggtaattctcgaccctgtctccgagggacagttgaatgaacgactcatgaatactgtcggcacggacgagccaataattcgaacgagtttagtctattttgaattttctagctaccttataaataaaaagctaaatgacatgtaacttcatttaaaagaaaacttatagaagaagacaaacaaacaaagaaaatatatataataaaaagaaagataaaggttgccaccacgtaacaaccacttccactactactctttcgtcgtaatgaagaaagctgaccgtgccggagtttcatcttcaccggatcaccaaattagtcttctttatatagccgatgaaaataccacgtgactccaacgaccaaaataccaaagtccattagtataaagaaaaacatttatttacaaaaaaaaaacgatggatatctcaaaaataaaatgaccaaactacccaaccattatccctatatgtataacacacagcctcttctttttcacccacaaacaacataac

SEQ ID NO: 9592 - DNA, 3000 bp, Unknown
  misc_feature (1)..( 3000): cDNA_ID_3042602_gDNA_ID_1972159_Annot_ID_179546 3000 nt of promoter + ATG
acttccattaggcatgaactcatagatgagagctctaaattcatttccttgaaaatcaatactcgaacaagctgtcaatagtttcacaagattacgatgtcttatgtccttcaaggattcacattctgccataaagctcttcatcgctccacgtctctgcatgtttaaaactttcactgcaacaacctttttctccgtcaggagcaatgccttatatacggtaccaaaactgccagacccgaccatattgctcgaagagaagccattcgtcgcattacgaagatctccataacttatcttctcatgcaagacttccaaagtagaaggagttggattattggtttctttgttcttctttctctttctcaaccaaatcaaagtaactgaagccatgaacaacaacaaaagcaaagttatgcctacgctaactccaatcacaactttctttaaacgagatgaatgcttcttcaccacagatggtgcttgcgaaaggcatggctttagttgaaaccccataatacctccacataaatcattgttcccaactatggaaactgtagtagcattctcaaatattcctttcactggcacctttccctcaagattgttaaaagatagattgagatactccaacttggaaaagcttgcaaagtattcaggtatacttccagagagatcattgttagacaaatcaacttctttaacacccaccaacccttttaaatctggaatatctccataaaacaaatttccttccaaaaaaagactttccattgtaagacagtttcccaaagtttgtggaagtttccctgataatttattatccccaagtgatagtgtaccaagattttgtagcgctccgatatcctgcgggagagagccgatcaaagaatttcctgacatgtctaggcgaagaagctgctgaattttcataatttccagaggtatagtcccattcaacttattatccccaatccacaattctagtaggtgactacagttgccaagacttgtaggaacaataccttcaaaaccattgttggacaaatcaagtgtttctaacatagtcatgttgcctataaaagctggtatacctcctgataatctatttgaaaatagacttaaatacctcaaattcaaaagctttccaagagaggttgggagtggtccactcaacatattttgatctaaaataagcttttgtaggtttatgagatttccaatgtcataaggaatgcttccggaaatgagggttcctccaaggtctagagttacgagttttgcggataggttcgcaatagatataggcaagtcacccccaagcctatttctgccaatccctaaggtctctagttgggtgcagtttgtcaaagaagtgaggaattcaagatctctagaagaatcacttcctaaagaattggtatgaagaaataacaattttaaatttggaacatttccgaatgtaggaatacttcctgtcagattgttctcattcatacccaatctttcaagagtagagatattggaaagagttgttggaatggaccctgtgaaataattccctcccatattaaacgatagaagatttggtagtagaatacctaagtcaggtctaaggcgacccgagaaatgattataaccgatacctagaagcttaagtgaggacaagttgtagagagcgggaggaaaaacaccggagaaattgttggctactaattgaagactccatatttgagtcagttgagctacatcactcggaatttctccttccagattgttatgcgacaatgcaagttgttctagtaacgtcaagtttcctagtgatgtagggagctttcctctcatattgtttccataaagatttaactgaacaaggttcgtcaatgatcctagctctgaaggaacacttcccccaagacgatttgaatctaaacgaaggttcaacaatctagagcaattgtatagacctaatggaatcggtcccctaagataatttatgcccatatccaagtattcgagtctagacaactgtcccacctcttgaggaatagtaccaccaaaaaagttttcatagagatcaagtgatacaagaaacgatagattaccaatggatggtgatatcactccgcctagttgcaatcttccgagttccagatgagtaactcttttgtttttacggccacatgtaacgcccttccaattgcagagtgggaatgagtggttccatgaggacaagacaactcttttgtcttcagaaacttgagacttgaactgaagcaaagcttgcctatcagtttcatcggtaaaaccatgtgtttcaagtagcatgagagcattgaaagcaagtaaaagaaacagtctcatgctttccaaaaaaacaaatggtggttaaaaagcttttgatgcttctcatgttttgcaggaaaatgaacatataagaggcgaagcaattgcaaattaaaatgcctgtagtgataatgcaacttgaaataaaaaatagggatattaaactgccacttttcgaaaatttaagtcaagtcgtcaacaaagacacgttttatgggatcccattatctaaaaaggaacaaaaaaacaaagacattttacgaatctttatgacttttcttcagacatcaagcggtggctacaggatgaaatattttggcacttttgtagcaactagcaaatgaactattttatttataaacatgtaacaggagtcaggagatgatgtagaaattgaccaattattcatttacatttactagatggtaggtttgattggtaaaaactaagtttttttaaacactagaaaaaagagagaaaaaataatgagtgacaaagaaaattaaatagaaatcatatatatatatatataaattccaaaatatgatcaatgagagatcatgtggttgtcccacattatctttctcaacgcacgccttaccattaaggagacccaaatttcctgcaacaaacaaagtaaaaaagttgagaatg

SEQ ID NO: 9593 - DNA, 3000 bp, Unknown
  misc_feature (1)..( 3000): cDNA_ID_3042594_gDNA_ID_1972159_Annot_ID_179548 3000 nt of promoter + ATG
ggagatcttcgtaatgcgacgaatggcttctcttcgagcaatatggtcgggtctggcagttttggtaccgtatataaggcattgctcctgacggagaaaaaggttgttgcagtgaaagttttaaacatgcagagacgtggagcgatgaagagctttatggcagaatgtgaatccttgaaggacataagacatcgtaatcttgtgaaactattgacagcttgttcgagtattgattttcaaggaaatgaatttagagctctcatctatgagttcatgcctaatggaagtttagatatgtggctgcacccagaggaagtggaagagattcataggccctcaagaactttgacccttcttgaaaggcttaacattgccatagacgtggcttctgttttggattatctccatgttcattgtcatgaacctatagctcattgcgatcttaagccaagcaacgtccttctagacgatgatctaaccgcccatgttagtgactttggtctagctcgtcttctcctcaaattcgacgaggagtccttcttcaaccaactaagctcagccggtgttagaggaaccatcggctatgccgcaccaggtatactatcacacatctgtagcattatatgaagaaaattagtatctatcctttctttttatcattacagtcttcttaacattgtttctatgaaatatggtgcagagtatggagtgggaggacagccatctataaatggtgatgtatatagttttgggattctccttttagaaatgttcactggaaaaagaccaaccaatgagctatttggaggaaactttaccctgaacagctacactaagtcggcattgccggaaagaatattggacattgtagacgaatcaattcttcacattggtctcagagtcggtttccctgttgttgagtgcttgacaatggtttttgaggtgggccttaggtgttgtgaagaatctccgatgaaccggttggcaacgagtatagtcgtcaaggagttgatctcaatcagagagaggttctttaaagccagtagaacgacttggcgttgaagtgtttggttttgtctacaaactttgcaacccaataaaaaggcttataatatcttatttcataaattggggttttgtctaagaatgcttgtagaatattgctaatgaaatgcttgtgttaattaataaaaatgtatgaatgttgtggtaccaattttatatggagacaacgtagctttatagttgcaaatccacattgttcccaattttatttggattctctttgttttggtaatgtaaagttctgaacatggagcaatagatcgatgttcaacgataagtaagtaagccttgtcgtcttggtaattgcgtttactaaaagtcccacaagtgggatatggagaaaatacatctaatgccggtcagatcatgaaatgagatcgacgtcaacatttctagcataaaattgacttttgttggcacagtgatcacgacattacgatacgttttagcttacaaaaaatcgttaaccggattatagggtatgttacccataacaaaacaaaattgtgagcaactattcgtaacactggtggatattacaagaataatcttcgtttactgtacttttaatttttctctttgaaattttactattttgttgcaactagatgttaatttaggtatgcaaaccctatttaattaatgggtatgtgtaagagaaattgatccatttaatttcattaagaaaaaaagttaaatggggttaaataggttagcccaactaaacatatttattaaatgtagttttacaactaaacatatggggtatccaattaaacctatttatttttcttttatattatttattcttattgaaaatggtaatatgtttatacattaaaattaaattaataaattattctatttaacttcactttttggtttaaatatttgtttttaaactgcaaagctccattttccactaaaaccgtaaaccaatgttttcccgtcaaaatcgtaataccacgttttcccgtcaaaaccacaaaaagtgttttccgcaaaaattgaaaatcatgttttcccgccaaaaccgtaaaccgacgtttttctaccaaaaccgtaaaaccacgttttcccgccaaaaccgtaaaactacgtttcctaccaaaatcaccaaaaatgtttttctgcaaaaatcacaaaaagtgttttcaaccaaaactgaaaatcatgttttcccgccaaaatcgtatgccgacgtttttccgccataccgtaaaaccacgttttctccccaaaatcacaaaaaatgttttcctgccaaaattacaaaaagtgttttccgacaaaattgaaaatcgtattttcccgccaaaaccgtaaaccgatgttttctcaccaaaaactgtaaaccaatattttctcgcaaaaaccttaaacccgtattttctagctaaatttttctttgccaaaagaatattcacccataaaaatctgtaaaataattattgattatattatatagatatagatctaaatgggtttaaatagattaatgataatttaaatagaaaagataaatgaaatataaaattaaaaagagttaaatgatttagagtaaataggatagattttaaatgggatgggttaacccctattaacatttgcgactaaactattttggctttgcaataataacaaatgaaacctgtcgtcagttggtggatttcttaaacccaaggtgcgtgaaaataaatatacaagtgacataagttgtaaacagtaatgactagtgtcatcttttaacaaagttgatttgttgacttagacggcaataatacgtgtcgtattctgtgtggttgtgagccaatttattatcaccacaatacgtaatgaaaggatttgcaattgcttcgtccccttttaaatcagtttcctgcaaagttgataagcacaaaaacattcaaaatataaaaataaactttgagaagg

SEQ ID NO: 9594 - DNA, 3000 bp, Unknown
  misc_feature (1)..( 3000): cDNA_ID_3042580_gDNA_ID_1972159_Annot_ID_179555 3000 nt of promoter + ATG
aatccccataaataaaaataaaaggttccataatctatttccaagaattgtctccttaagaatcacctttcatctgcagtagcatttgcttcatcagacgatgtagaaggagttttcgataccatctttgcttttattacagaacaagattctctgtcaagtcacctaaaatttagacataagatgattaatcaaaaagaacagtgatcttaatgaatctaacaaatcattcatctttataatcaatcaatcactcctaatgtcaaataaacacaaacgcaccaagaaacataggagcagaaaaaaaaaaaaaactttcgtgtgatttttgattcctcaaaaactgaagcaagtgttttagattctgtctttattacccatattcttgtcaaatcaaatagtgaagaataattctcaaaaattacggctaagttctcaacacaacagattcagagaaaagaactacctttctttctccggtgagaatctcgtcggaaactgtagacgattaggattcgaaacgagtagaagaaataataagagaatctgagaaaatgaagagtgaaattgttttttttggaggaagaaggtccgaagttgaggagggcgtgtggaggcgcgtggagagcacagaagaaggtggtgcgtttaagtggacacgtgagttcgacatgtgcctttctcttttttacttttgtcttcttctcttacgttgcgtgccactaaagctcatctctcatggacacgtcatcgtatctttaattaataaaataataatattaatcgagtggaagagtggtttaaatcgggtaaagttctattaatggaaatgtttgttgagtgtaaataacattgtattttctacagattaatcgggtaaaaagttgtactatctgtttaagaattttatcgagtagatgaaaagtaacattttcacaaaaatataccgtagaacaccaaaaaaaaaaaacaggggcatgtggggtcaacgtgaaggataataaaggcatggaaacgcgccgtcgagagctgatgacgtgtctgtcgtgtgtttcccacaaactctatttattgacggtatgatgattagtatacacatttttaatggcatagtcaaattcagtgggtgaggaaaaattgaagataggaaattaaaaagaaataacgaaattatattaatctgcctattcctcttctccttcattttgaattcaaaaaccgaaatactatatatagttttgcggttcgaatgatgactgtattttgtgatacggaaaaagtatgggacggttcaaataataacaaaaatacatagatatatatgtatatatagagattttttatactgttacagttacggtacggttttgggggcggtctatgtcaccattcatacactgtgattaagaaacatacaaaaggcgttttcttgtttttttattaaaactacaatacagttaccaatcaatacttttaacaaatttgcgtttttcgaaaaaaaaaagaaaaaagtttgcaattttgtcctaaaaacaatacactggaatgcttttcaaaagaagaaaaatcatttacctagtgtttttgctcaaaaccgcattccaacaaaaaaatcgttcattactccattacttaagcaaattgttatgtcctacgtcccaaccaaaagtttctcagcctttgcctcttccatacacacatccctcgtttattactccattacttaagcaaattttaattttttttccattagcttccccatttaaatatatgtacaaaaaaagagagtatatgtgtgcatcagaatcactagttacctagtgcataaaagaaaaaaatatacgtaggacataacaatttgcttaactaatggactttaatatatatatatatatatatatatatatatatatatatatgcaataattatagttttattctttttatttaattaaaatctaagaaaatgtaattacaagaaatagaaatatcataatacttatagaaattttgacaattattatccactataagcttatataagttctataatcaatttactagtaaaaaattatgatttttttttcaattttttatgatgaaactattcaacgaatttaataatatgtatgttaaactttaaaaatgtatattttgatttatttatgtattaataatttataaatatatgttattgcttatttattaacacaaaaataataattaattattaatatatatatatatatataatttataatccgcaccgcaaataattttttcatcaatcaaacattattctgtaccgcttattttgtacaaaccatatttgtcccgcaaatatatttttctcgcacgtaccgtaattgaactgtactgcaatgttataccacttttctcacatattaaaaaccgaggttaccattcggaccataatatattttttcatcaattgtttgcattataaaaagaaaaaaaaaaagaagaacaaatcggagggttcagatttcagaaacaaaataccgaaccgctaggtcgttggttttgccggttcgtttgcaccgggattttagagctagacagggaccaaataattaagcggatcgtgggtattaccggtccgggtccggaaaaacatctgttagaaactaatctcgtttggcccaaacccaaaaaagctagcttcacggcgtttgttgttcttcctcgctcttcgccgccttcactcgcagtcgcaggtaagcttcttcaattcccctcttaaatcaactaacgcttcctaattcctcctctggcttcgttcctctccttttttccaaggtttgtgtcaatctgaaatcaaaatgatcaaatgatcatgaacttaattgtagaaactttaattagattactcgaaatcaaatttgaccaatctatcagaagcaacctttttattacgtttcttcatctgaataggtctgcccagttgaatacattacaagggttatttttgtctgaatg

SEQ ID NO: 9595 - DNA, 3000 bp, Unknown
  misc_feature (1)..( 3000): cDNA_ID_3042578_gDNA_ID_1972159_Annot_ID_179557 3000 nt of promoter + ATG
aaacactaggtaaatgatttttcttcttttgaaaagcattccagtgtattgtttttaggacaaaattgcaaacttttttcttttttttttcgaaaaacgcaaatttgttaaaagtattgattggtaactgtattgtagttttaataaaaaaacaagaaaacgccttttgtatgtttcttaatcacagtgtatgaatggtgacatagaccgcccccaaaaccgtaccgtaactgtaacagtataaaaaatctctatatatacatatatatctatgtatttttgttattatttgaaccgtcccatactttttccgtatcacaaaatacagtcatcattcgaaccgcaaaactatatatagtatttcggtttttgaattcaaaatgaaggagaagaggaataggcagattaatataatttcgttatttctttttaatttcctatcttcaatttttcctcacccactgaatttgactatgccattaaaaatgtgtatactaatcatcataccgtcaataaatagagtttgtgggaaacacacgacagacacgtcatcagctctcgacggcgcgtttccatgcctttattatccttcacgttgaccccacatgcccctgttttttttttttggtgttctacggtatatttttgtgaaaatgttacttttcatctactcgataaaattcttaaacagatagtacaactttttacccgattaatctgtagaaaatacaatgttatttacactcaacaaacatttccattaatagaactttacccgatttaaaccactcttccactcgattaatattattattttattaattaaagatacgatgacgtgtccatgagagatgagctttagtggcacgcaacgtaagagaagaagacaaaagtaaaaaagagaaaggcacatgtcgaactcacgtgtccacttaaacgcaccaccttcttctgtgctctccacgcgcctccacacgccctcctcaacttcggaccttcttcctccaaaaaaaacaatttcactcttcattttctcagattctcttattatttcttctactcgtttcgaatcctaatcgtctacagtttccgacgagattctcaccggagaaagaaaggtagttcttttctctgaatctgttgtgttgagaacttagccgtaatttttgagaattattcttcactatttgatttgacaagaatatgggtaataaagacagaatctaaaacacttgcttcagtttttgaggaatcaaaaatcacacgaaagttttttttttttttctgctcctatgtttcttggtgcgtttgtgtttatttgacattaggagtgattgattgattataaagatgaatgatttgttagattcattaagatcactgttctttttgattaatcatcttatgtctaaattttaggtgacttgacagagaatcttgttctgtaataaaagcaaagatggtatcgaaaactccttctacatcgtctgatgaagcaaatgctactgcagatgaaaggtgattcttaaggagacaattcttggaaatagattatggaaccttttatttttatttatggggattgattatgtttggtgtataaaacagatgtagaaaaggtaaagtaccgaaaaggatcaacaaggccgttcgtgagaggcttaagcgtgagcatttgaatgagcttttcattgaattagccgatactcttggtaaatttctcatctttccgtagatttgaatgaacaattgctcgagtgtgttgtgatattttgaatgtgattgtgatatctaactgtgaacatgtttctttgttgcagaactgaatcaacagaacagtgggaaagcttctatactatgcgaagctactcgattcttgaaggacgtgtttggtcaaattgagtctcttagaaaggagcatgcttctctcctatctgaatctagctatgtaagtcaatttctatatgcacattgattgtgtttatgtattctgtgacgtgaatcaacaactaagacgaatgttgcttcaagaagttacttcatctttgtatttttctaaatggtcttgttgatggaaactggtgttgtgtgtaggtaaccacagagaagaatgagctcaaggaagaaacatcagtgcttgagactgagatttcgaaactacaaaacgagattgaagctagagcgaatcagtcgaaacctgacttgaacacctctcctgcacccgagtaccatcatcatcattatcaacaacaacatcctgaacgtgtatctcagttcccaggacttcccattttccaaggccccggctttcaacaatctgctacaactcttcatcctcctgcaacagttcttgtccttccaatacaacctgatccccagacacaagatatctcagaaatgactcaagcgcagcagcctttgatgtttaatagctcaaatgtgagtaagccatgtccaaggtatgctagcgcggctgactcgtggtcttctcggctacttggagagcggctgaaagccagtgaatgaggtcttgaacggctccacatggagtagcaacgcaagttataagacatggcaacttatgaaggactctggttttgtattttttaatacatcgttctgatgtccttgtgggtttggccttggctatttcttgtttttgatggttgttcataggatcaggaagttatggccttgatgggtcgtttgagataaataagtaaattagctctaaccattgtcattttcttttgtcttaagattctaaaaacacagaaacagaacaaaaaaaatcaaatttctttttaagaaaaaagctttctaatggaaactaaaatgtgaaattgggtttaaaagacaaaaccggttaataggttttggtttggattggataaagaatatgatggtattttggtaaaataggcacttgagaaaaagagaagtgagaggagccatcttatctttgctatcgagtgggtaagaagaatcagaaaacagaaa

SEQ ID NO: 9596 - DNA, 3000 bp, Unknown
  misc_feature (1)..( 3000): cDNA_ID_2184111_gDNA_ID_1972159_Annot_ID_179556 3000 nt of promoter + ATG
aagataaaaaaaaaaaagaccttatcttggttatttgggtgcaatgttgaaccataaacacaacagaaatccacaggaggaagaacacttaagaagctcgaaagctcatctttttgagtagtttccattcagacaaaaataacccttgtaatgtattcaactgggcagacctattcagatgaagaaacgtaataaaaaggttgcttctgatagattggtcaaatttgatttcgagtaatctaattaaagtttctacaattaagttcatgatcatttgatcattttgatttcagattgacacaaaccttggaaaaaaggagaggaacgaagccagaggaggaattaggaagcgttagttgatttaagaggggaattgaagaagcttacctgcgactgcgagtgaaggcggcgaagagcgaggaagaacaacaaacgccgtgaagctagcttttttgggtttgggccaaacgagattagtttctaacagatgtttttccggacccggaccggtaatacccacgatccgcttaattatttggtccctgtctagctctaaaatcccggtgcaaacgaaccggcaaaaccaacgacctagcggttcggtattttgtttctgaaatctgaaccctccgatttgttcttctttttttttttctttttataatgcaaacaattgatgaaaaaatatattatggtccgaatggtaacctcggtttttaatatgtgagaaaagtggtataacattgcagtacagttcaattacggtacgtgcgagaaaaatatatttgcgggacaaatatggtttgtacaaaataagcggtacagaataatgtttgattgatgaaaaaattatttgcggtgcggattataaattatatatatatatatatattaataattaattattatttttgtgttaataaataagcaataacatatatttataaattattaatacataaataaatcaaaatatacatttttaaagtttaacatacatattattaaattcgttgaatagtttcatcataaaaaattgaaaaaaaaatcataattttttactagtaaattgattatagaacttatataagcttatagtggataataattgtcaaaatttctataagtattatgatatttctatttcttgtaattacattttcttagattttaattaaataaaaagaataaaactataattattgcatatatatatatatatatatatatatatatatatatatattaaagtccattagttaagcaaattgttatgtcctacgtatatttttttcttttatgcactaggtaactagtgattctgatgcacacatatactctctttttttgtacatatatttaaatggggaagctaatggaaaaaaaattaaaatttgcttaagtaatggagtaataaacgagggatgtgtgtatggaagaggcaaaggctgagaaacttttggttgggacgtaggacataacaatttgcttaagtaatggagtaatgaacgatttttttgttggaatgcggttttgagcaaaaacactaggtaaatgatttttcttcttttgaaaagcattccagtgtattgtttttaggacaaaattgcaaacttttttcttttttttttcgaaaaacgcaaatttgttaaaagtattgattggtaactgtattgtagttttaataaaaaaacaagaaaacgccttttgtatgtttcttaatcacagtgtatgaatggtgacatagaccgcccccaaaaccgtaccgtaactgtaacagtataaaaaatctctatatatacatatatatctatgtatttttgttattatttgaaccgtcccatactttttccgtatcacaaaatacagtcatcattcgaaccgcaaaactatatatagtatttcggtttttgaattcaaaatgaaggagaagaggaataggcagattaatataatttcgttatttctttttaatttcctatcttcaatttttcctcacccactgaatttgactatgccattaaaaatgtgtatactaatcatcataccgtcaataaatagagtttgtgggaaacacacgacagacacgtcatcagctctcgacggcgcgtttccatgcctttattatccttcacgttgaccccacatgcccctgttttttttttttggtgttctacggtatatttttgtgaaaatgttacttttcatctactcgataaaattcttaaacagatagtacaactttttacccgattaatctgtagaaaatacaatgttatttacactcaacaaacatttccattaatagaactttacccgatttaaaccactcttccactcgattaatattattattttattaattaaagatacgatgacgtgtccatgagagatgagctttagtggcacgcaacgtaagagaagaagacaaaagtaaaaaagagaaaggcacatgtcgaactcacgtgtccacttaaacgcaccaccttcttctgtgctctccacgcgcctccacacgccctcctcaacttcggaccttcttcctccaaaaaaaacaatttcactcttcattttctcagattctcttattatttcttctactcgtttcgaatcctaatcgtctacagtttccgacgagattctcaccggagaaagaaaggtagttcttttctctgaatctgttgtgttgagaacttagccgtaatttttgagaattattcttcactatttgatttgacaagaatatgggtaataaagacagaatctaaaacacttgcttcagtttttgaggaatcaaaaatcacacgaaagttttttttttttttctgctcctatgtttcttggtgcgtttgtgtttatttgacattaggagtgattgattgattataaagatgaatgatttgttagattcattaagatcactgttctttttgattaatcatcttatgtctaaattttaggtgacttgacagagaatcttgttctgtaataaaagcaaag

SEQ ID NO: 9597 - DNA, 3000 bp, Unknown; identical to SEQ ID NO: 4569
  misc_feature (1)..( 3000): cDNA_ID_2184119_gDNA_ID_1972159_Annot_ID_179562 3000 nt of promoter + ATG

SEQ ID NO: 9598 - DNA, 3000 bp, Unknown
  misc_feature (1)..( 3000): cDNA_ID_3042574_gDNA_ID_1972159_Annot_ID_179558 3000 nt of promoter + ATG
tccgtagatttgaatgaacaattgctcgagtgtgttgtgatattttgaatgtgattgtgatatctaactgtgaacatgtttctttgttgcagaactgaatcaacagaacagtgggaaagcttctatactatgcgaagctactcgattcttgaaggacgtgtttggtcaaattgagtctcttagaaaggagcatgcttctctcctatctgaatctagctatgtaagtcaatttctatatgcacattgattgtgtttatgtattctgtgacgtgaatcaacaactaagacgaatgttgcttcaagaagttacttcatctttgtatttttctaaatggtcttgttgatggaaactggtgttgtgtgtaggtaaccacagagaagaatgagctcaaggaagaaacatcagtgcttgagactgagatttcgaaactacaaaacgagattgaagctagagcgaatcagtcgaaacctgacttgaacacctctcctgcacccgagtaccatcatcatcattatcaacaacaacatcctgaacgtgtatctcagttcccaggacttcccattttccaaggccccggctttcaacaatctgctacaactcttcatcctcctgcaacagttcttgtccttccaatacaacctgatccccagacacaagatatctcagaaatgactcaagcgcagcagcctttgatgtttaatagctcaaatgtgagtaagccatgtccaaggtatgctagcgcggctgactcgtggtcttctcggctacttggagagcggctgaaagccagtgaatgaggtcttgaacggctccacatggagtagcaacgcaagttataagacatggcaacttatgaaggactctggttttgtattttttaatacatcgttctgatgtccttgtgggtttggccttggctatttcttgtttttgatggttgttcataggatcaggaagttatggccttgatgggtcgtttgagataaataagtaaattagctctaaccattgtcattttcttttgtcttaagattctaaaaacacagaaacagaacaaaaaaaatcaaatttctttttaagaaaaaagctttctaatggaaactaaaatgtgaaattgggtttaaaagacaaaaccggttaataggttttggtttggattggataaagaatatgatggtattttggtaaaataggcacttgagaaaaagagaagtgagaggagccatcttatctttgctatcgagtgggtaagaagaatcagaaaacagaaaatggcgaattcactatgcttcttctcttctcctcctaccttttgcttccaatctccaagcaaaaaccctaaaccttctcacttcttctcaactaatgataacacctcttccttggtacagaagagagaactgcttcagacttcaagatcccaaagttttgaagttaaggttagaattttcccaaactcttctcttctctataaaatttgcttacttcattgaccatttcgttaatgcaaaatctcattctgtggtatcaataggccgcaaacaataatcctcagggcactaaaccaaacagtttagtttgtgcaaattgtgaaggggaaggtaagttcttacctgttttataattctcttagttttctactcctgaattggttagtaatttgataaagatgttttttcaaaggttgtgtggcatgttctcaatgcaaaggaggtggtgtgaatttgattgatcatttcaatggtcagtttaaagctggtgcactctgttggctttgcaggtttgctacatcttatattctttcttctaattcttccttctccacaacacatacataaactcattacttaatatatatttttacatttcttgtgggcagaggtaaaaaggaggtgttgtgtggggactgcaatggagctggtttcattggtgggttcttgagcaccttcgatgagtagtagaaataagcttcttccaagaagactggatttgattacatggactcaaaaaacactcttttataaaccttagaagaagtaaatctttctctctatcaatgctcttctttaccaaaaacatgtattactatttgttattgcacaccaaacttttgttgtatttttgtttttcagattcttctctctctctctctcgttttttgtcttctacaaattgctaaaagtctatagcacctctatggtagtcttgttgatggcttgaaatgttgaatggtttagagaagaattaatcaaagttttgttctattcatttacattgaaagagaatgttttatatcatcctagtatctatctatatgatattagaatttttattttattttgatatatttgataaaataagatggataaaactgaaaaaacattgcacctgaaaaaaggagaagaaatggaaacaactgtaaataacagataaacgcatctgagaccaacaaaaggagaagacacagaccttttttctcttatctgttgttgttgttgtcgtcgtcgctgggtcagaatcttgttgttatgtttttctttattctctcgctccacgtttcaaatccaacacaaagatctgtctgattctcgggagagtcaagtcagaaacctaacgagggatattagttcgtctaaattgctccaagctcaacatatgtttgttccgtaatttcaataggattcgatttgttccacaaaaatatattttcgcattgtggcgtgcggaacaaggaactaggtgcgtttctctatgatttttgatcatcaatcctgttttgtgtaatccgcattgtagatgatttggttatttctatatttcaagggaaaaatgatgaatgcaaatgcgattccataggagaaagcagaagtagttattagacgtcttgatgaggttttcgattcgaaagcttaggtaaagaacctctttggatatcaaaggcaaaaggggttttattatatggggcgagcattgggattatctggtgctcaaaacttgga

SEQ ID NO: 9599 - DNA, 3000 bp, Unknown
  misc_feature (1)..( 3000): cDNA_ID_2109463_gDNA_ID_1972159_Annot_ID_179550 3000 nt of promoter + ATG
tgttctagaaactattaggaaacatcggagaactttcaagatcttgatccagagaaacaaacgaaagtcgaaaccctagctagctagaccttaaagattcagagatattatatatattacaccactcgacaatttagtcaaaatagtatttgtgatagatgacagtaaatagtatttactgctataatttatcaaagctatgggtgacttttttttttccttttcttgcatcttgaaaatttgtgtacattaggcattagccattaaggtaattactgttaaaagttaaaactacggtaaatatttttgaacttacgtgtactattactgtactctatttatttcacaaaaatgtgattttatatatttaatttttttttgtttaaatgtcatcttaaggtttacaaatgaatttattccaaaacaaatatgaagctaagaaaatttgaattttctatacttgtccaaaatttggtttgagtctatataagcacagtttagttaattgtatactgacgccaaaaggaaattaattgtaaaaagatgtatacaattttgtttttagctaaggattctctcttcttggtttattcacgttgttacccaaaagttctgacttagtttctatgcctttctttaccctctaaaaaatgcaaagcaatcaatattactcatcggaatattactaaggagttttttgggttaaccaacccctacaaagattttgggtgaacatggacatatattggctgagagtaaaattgcttccctaatcttgtaactaaacgaaacgttggtttaaaactcgcatactaataacttttagttgccaattcacttgatgaatgagtgcactcaattgcttatatcgaagcatatatactatattaatacaattttttttttctttttgctaagaatatcattattttataaaaaatgtacttaggtctacaataattgaaatgtagacctaaaatgttgaaaatattttcttatcttcaaataccttaattcttatataaaaagaaatcgacgcatagcatgatactcagcctcggtaaaattaaaagcataatcttaaccttaagaaccagacaagaagttttctgttgaattctaatcaatattataaacgataccaacaacgtaaaataatttcgaaatatacaattcaatttctgatattcagtattacaatataactagttatactttaacaacaaataaatataactagttagaggtgtctatgtgacgattttagtcaaaattattaataccatcatcctcgggacatgggttacgtaatacaaaaagacgtggcgtatggggtttcaacctattttgttcaatgaagtctctacggtccgttgaatttgtatctattgtacgtagtatcttcagacgattttttcatattgtattatataatatttatgttaattatttagatacgtataatattatttcctatccaatttaaaagctcaatacacaacgacgacgcgctttgcaacattcctctcgtttcttgtaaagtttttgaaatccttaaactgatttttaaaccaattcttagtgtatgagattacaatcattattgttttacaaaaaaaaagtttatcgatctaaatataccaacaagtccaacatcaccaaaagatctatatgtgtggacattttccttattgggaatgtggggatatgtgtttcgattatcttttatcaaccgttcaattcaattacctacaaaagctcacaagtcacacctgacaccactaattaacatttttacatgttcgactaaattcgcatcaattcaaatttaacttcttttttttcttcttttaaataataaattttgctacttattctgtgttttgttgatgtctatatttgattgttcatgagaatttgacgggattgaaaccaaaatatttggtttgattttagttaagttcactcaattttgatatatgctaagtcgacttattaagtggttactagttttatatattttgagatcatgtaatagttttcatatgatatgtataccaatttgatcacaacataactcacaaaatatcaatatttttagagagacagataattagtttaaattccggttggttctcaataacgcaggaaggacattgtaaaatcatgccacatatatgcatgcaagtggaaaatccaaatttacaaattcatattatgaaaatccttttattgtttaattcatgtatgcttttccaaatgtataattagaaggtttaattacataaatagaagttatatactcatttcactctcattgtggacccatgcataaatgcaatcaaagtctttgaagtctaaacccaatcaaattgatgaacacctaataaaatgatacatgcacatatgttctcgtgtggagacaaaattaagggtttatttgcgataatatgaaatgactaattacaaagagaaaatagtaggctaattttagagagagaaagcatggagtaatggtggagagagagagagaggaggctgactttggagagcaagagagtaaatgcatttggctgtccatgttgactctttgatagcaaaaccccactcttcattattgttacttttaactctattattattgctactaattcactcttcagcttaaacctctctctctctctctctctctctctctctctctctctctctctctctctctctctctctctctctctctctctctctttggctgtataaatatacacaagctctctctccacatcttcagacaaaaccaaccaccacttgtacctctttgtcttaagtactctttaaccctacaatttcctaagctctcaagccacaaaaaaccacaaaccgttcttcaccaatatatatatctgatcatcatcaaagtccttctctctgctcataccacaaaccgttccattcttcccctaatcacaaagtgatatttacatagagaagatagagatg

SEQ ID NO: 9600 - DNA, 3000 bp, Unknown
  misc_feature (1)..( 3000): cDNA_ID_3042598_gDNA_ID_1972159_Annot_ID_179547 3000 nt of
tgaccgacccgcgcattctggcaatggcggctgcagaacgtcatttcttggaagcagactatgatgaatattctgagaataactcaagcggagctgccttttgtcgctctgctgctctcatcgtaagctctcagttgagaagatgttttcttaccatgatttaatactaaatgcctgcactctaacttctgtaatggcagctaatggcacttttactgttacgagatgcgctaaatctcacaacgaacccagacgacgaggacgatccaactgccttcttctctgtatgttcatctttacttactttcactacttctttataccgtcactgactacacttgtttgtttcaatagctattccttcttcgtgctgctggttttctcctcccatgttacatcatggcatgggccatcggtatactacaacgtcgaagacaaagacaggtgtgtacacggaaaaaactctctgtatcaaactctgttatattgtaagatactcaatctaacagatgagacaatgtactgcttttgtttgtaatcaggaagcagcggctctagctgccgcagaagttactttcatgatacacggtggtgggcctcaacgcagaggactgcactttgctgtagcaccgcagccgccgatatccaatgtcccaacaccagtttgatccttaccggcaatgattctccgttaaggctattagataaaaccttgaacttggttataagaactctacctacttatgcttcttcaaatgttattatcttcctcttatgtttgtgttatctgaatctgttaaatgtctacttcggctctcaaatgttttacaaagagctctcacggtatactatgtacagtcttattattatcatatgattatataagtattatatttttatttaccttttataaatttatttggtcaaccaaacataaataaatgtccaatgcaatattggagggtcaattacaagtcttgtcgtttttttcttcacaatgactctttatgaactccataaccgttaaaaccaattgactttgataattggtataacaatgatcagctccttccacaatctgtagctcgtggttcggtattatctttgcaaactcctttgcatcttccactggtactgtctcgtcacccgatccatggaccgtcaagaccctaccattacatcaatccgggcttgtttataatgtatctcaaacaaacgatatgagttggtgaacttattgaatctcacctgcattctttgtcaatcttgaggcaagcttcatgcatatctgtgtttaaccggtccatcaaactctcctcggtaacacggtaaccagaatctcctgtaacaaaccagtacattgatagtaacactaaagttctgataacggtgcatgaaaagcgaagagcgataacaataccatctttaacatcgatgtatccttgttgcttaattctttccaaaaaatcttcaccaagacgttctcctatgcctttcttcagatcataacgtcccgagagattgatcacattggggatatcgtgatacttggaggcatagaggaggaccacatcacctcctatgcaatgtcaaagtataagttgagtttcttgcaatgtaagattcaccccttttgaaaatccgttgctcgaagcagaaagatcggtactacttacctttactgtgaccgagaattatagtaacaacacggttcaagttagagaagtattggataacagaatgtagatcatcagcttcgtaattgtagttaccataatagaaactgccttcactctctctgaaagaatgaaagcaccacaaccccagagtcaaaacaaagaccaacttattcaagataatgcaagaaagaaaaacatacccattcccggagaaatcaaaacggaaagcactaatcccttctctctctatagcaacagccacatttttcataatttcgaagttctggatacattcataggccaaagacaaaacaaagttaatgcatgcaataactcctaccaacatctgcaaccctactatgtcatgaggactccactttctttgtgtacaaaataaatattcccaaacaacgaagaagcagagctactaatgggaaaacattataatcactataaaaaaagtgaactaaaattatgcacaaatctttggtaagatgttggattgagaaatggacattcaagtaagtgagaaaaaagcagaaccgaaactaaccttgtttgatcgaaagccatgacacaagactacaatttctgtagaaccagtttcatgaagcagacccaccaggttctcattgtggctgttcagaatcacaatcttctgttgtgtacttccctgcgatgaatccattctcaacttttttactttgtttgttgcaggaaatttgggtctccttaatggtaaggcgtgcgttgagaaagataatgtgggacaaccacatgatctctcattgatcatattttggaatttatatatatatatatatgatttctatttaattttctttgtcactcattattttttctctcttttttctagtgtttaaaaaaacttagtttttaccaatcaaacctaccatctagtaaatgtaaatgaataattggtcaatttctacatcatctcctgactcctgttacatgtttataaataaaatagttcatttgctagttgctacaaaagtgccaaaatatttcatcctgtagccaccgcttgatgtctgaagaaaagtcataaagattcgtaaaatgtctttgtttttttgttcctttttagataatgggatcccataaaacgtgtctttgttgacgacttgacttaaattttcgaaaagtggcagtttaatatccctattttttatttcaagttgcattatcactacaggcattttaatttgcaattgcttcgcctcttatatgttcattttcctgcaaaacatgagaagcatcaaaagctttttaaccaccatttgtttttttggaaagc

SEQ ID NO: 9601 - DNA, 3000 bp, Unknown
  misc_feature (1)..( 3000): cDNA_ID_2184073_gDNA_ID_1972159_Annot_ID_179545 3000 nt of promoter + ATG
aaattagtcttctttatatagccgatgaaaataccacgtgactccaacgaccaaaataccaaagtccattagtataaagaaaaacatttatttacaaaaaaaaaacgatggatatctcaaaaataaaatgaccaaactacccaaccattatccctatatgtataacacacagcctcttctttttcacccacaaacaacataacatggcttccaccaaaatttccttagtctttttcctttgcctcgtaggtccttgtataggcgctggaaccacaagcgctgccgaatcagtcagtagcattgtgacacaaggtttctttaacaacattatcaaccaagccggtaatggctgcacgagaaaaagattcaacacccgcgactctttcattgacgctgctaataattttccaaactttgcaagttccgttacaagacgtgaaattgcaagcatgtttgctcatgtcactcacgagaccggacgtaagatttttttttccttttctctatgtttttatatattattaaaaacttattagttttgtttgtacatctactctagtcatgagtaaattattctcaaaacttttctctattttaaagtaaaaaatagagatttacattggagattgtctaagggttgaggtgtttcattattatttgagattatcaaatggtgattataatagttttattagagcacgttaagattaaacctgtaaaactgaacatttgacttaagctgattaaaaatcataacctttttttccatgtgatctctatgtcgtatagacttctgctacatagaagaaataaagaaaaggtcacgtggtaggtgcgacgagaacgtagagcagagaccatgtccatcacagagtaaaggtcactccggtcgtggtcatcagagtctcggtctcgaccttctacgccagcctgagcttgtgggtagcaacccaactgtagctttcaggaagggtttgtcgttttggattaatagcgtaaggccggtgctgaaccaaggatttggagccactataagagccatcaatgggatggaatgtaacggtgggaattcaggtgcggtcaaggcaaggattgggtactatagagactattgtagacagcttggtgtggatcctggtcataaccttagttgctaaaacgttttacaaacgcatacacgtgacgtgtcacgtgataatgcggaataagaagttacatttcaaacagggcaaggattcagaatcgcaagtacatgaattaacattctgtaactgttaattgtatcaagttgtgttaatatataagagctaggagaattggtctttcttatgtctagctagtaaccatctatgtttgtagctaggagctacttgttgtttctagttgtttgtctatctaagccaatcatacaaaatctatgcttattcacaaacatggagatcgatgttgcaaaattcatcatttcgattttcacaaacaattaaaatcacgctaccatggctcgcatgcactccatccgccgttggcatctccctccgagcagatcttgttgtcgttctcgtttcccttcaatagaggacttgattcctcatggtcttcgcggctatcttctcccgctatagattaaatacattctcatggtaggctaatgtatttgattgttggtcttccttatgtttattagtaacgttttgacgcctcctctaatcgtcttctcgggcatggggatgaccctttttggccaaatctagtagcactcgtctcaataaaaaaattgcacaaacaatcaaatacattagcctacccgagattctttcagatgcttagaaaccgatttgaatagtcatgttctaaccaaaacaaaaacatattatctttgacaaatcctaaaagtataaatggttcattcccacggtatttcaactcctctaaaccagtattagaaccatatgaatcaaatcgtataatcaagtatccacgaaacatcataatactaagctacatatataccttgatttatcagagttactattgtcattttgcaagtttcagatttgtctttgagaaaattgtcttactttgttgatattgagattatataaaccggataagcgaccttgattttacatgattttgctgttttaaaaaaaaacctaaccggtttcatttaattccgcatgttattaaaaaagagggaaaagtcaaagagtcaaacttattaggaacgtctagaattttccaacttggtccattttgcctactctattggaaaaaggaaacaaatatgtatattattatatgtcacataaattcttttccaacgaaacttcaataatttaccatatggaccaattttaattaattcctgtatcagatttaggtgaaacaatcttaataaacatttaaactcaaaaccaaaaaactgtaacacatttttccgtcaaaattgacgagaagaacaagcggctttctctactagccgttaaacagacgttatcttaccaaactccaaagctctggttcgtacaaacccgaacctcatccaatgcttatacacgtatgtatgtatacatttcttttagatattttataaaaacacgctcccaaaaatatttaatagagttgaattatgtttatctgattattattcagaccgaacacgaagaaacaaaaattcaacaaaaacaaagacaaagtttcgttttagcttaaaggttccagatttcgaaaaagctctctttttttttctccttcgtgttacacaaccatttctaggtaatgttttgatttcgaaagagctctctttataatgattttcatttgtgattctggaaatcaaatcgttctattgaaattggggattttttttcgattagggtttgtttggttcctgttaaattatcaaacgttcctgcatttaattgatttttggtcttctaatattttggagcttcttcttgttgttacagatatcattttggtgattaagttatttaagaa

SEQ ID NO: 9602 - DNA, 3000 bp, Unknown
  misc_feature (1)..( 3000): cDNA_ID_3042605_gDNA_ID_1972159_Annot_ID_179540 3000 nt of promoter + ATG
aaaaaaacaaaaacaaaaatataagtgtatcttcgaatttatttattaaagtaagaaagattttacatacatacaaattgtttctctttattggttgtattactgtaagatatatttttctgttaaatatttgatttcatgaaatccagaatccatatcaccagatggtggatgaatttcaatctatagtgtaccatgttatcaaaaaagaaaaagaaaaaaacagtatatgttccacaaattaggcattttataattgccatagttgatattcctaacattagtgaacaaatatgattagtcaattgaaaattgaacaaagcaaattaaacgtgaattctaaagcactagacacaaagcttcgtttgagtcgacccatttgttagtgtaatgactaactataaaatagacacgcgtaattaagtgatcatgcccattggctcccacaattccaccactttaaacagcatccataatctacaagtttttcttattgatcatttacatatgcaaatgattcatacttcaaggaagagaacattctactaaagcaatctccactgactttcaacattgactataatcttatcttttcttttaaaacaatatatagtatgtttaatgtacaaacactaaaaaccctacggataaattaggattttgcttatgtatgatggagtatacacacattttttcatattgtaattataattagtatcatatattatatcgaacaataaacgtggaaaagtgaaaccgcgtcgattacttggtgcttcgtatatgttcttttaaagtttagacattttggtgggctgatacaaaatactatagcagtccaaatcagattaaaaaaacattccatgtttaatttagtgatgaaagccccaccacgacaatattttaaaatgcgcaaataggaagaaaagaactataaaggaaaccaccacaaagacaaaactcaaaacaagttggaggaaaaagagagacaaaactcacaacaacatcaaggttttaactaaatttaattttgtcataactattcatatatagtcaaatggctaacaaagctctcattcatctcctcgtcatcttcttcttggctctatcacacatcttcttcttcccttcccatgcttcgagtaaaatcttcatctctcttaaaatcgtattttatgtatttacatcatatgttttaacttatatcatctatattttgtacgtatacaggacttgggagtttgatggagaagccaaaaattgttcgacctcaacaagatacactaatggttagttatttagctatttatctgtgttcttgagaggttaaaattaggttattaaagattttaatttggttttgttttacataatcaatgctattaggatgtgaagaaggaggtcgaagaaaggatggtgatggagttaaacgactatccaggttcgggtgcaaacaatcgccatttgccacgacaacgaggctgcgtcgttgattgctgatcgatatataaaatgacgaaaaacgaattaatatgattatagctagtatcgataaattgatgtataagtaagatacgtctaattatttttcagaatatgaattgagttagtttaacattggagtctatagacgattagactatatacttgtctactctacggagaaaagcatagttttatttatgtagttcagttggtaaatcaatagatgctattgttaataaaccatatatatggatgatatgtacaagcctttaatttcaatttggtgataggacataattggtttactgccaactaatagacattagactgacgtaaagtttttcaaaataaagataagtcactactctccttttcacttatatttaccaaaaattgagttagttaacttcttattcaaatttatattttgctgatatatcttatatactcgtcatgttttacgccacggatcaatataaaataaagatttaaaactaaaaactgatgtggaaaaagagtggtttaataaagtaaaacaacaacataattgaagttttatgcaacaccctaagtgtggactagataggaacatagaggacaggcaaaaaaagaagaggtaattaacatacctaccttggagtacatgccactatgccagttgggtttgatttttaccctcgaaatattagtatgttaccgttcatctccgagtaggtgttgtgattttatagacgagcaaaaaacaaaagtggttcatgagttttgtcgggctctctccaaagagacaagattgggaaagaatactctatcttctcattcttgttacattgattttgttttattttgcataggcgatgcagtaaaactattaaatatatactcaaggtttcaattatcataactggtgtgattgttagagggttaaatttaagatttatataagatgtgattacataactcttgtattaaaagtgtttactgtatttgtatcactcacatgtaatcattcaaaaaaatactaagatgaagatatggtaaaacatttcaacatagaaaaagacacaatcgataacaaaatagaacagtacacttgacctaaaccaatgcggtaaacacacacacacttatatacatattgttaataattttgaagttatgctatacaacttattattttgtatatcaatacatattcaaatagcttaatatttaaagcgctatgatgtcaatttcaaatactgaaattattttcaaaactttgtcacttatattatcacttataaccattctatatatcttcccaccgcgaaatttataaccacacttttacaaactaaatttcatacattttccaaatagtattgtaataaacaaaatagtttaaaaataatgtaatttacaaaacaataaatttttaatataaaacatattgatcagcaaaaatgctggttgatgcataaaaaagactcaactacagaagaaatattcagcacacgatatcacaagaagaactcg

SEQ ID NO: 9603 - DNA, 3000 bp, Unknown
  misc_feature (1)..( 3000): cDNA_ID_1023528_gDNA_ID_1972159_Annot_ID_179534 3000 nt of promoter + ATG
taataaatgttttttatttgaatcaaaaactgatcatgggtttgaaactgaactaccacgaagagtctcaatatttctacatatcaaatattccaaagggtacttgggtcggtgaaagcaacaagataataaatttaaaggaaaacgttacaaggaaattgcatggaaatttccatgaattggaatccaagacaatgaaagatgctctcactcaattttcaactctattgtcttgtgttcttggatatgatgagaagttgattacatttattattcaactatcaaaatatatataaacatttgtttttttcttatatgacaagattaacttccatgtctccatttggttcagtccaaaaatttcaatttgattttgagatatatatatatatatatatatatatatatatatatatatatatatatactccacctattacttgaaaagccaaacattttcaagaacatatattaattttgaaatgaaaatacagattaattattaataacaagcattaagtttttattagtatgatcatcattaatgaaagcttgagtcgatggtagtttcttaggttttctcggtaggtataaaagtatgaatataatactttcaattgaattgcggtgagttttaaagtagcatttttctttcctttggtaagtttctcaacaatttacatggagactctttccgcagactttgtgagtaagatatgttttggtcttcgtatacttaactaggaattataaaataggaccaactcaacacacttattatccaacctttgaaaccaaagaagacaaataaaagcttcatagaaattttgtttatggtattccacacacataaatttagatcaatatggaggattcgtctcttcttagcccaatctctctcctcaccattgtcatcttcttattcattctcaatctcatgatgataattcaagacttctcttcttcttttccctttcgtttccatctcttcttctctaatgcctacattctcttcacctcaataagaaacaataagcaaaataccgagctcccaatcataaagaaagttgttgtcccaaatcgagcagatatcaaaacgtccgtggaagaagtcaaggcgataatcgatgactcggaagctttatacgaatgtttgattgaagaaggagaagagtacttgcttgagaagaatgagatgatgggtaaggagatagttaaagaggcgtttaggttatttgatgagaatcaggatgggtttatagatgaaaatgagttaaaacatgtgttgagtttgttaggatacgatgagtgtacaaagatggagtgtaggaagatggttaaggtttatgatgagaatagagatggaaaaattgatttttatgagtttgtgaagcttatagagaagagcttttcgtgaagtagattggaataataataatagttatgttgttggctaattatacgacttgtctaatatatttcttcttctttagtgggtcgtcctctaatgaactttattttcctctgacaaacttatttacgttgatatattcatgcttctctgaatttccaagaaagtgataatatatgacaacgtaaacttaaatttgtgatgaattttgcatggtgatttccagttaggtttggatatcgtctttatctataatattgaagggaaaaaagtatggaccataatcgaacaaataaacttaattttcaaaaaactacagttaaaaatagttttttgaattcacaagttctctctagtagactttgataagagtttttaatggatagaatttgtatttactttcacacttataataataaaagtgatcatacataatgtttatatagagcttgagactgctacatctagctagtttcctaatacactttttcaataataaaaagagaagagattaatttgttttttttttaaaaaggtcaagataatagtcaatctcatcatttgctccaaaattttagtgttaatcaaatgtgggattatataacagactacaatgtaaatagtaggattctacaaactcaaaaatatttgtaacagttttttcttttaaaatggctttcaaattttgaggccgaatcgatggcttatgtatcttgttttctggggtctggctagatcatctgttagcacactaaattttgtaatttcctacaaaatgcatgaagaatattcccaaaatatcttataaggatcttcagtatcttctaatccattataagatttgagttaacagtttaaaaggtaatctcaaatgtcactgtaactctgtaagattttgaaagatgaacatgatcttgaaaaagagagattaaagaaaaagatggatttaagttcttcaacactctctttcttcttttcttcttgggcctaaaacaacccaatatctcactcttcaaacgagcccgagattctcaaccttgacaagcccaaagtgaagatagttttttagataaatccaaattggttttatgttttacaagttacatacactcccctatcttgatgattaggaaaatcagactttagatttttggtttcccatatgccaattcagttccatttgattggttgacgagaatcctcactccactctaatatttttaaatccatttaattgacacgtgtaacaacaatggacccgacactatcttattccgaccaatctcaaacaacattaaaatcctcttaagatacgcttcgaagataaaccgataagcctgtatctcctctcaaaccaatctcctccgtcaaatcaaccacgtcatctaatccaacggtagatactcagtcatcaaaccacagccacaaaactcgtttcaagaaacgaataaacttacaaaatcccctccaagtcttatttcttcacaaccatctctgaactcatctttcaatctctcttgattccaatccattcttcttcaagtgccgggttctcgggtcggatcttctaagtctagctagggataatg

SEQ ID NO: 9604 - DNA, 3000 bp, Unknown
  misc_feature (1)..( 3000): cDNA_ID_2184050_gDNA_ID_1972159_Annot_ID_179536 3000 nt of promoter + ATG
ggctcgtttgaagagtgagatattgggttgttttaggcccaagaagaaaagaagaaagagagtgttgaagaacttaaatccatctttttctttaatctctctttttcaagatcatgttcatctttcaaaatcttacagagttacagtgacatttgagattaccttttaaactgttaactcaaatcttataatggattagaagatactgaagatccttataagatattttgggaatattcttcatgcattttgtaggaaattacaaaatttagtgtgctaacagatgatctagccagaccccagaaaacaagatacataagccatcgattcggcctcaaaatttgaaagccattttaaaagaaaaaactgttacaaatatttttgagtttgtagaatcctactatttacattgtagtctgttatataatcccacatttgattaacactaaaattttggagcaaatgatgagattgactattatcttgacctttttaaaaaaaaaacaaattaatctcttctctttttattattgaaaaagtgtattaggaaactagctagatgtagcagtctcaagctctatataaacattatgtatgatcacttttattattataagtgtgaaagtaaatacaaattctatccattaaaaactcttatcaaagtctactagagagaacttgtgaattcaaaaaactatttttaactgtagttttttgaaaattaagtttatttgttcgattatggtccatacttttttcccttcaatattatagataaagacgatatccaaacctaactggaaatcaccatgcaaaattcatcacaaatttaagtttacgttgtcatatattatcactttcttggaaattcagagaagcatgaatatatcaacgtaaataagtttgtcagaggaaaataaagttcattagaggacgacccactaaagaagaagaaatatattagacaagtcgtataattagccaacaacataactattattattattccaatctacttcacgaaaagctcttctctataagcttcacaaactcataaaaatcaatttttccatctctattctcatcataaaccttaaccatcttcctacactccatctttgtacactcatcgtatcctaacaaactcaacacatgttttaactcattttcatctataaacccatcctgattctcatcaaataacctaaacgcctctttaactatctccttacccatcatctcattcttctcaagcaagtactcttctccttcttcaatcaaacattcgtataaagcttccgagtcatcgattatcgccttgacttcttccacggacgttttgatatctgctcgatttgggacaacaactttctttatgattgggagctcggtattttgcttattgtttcttattgaggtgaagagaatgtaggcattagagaagaagagatggaaacgaaagggaaaagaagaagagaagtcttgaattatcatcatgagattgagaatgaataagaagatgacaatggtgaggagagagattgggctaagaagagacgaatcctccatattgatctaaatttatgtgtgtggaataccataaacaaaatttctatgaagcttttatttgtcttctttggtttcaaaggttggataataagtgtgttgagttggtcctattttataattcctagttaagtatacgaagaccaaaacatatcttactcacaaagtctgcggaaagagtctccatgtaaattgttgagaaacttaccaaaggaaagaaaaatgctactttaaaactcaccgcaattcaattgaaagtattatattcatacttttatacctaccgagaaaacctaagaaactaccatcgactcaagctttcattaatgatgatcatactaataaaaacttaatgcttgttattaataattaatctgtattttcatttcaaaattaatatatgttcttgaaaatgtttggcttttcaagtaataggtggagtatatatatatatatatatatatatatatatatatatatatatatatatctcaaaatcaaattgaaatttttggactgaaccaaatggagacatggaagttaatcttgtcatataagaaaaaaacaaatgtttatatatattttgatagttgaataataaatgtaatcaacttctcatcatatccaagaacacaagacaatagagttgaaaattgagtgagagcatctttcattgtcttggattccaattcatggaaatttccatgcaatttccttgtaacgttttcctttaaatttattatcttgttgctttcaccgacccaagtaccctttggaatatttgatatgtagaaatattgagactcttcgtggtagttcagtttcaaacccatgatcagtttttgattcaaataaaaaacatttattattatagttgaatgatttgaaaacctcggaatctaaagttcacgtggtaattttcttaatcgtttttttatggagtataataggcttaaaaaattattaactaaataataatgtaataggcgctagactaattcaatttggttactattgaatcaaaatataaatagaaggctagcaaattaaattgaattaaatataaataagtttgaaaatattgaaatctacatctagccatctaaaacatagatgagaagtttcagttgcgataggttttagtacattaaattaaattcgaactaaccttataatttgttctattatatagttttgactggttacgaatatcgaaatggtttaaacaagaacatttggaagaaaaaaaaacatgagttgtaaaatatattaatcccaagagcaatgacaaagttttgtacttttcatgtctacttcttatctttgtagatagaaaattacgaatatcgaaataaccatcttgaatatacacgtatgagtaacgagcccatatatttatgttcgtatgtttatgggcctaatgagattaagaga

SEQ ID NO: 9605 - DNA, 3000 bp, Unknown
  misc_feature (1)..( 3000): cDNA_ID_3042902_gDNA_ID_1972160_Annot_ID_179577 3000 nt of promoter + ATG
agttatgagtcttcccactttgaccaactaaaccgttactaatatttccgttattagtaacggttccgttactattattaacatcgacactaaccggtttccggtgacttgttttgtgtccacctaacgcttggtaagacgggaaagatttgccacagacggaacacttgtaatctttctgatgatcggacagtggagaaagagagtgatgatccgacggtggagagtgatgatcggaggagccacgagcgagcataaggaggcaaagagcgagatactcttcttcagaaggaggagggtttggttgatctatacggtgacgttttgtacgttttcttttggtccatgattcgaggttttcgggctcggtttcgtcgaggcaacggaggaaaggaggaggagcggtggttgtggtggtggaggtgggagaattgagagtgtcgagagccatatggtggtgatctttgattagaagatgattgagaattgagagagatgattataaaaaaaagaaaaaaaaagagaaagagagagtgaagtgagctggtgagggagtgagatgagatgtgagcacgtctttgttttaattttttttgggtgattaagagtgggaacgtgggctctaagtgatcaagtggtgcttcttctcttatttctccatatccattaatatctcatcctattttcatcttttatatatttttctttaacataaatttatttatataattgaactaaattctttccaaatttccaatatatcaaaaatgaacgaaaaaagaatattagagtttgatgcagtcgatgtagaatcaatgaaatagagatgaattttgaatgatcaataatgataaatttgtgaaaatattataaaaaaataaagtaaatcaaagaaaaactatcttttcagtggcaccttgtccaataatgcgtaatctaagaatgcctattttaaaaattatgtgttgtgggggaagtcatgtaactataaatgtattagagtctaacatcaaactttattggaaagccgaaaaaagtaacacattcacaaagatggaaaactaaagtacttatcaaagttgtgctaattttgtcgataggtagcagtccaaatcatgagctgatcagcttattcaatatcttcttcttcctctttttttctattggcaacaatttattatccgaattgtcaatttcaatacactttattcaaaaataaacatatatccacacataattttacattagaccttttttttttggttataataatgattgtaaaagtaaaaggaacttttacatttgtagtgtagtctatagtattaatgtattattattatattgagaggataatttagtttactattaaaagcaagaaactaaaaaaacaacaaggcataaaatgcgacaggtgttgatgaagatttgagttgccatatcttcggagttagtttaaaggttaggccaggttagcgaatcttttcatggcgttgggtcataactgagttgtcaatttttcattggttggaagcaggttagattctttcgttggggacacgtggttagttatgtatggtggaaatggtacgatttggtggagacttaaaaaagacggtacgagacactttcttaaggctcaggcgacatggttgtgagtgacaccacccacttcataagcaactaattttatttattttcttttgtattttagtttacaaccatcaagtttaggatctcatagtttagttgcttaaaaaaacttcgtcttatatacttgacattacttgcttatttatttccttcaagtttttatatacagatcatgatttattatagatttttataagaaaaacaaaatctgaggagattaagagatgatatatgaataatggaggaatttaggtcctatatacaagaagttagttaagttttctttgcacaacaaaattaaaactcaaagtcaaatgagcttattaagatagaaataaactaacaacttgcatagctcatgaagagctttattgtgcaaagaaagtaaaaaaaaaaaggactttagattgtcaccaagattagtaatactttgattcaatcataaaatagggaagaaggagagctgcctctttaacaactctcttggttatatatcttaagagtcattacacatccttatatgaaaacataatcttgattgcaaaaccctacttacataggctttcagagtttagactagtaatggtactattgggctttgtagcttgctttaataataatagcatagagcataataacgagcaatgttattcatctttgaagttttatttgtcttgcatcataaaatacgttgacatatgcctagcaatcttttataaaatattgaaaatatattcccaaacatataaaatcctaaattcaaaagagcaacgtacatgtgagcaaagtatcgagttgttatgtagattcgaaaaacatagtttatatcattaatgaatacacaaactattccatcaatcatgcttcagtatttattcaatcatctcatctttttgttgggggcacaattcaatcatctcatcaaataatatttcacggcttcataatctgcatcgagaacttccaaatccacattaaaactaaccataagacacaaagaaaatggaaataacgcataatcaagaataattagtacaaagtgaaataaccacgtttgttgttaaagacttatcgatttaaataatgtaagcttaatggactcctgacattccaagcgtaatgttcttttacaaagtaaaaaaaaaaaattaaaagaagaaatggcttcgcccgggttcgaaccggagaccttcagtgtgttagactgacgtgataaccaactacaccacgaaaccttttgttgttacacgtccgttaatcattgattttaactattattgacttggacaattttactgccgtcactatctctatttggtttcctctctctcaaattctccgatcaccatg

SEQ ID NO: 9606 - DNA, 3000 bp, Unknown
  misc_feature (1)..( 3000): cDNA_ID_2184154_gDNA_ID_1972160_Annot_ID_179586 3000 nt of promoter + ATG
tgggtcatatcgtactatgattttggtgtaaaccaccaatttatctacactaaactgatacgattatcttttatgaaaatcaacaaaataataaacaaaagtttgctttatacaaatgtttagagttgtcttcttttttttagaaaaaaaagataaaaacatatggaataattgtttgcaggaattaaggtggattggccagaattaaatggagtaaagggacttgaagctaagagaataatcgaacatgacaatccaaaagtggtggttgttatcattcccgatgatgttgctgtactagccgtcaattgttgtaaccgtgtcattgtccgtgttcccgtcaacaactgtcccaatggtcctgtcagtaattttcctcacatcggatgagaaaactataatattcctcatgtcggataagaaaactatgttgttcttttacctagctatttcagttatatctttcgtttcaataatttccgataagtatttttattctctcagattaaaaaacttgtttgattatatcgtaatttatattatgaatgataaattgcttctaagttaacaacatttgcattttttatgcaactattcgaagtgtatcaagaaaacaaaaacgaaatatgatgcttattgaacaaattaagccgaaatatttttcaaaaaaattcttagatgaaaaatttggaaaatgcaccacttgttgcttgttgtgtttgaatatgttctcaaagataatgaaatgtgcaaagggctcatgcttgttgcttaatcatcctaccatcttactctaataacaaaatttagttatgtaatgtaactgagtaaaatgaaacaaaaacgagagaattcatgatagatagagaaatatggtgagaattcatgtaacccttgagcatcatccaaaagacttgaatcgtcaagacttgaagtctgtttttcctctgcgatcacaaggtacttgtgatttttactgtttttgaagtttccaaacacaagctgcttctggttatggaatctagatactctgaagaacacaaaagaccaatctaataaattcacttattactgaattagaaaggtgttttattttttaaaattatatggttattgggctacttcacccaaaatcaatttaatacaatataacgtataattaaacaagattaataatggatttagttaagaaaatgaggtcatatttgttattgcaaataattctcttagagtgtcaaaaatctgaaaacatacattcttaagaaacggagagagtaataaaacttctcatatatagaaatccataatttaaagtaatttcgacattgtaaaagaaatccatgtatgtaactatgtatatgaaaatgtattagtaaacaacaaaagagcacactggagacaccgaaacaaaattgaccgagacatctctatcgaatcatcattctgctgctttgacttgagctaaatagggatgagcttgtcatcaattcataaaaccatcacaatttagcagactatgagaaagaacccttgtttgagttacgttatatgatacttaccattgcttcttttgcagttaatctgtctttgtttattaaaatagtactcatcaacaactggtcattgtttaattgtttgtatatatagaacgttgatatttacgagttaaagtgggacacaaaaaaaatattaaatagagcaacgaatatttacaaaagaaaaagaaaaagttgatgttacgacttacgagtaagacagtctggagataggttcgagggagaaaaatgacagtaatttaatacgatttggccgaaaccaacgtcaaaagagtgtaagttggtcattttctaacagaaataaaccgtatgttggtctttcttttttcgataatcaagttggtcattctttaactagataatttttagttgtgtaagcatcttattctataaaacttttcactttaaagttaataatttatatgattgtggtatttatcaaaattgatacatgtatctatcaaatatacttatcaaatttctactgcttcatttcccatcaaactccttccagtctcatatacaaatttaactaactatatatttggaagaaatatataggatattttttcctattttctatatcaactgtttttcatagaaaagtcgtagggtatatatggttggacaaaattcctaccaatttcttctaagaactgtttttcgtagaaaagtcataagtatataatgaaaaactttttttactaaaagttttgtagaaaaattgctaagattttaccattttttcttgtagtatatatatatttatatgtctaaatagttttattttattttcttcataaaatatggaaaattaaataaaaatatttttacatatactaatttatatgtgtatatgtaaatttcttattgacttgttatccttactcaaaatagaaaactaacaatatatatatatatatatatatatatatatatatatatatatattgtgacattttaatataaatttttcagctcttaaccattgagataaaatgcacaaaactaaaaaatataatttattatgatgagatagatagttaaattgttttgtaagattgaatagttcaaaaccggtttataaagaaaaacttgtgtgcatgttaccatttacaattgaataaaacttaacatgtatttcttatacaggtgtatttagataggtcctaatctagttgttaatatatagaaaagttaatagctggtaattcttttatacaaatacaaaaaattggtacttgtttatatatatgtttgttttcgttgcctacttgccagtatttttaaatttcactctcccactaggcatcaaaagtcaaagctattgttttgtttatgaagaaaatatgaaagttgcataagccgaccttacattcatcctcaaaaatctctcatattaacaaaacttttactcaaagagcctctctcggcaaacactatg

SEQ ID NO: 9607 - DNA, 3000 bp, Unknown
  misc_feature (1)..( 3000): cDNA_ID_3042645_gDNA_ID_1972160_Annot_ID_179588 3000 nt of promoter + ATG
tgtgaataatccccacggtaagagtttgtggagaagatctcaagcgttcgatttaaaaggatcgacgagagagagcttgatggattgtttagcgttcgttgatcatcgagtcaagcattcaaatacacagaggattccctactatgcggcgcagatgataagaaaacagatgagcgccacgtgtattttctctggggttgtgtcgaatagtcgatgatctgacggttcaaaatcaaagttcgaaggaaggtgttgatgtgttaggcattaattgttgttaacaattcgttaattgtcttcaagttgagtgatgaattattaatttattagcgatagattgatgaaattgtgttgttttctttaatcaaaaactgatttggcgaaatcgtttttattttttcttctttttaatcgtcatttggatcgacaaaacatgatccataaccaaattcttacaatgagggtaatacgattatttggagtcgaactactcgactattggtacttcctagtagttggttatatcatttgttttgaacttttgattaaaaagttttagatattaattcgttaatttggttgtaccgtttttttcttttttgaatactaaaagttaataacttattatttcatggtgataagccaataatttacttggtacgattcaacaacagatcagattctgttataatcttattttatgggctgcttatttaaactgggcctaagccccataacaatattatttcttagattaacaacacttaaatcttattttatgggctcgttacaatgcgcctctatgtgtacgcgccttcgcctccacctagtgactggttgatcgtgactgcaaacgaagggtagttaaggtctgaggttctgtaatatatcagggccttgaggcaattgcctttttcgttagcttatagtcacggctctgggtgaaggcttgacatctacgatgattcatttgaatataactttcgctgttgaatttctattaagatataatttttaatattgtcacccgattttttatcgacgaacacggatggtaaaaaagtgtaccgagtagaggtaatggtgtgttagacaaaccactgctgggtttgaacaatgatgagacgacatcaaacttttttccgtttcctaaggttattgtagttggaaaaagacgatctacgatgtcagcgcctacactgatatacttcaaaaaaaccaataaaaacttaagctaacttaacaaaaataaataaaaactcaaaaaaattcatcaaagtaaataaaaatccttaaaatctagtcaaattaaaatttaaatcaaaaacaaaacaaacttcttttatcacatggtttaccaactctgtttagtatttaaagttcaaatcatcttgaaaacattaccacaaaatatttgacatttcttccacattttgtttttgagataatgttcttgataatgagataattaagcatgtacaaaaaatttttgaagcgggatttcaaactttatattactgggtttgtaatgaagtttggtaccagatgtcatttcataattttaccatttcattttttttttttcaatttttcaattcaaatatttatttctatgtttatgcaaataatttccttatgttttgcttatattttgcttatgtttctctttgtttttctcaacttgtttttctcctttcttatttcagcatttacaataagtcaaataactataacatcgttggagttgttattaaaaaaaaaaaaatcactaaattctttgaaaacttaatacgatgtttcaaaaagatattctacatatataggtaactcgttcagtaaataaaaaaagggtaatattagaaactaactatagaattgaaaagaatcaagtaactaaccattgtcagtttttctatggataaataactatatgacggcataagaaaatacaaaactatccttgcaagttgaaccaaaagcaagcttatgtagatatatttgatattttttagcaaatcgcatgaaacatgttaaaatagcacgatatttataaaaacgatgatattttataacgtacattttacacaaatagcatgttatataaacaaatatcgtttcatttgaaaagttgaaccatgagcaagcttacacgaagataaaataatagatttgagaaagttttaacatttaaatcatgtttttagaagaaattacatgtgattttaataaataatgtgttatatgaaaaagtagcatgtcgagagagagagatttctagttatcacgtgtaattcgaaaaagtagcgtggtataaaagaaaataacatacaatttaaaaaaaaaacataacgacggagattccaagaaataatcaaaatcgaataaaaaaatgacaaatcttctgcaaattgaaggagagatgatctatcaatataaataacgtttggcagcctagatttatcgaaaaagagatcaggtggttgtgatggtggaagatgtggtagttgtggtggtggaagaaagaaagatgagatgattctaagtgttttatatgattttgaaaaatagcatgtaatatatatataatacgaaaatgggtaaaaaggtaattgcaagtgaagaaagagagtgtgctctgacaccatggctattttgttagttcttttacaatccatagtcatctagtgcatattctcataaaaaaatgtgtccgagtgatacatataaaagcatctccaactctttcctttattttattctaaaatgaagtaactctattctagatttgtatttttattcagcctaaaaccatgagttgaatgattgtatgtgtaaacgatctccgccgagtttgagagggatcgaacgttggctttgtaccattcagatttgtctttgaagctgattggcatctcctgagccatatgaacgataaatgtcattcgttttgcgtagcttactggaagagaacaaaaagaaataagaacaagatgaaacatg

SEQ ID NO: 9608 - DNA, 3000 bp, Unknown
  misc_feature (1)..( 3000): cDNA_ID_2184190_gDNA_ID_1972160_Annot_ID_179598 3000 nt of promoter + ATG
agaagccaaaaaaaccaatggttttgtcaattatcaaattaatatcattattgggcctttatggcccattagtgaatattccggtacattaatactgagcactacaatggaagaaaatgaccatggctatgttgaaggtcaaactcaaggaaagcaacgaattagtggaataaagcccattgggccaaacgtatgagaaaaaatggtggcctcgaaggtgagagttgttgactacagtccgcagaaaaaacattaaaaacgaaagatactgaaaaaaaaaaaaaaactcacgagtcgtgtgtgactcggtgactcgcgactcaaccgaaccttacccaatactcaaccacacaacaatgggccaagctccgtcgtctccggcggaaccaaacgtacgcgatacttctttatgtctatggtcaccggaatttctcgattgcgaatcgattggtttcgaagacggagattacgatttcacggcaaatctaccagacgattgcctcgctcatatctttcaatttctcagtgccggagatcggaaacgatgctctcttgtatccaaacggtggctattagtcgacggacagaatcgtcaccgtttatcacttgacgctaaatctgagattctccctttcttaccatgtatcttcaatcgattcgattccgtaacaaagctcgctcttcgttgtgatcggagatcttttagcttaagcgatgaagctttattcatagtctcgattcgttgctcgaatctgattcgagtcaagcttcgtggttgtcgagagataacagatctaggtatggaatcgttcgctagaaactgtaagagcttgaggaaattatcatgtggctcttgtactttcggtgcgaagggaataaacgcgatgcttgagcattgtaaggttcttgaggagttatctctgaagagaatcagaggacttcatgaattggctgagccaataaagctgagtttgtctgcttcacttagatctgtgtttttgaaggagcttgttaatggtcaggtgtttggatctttggttgctactagaactttgaagaaagttaaaatcattcgttgtttaggtaattgggatagagtttttgaaatgaatggaaatgggaatagttctttaactgagattcgtctagagaggcttcaagtgactgatattggactgtttggtatatctaaatgttcgaatttagagactttgcatatagtgaaaactcctgattgctcgaatttaggtttagctagtgttgttgagagatgtaagttactgagaaagcttcatattgatggttggagggttaagaggattggtgatcaaggtttgatgtctgtagctaagcactgtttgaatttgcaagagcttgtacttatcggtgttgatgcgacgtatatgagcttgtctgctattgcttcaaactgtaagaagcttgaacggttagctctttgtgggagtggtacgattggggatgcggagattggttgtatcgcggagaaatgtgtgacgttgaggaaattctgtatcaagggatgtttgatttcagatgtaggggtccaggcgttggctttaggctgtcctaagttggtgaaactgaaggtgaagaaatgtagtttggttacaggtgaagttagggaatggttgcgtgaacggaggatgacattggtggtgagtatggatgatgatgaaaccaatggtgtgggtttggtggatggtggtgatcagagagttcttgagacggttgttgaggaggaggctccgccagtgattgatggtgatggtggtttgggagttgcaggtggtggtaggctagggttagctatcttgaagacaaagttagggttacttgcaggaaggaacttggtggcttgcacgttgagaagatggtctcaaagtgaagctactagttccatttgattgcacttttttttttaaacaagggtctttgactcgttgtgcattcagaacaaaacccacttctgtattattatttcttgtttgtttattttatcttcacaattcattttcaaaatatttcatggcataagattattactattactaacttttattttattaatatttcatgtaatcataaaatagttgatctttaaatttgtatagtgaaatggaaaaacttagtaagtagtaataatagttgatctctaattctttttcttataacaataaattcttagaattaagctttaaaaaccaagaccttgatcattcaatttcaagttaaggaacgcacactactcaaaatattgaaaagtgttatttttatttttccacaatactgctaattatgtagtacattttgttatcgtgaaactaaaaagcaatatatatatataaatgtttaaattctgatatttattatgtctaggtaatacaaaccaaaatggttgaccgaccaaaatacaagttcgttttgtttttctaaaattttttttattttattttttggaaatcgcagcataattgacaattgatgttcatacttttagaaaaagaagacttgatatatttgtttactaaaagatctccaaaatattctctgataacaaaattatatatgctgataacttgttactttcttataaaatgtcacattactatcatttttacatagtataagaaaacatatgtgatttgttactgctgcgtctgtatcaaccttatttttagaaaacaaatagtatatgatttacgatatttatctcttctttttttggttaaaggatgtttcttatcaaaccgtgctgtttcccaattttcattgaaaatcaaaattcacacatttacattcttaaattaatttacatacacttcagtgaggtcaacaatgaacaattaagtggagtattcaaacagtttcgaagccaccaaactctatatatatcaacatcatcacgtaaagttcctatagaatcttaaaacacatacacttgaaaaagccaactcaaaaaaaaaaaaattgattggtccc

SEQ ID NO: 9609 - DNA, 3000 bp, Unknown
  misc_feature (1)..( 3000): cDNA_ID_3042636_gDNA_ID_1972160_Annot_ID_179600 3000 nt of promoter + ATG
agttccatattaccttcaagaaaacgacaacaaatcgtatttccctcagacagtctcgcttggtccgtaccatcatggtaagaaacggctccggtctatggaccgtcacaaatggcgtgctgtcaatagagtcttgaaacgtacgaaccaaggcattaaaatgtatatcgacgccatgagagagctagaggaaaaggctcgagcttgttacgaaggtcccttaagtttgagtagtaacgaatttatcgaaatgctagttcttgatggttgttttgtgcttgagctctttagaggagccgttgaaggattcactgaactcgggtaagcctgattttttcaatatctggttatttccggttctctcaaataattgttaaaccggtcacaataatgttttgtgtagatatgcacgtaacgatccagttttcgcgatgagaggatcgatgcattcgattcaacgtgacatggtaatgcttgaaaatcaacttcctttatttgttctaaaccggttattagagttacagcttggtacacggaaccaaaccggtttggtggcacaattagcaattcggttctttgatccactaatgccaacggacgagccgttgactaaatctggccagtcaaaactcgagaactcactggcaagagataaatcctttgacccattcgctgatatgggtgaactgcattgtctagatgttttccgtcgtagtttgttacggtctagtcctaaaccggagccgaggttaacaagaaagagatggtctcgaaacacgcgtgtggcggacaagcgccggcaacaattgatacattgtgtgacggaactaaaagaggctggtataaaattcagaagaaggaaaaccgaccggttttgggatatgcaattcaaaaacggttatctagaaataccgaggctacttatccatgacggtacgttcacgtttttcacatttttcttctttttaacacatgccccatatgtttacaatttatttttcttttgtttgagtaaaatgttacagtttttttttcttatccatcacctttttaattcatcaaatccatataaattgatattttctcgtttgtattggtttatatggattgacaaagaatatattagtaggaatcatgatgtattgatgtggtatgttgcataaaaatgctactttggaatataagaaatgtcatcaattgactaattcagaatgatctaagcaatggaaaagagtatgtgttttcagattggcaaaaagtttagataatgaaacaaatacattttctcaacaaaacaactaaatgtttataataagtaaagccatcctcgtatgtttttttgtaggtaccaaatctctttttctgaatcttatagcttttgagcagtgtcatatcgattcgagcaatgatataacatcctacataatcttcatggacaatctaatagattctcacgaagatgttagctacttacactactgtggtatcatcgaacattggctagggagcgattctgaagtcgcggatttgttcaaccgtttatgtcaagaagttgtattcgacaccgaagatagctatttatctaggttatcgattgaggttaatcgttactacgatcataagtggaatgcttggagggctacgttgaaacataagtacttcaataatccatgggcaattgtttctttctgtgctgcggttattctactagtcctcactttctctcaaagtttttacgctgtttacgcttattataagccaccttcttaaccttataacttgtttttcaaagcatttttttgtgtgttatattatacatatgtactagattttaacttgtggtataccgcgggacgatttatttttaaaagtaatatatattaaaacttgtaaattttattaaaataataaattaaagatttaatccatattgaaattaaattaaattaattaaaatttagatatcaaatcttatatgttgattttgattggctattatttttgaaaattaataatgtatttcgttttttaattaatttaattaattaaattagtatttgactttttaatccttaaatacataaattaatttactctttaaaattttatttctaatggcatccctatgtaattacttacaaaaattaagattacatttaaaatgtatttcccaaattatatagtaggatatgtagatcgtttgtgattacattgacacgtcacgcacttacgcccactggattaccaaaactgggccttttcgatatctataaggcccagaccaactaggattcaacataatgtgaccatataggcccaatgaacgaaacacaaaattctgaccggcaagagcgggggatgataaaacgggaattgatcgttaatctccgcacgttcatcggaaatttcgtacgctgctgctctgaatcagaatcagctccaatcttcttcctcctccattgaatctcttttcgctacggaaaaaaactcgaagcttatcgtcctgcattctccggtaatcaatgtctactctctcgttttttttctttttctttcgcggccgatgctttgtcgaatttggaagccttgtttcatttttgatctgcctctgctagatgatgcacttgattttctgatttgagagatctagttccattgaatttggcgttgagagagatgtggaaatgaatgcgacctttggattatagcaatgtgcactagtacggtcttagattccttatcctccgaagcaattttgcgtattcagtgctattttcagatgattatagaagcgaatttagccaaaacctttagctggatattgcttatgtataatgtgggaatttggagtcgtttctgtatattctgctaagtgtttgattaaatgagaaactggactcaatactcaaacgtgaaattgactttttttttttttaggttttcgttttctcgtaaagtaaggctcatcgttgtctgagctagcgttggattgctaaaatg

SEQ ID NO: 9610 - DNA, 3000 bp, Unknown
  misc_feature (1)..( 3000): cDNA_ID_2183608_gDNA_ID_1972160_Annot_ID_179607 3000 nt of promoter + ATG
cgtcgtggcggacaagcgccaacaaaaattgctacattgcgtgacagaactaagagaagccggtataaaattcaaaagaagaaaatccgaccggttatgggatattcaattcaaaaacggttgtctagagataccgaaactacttatccatgacggtaagttcacattttcgtttttattagttttaaatcatattttgcttatattgttgtcgcctaagaatcaaacgtgatacctatctgcatgttaatgattttgtacaaaaccaaatagagcgacatgtattggttttgttcagatttttcccacaagtcgctaaagtaaatagactgacatcaattgttgcctatttcaccaattcggaatgattagccatttaggcgtatacattatttttcctagagaaccccatgatggtaagttagaacttttattttattttctttcctactcttttattccttcctttcccacatatgttctctttaaaaccaaaaatttatctacagaaccatcacattattaaaattaaacatacgaacctctttcatatttattgtaggtaccaagtctctcttgtcaaatcttatagcttttgagcaatgccatatcgactcaaccaaacagataacatcctacataattttcgtggagaatctaataaattctaacgaagatgttagatacttgcaatattgtggtatcatcgagcattggcttgagagtgactctgaagttgtggatttgttccacaaattatgtcaagacgtggttttcgatcccattgatagttatctatatccactttgtcttggtgtagaccgtttttacagtcgtaagtggagtctgtttagtgcagtcatattacacaagtaccagctcaaccttagaagtccttgggcatatttttccttttttggtgcagttattttgctacttctcacattttgtgagagtttctttactgtttatgcttattttgagccaaacacttaacttttgtcctttttcattcaatttggaatgtttgcattttcttgtttttcaacatttcctattttcttctatccaaaattggttttggaataatattttgttgttaaaaacaagtttaagaaggttaatttcggtggctaagcaataatggacatggttttttattagggggcacaaacagagtaacctaatcgaactcaaactatatccctatgtactctctgtctctcaatctctcttgattctctgtttcaagcactcacatctctctatctctttgttttggttgaaagaaagtgagaattttaacgcattctcttgaacatggccggtcctgaacctcatcaaaaaacatgtttttgaaattgtttttgaaattcttctgaaaatttgtttacaaaacggtctcaattttgtttatttttttctagttggcctcaatttttaaaatcttttgaaataaccttaaatatttttgggtgcatttggcacccaaaattccaggggaagccctgctcttgaatacccttttgaaaaaccttttggaatcataaaatgcagatactttcacacggagtatacaaatccacacttcatagaatgatcaataactctcatcaatactgtgtttgtgttgcatccttctatgaggtttaaaacttttaacactctggtgtgtttttccactgttggatttggaatcatgttttaatttgaatgaacagactaatttcgacgcggtagtggagccattgggtatatgtaaacagaagtaccctggagggagaagaggatgccaagttttcaaaagagctgtctatggagagcatctcgtgagtaaagtccagaccaactttggtatgtgatggaagacagatatctctcaccttctctgtacacaatccaccaacttcagcttcaagtttaattcgttagtaatgtgcttctcctcttctgtattattaatcgatacatatcgatttgtttaaagaaaaaaagggtgtgtttgtttgtaatattagtttcatagttgattcttcgaatgtctgagaaatcatatataaaactcacatctataatttataaaataaaattgttatacaataacttttaaaaaaaagatttgcatttaatattctggatgtacagtttgttttgttttgtttcgtctcctaataattgttagttttacatgaaaaatgaaatcagttaatagttgaactttggtaacattttttttctcatgactttgttttattttatgtagttattgaatatatatatatatactacaagctatatatgagagtcgacaaatttattaagagtacatagtttttccttttttaatgagagttttggagttgaaatgcagaaaaagaataaattaattaatcaaattcaaatctcacacgttggatatagtataaactagaagcatttattagagtctttttataagagttttgtagatttcaaaataagcaaacacatggccagttcacagctttaagattagttacagcgttgctttgacatttcccaatttacgtctcgctctcaatctctggaaaaagcttttaaccagcaaaaacaagggaacccccaaaacattggttttaatttatgctcatacagttttcatcaacaaagaaatgttgacttcgtaattgcaattaaaattggttttagacaattagtatacacttgcaatatttttataccttgagaaaatataatgtttttgtaagtataagagggatattattttactagtgtataacaagaatttatcaggattttttttaacgaagtttgactttttcaatctcactcgttaaatataaagtatgacaacatttatggtgagtctttttataaaagagttaaaagattgaagctttctatatatatctacatatattttagctttctttatttgttacttcgtttactcgaattcattactcatttcctcttggtatagcttcaaccaacaaaatg

SEQ ID NO: 9611 - DNA, 3000 bp, Unknown
  misc_feature (1)..( 3000): cDNA_ID_3094226_gDNA_ID_1972160_Annot_ID_179605 3000 nt of promoter + ATG
ataagagtacgaagtctttttataagagttatgtggattggaaaataaataaatgtatggccaaatcacagctttaaattagttacagcgtttgcacttaacatttcgaaattacagcttttgctctcaatctcctgaaaaaagcttcaaccagcaaaaccaatggttttagttaatgttcattccgatggacaaccaattatcatcaacaaagacatgttaacttggtacttgctcagcctcaagctcagacaaaaatttcaaaccaaaaaccaacactcggaaccggttcaagatccgaatctccacggtttaccggaagttaccagaccgaatcaagaccaaaacgtgcagaaccacaagcagtctcattccgagtcaggtaaggaggtggtagaagagaggccagaagagaccacaggagacagttgggtgatctcaataagagacaagctcgagcaagcagatagagacgacgacacaacaatttggggaaagctctgcatctacagagttccacattacctacaagagaacgacaagaagtcctatttccctcagactgtttcgcttggtccgtaccaccatggtaaaaagcgtcttcggcctatggagcgccacaagtggcgtgcgctcaataaggtcctgaaacgtttaaagcagcgcattgaaatgtatactaatgccatgagagagcttgaagagaaggctcgtgcttgctatgaaggtcccattagtttgagcaggaatgagttcacagaaatgcttgttcttgatggctgttttgttctcgagctcttcaggggaaccgttgaaggatttaccgagatagggtaagcgtgaataaattttctggttttttccggttatctactatacttgctaaaccggtcttattttggcctgtatctgaaaagttgatttttttttactgtgatgactgatgagtagatatgcacgtaacgacccggttttcgcgatgcgaggattgatgcattcaattcaacgtgatatgataatgctggaaaatcaacttcccctgtttgttcttgaccggttattagagttacagctcggtacacaaaaccaaaccggtatagtggcacacgtagccgttaagttctttgacccgctaatgccaacgggagaggcgttgaccaaaccggaccagtcaaaactcatgaactggctggaaaaatcattggacacacttggtgacaagggcgagttgcactgtttggatgttttccgtcgaagtctactccagtctagtcctacaccgaacacaagatctctcctaaagagattgactaggaatacgcgagtggtggataagcgacaacaacaactggtacattgcgtgacagaactaagggaagctggtgtgaagttcaggaaaaggaaaaccgaccggttttgggatattgaattcaaaaatggttatctagaaatacccaaactactaatccatgatggtaagctcaaaggttctcttttaattcctttcctactttttattccttacacatatatatgtttgtataaaaacgatatttacctataaaatccttaaattccataaacttacaaatcctctcatgttttttctgtaggtactaagtctctcttctcaaatcttatagcatttgagcagtgtcatatcgagtcgagcaaccacataacatcctacattatttttatggataatctaataaactctagcgaagatgttagctacttgcattattgtggtatcatcgagcattggcttgggagtgattcggaagttgcggatttgttcaaccggctatgtcaagaagtggttttcgatcccaaagatagtcatctatctcgactgtctggtgatgtaaaccgttattacaatcgtaagtggaatgttttgaaggctaccttgacacacaagtacttcaataatccttgggcatatttttctttttctgctgcagttattttgctacttctcacattatgtcagagtttttatgctgtttatgcttattataagcccaattctaaactctagttgggggtttttcccatcaatttggaatgtttgtattttcttgtttttcaacattttctatgtacttgaccaagattttgcattgtaataattgggttttggaataattatgttgttgcaaagcaattttaagaagtttgattttattaggggtgcaaaatttgtaaactaaccaacccaataaaaagctaacctaataacctaacccattaatggtctcttttgtttttttttcgctggtcatgaaatggattaatccatgtaaaaggattgcaataaatttatcacgaaaaataatttatccaaaatgtatatggaataacgcattttttttacttaatacacacatactaatttttcaaaagtgttatttattttaaaaaatctaaacatggcaaaaacaaatgttcatagtagacttatgatattaaattaaatgaggggacacattttggaccacccataagaagaatattggaaaatgcagttatcttattctccataggagtattttttaaggagtggagaattagtcaatctcattcgttgaatatatcacgagagcttattaatctttttcctatggagaattagtcaatctcattagtcttcttataagagtacgtactatacgttctatttgatggtagttagtatgtttccgtcccacttgtttatatatatacatactattatgatattttctatactagtttgaatgtttcaatcccactcgacgatgcatggattaaaacatccaaactacttgtattatgtacaataccctattgacaagacttcttttatattttgtatttataagagttttgtatagttagaaataaacatagcgtggccagattacttcaactcagttacatcgttgctttgagatttgacaactgcgctatttctctctctctcgatctcctgaggttcaacctacagaaattatg

SEQ ID NO: 9612 - DNA, 3000 bp, Unknown
  misc_feature (1)..( 3000): cDNA_ID_2184194_gDNA_ID_1972160_Annot_ID_179599 3000 nt of promoter + ATG
aaaaaaaaattgattggtcccatggattatttgcaagtaagtgaagatatgttacacaatgtcacttataactttattgtagtgattaatgagttttggttatttttatttttttgtttttttatgctaaggctatgcgtctccgcgaagccaatcgtctcatgattgcaaagttcaagaaagaatctccggctaatgactctcctgaacaggtgtgttggaaatctatcaaaacatgtttttgaggaatatgtttgtataatttgtaccgtaatatgtttgaaaatgttgttggttgtacagaggctagttcgattgaccaatgagaatccgcaatacaatgtcgactttttgtttcattcatactccaaggtttcttaaacaatagtcttttgatgtttaatagtatatccaagttttgtatatttcatgcgcttttttttaagacttcttaaattgctaaacaggactggtttgtatccgatgttggaatgaaaatgtcaaatgtgatgattccaaaccaaatgctagctcttgactgtgaaatggttctatgtgaagatgggacagagggtgtggttagagttggcgctgttgaccgcaatttaaaggtattgcgtatagatactttgagattttgaatcttgatttctttattggtgtcttttattggatccttgatgactcgggtgatcaaatttttatgtctttaggtgatccttgacgaatttgtgaaaccacacaaacctgtggtcgactataggacagctattactggagttactgctgaagatgtccaaaaagccactctctctctggtggatattcaggtaaatctatatatagaatcttcttctttattttattatttcaagagacaacacttcaagatgttatgtttattgtgcaggaaaaattgaggccgtttctttctgctggtgcaattttggtaggtcacagtttgaaccatgacttggataggtaaataaaacttttctagtagagtccttgttaattttaatttggaattttgtctaaaatcatgagtattttgttaccagtgttgaagatagatcatcccatagtgattgatacttcactagtatttaagtatcctaattcacgaaagctaagaagaccttctcttaataccctttgcatggtaagtctatatctactcttgaggtattcacataaaaatgttaacattcttaatatatactttctaaaaataaataaatttccagtctgtgttgggatacgaagtccaaaaggccggtgtttctcatcactgcgtacacgatgcagccgctgcgatgaaacttgcacttgctgttataaagaaaagagttgacacaacaatcacattaactaaagaggtgacaacaaatatttacctagctaacttgtttatgataaattacaattacaatgtttacaagttttttgaatagatggtggaggccgagaaatcaagactctttctacatcgaatccctcaccatctgtcatctgaagagctgaagaaagatcttgctctaaagttttttcccaaaaactttacaattgatgttaaggttgagtttaaaccatatatctatttcttttctctaaatcttaactttttttttttgatatacggtttttttttttttggcagccagcaaaaacacagggaggttattattgtgcagttgttatctttggaagctcagtagaagcaaatcaagcatttgagaacgttaatggatacaaagagacggtattatagaatcttttgatttgttttgaaatggtccaataataattaaaagtgatgaaataacttttttttttttttttttttttgtgtttggttttcaggattcatcggggctgccacagaaactcatttcttgttcaatatctacattttatgtccgttaaatggcttaagatgggtgggtttggttgaaggcttgaaatcttcttttaaatttgctttttaataatgttggcatttctgaatctgtttaaacattgattaataaatctaagctaagtttttttttttctatccttaatttttggtattttgtttgacatttgtttttgatacaaatcattggcaaaatatacacaattacagtattagaacacaaatcgaataaaaaaaatctttgtgaacatcatcatttaaatgtaattgaaacagagtcaataaaggttctctcaatagaggtagcaaacagagtcaactatgctataagaagttgttgcgttatgttttgcttttctgcaggattcatttgggctgtcacagaaacacattgtcttttggcgtctaagttatgaagtttatttttaagtccataaaatggtttacgatgatgatgtaacctcttttttttccatggatctatattttcaaattctatgtttgtaacctaaactgttttaattatctataaaatatttacaatttagcgaaagaaaaaaatgacgatggaacctcagatcaggtttaatacaacaatatgactaaaattaaatttctatttccactacatttttattcgctccaatccatctccctttctaacttagagatcttaatattttttcttcatatttggagatttcttttttcaaatttacactaaaatttgaaatctccagtttgttgggaaaaaactcaactccataactccatattgaaaataaaaaatgtttatgaagaaatgggagagatgttctaagcaaattttaaataattcctcttaaaataatggtaaagatgttactacattgaagtcaaagatgtcacaatttaagcatacaatatagttaaaattatatataaaaaaacccctaagaataaaatataatccagttaattatatattttgagaatataaccctaaactctgtttcttcttccccaaacagtttatgccaaattcactcccagctaataaaataaaatagaaaaactcgttgagccgccattgtttccgtact

SEQ ID NO: 9613 - DNA, 3000 bp, Unknown
  misc_feature (1)..( 3000): cDNA_ID_2184182_gDNA_ID_1972160_Annot_ID_179593 3000 nt of promoter + ATG
ttttctcgtttcaaattaaatgtcgttttgcatattaatttttgtgtcatattaaacgtcgttttatattctatgcagattttatgtataaactttattggtcaaaagcgttacgaatatcgtttcaagttcaacgaatcaaaacatattttataaaaacatctaatacgttttccgtttcaaattagatgtcgttttgcattttaatttttgtgtcagtctaatgtcgttttatattttctacacatttatattttcaaaaatttcagttttatttttattgtttaaatatatcatccaatttgaaaataatacaatacaataacaaaaataacatttaaattaaacaaaaatatttttagaacactgtgatcaaattttatcctccaatatttcccgacccataaactttaaaccttatgtaacttcaaaaaaaaattcaaattagtcgttttgtattctacaaaataaaataaaaggaaaaaagtttcagagaaaagggtaaatttgcataacaaggaatacaggctggcgtgtccagtcaaaaaagtcagaaatctgcataaaaaactgtctttacccaaactgccaaacctaaccgttatcgtctcagatattattattatttttcaaataaacattcaaaacagctttctaatttttcacctcagattgtgcgaataatatcagagctctttccttgtaggtttccgtgattttgtcgctttaacttcccttcttttcccactctcttctcacgcgcgcgtgcttcccctttctctctttcgactgtatcacacgctccataaactaataaacagacgcaccgagatcacgacacgtgtacacctacagctgtatcccaaaactttcaaaaccgcttgcgtggaagaagcggtgcatgactttctccaccgtctctaccggttaccggttattatccatcctcctctctatctctctctctgttataaataccttttttctcctctcttcagtttcctccaccttcttcttcttcttcttcttctctacaacaaacaaacaaaagatctgtttcaatggcggatcgtgttaaaggtccatggagtcaagaagaagatgagcagctacgaaggatggttgagaaatacggaccgaggaattggtctgcgattagcaaatcgattccaggtcgatctggtaaatcgtgtagattacgttggtgtaatcagttatctccggaggttgagcatcgtcctttctcgccggaggaagatgagactattgtaaccgcccgtgctcagtttggtaacaagtgggcgacgattgctcgtcttcttaacggtcgtacggataacgccgttaaaaatcactggaactctacgcttaagaggaaatgcagcggaggtgtggcggttacgacggtgacggagacggaggaagatcaggatcggccgaagaagaggagatctgttagctttgattctgcttttgctccggtggatactggattgtacatgagtcctgagagtcctaacggaatcgatgttagtgattctagcacgattccgtcaccgtcgtctcctgttgctcagctgtttaaaccaatgccgatttccggcggttttacggtggttccgcagccgttaccggttgaaatgtcttcgtcttcggaggatccacctacttcgttgagtttgtcactacctggagctgagaacacgagttcgagccataacaataacaacaacgcgttgatgtttccgagatttgagagtcagatgaagattaatgtagaggagagaggagaaggacgtagaggtgagtttatgacggtggtgcaggagatgataaaagctgaagtgaggagttacatggcggaaatgcagaaaacaagtggtggattcgtcgtcggaggtttatacgaatccggcggcaatggtggttttagggattgtggagtaataacacctaaggttgagtagttttggtttagggttaaaacttgaatcgattggggattttcaagagcattcatttttggggtttatggtaaaattaaaaacaaaaacaaaatgtacagaggaattaaaatttctatggaataatcttaaatctcaaatatttgttacttgttttggtgattcataaccaaaatctataacaagtctaaatctaaaaattgaaccttgattagtgagacattatcatacaaagagacatactgagttagtcaacaaaatgtaggataactacattcttacatattgtatagatgaatttcatgttaatcctttcatagagctatacagtaaccatgattagtgagaccttgtaacatgtagtatcaaaatcaacaaaggtatagatttaacatctatttgaaaacattcgaaccttttatttgaaaatcttttgcttgttgtaagagatttactctatagtctatagatagtaattaaaccttttctataggtttggtagattacttcacttttatataaaattaattactgtcaaatcggatttttgttaacataattatttttcgacaatttagaaattatcgtaaaaattagatcaatctttctacattcttacaaaaaataaatacattgtctagaaaatcagtttttttttttcgttttaaatctataaaaaaactgacaacaacaaaacaatacatactttttaattactatagagtaaaatctcttacaacatgccaaagatttcaaataaattgtaggaagatttttatgttatttaaccattctacagtataaataaacactggtacagcgatgttaaaaagtagaggttaaaaaaatgcgttaaaaacacaaaagctacgtcgtttcaataactgggttttgtctcaaagaaagctgcttttggttcccgtagatctaaagttacgttcgagtctcccctcttctctccactcactcagctcttttgattcccctccaattttctccgacggtacggtcgaaaaatccaaccggagatcaaatg

SEQ ID NO: 9614 - DNA, 3000 bp, Unknown
  misc_feature (1)..( 3000): cDNA_ID_3042621_gDNA_ID_1972160_Annot_ID_179579 3000 nt of promoter + ATG
gcttaaattatttttataattctgtattatttcgttttcacgagttttacgagtcttttaataattaattaattgtataatttgttacgataaatatcttacacgtcttaatcgatcccagttcttatgtatcttctaagaaaaagagtagttatacattccgagaaaaatatggatattgggtattttctgaattaaatgccgggaaaatattgtttttttggtggcacaaaaaattgacttataattattctttataactatattgtagtatctgatggttaagaatttttggaattattttaagatttgtttttttcttgtcaaccgatttttatttagagttcagaaaactcatcccttaaaaatgttgtttatatatgtgatattatgcggttcggtataaacttttcgtcaaattaagatttggctttgaaaagacaaaagcaaaaattttaaatctaaaatggtgtgggaaaaaataataataataccttgctaaataagacggaaaatatgtcgtgcagcttactgcttatacttacatcttacattacctattaggctataacctaatgcttgtgttataagtctgtaagatttggtcattcattctctttgtactattgtcttcttatattgctagaaacttagaaactaaagaatttcaccaatttttgtgggcatagtatatagcttattagcttgtaataaggcctaataaggccctcgagcgttacaataacatccaaattagttttggcatggtaccgttaaagtggtgttaaactattaatttaccaaagactcattgtttggactttggaccatacgaaaaatgcagtagagcccatagtgacatagtgtaccggctcttatagctgagaaattatatcccaattaacagcccagtatttaatcatttagaactcaacgtgaaagaggacatgttaaagcccaacacaagtccatagactcatgaaatacaagtccacaaacccaccttatctaaccatgtaattaggttttatagcataatataatgaacatcaatgaatgtaagtaggaatgcaatttgtgcaacctctatttgacaatttctttcatttcttctcaatagtttacaagtctcatacattgtttttgttctgttttcaaagaaatagttttggtttttctattgtatgcaatatgacttcccactgtacatcataaacattgaagtatatataatattttttctattgtgttctgccgtacgtctaacttataatctattttataacattgattttactaaatatataaaggtaaaatctatcttgttgcattcacttcagaaaataaatttttggaagaagggccacaaaacaatactaattttcaaaaattgagattgaaattatgttataagattgatatttaaaataggaataccgttgtaaaaataagtagttgatttatcgaacatctaagcatctgtttaacaccaattttatgtcgttgttgatcaaaactgtcgcgttcaagtgtcttgtgtcgactaattaagcaaatgaactttaggtaccagaagttcaacgaaacaataatgcatttttaaattactaatggactgaagtaattgggaataaagaaatataaagagacggcggcattcagtggaaaatttgcctaattggagtgtaggtaagcacaccacgtaagccatgaacggcgccgtttcaccgcattgctataggaaagtagaagaagacactttgacttattaatatcattttgttgtagatcttctgttcatcatatatttgattttgttactagctaatgtaaaggagaaaagaaatgtttgatttggtcacacacgtgagacagcatcgtaggcaaaaaaacgcctctatctttcttctaaaacatttttcatattaaattatcaaaacccttaaggttgatttaagggtcaggtagtggatttgtttcgttgaagggtcagcttagccttaaccctaaacaaaacaatctcattggtttcataaataaattgtttacaaagtatacgtactgcatgaacgaatgaaccatatctatatttataaaactcatagagaccaatagtttaagagaggcacttatatagctcaacaaataatagcgaactagagagaatatgatctaattagttataaatctcaattttgaaattgaagtgcgttatttcatttgagaatctatgtgttttttttgttgttgttagatgagaagctaggtttttttcttttctttacaccgataatcgataatatatgttaatcacactgatttttgtttgagacatgaagattcgaaaaatttgtcaacgaataaacactggatagatagaattgagatctgccatcaaataatcgagatcgttcatgcatgacgcaaacatttatatagaaatgaagcaagtaaagaatatgaaaaagaatagaaatgagaaatttataaagaaagaaaaaaagaaccaatggttgaggaggcaactattcgcggggacacggagccgttcgcacccatcaccttggaatctctctttcttcctctctcctcatcaccaactagtcaacaaccacacaccatttttaactttcataattaaacctaacataacatttttttttgtataaactatagcataaattaaattcagttaatgataaaataaatatattttgtagcaatcattctattttgtaatttggtagggctctttaaactttgattattatccaatttttattaaaatataataaaatctcaaagccatgacccattccttcactcaagtatcaatgtctattgtctataaatattacataactcttcttcttcaaccaaacattgaaacactttgtcccactctctctctttctctttcttgtaccaaaagctttttgaatctccaagattatagcaaaaccaaagataaaatactaacttaaaagatttctgaaaata

SEQ ID NO: 9615 - DNA, 3000 bp, Unknown
  misc_feature (1)..( 3000): cDNA_ID_2184150_gDNA_ID_1972160_Annot_ID_179585 3000 nt of promoter + ATG
ttacaaggtttttatttcctgttatttctccaaatgattcatatatgtaattaatgtcagtaaaacattattatgccaagacaaatgtcactatgaagaacttgctcggttgctccacgacattactttggtgtttgatctcatcatcaatcttatttgttacccatatctctttctttgatgtatgtgtacgctttaataatcaacaccgaaagtttctcttctctaacgactcataaagagatagtttcataacaaccacgctgatagggaagacgtaaacgttcaaatctctctgttgtataatcaaaactgagtaagaatataccgagctgttcctatttatcttcatcataagcaaaccagtaagtgtttcccttcaaaagataggcggtagtcagaatttatgaagtggcagtccagagtgtgacatcatgattcctccatgaattagagttcatatcatcgatttggaattcttggtcgtcacagttttagttcttatagctaaaatatcttgtagctcttattgccagatttgttgtcttggtactccgttggtagtatccaagaacaaaggttaaattctgatttgagtcgactctgttctcatcactttctcgaaattagactagtaaaagtaataaataatattcaaaagtccacatccaaaacaagattcaagattttcaaatcttgatgaaaaagaaaaaacaaacagcaaatattacacgaaatggctggaaaaactggttttaaacagtctgagaattgttttgttttaccttagtcatattattttagaggtctcgacgatggaccagaggtagcaacagctctttgagcacgctgcgtttcaccgcaatacagcatctttgtctgtttcttaattatccttgcttctcgcttttcggcttttacagcatttttccgctctttcttctcttctttcgactcttgaccatgagtcttcctcttgatcggttcagcttttgggatttccgctttgacatcggtttgttcagctctcctaccaggtaaaaactcgacaggaatcctctctctcccttggagattaatgattcttccatttgaactcaatgcgttagctaatgtttcactcagcttcttctgcctagctgactctgcagcaaggattttaccagggaggttatcgagattcgagtatgttgagactatggtttcacaatcatgcttctcgctttcatcgctgctttcttcagtcagctctacaaattcatcttcattcccgttatcaaaattttcaccatattctacagttcggcggataacatgagcagcagtgtccacttcctctttatctctgacagagtcactgttcttcagtatatccgcagggttcatatatttttcttcaagctcataatcttttgccttcccatgaataagattctgaacttcttgagccatgaagtcttcttcttcttcttcttctccatcttcagctatgtaaccatcaccgtcactatcacttccatattcattgagttcgagctgatcaaatagctcatcaatttgacgaggaactctcgggttttcagccacaggttcatcactttctctttctctaacctcacgtcttacagaaaactcgagctctccattgctcacaccagaagattcacccttttgagtaagattagcttgaacaacaaaatcttcttccaaatcctcaacatcagaaccaaactcagacccatcactgttttcaagcaacgcagcaacttcaggatcaatagctttctgcaccttgacgttaacagtcttggacgcaacactatacatcaacttattatcattaccttcttcattcaccataccagagatcttcacacgagacgcatcataagccttaacatcacgaggtaactgagcaacctcatacttaggattcacatagaaattagaaccaccaccagtattcttaatctctctcaaatgctccaagtaattataaccatcatcaggataccctaactctaaaatctccttcctcacatgagcaggtaaagaactactcgaatccccaaaactagagtaaccataatccatctcttcaggagcatcatcaaaccgtgagctgtctccttcttcttcttcatcttcttcaatgaaaccattgatgttaacagggttttgatcaactcgtaagaagatcttatcaccacctggtgcatcactgtatcttgggtctgacgtatcacgaggacacaactcgaaagtcgccgcctttttcttatcaataaacttcttcttccccattacttactaattcacaccttcttaagggttttgcaaactgtaaaacaattacgaagatataagatgtctaacttctaagtcacagcaatcaactagactatgtttcaatcctgactaataaaatgtaaatttttatcatcaatcaacacgaaaacatcgaaaagggagaaactttaagtctagaaacgattcaaaaacactaatttaatgaaattgaagaagcttacctgaagagtttgagagagagaggcggagaacaatgcagatgaagaacaaaaacgctgttgaagatttttagttttagggtagagccacccaaaacgcatcattttagggtttaaccaaaacgctgcgtttttgtgttaagcaagccaaaacgcgtcgtttttggcaacaagtcaaattaaatatttgttttatttccataactcagtgtatgccactaaaagaaataatccaccgcgggagagtgcaccgaatggttacatgcacctaatcttcttcttctcctactttcttcgacggtacctgttgttattgtgcgccatcttgatcttacgtgcgccgttggcgcattctcttataccaccattaacgtgcgtcaacaccggaaccgttgaatcagacgttactggtatcaggttcgatcgttgcctcgataccgattctctcgccaagatctctctttccaccgtc

SEQ ID NO: 9616 - DNA, 3000 bp, Unknown
  misc_feature (1)..( 3000): cDNA_ID_2184267_gDNA_ID_1972163_Annot_ID_179621 3000 nt of promoter + ATG
aaacgaaactcttaaagcttatcacgcgggaaaggagacgaggtcgttaaaaaaagcggttgactgttagacataaccgtcaaaacatactaaaagttgacgacatcaaacctgaagaaagaacgcctgaaatttatctttagttacatctgaaatttcgatctcactttcgtaatgttgacatttctcttgacaatgacagagaccatcactttgagattctttggtcggctctcaatattgaaagtcagaggcttatccattattatctgattatgcttctgcggtaaggcttttaaggaacacggtttcgtgattagatacgtgtttgtcttataattgaaaccttttcctcttatccctatatatactatatacttggctcatcaaatactctgttagatcaaatcttaatttatcgcaaaaagtattctgttcttttttatatggaccggagtcacaatgacattaaagattccgatccaagagatggtgaaaatggttggctctttaagatctcatggcatcgatatccctgaatcaatggaaatcaacaaaaaagagaagatctatgtagcagtgacagagaaagatctagaaagcaagtctagtctcgtttgggcgatacagaacagtggaggcaaagagttttgcatcgtccatgttcatcaacctatccgtaagtaattaaacatccacaagaatctttttatgcagaggttaaggattatttggttaaatttggagtatcttgtgttcttgatttcaagcgggggagatgtttcacgagcagaaattgcgtctctacagaaaagagaaggacaaagcacataagaattcggagaagtaccttcaaatatgcaggcaaatgcaggtatctatatccttacttcttatccatgtgttttgatggtagaagagatgtttggttttaaatttccagtcaaattgtgaattaggtcactgcagagatcatatatattgaaacggattcggtagagaaaggtatcctccaattgatatctcagcgcggagtcaccaaactcgttatgggagcagcagctgatagacactattcaatgtaagtggctaattagtgtagactactaagactttttgtgatctaatatatagattaaaaaacgttgattttgcaggagaatgagagacttaaagtccaagaaagctatttacattcacagagaagcgcctgccacttgtcttatatggtttacgtgcaacggttacctaatttgttcaaggtttggctaattaagtcaattcttcatcttcttttgtgttagctgaacatactagtcactgttaaggactggtctttgagttttacttgtctcacaagtcacactacaatgcagggaagctagaagagcaaataacttgtatctagaatgtgcatcgtcaaattctttgagtcaatccgacataactagaggaactgaaagtatagttaaagatgatgatcatctgatcaaattagctgtcacagaagctgaggcttcgaaaaggaaagcacgctttgaggcatgtaagcgcgaagaagctgaaaaaactgcagttgatgcactcaaaaaggtatgtaagttccttttaacatgtttttttagcttagaagtatcaaacttttctaactcttatctataacaaaaacaattgtaggctaaacaatgggaaaatgtgtattttgaggagttgaagcagaggaaagaaacagagaaggcactgaggaaaagaaatgacgaacttgaaaagatgagatcagaatccgagacccaaataaccgaatcttatactgtgattagaaagcttcaagaaaagaacaacttatcaatggaaacgtttagaggaatcagagaagaacaagaagagttgaagataaagcttagagaagtatcaaagctgaagggtaagcgcgaggaagaggaagcttctacctctaaccaccgtgaaccgccacaatactttatttgtcccattacacacgtgaggaaacgttacaagatcaatgaaaactaaatgatcaaaatgttataattttaagaaaagaaaaaaaagaccaacagttttgttatttgtaggatataatggaggatccacatgtagcagctgatggatttacatatgaaggagaagccataagccgttggtttgagagaggacatgagacttctccaatgataaacaaaaggcttcctcacacgagcttggttccaaatcttgctcttcgatccgcaattcaagaatggcttcaacttcgtgaattattgaacagaccctctgcttgcagagagatataagtgattcgccttaatcagagtgacaaatttatcataaatcaaaacattttcaaattttgtcaattcaactttctctaattaatgtttatattattatatcaatgcacagtgcgttacaacacatatgcttcttagttaataggagttgttactctatcactagtattattggtttggtcactcttttttggggtggttacgcacgtatatactaaatatagactatgatctacttagattttaatatttgtgatgaattgtgaactataagaatatagtggttatgactgaattttttcatagatttaataaatcttccctcatggcataatattagttagttaatatatagtggtatagtggtcactattttatttgttaaatttggtttgatgcattggtggtcattataacaagcataaaaaaacactaaagctagtattggattcatccacgtttttgtaattttgttatttgatggaataataataataaatttagcctgaatcttgcatagatttagttctcttaattaatcttccctcatgacgtttaatataacggaaatatggtggtttggttgcccactacacactatatattcctttgatgccgtgatagtcattataacaagcacaaggaaaaacactaaatcgtagaagaagaaaagaaaaacaaacaagca

SEQ ID NO: 9617 - DNA, 3000 bp, Unknown
  misc_feature (1)..( 3000): cDNA_ID_3042712_gDNA_ID_1972163_Annot_ID_179629 3000 nt of promoter + ATG
gagtgtggttttgtccgtgaaatactcttgctctcccgccgtgtaccatgacggagtgttgaggattccgatcttcgttaggaactctgggatgaatatcccggcggctcctagcatagcccatcggcagtggactatctcggcttgtacgttccattttagactgtccgggtccgatgctgacatgtgtctaaattttgtcagaaaattataaatatagtctaattttgtttataaaacttgttaaaaagcatgcaaggaggaacaaaaaaaatatactcacaaagaccaagaggatcaaatccgaagtcaccagggaggctaccgtctagccactctggaggagtgcttcccgggaaccagattggtctatctggatcagctgcgacggcgcgcaccgacgcatcttgcctggacacagctggaacagtcaacttcttcttcagcctcagtttcttaccacccaagaaactgcacatatatcatagccctaaaaatttagtcacaacttcaataacaccaaccatgcataaattcatattattacatagggcagatcggtgtttggatcacacaaacaatagtcgcacaacgtttaatctaaatggatgatggatcactaattttacaaccgcacacacattctcggatactagatcataaatcccaatcaatggatcactatcatagtcatgttaacgaaactaattaagtacaactgtacaaggatcttagtctcattcctacatagcaagtgatgataactgataagaagagagaaaaagatgagcttaccttggagaagaaatggcagcgatggcagaagaagcacaaagagatgatgccattattctcgacgttgttgaccttcaagactcagagtgtgttagaagaagaaagaaacgaacgtgtgttgtgtaatctataaaagcactctggtgacaaaatcagattctgcttatctgattatccctacggataacgcactgagtttcctcattggtcaactcattggcacgtggcaacttcgtcccaccacatcttagattttctctctatttgaacataactattaactgagttttaaagaaagaaaatataagctagtattccaagtgactgggcttataaagaataccaaagcccatatgtttttgggctttttttaatcttcagctgatagcattaggccttcaagaaaataactacggctttaacatttgccggagcgggacctcatttatgtaccttctacaaattaattgcaatttttctatatccaatttgataataaaaacatggagtggtaccaagcaaaaagaaacatgaagtggtaccatgtgacgtgtaggagaaagacaagacgacgagatctaagactgtatactcactagcaaaatgattaaatatctataaacatcgttgttaatcgatcatatattattatagcgaatgattgtatacgtttatctctttctatctagaaaaccacccctgctttgtaggaaacaaaattgcgaatcacatctataaaatcttatgattagcaaaacactgattagccatgttttatgtgacctataaattatgagattcataaagacatcagtaggaataggaatcataaagatagagaataagctaattatatctttatcgtataatatcaacaacaaaaggttcctaagaccctaacagagactgaatacatgaactccaatctttttatttgaaaaacaattatagtgtaataaaaaaatctgtattgtcgtgactttttcagtatcatctaaaattttatttaattacaaatgaagcaatgattgaacctcatattccaccgaaacatcatcttaaatctaagatcaatattggatcaaatagggtttaaagtagggtatatagttatgaaacaaacaagaaacagtcaatcaagtatattcgtatcgatgcatcatgggaccagagaacgagatggtgcgagtattcaaaaattaaacagtgacatgacaaagagaagtgtgggagaggtaggagatgagatgatatgcatacaagcaatagggccatgtggctgtctcggcctcattataacatttccaaatcaacacaccattctccatacttatttcgttcctcttatcgttttagagggtttttttttttggatcgatggtaattgacaaattgcatgtttttttgtcgtataacatacacattgactagttgagcatcatgaattttctcattgaagtttggtttgaattttgtgacattaattgattacaaaattctactacaatacatgtattcttgtactaccatcgtgtataactaataaaataatttataaatgtataggtgtattaatgcgttattatggtaccaatacgtcttgtcaaaataactttgaatgattttgactataacaacaaaatgagctcaaacgttgatggtttacgagtttttgatacttttgtgggtttttgtgaccgttctactaggctatatagattttcttattgttatttttttttttttttgaatgcgttttctaattataaggtttcagaattcagcgtgtgattataaataaggcccatacttcataaatattaccaaaaaacatcaattttattatttatctctggttatttttgagtgagtcaactatatataggctatagaaccaaataaattcctactaagtttgaatatatcatcgtaagtaagttgtacatcttatgaaaaaatttccacatgactataagtattagagtatatatatacgaccacttgattttaaaatacgattatagataacaaaacatatatgttcattgcaaaaacgacatttctccgatcatagttgagccatgaaccattgccggttggtggaaggatcattgccaccgacgacttgtctcctatacctctctccggtccaccactcagttaaacaatagacttttttctacttttatataattattaattatg

SEQ ID NO: 9618 - DNA, 3000 bp, Unknown
  misc_feature (1)..( 3000): cDNA_ID_3042705_gDNA_ID_1972163_Annot_ID_179632 3000 nt of promoter + ATG
actagcttttgtgtgtgtgttttttttacaggctttcacacccaagtgagacaacgaaaaagggttatggggaggtgaatgcgtttgtgtgtgatcatgtttgtacaaatatcattttgaacttaaaattattatgtactttatataaattgtggtcgaatgcaaattaaggttccccgtaacactcttttcctaactcaatgatcataagatgcttttacattgtcattcggagcataaaagagtccatcttaattgtttttcgttattgttgatatctaagcttatgttcttcttctatctctctctcttacctttctctctttccgaatatctctttctcacctttctctctctctcttgcttacctttttctaaatctctctttctcacctatcttcttttctctctctctcaatataacatgacaaatttaaatattgaaaatcaactgaaaatttgttattgtctaatgcatattcactaaagttaaatctaagatagtagttatacgttaattatgaacatgatttagcaattatacaacttccaaatagataaggtggaaaaaagtgaacacatgagtaaattgaagtttaacttgtaaatattttgtacagagaaagaacctctatcaattaacactcgataaattagtaatcactataaattacttattttttcagtctcgagttagatcaatgtaatatttaacatcatttgataaaataataacttgtttgaaaatctaatgtaactaaatagtctagtaatatcgtaaattaataatcattatcataaattaatataaacttatcaaacatcaaaattccgattacaaaaagaataaaagtttagttatgttattaattattaaaaatttagacgaaggtatactagttttgtaatcccattattaatagtctatagaatggtaacgggctaacggcgatggtgataaacggaagagaagagagagagctagggttggagaaagagacaaaagagagggactacggaatgcagaggaaagcttcggcggtgttcatagggtcgtagaaaggagaaaaaaaacagagagaaacgacggaaggcagaggaaagcttcggcggtgctcataagaaacccatggagaagtctagagtcggagatgttgtcggagaaaggagaaaaaaacagagagagaagacggaatgcagaggaaagcttcggcggtgctcagctcataagaaccatggagaaatctagcgtcggagagaaatacaaacacacaacagagagagagagaaagagagagcttacattgtgagatcagagcgagagcttccatccagagagagagagtgagagcttatatagatggttttccgaatatatagtgtgtgagaacgaagaaccatcttttgtttttttgtttttttcttaagtacttttatataaaaacacgagagagagagagagagcacggagaagagggagagagacagagaaagcaatggtaatgatcggaatatggtgcacggcggtgatgatcgggaaatggtgcacggaggagagagagagagctaaaaaaaacttacatagtagtacatgaaatttaattgtttattttttggggtttctatgaaatcgtagaaatattattttattaaatatgaaacttacaataaatattattttctttaacctagagaaatagtagagatacaagtggatattggatataaatacctctttatcaaagacattttatacaacacacatatcaatattaataatacaacggttgattaaagtcaaaaacaaaaaatcccaacccaaatttttttaagttcacatatgtgtagtttgtttagcgtttcagaattcttttcaaaccaagtaatccgactttatttttaactgactcgtttttttaattatgttttggtgtcaaaactaatcaacccatggaaagtatcaacccacatatgtggtttagctttttcataaatatacattttaatcatttcttgtttagttagtgacaagacatgttacttgtttgatgacaaatatttgtatctccaatttctaaatcttttagccaaatgaaattatatatttgaccaaaaaaataaaactaagaaaagtgaaagagtatgggggcatcagaatctctgtcatgtgagtactattttttgaacaagctaagtaacgtcttgtatctatttgatttttttttagtatcatatagcacgagtgtcttaatgaaatcgttattagcttcaataatactaaataaaatgtttactttcacaatatgtaaccgattaaattcgtaaatattttgtacgaagaaaggatctcactcgataaattagtaattactataaattaattatttttttaatctcgagtgagatcaatgtagtatttaacataatttaataaaataataatttggttggaaatataatgtaattatatagtctagtaatattataaattaataatcattatcataaattaatataaacttatcaaacatcggaaattcagattaaaaaagaacaaaagtttagttgtattattaattattaaaaatttagacgaaggtatactagttttgtaattctattattattactctatagaattaaattaatagtctatagaatggtttgagtaaaccgagaaatgagagagagttctccttgaaccaaggataatcaataattgattcccggtttattcgtaaaattagattcgtatcaccgaaaccaattatattcgcaaaattaaaatccgatcaacataaaccggtcgggcaattccaattttgatgctccgtttattgagcgtttattgatctgcgactgcgagatccatcttcttcttcttctccttcttcttcttccaacgaatgttcctatgatctctgtgtatgaacagaatctgtaatcagatccattgtagagagagatagccatttcaattcgaggtagccaaagatgtat

SEQ ID NO: 9619 - DNA, 3000 bp, Unknown
  misc_feature (1)..( 3000): cDNA_ID_2184314_gDNA_ID_1972163_Annot_ID_179635 3000 nt of promoter + ATG
tcgataagaggtggaaactacaactctgattgtagtttttgattttctagagtgatacaactgtcttctgatcaagatttatttgtaaaacgtgaccctaaatgtagctcctcgttcaaagagcaaagtcctcatgttgcttctgtaaagagcatacttgaaagtcatgccagttacttgatgtctggtaaagaactttcaaagcttgttgcattcgtcaaaggcacccagtttgatattgtggtacgtatacaatttgtaccattcaccttttcatgcttggaaccaataaggtatatagtcattcactaacaataccaaaattccaggattttcttcaacgagaaagatatggttgtgcgcagctgcagaattttgctgcagggcttgaactgattgggcaaaaggttagaatcaacccccttgtggtttctttgatgttcaaaactcgttatttttccctctcattctgctgcttgaaacaatttgataactaaaacatagatccctatcgcatcgtaaaagtctgcatatttgagtaaacttatcttacatcgaagtctaactattgaaatccctcagctgcaaatgagtgagctacagaaccggttagatgcagagtttctattggctcagatgtgctccgtcaaattcaaagaatggatagttgttcttgccactcttttacaacggtctgaggtaaaaatcttttagatttccaccgtaatcacgactttaaagcattcacagtgatataaccagattgtttcattattttgtcacaacacaggttctttatgatattttccggtatgatctacggttgtggaaagcatatagcgtgacattagaggtaacaaactcttgtttccataacaatcgatatcgatttcatcacgtgcgggtctcctctttaaaacatgttctttgtttcagtctcacttggctttcgctcagtaccatgacttacttcagattttagaggcaaaactctcagcgacctcacgagaagaaagcaatagaggttccatctcttgataaatcattttatttttgaagctttttcacatcaaacattttctgcctgagttttcacgttcgtgtagataaacataatttgagaagaaataagaaatacatcacctcacatacttttactatttattttggtcacaatagaaaggaaaagaaatgtagaagtcatatcatgtttggcctaaataatcgaattgttacagcctgaaatcgaaaataaattgaaaaaaacactctgcattttgtgtaatgtgcgtgtatataaaaccattgttttgtccaacataaaaagataaatgtatatgtattttgatttactattcagtataacatgtttttattcaaatcaatgaagcttggaacaaaagtatatgagtgctgactaggtgtaatgttctggtcgttattattacaaatagtagattagaggtattaaaaaaacaatcggagaaagaaaaagagagttgtattaaaataaaactgaaaagtaagataagcgtaagcacccgtgaccgtgagtaagtatggaggcggcagaagtgggtcggcagaagtggggatgagtggagtgaaagtgggacaaccccaaagttcacaagaggctaattagaaaaccaaaaaaacaacaataacaaaattggagatgctcttttatgcaaaaaaaaaaaaaaaaaaaagcaacaataatgaaaattaacatggtttaacacattctcattcctatatatgttacatgcgtaactggagatgctcttgtatgccccccaaatttgcatagtccatgttacttcacttaaagatagttttatttctaactttttctttataaaaactaactgccgtaagtagtaactaccgagtagtataagatggtaatgtaaaatttagtagccacgtcgaaagtgacaaacaagtgatgtatctatactctactctcataagtcacaagtcacatagagacaatcacccattcttgtatcatatccttttcagatgcaaaaataacctcacacattaaaacccgtgagtaaacaaacgaagtaaaggaattgacgttgtactcacctcacattctctccctagtttaaacaaattatgattgttatatgtttggaaagatacatgcaacacattttaaataatatgttgtgattgagccgaatgcttatatgattttctattatacgtatagcaatgaacacgattatgaattcgatttagagtgatgatacaaccttaataccttaatccattcaggctagagaccataataagttaacttaatctcctcatcctagtcactactcgaatgccatctttacgtttaaaacaattatggccacactaacgatatacctatgtttgtttgctagtataataaggatatgtctctatttgctatcacttcagccttttctgaagacaatgttaccgctatatcttccaatcaattgataccactaaatgataaaatcattgctaatcttataagatcaccaaacactcagacaaaaagtttgaatcttgcttcttcgtttctccactctttatccgcttataaatactcttattctctcctcttaacatcctcatcaaaccatttagcctctccacactcacaaagggctcacaagtctcaagtaattctctttctctctctcaagcacaaacacacacaaatgtataaacaaacccaccatttttgctttcaaatgttagttgttcactatgtctcatttacattaaactctctttttctttttcccaaaagttgttcaccaaaaccaattgattagctctcattctcataaaaaaaacaaaactttacaacaattactaacctttcacatgcacccatttatttaccaaactacgaaaaaagatacaaccttttatatctctctctttaactaacttaaggaactaaccattctctcttcctttttttttttcagatacaaaaca

SEQ ID NO: 9620 - DNA, 3000 bp, Unknown
  misc_feature (1)..( 3000): cDNA_ID_3042695_gDNA_ID_1972163_Annot_ID_179641 3000 nt of promoter + ATG
cttttcttctgtcaaaagccttcccttccaaacctcgtgtaacacaatatccgctgtgattctattaggaggaaaaacagattctttctgaagcatttcgtcgagcaccttgaaggcatcatccacaagtccatttcttagcaagacgtctaccacaacattacgaacctgcgagtttttcatattcgaatcgagtctttcgtatacaagaaccgactgattcaccatacccatacgcccaaaccatcggatcagaagattagtggcaacgacagtaagaggaatgttcttctctttggcgatctcgtagagacggagaagtttatcacgcgggtccggttcactaccggcgaattcaatgaccgactgaagcgccaaggagagagattcttcacggcgtttcagagactgagacttcgcatccaggtactcgaagaacgagattgctagagaatacgatcctagccgccgcgtgatttgcgagaatactaaaggagaagcagaagaagaagatacgacaagcgcacttagcgactcgctcgacgcccaatcatgttgcggggttttttgaagagttttcacaaatttgactactacaaattcctggctctccaatttgatttccggccgtgggtcaacatcatatgaaaaacgacggaggaatcgagaatggttgagcagaatataagagttccggcgccgggaaattgatagcatgatactcatcgtctaaggttttgaaaaagacggccaccgggaaaagtgagacgacgaactctgttcggcgaattcaacgaacaagaagttgggcccattttaaataatgggcttacacatatttagcccaaataaacctttacaatattacacaatgggtacaaaaatttattttttctcataaaactgaacgtgagctttttattatgctgactgattacattatatttataacaaaatgaggacgaatctttatttttctcatataattatcctctttgttttattaatcaagccaccaccctgaactctgaaatagctcctatggattacactagttttacccgctaataactatcctattaaaggatttttatttcttcaacctactcaaaatgaagagctacgagaattgcaacagctttgtcactgagaagatggtgaatctgaatgatccatcttttcagctgatgctgctgcatcagaagcagctttatctaatcccaatttctgtaactcgcttaagaatccgtccaggtcgcttgaggagatcttgtaagggctgtgagaaggacctggaaacaagtgtttggatacttcttccttatactccaagagggctttgttgatcacttctcctacttgagcgtactgtttgcaaaactttggagtaacctgaaatgaaaaaatatagggatgcaacacagcggaaactatcagataatgaatcataaatacaggaagaagcatgatgatatatgaatggtccaggattttaccttagcgtgatgtggatgctgcatcattcccagaagatcatggtagactaaaacctgaatccacaagaaaaatgtgacatacttgatcagaaatgtagataactcactctttttgtgctgatcttactctttaatcatgcaaaaaggccaataactgagaatatggtttattcaatcaaaccatgtataagcacatgaaaccgaaagaagcctattgctctcgttaagacaatgtaaagagtatcaaaacgaacctgaccactgcagaaagggccagctcctatgccaatggttggaatattaagagcagaggttgcagcagcagccacaggaggtggaacacattctaaaacaaccgaaaaacatccagcttcttgcaaagccatagcagtttccacaacctaatccaccaaataagagaaaaataattttatcacacacccctttaaaaaataacctcttaaggattacatacacatgcctgaaccattacattcaaaccttaacagcactagcaatgtttttgccctgtggcctgaaaccaccaagaacactgatagcttgaggagtcaacccaacatgtcccataacggcaatccctgcttccacaatggattttgcagcagtgatccttgaaggtgatcctccttcaagtttaatagcatccattcctccttctttcaacaccctaactgcagtatcaaccgcctgaacatcattcaaactaaaacttaatcaaccaaatcgatgctttgctcgaacaataacaaacttgatatcaaagcgattaactgaaacataggataggatcctttgggttgtgaatttgaaacaaagtatccaactttcgagattattcacctgattggtgctagattcataagtaccaaacggcaaatcgccgacaagaagtggtcttttggctccgcgagcaacggcgcgacagtgaacaagcatctcctctaaggagataggaagagtggtgtcatagccatggacaaccatggcagctgaatctccgacgagacaaacatcgattccagctgtatcgatgtgaacggcagaagggtaatcgtaggcggtgaccatagttatcggctcacctttccgatgcttctgtctcaattgcgtcaaagtcactctctgattcgagttctgcggtttcggtcctccgtaaaccgtgtcctccggtacgttgctcataaaccggacggtggtgatggctctcgaagcacgagagcaacaactcctgacgagcgaagcagccattgttgttgctgatgaaagcgattttggaattagttataaatttaaagacttttggataaatatttttcttttaagaataaaaacgatgttggcgactcacgcgctggtgactccgattccaaagttgactgctttcgtactctctctatctactactccatcaagattgtctggttctgttccgggtttgattgatttctaccgtcgccggagattttgtcgtgtaatcacctcc

SEQ ID NO: 9621 - DNA, 3000 bp, Unknown
  misc_feature (1)..( 3000): cDNA_ID_2993443_gDNA_ID_1972163_Annot_ID_179640 3000 nt of promoter + ATG
attgaatacaatgtttggcaaaatattaatagctttgcatttattaggttttcttgttatacgttttgtgaatagtgacttcacttagtagtgtggcccaagggaggtcaagtttttctagtcttatttagtttaaatgcttgagccgtatgacattgacatgtgtgatattttgttgttgtttacctctagctattttcgtttcatcattcaacattttattgagcaatgagcagatagtaacagtatctcacgacttctaagttcattctattttacagtttccggaaataaaaaaacagaaagcaaaaaaagactccgttgccgggactcgaacccgggtctctcgggtgagagccgagtatcctgaccagctagactacaacggattttgctaaaccagcatcgtatattgtataagtagtatctagaatttacattatctcactgtctctcgcccaactgtctgcatgaacactaaatggaaaggaaagtcaaaacttgaaagactttcttttattcattctctttcttttttactcatttaattctcaaagaaagtgtataacgaagaaaaccacaagtcacaaagtactgactagtacaaggaatcaaaagagaggctttttcccattgatcattcccaacaaatgatcaataatttgtcttccagcatcacgaagacccgaatgcataaactcattcgttacccaaagtctgatacccgatatatgagaagctgtttccgtcaccagcttgaagtttacatacatatcttcgtagtaaaccgctgcagcaacaggcacctacaaaaagaaatcatgtgaaacagagtaaaattatttgatccatatgaaagaacgatcaagattctgaaacagaccttgttattctgcaatctaggaacatcatataatggaggccaatcctctttcttggccaaaagatcggcggcagctttaaatggcttcaaggcatgaatttcatcaaacatccatggaaatatcatctatacaaatccaaattctattttagttaagcaatgtggaccaatcatccaagctatgagccatacaattagaaatactcaaaacctgtacctctcctgtgaagagtacaggctgactttctttgactgccttcattgcgtcgaatttgtactcatatttatcccgtaatctatgagcagaccatcctgatgaagcaccctgaaaaagtttccatttaaacataaacgataacaagaagaagtaattgtctgaaatagaaaaaaagatgagaaatttgaagagactatacctcacagtatatggcctcgtggagaagagcatatagtggatttgtatcaaaagaatgccaactctcaaactgcagcaacgataaaatgtctcagactattgaattccttatttgagctgagaacagaaaacaacaaatttttgtgggtctcttacagcgtttaagaagaactgactaatacactttggagctccagtaactaaaataggatcccatactctctccaacctatgatcaattaagaaggccagatttaacacagaacatgtgaggtggttgataaaaattaagctaaactcttacatataatgcaggcgctcaaaaccagtacttgatcctaaaccagaaagaccaagagtttgaagacccttaggagtaagaatgcctcctgatgggagaggtacctaaagacaaagaaacagagacaagtaaggaactaaactaaactggtcagtggattgagcaaatgttgtaatccctcaccccgccaccttcagattcagccaagtaatttacgagttcacgaacaatctcaatgtcttgagggaatctcttgtagtatttttcattttggcgagcaacttgttcaaaaccggcttcatatacatcatctgctgtacatgctttaccaattggtggaattcctccagttattagcacttgtttgagtccttcgggtgcaaaactcagatatgtaagtgcacaaaagccaccgaaactctgtagatttgaagaaaaaaagatgaatacaaaatcaaatgacaagaactgaagcaagatgaccaatagacaatacaaagacaaattacctgacccaaaattgtccaaggatcagccttaggaacaagacgaactctaataaactcagcatctttaactatattatcagctcgaaagtgaaccaaataatcagctaattcctttgctgatttgaattgaagcatagaggaacatgttaaaggagtggacaagcctgttcctcgctgcaggacaaacaaaattagaacaacacaaagactaaaaaaactgtccagagaagagtataaaactatgaaagcatcatacttgatcgagtaagaccactcgaaactcttcacaagctctttgaatccatccactagcttcactaggccttggaccttcaaatcctggaccaccttgcaaatacaataaatacggcattgcttgctcctctttcccaactacaaaaaacaaaagacacaaacttttagcttcgtaatcacagaaagagctctgaatcaaaaagctccaaatttcaagttacccgcaacgatctctcgagcaaagacggtaattttgggagaacttttggaataatcaagaggaactatgaaccggtggtcacgcagtcggagctccggcaccgaaaaccacttcccagtaacatgctccgacttcgattccccagctacatcgacgtaaaccgatcccgcttcagccatggaggtgattacacgacaaaatctccggcgacggtagaaatcaatcaaacccggaacagaaccagacaatcttgatggagtagtagatagagagagtacgaaagcagtcaactttggaatcggagtcaccagcgcgtgagtcgccaacatcgtttttattcttaaaagaaaaatatttatccaaaagtctttaaatttataactaattccaaaatcgctttcatcagcaacaacaatg

SEQ ID NO: 9622 - DNA, 3000 bp, Unknown; identical to SEQ ID NO: 9576
  misc_feature (1)..( 3000): cDNA_ID_2183928_gDNA_ID_1972163_Annot_ID_179648 3000 nt of promoter + ATG

SEQ ID NO: 9623 - DNA, 3000 bp, Unknown
  misc_feature (1)..( 3000): cDNA_ID_3042687_gDNA_ID_1972163_Annot_ID_179644 3000 nt of promoter + ATG
ggcgacgaaggctagagtgtagagagtaacgtgacctttgttttcgaagagaccgagtttacgaaactcggcagccatacgacggtaatcgcgtgagacttcggagacttggaaatctctgatgtggtaaccggtgaagagatggtcgagatggtgccaagcggttccgggatgaaatgcgatgaaagcatcggtgacgtcttgaccaacgagattgagaatcaccgtgtcgcctccgggatgagttttaatccaatcggagacgttgtagaccttgccttgaatcgcgatccatagatctccagatttgttgtgttttttaagatcttcgttcgtaatgtactttttctccgtctcttccgccattgacgacgaaccaaaagctccgagatccgatgaacgcacagagagaagatgaatctcttcccacgatttgctttttccgaatttgaaaaaagctttgagattagagaaacaccaacctttgtttgcccaggaatggatctggaatcggatttttgaatctctctctgtctctctctctctctccgcttatcttcgactccttccttatcctccttatattatgggtttgttttatatttagtgaattttcgcggattaatattgaatttttggagaccgaaattacgtggctaaagcgtgccgacgtcagtcgttctcacgtgtgggactttaaatattgggtttgatgttaattttgggtggtatatcagaattggtaaagagggaccattattgggcaattaagaaaatggttagttatggtaattagaaaggaggaaacttagtgctgtccctcgtaagtaatcatgaaatgcaagacagaccacgtgttaccttagatattttctgtatgttctgtcattggttggtgtccgtcaattttttttctacgctccaaaaaagttagtaatgtcaacattaagaaaataaataagagtatcaccaaatgccaaaaccgaaaaagaaaagtatcctctaattgtggtcaataaagccttattcttttacagaaaaaaacaaaaatacaggttttacctttaaaaatttcatttttactataaattacccgaatattagcatatgtgttgagtcatgagtgatatggaaacataaactaacctaaagtttatgaaatgtaaaatttataaatagaagcatatggtttttacgatatattgatgacttttggcatattccgttttatgtatagaaagatttttgaatgcaaccagcaccgtccatgttgtctaactgcttctcaagacttggtctcaaagatacacagctgttctcttccatatctttttctgatttatggttaactcttccaagatattttcttcctcaagtgggatatctttattttatccatggaggagaataaaagtcagataaacacattgataatattactaaaagaacaaattaaatagcaaaagggagggaaattgctcaactgggaaataagaagactttttttttttgtttggtgtaaggaatacaaagaagacttgggaaagcagtgggaagatggttggttattcatttttataatataggagatactatttctgatgtcacttttgtttataagtaaaattataaaatgcatacgattcgaagcctacaacgtgtgacaaatgaaaattggtgcatatattttgttttgttttcaagaagataattacgaatgccaattttgtagaagaagatattttgaagttttgatgttcagtcaaatgaaatttatttgggcctacacaacgggttggaaaaggggtcttgatctgaaatcttaatttgaaaatgggccttattctggaaactcaaatccaaaagggccgcgatgaaacctacatagtatatacattacatatatagataattggatatatggaaatgatttcctaaattcctaatagttcagaaccgttgatttagaaaaaattaagaacatgtacggccttaaataggacggtctattacaaatttataccgtatatgtgaattttcccttttctaaaattatgttaatgttaaattttactttcttttttttttccgtttttttctcttacgtcctatatgaacattgaacgggtagtgcctgaataaaaaactttaaagagcacattcaaatttgataagtcgtcattctatatttttctctgtaatttctcgtataaaaaaatatgactagcgcagataatgagattttgaggttgaggcacgaaaggttgatgaagatgtcggagaaattgttgtacatgatggattatgctgactcacaagtggaaaggttcaagtcgatattgacatcgcgtgacgatccactggcttcgttttgtgcggtggtcgtttgtcttgtcgtttgcttggttccattacagatttggttttaagttttgaatgcccagttggcctatttcccagtttcttcgcagtgacataccaagtcgaatctacaacttcttcaaaagtttgccgctgaccaaggcagagctagactttccaagtgaaatcaacaacttcttcacaatgcctccgaccatcgaagagcacatgtcctgacagattttgcaacgacggctgttgtgtttgtgtttttttgtctaaagatttattttgacgtctcatatttatctattgggcctttgtttttaaaagcccattaataataataacttgctacgagtagcgatttgttttaaaacgtaacgataagagttaattaattaatgaatacgctaattcaatatgatctaaacatttatttcaattccaaatctcttctctctgaccgggaaaagaacacgaaattcatttctgcttattgtttatctgcgctcaattccgacgaagattcattgtctctttgatagacaagtgatctgtgtttttgtggggtttttgagcctttgaggctgcagtaggtgttgagatagagctatgtggagttcaattgagaatatg

SEQ ID NO: 9624 - DNA, 3000 bp, Unknown
  misc_feature (1)..( 3000): cDNA_ID_3042699_gDNA_ID_1972163_Annot_ID_179634 3000 nt of promoter + ATG
aaactatgcttttgggactctccgatggatctttatatagtatttcctggaaaggagaggtaatgtacatctgcttcatctgcattgtttgttcttggggtttttgaattctttgtgcaagattcctgatttctcatgttttgtttgtctttgtagtttggtggagctttcagtattggctcccacccttctgctagcaacgatgatagactcttgtcctacactcttggtaatgggctagtctctggagtagcttcaccaacacttgcatctgatgataaattctctacaaaaccggctattgttcagctggaactttgcactcgttccaagttattgtttgtgttaaattcggatgggcagctagtagtatgctctgtgaataagaaaggtttaaagtacactgagagtattagagctgagaagaagttgggtggtgatgctgtttgtgcatcagtggcttcagagcaacaaattcttgctgtgggtacaagaaaagggatggtggagttatatgatctgtcacactcgatctctctcttgcgaacagtttctttgcatgactgggggtaagcaacttgttactatgaaaagggatggtggaattttgtgatgaacctttattttttaatatttgttttgaaaggtttgagtattactattcatctgagtagtttttattgtggtgttgtgtaaagaccataatatcatacttgtcatactacaactggaagtttatacgcctttggtagttttcaagttgtcttactgtgatttatttcatgcccttgatattttggctgcatcgttaataaaactgttttaaaacttgcagttattcagcggattacactgggcctgtaaataacattgcatggacgcctgataattctgcttttgcagttgggtggaagtcgagaggacttgcagtttggtctgtttctggatgtagattaatgtcaactgtccgccaaattggactgacttctacatcttcccctaaaattaatccaaaacaagactgtaaatacgaaccactgatgagtggtacttcagccatccagtgggatgaatatggatatagactatttgctacagaggaggcatcatgtgatagaattcttgcattttcttttgggaaatgttgcttaaatagaggagtttcaggaaaaacttatgttcgtcaggtaatgtatggtgatgatagactactcatggttcaggcggaggacactgacgagcttaagcttttacatctaaaacttccagttgagtatcatcatatccgttatccccttttgctcattcatcgtatcactttgaaataaatttcttatatatattttcttggtccaggtttcttatattagccaaaattggcctgttcaacacgtggcagctagcgaggatgggaaatacttggcggttgctggtttacatggcctgattttgtatgacgttaggtttaagaagtggagggtatttggagatgtcagtcaagaacaacagattcattgcaagggtttgttatggttggggaagattgtcgtaatctgtaacttcattgaagcttctgagacgtaagtcccgatctatattattagtttctaatcatggttcactggctatatttattaatgtttacaaggaagagaaagtgccttttaatagaaatgtgtttgctactcttccagacttttttacattaatgtgataaacgtttctgagcattttgtctttgaatgttgtttaatttcacgtgtatgttcgctaattattgcagatatgagctgcttttctatccaagatatcaccttgatcagagctctttactttgtcgtaaagtgctgcttggcaaaccaatggtgatggatgtttaccaggattatatacttgtatcttatcttccgtttatcatccacgtctaccatgtgaagatatatggtgaattgacaccttcaagcaaagcagatctacaggtagttagttattccggttcatttcttctctgcatcattttcagtaaattatactttttaacttccaaatgtgaacgcttgagttgcttttcatgcaccttaaagtgattaaatgacaaacagctttccacagtaagagagttgtccatcatgactgcaaagagccatccagcagcaatgcgatttgttcctgatcagcacccgagagaaggcgaattggatgaagataatttgtcttctgatttgtcagaaagggaaccctcaaggtaatcatcaatagagtagaatatcctttcagtttatgctgtcattctaattgcctttgtggtctccatagatgtcttatactgagaggaaatggggagctttcacttcttgatttggttgatggacgagagagggaacttacagactcagttgaactattttgggtgacatgtggtcaatcggaagagaagacaaatcttgtcgaggaagtatcttggctagattatggacaccgaggaatgcaggtaattcctctgcttcaaagctgcttgttatgctcacttttcttcttcttcttttttttttttttttttttcttttttctttttctcgttatagggttgccctgcccctaagtgtctgacagtaactctctgtttgatccctgtcttttgtaactttttttgatttgtttaacgctgagattctatattataggtttggtatccttctctaggggatgatccttttatgcaagaggatttcctgcaggtatgcatgctagtagagtccattttcaccgccattggtggcttatctttttgttctgatttttattgtctgtaacattattgtttgacgacattgacattcaaacacatccctcttataaatttctaattttttcattgtttcaaatgcatttttattatgttccattcttcagctggatccagagttggaatttgatcgtgaggtgtatcccttgggacttttaccaaacgtgggcgtcgttgttggagtttctcagaga

SEQ ID NO: 9625 - DNA, 3000 bp, Unknown
  misc_feature (1)..( 3000): cDNA_ID_3042709_gDNA_ID_1972163_Annot_ID_179631 3000 nt of promoter + ATG
aggcagtagataaatagggttacgttctcggtattaggacattttcataagaacaaacaaaaaatagagcactaattatcattattttaaaagacattagtatatgaaaattttatcaagatcgttaactaatcttgtagtaaagtaagatcaaatggctgagcttcattccgtaaatcacacgtcaaagaggtctcatgcgttgtctctattagcatttatactggttataggaaaacaacaaatgtatttgaaaagtataaaattcttttgtaattacatatgataagctaagtagctaactactgtattaggttcttttctttatttaacaagtttagatatttgttttgtgattctatgttggcatcagtggaggtgtatatatcaaataatgcgagggatcacctaaaatattactatttctataaaccagttcattgcttttgtctttcttttttttttttggtaagctgcttttgtctttcttatatatataggaaactatgctctaatttgcactacggtttggattagtttcttattttgactacagtaatatagttaggattgcttctagttttgaaaaagatgataatatgttttgagatcggtacaatgtttaattgaaatatatatatttgatgatcaaattaaaggcatattaggttgagtaaaaacattacaaaagcaaaagttcaaaaaaaaaaaatgaagaaagcaaagagaaacgagagaagggtgtgtgtgggtcaaggaggctttaaagagatgattaataaagaagaggaatcaaccttatctatacccctcaccctcaatttcgaaaatgatagattatatatatacataattaataattatataaaagtagaaaaaagtctattgtttaactgagtggtggaccggagagaggtataggagacaagtcgtcggtggcaatgatccttccaccaaccggcaatggttcatggctcaactatgatcggagaaatgtcgtttttgcaatgaacatatatgttttgttatctataatcgtattttaaaatcaagtggtcgtatatatatactctaatacttatagtcatgtggaaattttttcataagatgtacaacttacttacgatgatatattcaaacttagtaggaatttatttggttctatagcctatatatagttgactcactcaaaaataaccagagataaataataaaattgatgttttttggtaatatttatgaagtatgggccttatttataatcacacgctgaattctgaaaccttataattagaaaacgcattcaaaaaaaaaaaaaaataacaataagaaaatctatatagcctagtagaacggtcacaaaaacccacaaaagtatcaaaaactcgtaaaccatcaacgtttgagctcattttgttgttatagtcaaaatcattcaaagttattttgacaagacgtattggtaccataataacgcattaatacacctatacatttataaattattttattagttatacacgatggtagtacaagaatacatgtattgtagtagaattttgtaatcaattaatgtcacaaaattcaaaccaaacttcaatgagaaaattcatgatgctcaactagtcaatgtgtatgttatacgacaaaaaaacatgcaatttgtcaattaccatcgatccaaaaaaaaaaaccctctaaaacgataagaggaacgaaataagtatggagaatggtgtgttgatttggaaatgttataatgaggccgagacagccacatggccctattgcttgtatgcatatcatctcatctcctacctctcccacacttctctttgtcatgtcactgtttaatttttgaatactcgcaccatctcgttctctggtcccatgatgcatcgatacgaatatacttgattgactgtttcttgtttgtttcataactatataccctactttaaaccctatttgatccaatattgatcttagatttaagatgatgtttcggtggaatatgaggttcaatcattgcttcatttgtaattaaataaaattttagatgatactgaaaaagtcacgacaatacagatttttttattacactataattgtttttcaaataaaaagattggagttcatgtattcagtctctgttagggtcttaggaaccttttgttgttgatattatacgataaagatataattagcttattctctatctttatgattcctattcctactgatgtctttatgaatctcataatttataggtcacataaaacatggctaatcagtgttttgctaatcataagattttatagatgtgattcgcaattttgtttcctacaaagcaggggtggttttctagatagaaagagataaacgtatacaatcattcgctataataatatatgatcgattaacaacgatgtttatagatatttaatcattttgctagtgagtatacagtcttagatctcgtcgtcttgtctttctcctacacgtcacatggtaccacttcatgtttctttttgcttggtaccactccatgtttttattatcaaattggatatagaaaaattgcaattaatttgtagaaggtacataaatgaggtcccgctccggcaaatgttaaagccgtagttattttcttgaaggcctaatgctatcagctgaagattaaaaaaagcccaaaaacatatgggctttggtattctttataagcccagtcacttggaatactagcttatattttctttctttaaaactcagttaatagttatgttcaaatagagagaaaatctaagatgtggtgggacgaagttgccacgtgccaatgagttgaccaatgaggaaactcagtgcgttatccgtagggataatcagataagcagaatctgattttgtcaccagagtgcttttatagattacacaacacacgttcgtttctttcttcttctaacacactctgagtcttgaaggtcaacaacgtcgagaata

SEQ ID NO: 9626 - DNA, 3000 bp, Unknown
  misc_feature (1)..( 3000): cDNA_ID_3042716_gDNA_ID_1972163_Annot_ID_179627 3000 nt of promoter + ATG
gtcttttctatttggcaattagtacactacttacgttttgtggtaggaacaaataatttgtaatcttggcacaaaccagtgctttgtaactttgatgatagaaaaaatttattcactagttcgataacgattatcaatcatcataaataaaaaaagttagtttagacgatcatgaagagagaaaaaacagaattattggtactatctcttaatttcccaactctgtaggtacactcattaatcattatggagaatgtcatagtcatggtacataatgaatgtgcatggtgcttatggtacagatgttcttaacttcttatcctggctggcaaacgccagatcatctcaactggaggatcatgttttgttcgtaacagttagtaactaaccaaattagtgacaatcatgagggattattaaaaacagacattgatctatttttgattagaaaacattactgataaaactacaaaaatagctggaatggagcattcaaaactctgtccaaagtccaaacggttaaattatcactgacccaatccaataattagatttatttagtaagtatgattactacgaagataacattaacaaaattttatgttattgtcaatttgtcatcatcgtctttattttttatttctcaactttctttgcattacatcttccaactatataattaaccactctactttctcaaatcccacactcagagaagaagaagaagaaaaaaaacagagctttacaatttctctctacagagatcgaagatatggaaggcaaggaagaagacgttagagttggagctaacaagttcccggagagacaaccaatcggaacatcagctcagagtgacaaggactacaaggaaccaccaccagctccgtttttcgaacctggtgagctttcttcatggtctttttggagagctgggatcgctgagttcatcgctacttttctctttctctacatcactgtcttgactgttatgggagtgaaaaggtcaccgaacatgtgtgcttccgtcggaatccaaggaatcgcttgggctttcggtggtatgatatttgccttagtctactgtaccgctggtatctccggtaagtcactctacttctccaagtatacgcctttttactgtaattaggtttccgagtgtttgggttgtgaaagaagacgataaagctataatcttgagaaaattgtgtttagatttatagcttcttagcctgaacttgttccatttgtatctgattcaagaaatctcagaaagctacaatcttggtggaatttgcagttttctaatatgaattgtgtcctttagcctaatcttggaatgtattttttttatatgtaactctcaggtggacacatcaacccagcggttacttttggtctgttcttagcccggaagctgtcgcttactagagctctgtactacatagtgatgcagtgcttgggagctatctgtggtgctggagtggttaaagggttccagcctaagcaataccaggctctaggaggaggagctaacactgtggctcatggttacaccaagggaagtggtcttggagctgagatcattggcacattcgttcttgtatacacagtcttctcagcaactgacgccaagagaaatgctcgtgactctcatgtccctgtaagttaccactccttgtaacatatctgctaatagcttcttgaaacaattgaaatgagtgaacttttaagctgcctttagtgtgactctcatgtccccgtaagtaaccagtccatgtaacaattgctagaaacaattgaaatgagtgaacttgaagctgccattagtgtgcactaaagactgattctcaatattggatttgttgcttaccggcttgagttttgtaataattgtgcagattcttgcaccactcccaatcgggtttgcggttttcttggttcacttggcaaccatcccaatcactggcacaggcatcaacccagctagaagccttggagctgcaatcatctacaacaaagaccattcctgggatgaccacgtgagtttccacacactatataccaaatcgcattccaaactcggtttcgagcatttttccctgacaatttcgtttttttttgtcgtcattccagtgggtgttttgggttggccccttcattggagctgcacttgctgctctttaccatgtggttgtcatcagagccatccccttcaagtccagaagctaagtaaaaacaagacatcaagtcctctggtttctggccttgtccttagttgcttctatagttctattgttgatctactacatgtatgtgtgcaatgtgtttatctatgtgccctcttaatgcaatatttgtaaacaaggaagaagttccaaaggagaattatttgcaaattatgatgtttaacatgtttattacagatcaaagatgtttaacatggatattggtaaacgagaacctatataaacccaaattaagatggtctatcaccgcttaaccggttaggtattgtaatggtattttaaacgtgtcagtgtcaccaacctcgcctaaatcctaatggaattgagacacagccaccaaaaaccatcagaaaaatggttccatttgtcaaatacttttcaacaaagcacgaagattccttgaccgatagaaaaaagtaaactgtataagaaaagaagttaaaaatttactagaaacaggtgtaagaagttgactgtaagtttgatcattccacgagtacgaataaaactctgacaagaacacttcacttaccacaaatccacaattacttttctcacatagttccaacaagcaacttgtattattatattcttaacaccaatggtaatggatgatgatgcaatgtatttgtctcgttttctcatccatttatatgattgctttcttctccacctcaccaatcactcctcctctaaacttttcttcactctcttgtctcttcaaacttcggttactccgttttagtcgacaaca

SEQ ID NO: 9627 - DNA, 3000 bp, Unknown
  misc_feature (1)..( 3000): cDNA_ID_2184271_gDNA_ID_1972163_Annot_ID_179622 3000 nt of promoter + ATG
agccgttggtttgagagaggacatgagacttctccaatgataaacaaaaggcttcctcacacgagcttggttccaaatcttgctcttcgatccgcaattcaagaatggcttcaacttcgtgaattattgaacagaccctctgcttgcagagagatataagtgattcgccttaatcagagtgacaaatttatcataaatcaaaacattttcaaattttgtcaattcaactttctctaattaatgtttatattattatatcaatgcacagtgcgttacaacacatatgcttcttagttaataggagttgttactctatcactagtattattggtttggtcactcttttttggggtggttacgcacgtatatactaaatatagactatgatctacttagattttaatatttgtgatgaattgtgaactataagaatatagtggttatgactgaattttttcatagatttaataaatcttccctcatggcataatattagttagttaatatatagtggtatagtggtcactattttatttgttaaatttggtttgatgcattggtggtcattataacaagcataaaaaaacactaaagctagtattggattcatccacgtttttgtaattttgttatttgatggaataataataataaatttagcctgaatcttgcatagatttagttctcttaattaatcttccctcatgacgtttaatataacggaaatatggtggtttggttgcccactacacactatatattcctttgatgccgtgatagtcattataacaagcacaaggaaaaacactaaatcgtagaagaagaaaagaaaaacaaacaagcaatggattcaacagccaccgttgcaagtgatcgtcttagtcaactaaactctttcgaggagactatgacaggcgtgaaaggccttgttgattccggaatcaaagaggttccagctatgttccgtgagcctccagctattttagcaagccgaaaaccaccactagctttgcagttcacgatcccaaccatcgatctgaacggaggagtagtgtactacaagaatcaagattcagttacacggagaagcatggttgagaagataggagatgcagcggagaaatggggtttcttccaggtggttaaccacgggatcccgctcgacgtgctggagaaggtgaaagaagggattcgcgcgtttcacgagcaggatgctgaattgaagaaacggttctactctcgtgatcacactcgaaaaatggtttactatagtaacttggatctcttcaccgctatgaaagcgagttggagagataccatgtgtgcctatatggccccggatcctcccacatcggaggacttgcccgaggtttgtgggtaaggtttccatatatatatgagcttaattatttatagctaataacatttttagaaaggtttttaaaaaaaattttgtattattttttaaaaagtgaattatagaatttttaaagtaaatccatttgtatttttcatgaatctgaattgatgttttgatatgtggcagggagattatgatggagtatgcaaaggaaataatgaatttaggtgaattgatctttgagcttctatcagaggctctagggttgaataattctaatcacctcaaagacatggattgcagcaagtctttggtcttgttcggccagtactatccaccttgtccgcagcctgaccatactttaggcttaagcaagcacaccgatttttcttttctcaccattgttcttcaggggaatctcggtgggcttcaagttctccatgataaacaatattggatcgatattcctcccgtccctggggctcttgtcgttaacctcggagatcttctccaggttaaagaagtgactttttagctttgtaacattttagctctatctttgttaggaatatcatatatgaaataatatggaatttaaagtagtaagtaaaagatataggctagttatgatttgaatggagatgtgagttgattttttatttgaatttgtgcagcttataagcaatggcaagttcataagcgtggagcacagggtgatagcaaatagagcggctgaaccgcggatttcagtgccatgtttcttcagcaccgtgatgagggagagccatcgagtatatggacccataaaagagcttctgtcagaacaaaaccctcccaagtatagggacaccaccatctccgagttcgcaagcatgtacgcgtctaaagagatcaatacctctgcgttactccgtttagagatctgatacatcgaccaaagaaaatgtctttgtattaaataatgttcgtatgcgtttactcaatttcaagatttgagacatcgagcaaataaactgtacctttgtaacgtaatgtgtgtatgtgtgtcactccatgcacggatatgtcgacgtaaaacatccgtaaaatgtacccttgtaacataatgtatgtatgtgtgtcactctatgttaggatatgagacattgaccaaataaaatgtctttgaaaacacacaccgtttggcccattgacccactcttcttttttgtttttacatcaagtagtcattttttgtttatatggtgctagttataataacccattgctacctaatcttttaatacacacgcacatttgttttaagtatattttaatgatataatcgacattgattacttccttgagtttgattaggtcgttgacactcaaagggcttaaaagtaaaaccgcacaagaaaataatacatatacatgacattccagaacgaatattcgaaagaacagagtaacacaagaaagggatgacacatgccttaatcggatcttttctttcttaattccatattattaaaaacattttccggagaagaagacaaaaccaaagcttcttgtctgaaacgaaccagccattctaaagatttttacaaacaactttttcccgagaaaatctcaagtttgaggaagcgagaaagagcaac

SEQ ID NO: 9628 - DNA, 3000 bp, Unknown
  misc_feature (1)..( 3000): cDNA_ID_2184283_gDNA_ID_1972163_Annot_ID_179625 3000 nt of promoter + ATG
ccggtaagcaacaaatccaatattgagaatcagtctttagtgcacactaatggcagcttcaagttcactcatttcaattgtttctagcaattgttacatggactggttacttacggggacatgagagtcacactaaaggcagcttaaaagttcactcatttcaattgtttcaagaagctattagcagatatgttacaaggagtggtaacttacagggacatgagagtcacgagcatttctcttggcgtcagttgctgagaagactgtgtatacaagaacgaatgtgccaatgatctcagctccaagaccacttcccttggtgtaaccatgagccacagtgttagctcctcctcctagagcctggtattgcttaggctggaaccctttaaccactccagcaccacagatagctcccaagcactgcatcactatgtagtacagagctctagtaagcgacagcttccgggctaagaacagaccaaaagtaaccgctgggttgatgtgtccacctgagagttacatataaaaaaaatacattccaagattaggctaaaggacacaattcatattagaaaactgcaaattccaccaagattgtagctttctgagatttcttgaatcagatacaaatggaacaagttcaggctaagaagctataaatctaaacacaattttctcaagattatagctttatcgtcttctttcacaacccaaacactcggaaacctaattacagtaaaaaggcgtatacttggagaagtagagtgacttaccggagataccagcggtacagtagactaaggcaaatatcataccaccgaaagcccaagcgattccttggattccgacggaagcacacatgttcggtgaccttttcactcccataacagtcaagacagtgatgtagagaaagagaaaagtagcgatgaactcagcgatcccagctctccaaaaagaccatgaagaaagctcaccaggttcgaaaaacggagctggtggtggttccttgtagtccttgtcactctgagctgatgttccgattggttgtctctccgggaacttgttagctccaactctaacgtcttcttccttgccttccatatcttcgatctctgtagagagaaattgtaaagctctgttttttttcttcttcttcttctctgagtgtgggatttgagaaagtagagtggttaattatatagttggaagatgtaatgcaaagaaagttgagaaataaaaaataaagacgatgatgacaaattgacaataacataaaattttgttaatgttatcttcgtagtaatcatacttactaaataaatctaattattggattgggtcagtgataatttaaccgtttggactttggacagagttttgaatgctccattccagctatttttgtagttttatcagtaatgttttctaatcaaaaatagatcaatgtctgtttttaataatccctcatgattgtcactaatttggttagttactaactgttacgaacaaaacatgatcctccagttgagatgatctggcgtttgccagccaggataagaagttaagaacatctgtaccataagcaccatgcacattcattatgtaccatgactatgacattctccataatgattaatgagtgtacctacagagttgggaaattaagagatagtaccaataattctgttttttctctcttcatgatcgtctaaactaactttttttatttatgatgattgataatcgttatcgaactagtgaataaattttttctatcatcaaagttacaaagcactggtttgtgccaagattacaaattatttgttcctaccacaaaacgtaagtagtgtactaattgccaaatagaaaagacaatgttaaagaaaacaaaaacatgcttagtggttgctatattgttctggaatgggccctatggccctacgctcttgtagcatccaagggccatcttgattaccacctagtattttccaactccttatcaatcattttgacactgtaattaagtaattaatgataaaaaaggctcatgtgagatactttctcaaactaaaaatccacatttacacgatttgaggaccttcaatctttaaattattatttttatatgtatatttaagctgcaaaatagaaacacttaaaaccaaaatgttgaaacatcagctaaaatcactagccactaaaaaaaaagaccgacccattaagcctcatgacatgataaaagaatgtgtgaagtgtgattttggaatttttatgttggagactgattatttaatagccgtccaatgcatcgacgataagatacgtggagtcataccacctaatgccggcgccttacatatccaaaaccgaccatttatcttatgacatatgtactcgatcaatttattaattttattgtggctgctattcatgattgcatttgccccacctagccacccccatttgcgtcacggctccataaaaaaaaaaaatattcattgaccaaacacaaaaaaacaagcgaaaattaccaatgtcctcctaacatgaaattaataagacaaatgttatcgtctgcctataataaactaaaaaaaaacaataaaaaaaagttgcgacttttagctcgagacaataaatgggccatacatatacgggcttaagctaacaacactactattgatcgcaggcccggttaaacaaggctcgtacacgtggctcttgagactcatcaacttcgggtgtgaactgttgaaccatctcaagacatgagctatcacggctcgtacacgtggttctaaccacctcattatctctcgaacttaaaattaacaaaattcccaaattatttagctatttttgtctgatctgccgacgctagccgttctcctccgccagattcaaatatttcctccgccgtcgacactccttacctcctccggctcacaaacttaatccaccaattttaccatgctttagaaccttgggcatatatcaatg

SEQ ID NO: 9629 - DNA, 3000 bp, Unknown
  misc_feature (1)..( 3000): cDNA_ID_2184275_gDNA_ID_1972163_Annot_ID_179623 3000 nt of promoter + ATG
ctgttgatgatgaaagatggtgcgtaaatcctcgtaccttctcttgtttggaatcaggaccctcgtgattactttgaatctcaacaaggaaacatcctcagtgaacccagaggagcaaaggcgtcaaaaagaaatgtccatgaagcttatggattactaaaagaatccattttggtgattagaatgacgggattaagtgatccgttgattaaacctgaagtttcctttgaggtgctattctatctcaatataaaatgcatgctgcctaaagaaaccatggcttattgctttgttccctgagctaaatattgctaaaccctatccaggttttcagttcgttgacccgaactatctcaactgccaaaaatattctcgggaagaacccgcaagagagctttctggacagattaccaaagtccactaaggatgaagttatacatgtaagtctgacatcctccaatgtcccaagtaacaagcagctcaatatatactgattactgtaatttggttaataatgcctatggatattgttgtcccctcaaatgcatcaatactttttccttttttctctcatatacagcactggacatcaatacaagaattagtgagacatttttggtcatcttacccaataacaacgacatatcttagtaccaaggtaatgttgttgccacttcacattcttccaatcatagagtttgctatgtacatagattcttcaggatcaaattgaaatttatttacactgagaggaaattcttatactaggatgttatattttatcatgcaggttggtaaactgaaggatgcaatgtccaatacttattcactactcgatgtaagctatggaattcttcttcaaatctttttctcggagtaatgcgttagaaaagtagttcattatatcttcatacgaatgcatttacacaaacatgaaatttgggtaaaatgaataggtgcagagttgtagtcgaaacttacagcatatggtctagtgtttatggtttccgtaatattataccgaatgtaaaccaggcaatgaaacagtcggtgcagtctgatctccggcatcaagtttccttactagttcgtccaatgcaacaggttagcttccttccaattcatagatagttttattacatcatgtcttggtgaagtcttattttttccactcgcattgtatcgatccaatttaaccagcaaaaccagacattgcgttgtaatccagtttatgaattgaaatctgagtgatattaacccgttttctccaccaggctcttgatgctgcgttccaacactacgaatcggacttgcagagaagaaccgctaagattacatagagaacgttttgtacttggaaagaaagagatttccttcgacaaaaaattaaacattggactgaacatttagattttgtagtgtaatagataagattcttaaagaacttgagtgagaagcatcattagcgggatttggccaagaatgttgcttgtgctacaaggaacctctcaataccccaattgttttttttttgggtggcaaaacagttggttaagaacttgattgagaagcattagcggggtttggttaagaatgttgcttgagctatgtagtcactgaatcggtcattaaactctcataaacagaaatcgatgatgctaatactattgtttagttaaaggttagatatgttgctaatgaatttgtttagttttgtaagagcatagtgataattgagaaattggataatatatagagaagacgatgggaagtgtataggggtattcgggtttaattaacctagcatttgttttgagaatgtttgtaataaatttgtttaccataaaaaaaccttatagaaattaaattaacctaacctaaaaaaaaataaaaaaatgaaaaatgagaataagaaagaaagaaagtgaagacagaaaggttcacagaaatagccatctagaagagcctcaccgacttcatcagccaccaacgaaccctgagattctattttcatcatctcgagccatgagccatcgcggctcgtacacgtggcaattataacccactccattttctctcttgtcttttttttttttttgcgcgagaaaaacttaattattaaaaagaaatcccaaaatattattaagcccttctttctctctcttatccgctcctgtctctctctctctcttggtctgtttctgccgccgccgtcgccgttatcccccgccagattcaaatctttcttccaccatcgtcactcattgcttctcctccggtcgtaaggtacgacacgcttgtattcttcttatctattgctttctcatcgtcgtgtttctccattatatgtatctctctatgcgtgtgctacttgttcgattgtatcgtttgatcatttgaatgttatctatgtctctctctctcgctgttggtattcactctattcctcttttaatttcagtctccattgtatcaatttaagtttcggcacctctgtcttttgtttcatttttggtatttagcacctctctcttcatttctgggcttagggttttacgaattcatgattgaggtgcctcttcacattcgagagaaacttactttccatcaaaaagagaaaaagttgaatcgattctgaacttactaatctagactctcttagtttgtgtggacctggttgatgcatttttgattagatgccagattcaatctcgagctttctgagtgtttaccaagtttgatttcaaatttatgatcaatacattgtttcttctcttgtacccagtttagtgttaagtttccggaaattgattgagattgatgtctcgatgctcatagacctgaaataatcctccttctgtgcagtatttggaaccttgaagacttaaaaataacaactttttatagtgggcgctgtccaatatattggagagcttgacagtgtaataagatatatactctacaagcgttatacccgaagactgggtctataaatcaatg

SEQ ID NO: 9630 - DNA, 1197 bp, Unknown
  misc_feature (1)..( 1197): cDNA_ID_2105187_gDNA_ID_1972164_Annot_ID_179664 3000 nt of promoter + ATG
gaattcattcctgagaggttttccaacacctctataaactacaagggtcagcatttcgagctcttgccctttggagctggtcgtaggagctgtcccggaatgtccttgggaatcaccattcttgagctaggccttcttaaccttctttatttctttgattggcgtttgcccaatggaatgaccattgctgacattgacatggaagaagttggagctttaaacatagctaagaaagtacctcttgagctcgtaccaactcttcatcattcgtgaacaaatgcattaatatataagatcaaaatttgtaggtttgccctcatatatatagtttaatcagtttggtttttcattacattttggctttccttttatcctgtctggcttatgtattgtgaatcaagtatattcatgtttttatcttcaatagaaatattaatctatgtatgttttttttccaatgaagtggtctttaaataaactaaaccatgtttcaagttgacataacattaaaagtaaatcgttaagaggcattgaatcaaaaacttcttacaaaattcaatataattcctaagtttaattcaatcactaatcctgtttacgatcaaataaggtttgacgatcgcttcaatctagccttaagccacgtggaaccttacttttttttttttttccaaaacctaagtggccaaattagctcagaatttgtagaccgtagtgagtttatctcattagccctaaactcaatggccaatactagggtaccaccacatgcgggcatagttattttttcttcctatctgcatatttcatatttcccaatatattataactaacattatcaaacctaattagtttgtggtcacaggaatcagttccataaaacatggttagatatgttgattggcaccgtattgttgtcggtttggtttagagggagagagctttatatttaacgtgtctttttttagtggtattctccttctccatcaattaaacacagaaaatgatgtgcctcgacagagttgccttaattaattcaaattctctgatatattacacaaaaactttgatttattacaagaacctaaccacaagcataatgcctatatatatcctctctcgagaacaaaacgctcttcactctcctcatacaaagaaaaagaaagagttagcaacaaaaaaaaaacaataattatg

SEQ ID NO: 9631 - DNA, 3000 bp, Unknown
  misc_feature (1)..( 3000): cDNA_ID_2184561_gDNA_ID_1972164_Annot_ID_179669 3000 nt of promoter + ATG
tcacgagagactgttttctggttaccattagccattttactagtttcagaagctcgtgatgactctgatgaatagtcactgatcgaaccagcagttggtacactggaggaaagcttgggcttggatgtcttattggtttgttggggtgggattcttggctggcccataatacctctagatgtagatcgatttgccaatggctgggaagataatctggaacttgaatcattcttcttctttatcgaatctatagaaggtttgtgagaagcgctagatgaagcactggcacagctctctagtgaagaacatgaagaggtcatttcattctttgaggcatctgaagaacgtgaagaagacttaaaaggcacaccaggttttggtaagacgggtttagcacgtcgcgacatggatattcttggacccagaggctctttacctgtactattcaaggtcatacaatatatttcaattttaaaaaaacaagtgtaaacttctttaagaacaagttctgactaacccgcaggtaatttggaattcttttcttgttgcgttttgcttatatctaatgatgacctgttcgtcgatgttgttgacaagggcctgactttgctgagtccgttgggtggcttggaaatggatgtactgagacctcttgtagcaacaggctgcagaaaatattttatttttttacaatatccaatatattcattatgtggttcactatagggtaagctattaaaagtgatgacacgcttctgattcatagattcaacagagccaattcaattttattagtccagctcattaccaatggaaacctaggaaaaaaccattattctagttatgaaagactaagaaacaagcccatttaataaatatgcacctgagaaactgaatgaagatactatacctgtttggttgccttccctggtccttgtactctactcggatttctgggactgcctttagatttagtctgggaaataaaaaaattaaagagaaaattagccaaggagagagtaaaaagagatatccacagggtgcatttgttagtacttatcggatttacctttccctgagtggcagtgacgtccactgtacttgaagctggagttagacaaagaatgcataagatggtcaacttggaaacaaatcacaagaattaactattgctgcaaatgtgtatggtctagtgagaacagcttgaaacagttcttccaatgccacaaaattaaaacacagtggcgggacactcttcatgaaatatgatagaaaactctacgattagctcacattagaatactagctctttcagaagccataaaaagaaaaaggcacaggaacagcttcattatttaacggttaagtaaagcacaacacacaaaactaaaaaaagtaaatccttaatccttattagagagacattcaaagatacacatgccaaggtgtggtaaaggcatataacgatagaaagaataaagaagactcacttgggctaattgctacgtctgttgctctcaacacattacttttcccgggtgttgcaacatcagatgttttagcagacctttgaatagatgctctaacatcctcaaacaaaacaaactcctgactgttctccacagtgcagtcactttgaaatgtagaaatggattctgtagatctattaatatcctctagaatggtcggtaaagctttcttcccactcttatgattgctttccatcatgctggacagttcttccggttccaaaacacctgatgtttaacaatatatctcagcaaaagtaaagtaatacatacaaatcgaggtacttcgttcgaaatgaacttaccagcgctagtgaagaactcattgtcccaagcaagacttttacgcaaattatactttcctttcttcataactttctcaggctcaggcgactcgtgaggttgaagcacctcttccttctcttcaacagaagaagcaagtatctcatcatcacaatactgtgtatccctcatgaagtttagatctttatcctccttcaaacatttatcatccttatctgtctctgaaatgtaatacaaaaggcaaacaaattccaactttaaactcaattacaatggatctaagttcaagtatcaatcaaatgaagcaaaatcaaaatcctctactaatcaagtagattcagagaaattaacaaaaatacccagaacccataaatccaaaattgaaggagaataagcagagatattgtaattcaccggaaaactcggagaagagaaggctatcgtcttcaacagcgacatcaatcaaaccaaggccatcgacctcaacttcgcttttcttgctctctttatcttccattgaacagagagatcgaaatgttgagtttgctcaaagatcccaaagactgaggaagaagataaaattttgaattgaagattagattcgatttgttcccactctttgagaaatcaagggtttttgagttagtgagcgcggttgttcactaatgaatcgtgtaatgtctttgatcgactctcgaccgttggatttgttccatttttatttttgtttcttacttttaaaaactaatctcgttgaagcctaataaagcccataaaaaaaaaagcaaacttgacctcatatgggccttaatgcgtaaaacccaatatccaaacatatagccgtcgaccgaaatacgatgaactaactaatagagaattctaagattttgtaattgtataaaataaaacaagataagatttttcattacattaggaaaaaagttttgaattttatttgtatataaagaaaaagaggataaattaaacgaaatcctaagaagacaaggattatgatttgggatggttaatctctatataaacagagcaaatacgtgacttatttttcacaaacacattcataaactctactccaaatacttttcctgatccaacgagtttagagatctcatcatctttcttttttttcttcttcttatacgatcaaaac

SEQ ID NO: 9632 - DNA, 3000 bp, Unknown
  misc_feature (1)..( 3000): cDNA_ID_2184563_gDNA_ID_1972164_Annot_ID_179670 3000 nt of promoter + ATG
taaaatttaaagtgcaatgtaacaagtaacaacatacaaaataatttaaattaacagaacttcccaccaatgatatcaatgaagattatatattttgtatagtttcatcattcatcaaatctcgtaggttatatattatctttatccatgtaatttatttctatattacctcatttgccaacaaatgcatcaaaagacgaattattatggtcactataaaacttaagaaacgaaatatagtgtaaatttagcatgataagtaaaagataaacattctttcaattactatgattagtaaaatgagttataagttactgtttagtacataagattaataataaatcaaatgtgtacaaataggaataatgtttgtatattaaactataaactaaatgaaagagacgaaaattaaagaagtagccacacattaaaataaaaagtgaatatattaagcaggaccaaccaagaaatatcatatggatccaataaacatttggctatatatgtttatcatttggttgagtactcactgttggtatttttcattgaaaaactaaaataattttaaagattaatatgaattttagcaacttgacttaaatattttataaacaacattggtcaacttcaaaacatgaagaataagtagaaaatgaaggtaaaagataccttgtttctcatgtaaaagtgagaaggtaccttagacatttttcatcaagtcatttctaaaggaaatccacctttcacatattcacttatgcatatactctaaaatttgactcaacctctttatttcaaaacctacgaaagtcacataaaattttgtttttaaagatatttagttaaatatatatatatatatatatatatatatatatgtatatccattaatactatgtttatatcctctattaaaatatcggacatgttcataaaatagcaggttgaagacaccgggttcccatgtcgaaccactaaagtgaagctaaaggcctttgacaccatttactaaactttgaaactttgactatggttgtgactcgaatagttaaaacacaaatagctggagaaaaaattagaaccatgacattaataattaaataaaatatacatcacagatgagcatcgagcaagacatatatgatttgcttacctattaccttcatcatgaacagaaattctcagtgtaatgattgctaagaaattcttagtgtaataatttttaagccactttgtatctaccattgcacctataaaaggatgtattagcaaaaacacatgaaacatgttataaagaagagaagtaacaaagtgtgaatcagtatcaccacatttggacgatacaaaagctacacaaaacaaatattaaaattataaaaatgagagagagaaacttgattttagttcatttctttagtgaaaatgagaaaaataaaaaacaacgtaatacagaggacgaagcaaacctttgagattaccattctttggtttctccaatccgtcatactcatatggttcgtgctttgtctttttttctctttactttcaatttaattatgtggaaagacttagcagaccacaaaatattatttcgatgtttaaacaatcccgaaagcaacacagaatgatagaagtttaaaaggagttgtaagaaacaaaccttgaggaaccgatgttaatgttgttcctatgaagaatcctaccaggagcaacgtcaccaccatcgatcaactctctaagcccccaattctccacctcctcttctttcacctccttcttcttctccttctccacatggcggttattaggaagcttcacaggcaacctctcgaagtaattcccgaaacttaccatgcacgtttttattatcttcgtatagaaagaatgaagcttcaacctcaagcgttaacaaatgcagagaaaccaacttaaaaaaaactgacatgcagcgtcttgcattttataaggtgaagggttacactaaaaatgatattaaatatgatactaaatattgaaatcatggtcataattacataaatgataattatgttagtgtaacgtaactgctttgatttatgaaatagaacagtttagttgactaaaaaaaaaacagcaatagttagacataataaataaaagaaaacgtgatatcacatgtgtcattaaatagaatattaattaaactcaaagaatatggaaaatagtatatttaaatttaagaagaatgacacatgtcgaatgaataaagcgccacttgtaagatttttagagcacaagtttgaggaaaccttactttattatataagatactaggttttattacaaaactaatactattttgattccaaacaaatatatatttgcttaaatgacagaataaaaactgaataaaacaataaagataacaagaaaaacagtaaaccacttaaataattaaattagacaattaaataagtagaaattacatgtcactgagaaaaaccacttatcataacaactatttagataaattaaatccacttacataaatacaatgtatataaaaaagaaatcatgtttttttactatagtttacatgatagaagaaaaaaattcactacattgaaataaatcttatatattttatttcacctaattactaaaaaaagcagaacaaagaaacattgttgaggaaaaaacaaaagagttttttttgtttgtttggttttgtcaaattaacaaaaaaaaaatgaacggtgtcgataaaaaaataaaaaagccctaaatcgttgaatcgcatacaagctcctatcttctccagcgtcggatcagatcagatcaaatctctctctccatctccgtctcctcctccaatcatcatttctctctccgtctcccgctctttttcgaattctccttcttcttcaggtattctaatcacttcttcgcgctttctgggtttggttcctcgattctcccgatttcccaatctctacctgattatctagggtttctgagatg

SEQ ID NO: 9633 - DNA, 3000 bp, Unknown
  misc_feature (1)..( 3000): cDNA_ID_2184581_gDNA_ID_1972164_Annot_ID_179674 3000 nt of promoter + ATG
tactagtgcaacgactgttacaaagcaacaaactttattttaaacttagagaaggcaagagtcatgacgccaaaattgattcatgtttcaacttaacctacttaaaaacgaactcctctaaggaaacatactgttctgttataatttaactaatctactgtcactgagagtttcctagaacacaatctattacaatgacagaaacttatataaatttgttacgctgacataaatactagcacaagcacaaacgaagaacacatagagatccttagacaaagtaaatgtgaagtattgtgaaccagtggaatcaattcttcaagtttcactagctcaatccaagacatgaaagcggaatcacttgaaccagtggaatcaattcttcaagtttcactaacaaataatagtaaaggaaaaagatggaaggaaaattaaagatacacggaaaaagataaactcttgcctgttattcacagaaccgtccttgttataatgcagagcaccaactagcttcttagagacgtcctgtaactgctgtctcagtgatactgtgtacactacaataacacatcataacaaaataaatccatgagacaaggcatctagatcagcggtgaaaacggtaagctcaaatttctacattaccatccccagaattcagcccaataagtaagtcatgcccatccttagcatccggatcaaaagcatgacacatagggtttgaattactgaaatggatagactttactggatcctacatcaaagaagtttcctaaaccattacttccaaaacaaaacaaaaaacagaacattacagccaaatcactaaaaggaaaacaaagaaaagaagaaattaccttttcttgtgagttcaagtcacagataaaaatagcatcactcacattgaagaccaagtaagttcctttcccatcaaaattcgtatttgtcatcgaagtattagaattagaagcagcgaaggagccactaattcttgaacttgtactcacacttttaccgccaccattacctccaacaaaactaagcgcacggctcccatttccagttcctagcaacctcgctgttgctgaacgaaacccgctactagcactataacccgacgaagtaccagttggagtcgaaggagcagctctttccttaagctgagctatagttacctgaaaacgaaaatttccaaattccatcattggaaagcaatgctattcaaatcgattgatcagctaaccaactagtgcatcaaaatgcaaaatttcactaacaaaaatttaaccatcgatactaattctctgaaattgccgatttgaatgattagaaatcctaatgacgaatcaaactattaaacccaaatataaaaatttgatctttacctgagtaacagttttgccatgtgcgtaatgaaggagaccagaggaatgcgttttctcgtagtgaagcttatacttcccttcaggcgtcttgaaataagtcttaattcccggcgactgaggattcgccgccggtgaagacgacgaagatggcgctgatatcattccattagaagtgttcatcatagtgtttgcttgctactcttcttcgtcttctctaatcgtcgactcaaaaagcatatatgtgatcacgatttacacaacacctagggtttgttatctctcacccaaaatcgaaacccagaaatttttcactttttcttcttcttcttcctctcttcttcgatgcaaaatcgagtaaagtctcgacgaagaatcaaaaacttctcttcttctgaggtctctaatggcttaccgaatcaaaaggggttattatgatgcaactacttgtttctcgcaacatattatgattatcaaagctttgactcggaagcttttaaaaagtcattgcaatcaacggtgaagattctcgtaagaaagattttaacggatggtgatcagatgggtcgggttggttatttcggtttcgggttttttaataatcaagatacacgcatagatcacgtgggttgacgtcatagaccaattcaggcccactttcaagcccattatgtatcaattgatgaccaatgaagtaacggcctttcagcttagaaactaaagtagttttcttcataataggcctagcattcaagtttttttttggattatttttgtgaaagcaggccttaaatcaaattatccaaatatggaattggttttggttcagtgtacatgacataaatgtattttctttaatgtgatttgattctagaagacgagttattaccggtcgaaaagaaaaagaaaaaaaacagacgagttattaccgttttagttaaaataaaacttggtatagttcacttagaagaaattcagttttgtttggttaacatcagttttaattcgaaccccatcccatccataatttgatttgatgaggttttattctcacccctaattgatgtcttggaaactctagagaatccagtgacgatgatttgtgttaatgttcttggtacgacaattagccaaaaagttttggatacttttttctggtgcgtcttttacctttcaaccaacgaccacgaccacgacaagaataaataaagaaagatgataagtgctacgaccgttacatgcatgtagttatttgttagacgtgagaaaatcagaacaacaaaagtcacttcgatacatcataacattttctccatagaaaaaaaaaactttcagacaaaaagacatatagccgttggaaaaacccacgtggcgttacacatctctctatccacttgtctgacttcattcgttgtcgctttggattctcttttgctctctccatattattctttgtctcttcctctgctttactttactccaagcaaagtattgccccaatacactacccgtgactttcatcaaatctctctttctcaatctctcaaattaagattctttcttcttcttctccaatggcccttctctgaaaaaacatttcttcaactgatcattaatg

SEQ ID NO: 9634 - DNA, 3000 bp, Unknown
  misc_feature (1)..( 3000): cDNA_ID_2184702_gDNA_ID_1972164_Annot_ID_179680 3000 nt of promoter + ATG
acaaattgattaggacaagagcttttatacgtaactcgaccaaaaacattgtaggtgagacatcagtgtacacccaaaaaggcacattactgtcgactgagcttgtcaggccgctaaatttgaccaacgagcaccccatcaacaaaataaacgttgagaaattatactagtaacttcttgttcgtgtgctaaacaactattaataatgtctacctccttatttaaacaaaacaaaacataaaatatatatacttaatagtagtatcttatcttttttttcaaactatgcgataaattttggtcggatctacgatgttctcatagttaaacctgttttaattacgttttaaaaatctaccatagtgaaataaaaaactaacatactttatatccgcagttcaaatacgtatggaggactagaagagatttgaaatatggaggactagaagagattcaatagaacatgactttatatgaatttatttgtcctttccggtacaataaaatttggacttcatatgacttttatattttactcatttaagtaatcggaaattacaatatagaaatttttgatctgtaaatatcatgtaaagtatatatccaattgattatcatttgaatgcatattaaattattaattatgaagacagataaatcaatatatgtttgttgatcttgctgtagtacattctggactaattctttcaattggagtgactaaaaaggacaaaatttatgcataacgacgtcatactatatgtaactcgatttgtctagaatatttagataaggttaagactagttttctatgaatagaagaaagtgtaaaatatataaataaacatactaataacaattaacaacagaaccagaaccagaaaattcacatttctgtgcttttattatctaaaattcacttcgaaaaacatgagaaaaaagagttggctgacgtggaatattcgtctaatagtagccgaccaacgtagccaaaacgataaggtttgccacatggcaaaacgataaccatggaactgcatctcctgtcttttgtttggttgtcacaatttgtcatttttattgggatttattgttttgttatattttcgttttcagtctaattgtcagcaattttcgcaaaagatatgaaattttggatatgaagagaaaatgcaaatgattggtggggacaacaaacgtggcattatgtgagtggttgagcgaacaaacggctatatgctgagatggattggacggtgacgatacgtttgtcggagggatcgggtcggttagtcacgcgcgccacccattcacgtgtcaccttttgccaacacagaccatatgattttaacctcagtggaatctcgacccaccccacaaaacggcaccataactttacaccctggttttagagagtgatataccaacacaacaattatgaaaaagggttcgtttaggctttggttactttatgttagtaatatcaacttaaatgctaatttgagttatgtgtgataagatatacgacgaatcaatttacttatcgtcaattaagtttgaaatgaaagtttgtgaacgaaatagtttatgcttctttaatattgtgtcataattttgagttccggctctaacatcttcaagtagggttttgttttatgacacctcaaacatacttaataacatatgttggtgatagaaaactagaccttctagactacaaaaatgtttataatgtaagagaatgaccatatatctatctattttgaaaacaaagtgttttgactttggtgaacaagaaaaatgttctctatatatacaatgagacactcgaatataaccatgcatgattagttggatttggagtgaagaaacttagccatgcttcgttggagcaaaataaggttttggagttttgttatgtgttttcaagaatgtaaatgctgattcgataaaaaaaaaaagtggacgtaagttattttaaaatgatttggcatacaaaaactgtggctttttaaatctgaaaaatcgacaggctatgatattatacgacaaaaagaagagagcaccatattgatgatatagtatattgggtcggtcctaaagaaaatgacatttaggtgatgggggcggcgaggctaagttaaagtaaacaaaaaaaacctccattatttaccagaaaaacatataaaaatttgattgacataaaaactaataaattatttcaaagttgtggttctgatagctctccaccatcaccactgattgatacttcctattgctacgagagataaaactatgcaagtttatatgagtggatataaagtcttgttttatgatatcataagctagctaatcccatatcattatcatgtatttatagacgcatgttcaatagatttggatcaatctttttgtcatggacttggtgcaaactataacgttaaatagaataaactattctaatttaggatctaaaataaactcgaatcaaattttaaagaaatttactggctaacttatttgaatttttcaaatttcaacgattgaaaaactctaagtctgaaattaaactagggttcttgtctttacgtattagtaactatgtatgatattgatatatcaagcaatcattaaatagaattggttcaaaatttatttcaggacagctagttcataatcattttgtcaaagctacttccctcataataataataatcataactcactcgtatacttttatatccaattttttcattgaaaatacaaactttcattccaaaaaaaaacctcaatacacaaaaaaccaaaaaaacatataacgttggcaaaaatactaaaaatattttttaaaagataaagcaataaaaaagtatacaaacaaattaacaagaaggagagctctcactataaaacagagcacatgttcttctcactaaccactccaacagagaagcaaaagaaaaaaaagctattgtttgaaagaagaagaagttaactatg

SEQ ID NO: 9635 - DNA, 3000 bp, Unknown
  misc_feature (1)..( 3000): cDNA_ID_3042806_gDNA_ID_1972164_Annot_ID_179685 3000 nt of promoter + ATG
cacaggcctccctcagctaaacctccaacttcgccgattttattgaattcattaatgtctccatcatgttctgtacggcaattttaacgctctacttctctctcgggaatcaagacattgattgagattcaacttacgatcgaagcattattataaagtaaaaaaatcacgttgactataagacaaataattaagttggttaacgtctaagaaatgcaattttgtttaataactaaggttacatacttacatgagaaatcgcggcgggcagttttgttaggcctggatgaataaatactggtcttataaacatctaagatactgtattattgttttccctaattattgaaagaataatgcacaacatttactatgtttttattttttattttttttctattttgtaagaagacactttcaatgtaacttcatgcatgtgatattccttaattttaacttcttagaatgacttgaaattgaaactagaaaaatgttttcaagtcattttttgttaccacttttttagaattattcgtgaatatatagctttattatatctttatttatattttaaaataaattgtaattgataataaagaaaacaaaattcacaatttatatgtttgcctatataaagacttctgagagcacggttttcttattcaacaacgaccaaaacaagttttaactttggttcttgtacaatcaatattcttttggtcaggttcaccaaaaaaaatgagttaaaatgtttcacatttgaaatccgctcaaccaagaacgtgtaaccaagtggtttgtttgagtgtgtagaggatcaagtctagagattgagttctaccatctacgaaaaccgtttatcattcatttttaactactgtaaacattttcaacggcaaaaaaatacacgaatttctataaacttcaggggattaatcttgatttcggctcatgatctatctcggttattacaaaaacaaaaagggctctattatactgcgtttttatttgcttgactgtagaaactgcgatcttattatttggcaaaagtagtaatgcatataaacagtagaaacaacagattcagaatctgatctaaatgaaagatgaatgagattattatcacttgacaggagcaagaatggtgtagagaaggaggaatgagacaatgacgatggctccaacaagtgtgaaccttggacttgtccagagcatgagattggatctctctgttctttttataggatcgacttcttccgacaaatcaaactccgatctgggaggattccaagtcacgtacttgtccacgttgaattgcgagaacaatgacttcttgctctgcttcttgaaattcttccacgccttgtcccagtccgtcgacgctttatcaccaccaccacctgctataaaccaaataaaaccgaatttaaccgattataatctaccaacgaacataagcttcgagatcagactctcaccgttggactcgtttccctttcgaggaggttcgttgttggagcaacggaatctagaggaagatgagaatctaggggttatccggattagattggaggattttaagccggagattcgaacagtaatgtccattttccgatttcggtacggacaaaataagaagaaaaagtatctgactgttgtgttcttcttctcttcttcgattctccgccggacaatgttccttagccattttcaatctcttcttacgtcttcgctagcgacacgtggctatcaatgggacccattcttattatgaatctgaaccgggatggttattaaacggttaaattcgggtttgggaaatacccgatcccagactagacatctccagcttaaccggctctaataagtaactctttgctaattttattcattatccaaacctaaacctcagcaatggagagctagggtttatctctcggatccattgtctcctgaatacagacgtgaaccggagaggaggctttgggacagaattgatgatttggttcgagaagatggcatcttctggtagtattgactattgagcctaatgctacaacagttagtcagttacatactcttccttaacttaagccggaacacactatatttggaatcttaattgaaaatttgtgcaaggcttactcatgactataaattcatttttgttgcctattatttttacctttgattttcatttccaacaaaaaggaaaaaaacaaacaaacaaaaaaaatctggaaaacaagtgaaactgtatcaatattacataaacctcaaaattatggtatcagtggttacttaatagttaagaacgagttgaagatccatactggagcctcagtgtacagtctctctagttgcattttttcctttggcttttagtaatggccttatcttctcactagacccactctcttattccttctctttaatctacaccgtccatccaatttggacgcaccagatcttatcacacataccattcacttcattgaaaaattactatataacagaaaaaaaaaactcaattggtttgagtaactcttcttttaagctcctcaagcttactgtaaaaaaaaaagtatatttgaaatttctaaattttcaatataattatttattaatctgttttcatttcattagtaaacagtaaacacaacatttatatttgtgttgtcatattttcgtacttaatgaatcaaacaataagatcaatgctatttttatattttatgtaacaaagtaacttttatttttaccaactcttttgactgacacagattttagtaggtaaaaaaaaaatccaagtgggagatatttcaagtggataaagatttttattttttgcaaagaaaaaacgaaaagttccattttttttgccaataaatatcaaaaactggacttgttatctcgcagaacccttaaaccttatctcttcaccaccagcttctcaaagctttagcctcgagagcaaaattctctcaagctttagccatg

SEQ ID NO: 9636 - DNA, 3000 bp, Unknown
  misc_feature (1)..( 3000): cDNA_ID_3042802_gDNA_ID_1972164_Annot_ID_179687 3000 nt of promoter + ATG
agcattaggctcaatagtcaatactaccagaagatgccatcttctcgaaccaaatcatcaattctgtcccaaagcctcctctccggttcacgtctgtattcaggagacaatggatccgagagataaaccctagctctccattgctgaggtttaggtttggataatgaataaaattagcaaagagttacttattagagccggttaagctggagatgtctagtctgggatcgggtatttcccaaacccgaatttaaccgtttaataaccatcccggttcagattcataataagaatgggtcccattgatagccacgtgtcgctagcgaagacgtaagaagagattgaaaatggctaaggaacattgtccggcggagaatcgaagaagagaagaagaacacaacagtcagatactttttcttcttattttgtccgtaccgaaatcggaaaatggacattactgttcgaatctccggcttaaaatcctccaatctaatccggataacccctagattctcatcttcctctagattccgttgctccaacaacgaacctcctcgaaagggaaacgagtccaacggtgagagtctgatctcgaagcttatgttcgttggtagattataatcggttaaattcggttttatttggtttatagcaggtggtggtggtgataaagcgtcgacggactgggacaaggcgtggaagaatttcaagaagcagagcaagaagtcattgttctcgcaattcaacgtggacaagtacgtgacttggaatcctcccagatcggagtttgatttgtcggaagaagtcgatcctataaaaagaacagagagatccaatctcatgctctggacaagtccaaggttcacacttgttggagccatcgtcattgtctcattcctccttctctacaccattcttgctcctgtcaagtgataataatctcattcatctttcatttagatcagattctgaatctgttgtttctactgtttatatgcattactacttttgccaaataataagatcgcagtttctacagtcaagcaaataaaaacgcagtataatagagccctttttgtttttgtaataaccgagatagatcatgagccgaaatcaagattaatcccctgaagtttatagaaattcgtgtatttttttgccgttgaaaatgtttacagtagttaaaaatgaatgataaacggttttcgtagatggtagaactcaatctctagacttgatcctctacacactcaaacaaaccacttggttacacgttcttggttgagcggatttcaaatgtgaaacattttaactcattttttttggtgaacctgaccaaaagaatattgattgtacaagaaccaaagttaaaacttgttttggtcgttgttgaataagaaaaccgtgctctcagaagtctttatataggcaaacatataaattgtgaattttgttttctttattatcaattacaatttattttaaaatataaataaagatataataaagctatatattcacgaataattctaaaaaagtggtaacaaaaaatgacttgaaaacatttttctagtttcaatttcaagtcattctaagaagttaaaattaaggaatatcacatgcatgaagttacattgaaagtgtcttcttacaaaatagaaaaaaaataaaaaataaaaacatagtaaatgttgtgcattattctttcaataattagggaaaacaataatacagtatcttagatgtttataagaccagtatttattcatccaggcctaacaaaactgcccgccgcgatttctcatgtaagtatgtaaccttagttattaaacaaaattgcatttcttagacgttaaccaacttaattatttgtcttatagtcaacgtgatttttttactttataataatgcttcgatcgtaagttgaatctcaatcaatgtcttgattcccgagagagaagtagagcgttaaaattgccgtacagaacatgatggagacattaatgaattcaataaaatcggcgaagttggaggtttagctgagggaggcctgtgtcatgctgattcgtttagttaccaactcttctttcaaacatctttagtatgttactgctttcatcctctttatttgatctactgattatatatatatatattttttttttactacattcgacattcgttgctaagagaatagaaaacaattttctttttcaaaattatccttagtttgatattggtatgagagatttacatgtaatttcgactcttgaaaatagataaatgtatgttgagtattgttgactataagaaactagatgaatgcatcaaatagaagtgtctttttgctttatgtacttccccacttgaaaacatgacgattctatgaacgatttcattcgtcataacgatagaattagtttgtcctacgaaaacaaatgtaaaactactataattttcttgacgtaatattggtgggtttcatgctgcggctgttggttgggaaacgtccaatataaacatttctaattatgtatatacctgaaaatttgtaaaagctaatctaaattgtgaaacatacataacaaatactttaagaagaaaaagtcatcaagcaaacaagaagacatgacctagaaccatttccgagacattatattaatataaaattgatattcaaatcctccacgatcttacagctttcaactttgagtatttcaacgttttctctgattacacataaactaaaatttgtttttttgtttttttaatagttgatagcatgtgttaattattagtttatatcatacaatgaccttagaatccgcagatcatttcaagaactcagaacaaaagctgatgtattcacttacatcattgaattgtgtcagtttgagtaacccataatataaatatacgcaagtcaaaatgcattgagcttatctctcatttagactttaaatttctgatttcagagaggtcaactctttaagccaagcc

SEQ ID NO: 9637 - DNA, 3000 bp, Unknown
  misc_feature (1)..( 3000): cDNA_ID_3042799_gDNA_ID_1972164_Annot_ID_179689 3000 nt of promoter + ATG
tatattatctccggccaaacgggtcaatggcgatggcctccctctgttttacaatatccacaagtcagtggagcttcagagatgtcacagagacactgcgcgggtgtctgtcacacttgcagaacttctcatgagtgtggaagatgagggggatgaccagagtcgggctatggatattgcggttgcgtccaatttctggtcctcggttccgtcttctcgtgtgccttcttcttctccgtttgttctttccttcaaagacttgacttacagcgtgaagatcaagaagaagtttaagccctttccttgttgtgggaattcaccttttgatggtaatgatatggagatgaatactaaggtgctcctgaatggtatttctggtgaagcccgggaaggagagatgatggctgttcttggagcgagcgggtcagggaaatcaacgcttatcgatgcattagccaatcggatttcaaaagagagcctacgcggtgatattactttaaatggggaagttcttgaatctagcctgcataaagtcatatcagcttatgtgatgcaagatgatcttctcttcccgatgctcaccgtggaagagacgttgatgttttctgctgagttcaggcttccaagctcgctttctaagaagaaaaagaaggcacgggttcaagctctgattgatcagctcggcctgaggaacgcagcaaaaaccgtgatcggtgatgagggacacagaggtgtgtctggaggagaaaggagaagggtctcaattggaaccgatataatccatgacccgattattctctttctcgatgagccaacttctggtcttgactctaccagtgcatacatggttgtcaaagtgcttcagagaatcgcacaaagcggcagcatagttatcatgtccatccatcagccgagttacagaatcttgggattactcgataagttaatcttcctatctaggggaaacaccgtttacagcggctccccgacacacctccctcagttcttctcagaattcggtcacccaattcctgaaaacgagaacaagccggagtttgcactcgatcttatccgtgagctggaagattcgccagaaggaacgaaatccttagtcgagttccacaagcaatggcgagcaaagcaaacctcaagccagagcagaagaaacaccaatgtatctctcaaagatgcaatcagcgcaagtatctcgagaggtaagcttgtctccggagcaacaaacctaagatcatcatttcaaacctttgcaaacccattctggactgaaatgctcgtaattggtaaacgatctatactaaactcaagaagacaaccagagctattcggaatccgcctaggagctgtactagtcaccggaatgatcctagccacaatattctggaaactagacaattcaccaagaggtatacaagaacgcttagggttcttcgcattcgcaatgtccacaacattctacacatgtgcagaagcaataccagtctttctacaggaacgttacatattcatgagagaaacagcttacaacgcttaccggcgatcatcatacgtcctcgctcacacaataatctccatccctgctctcataatcttatccgccgcattcgccgcctcaacattctcggccgtaggactcgccggaggctccgagggattcctcttcttcttcttcacaatcctcaccgcgttttgggccggaagttccttcgtgacgttcttatccggcgtagtctcacacgtgatgatcggattcacggtggttgtagcaatcctcgcttatttcctcctcttctccggattcttcatctctagagatcgaatcccactctactggatctggttccattacctctccctagtgaaatacccttacgaaggtgttctacagaacgaattcgaagatccgacgaaatgcttcgtcagagggatccagatgttcgacaattcgccgctgggacaagttccaaccgccgtgaaaatcagcctcctgaagagcatgagcggcgttttggggatcaacgtgacggcggagacttgcgtaacgacgggaatcgatatactgaaacagcaaggaatcacggagataagcaaatggaattgcttgtggatcactgtagcttggggattcttctttagggttctcttctacttcacactcttgatcggaagcaagaacaagcgtcgctgatttacaaaacagaaaattattagagtaacttgaccaatgattatgatgtacttaatacttatgattaatacgaaattgcatatgtttgctaaatctttaatgggctttagagttgatataaggcccaataaaagtactaaattggaaagtgtgcaattttctattttctatatcggtaatatcgacgtttatctcgccgtgaaatctaaaccgttgattgaaacaaatcgctaccgttgaatctcgtcggtttccaagttataagataggggttgaagactaatcgcagtatcatccgcggttcacttccttcgtttcgaaattattagggttactgcgtatttgcactctccttcttcgtctctccaggtacgaggaagaatctttgtaattggatctgtttagggttacgattttattgttcttcgctctctagattagggatttcaattggtttctcgtttcctcgccgtagatttcctttataggtttccttctgtctaatctgattagagatttatattctcccctcacgaaattttcttcttttcgcctctgaatgtgttattcagtttggtttctttgtttttggatttgtgttctgctgaaaaatcatagatattcacatgggttctatgtttaggtctgaggtagtgttttaactctctggtctttttcttgtttatataatttgaagaggatactgttattctttttcttgtgattggcatatatatatatatatatacatatgtgcctaatagcttatgttaaaaatattttgcagcttgacaatg

SEQ ID NO: 9638 - DNA, 3000 bp, Unknown
  misc_feature (1)..( 3000): cDNA_ID_2184618_gDNA_ID_1972164_Annot_ID_179688 3000 nt of promoter + ATG
agatcgatgccacaacaaaaaccgtaaacctctgttttctctcttctcttctcttccattactcgaaatcaaaagcttaagtaacgaaacgttgaaaattgtacagaaattcgtgaagcaagtgcttgagacgatcgaattagatgagattaaagattcattggtgggagtcaccggagttagtggattatcgacggagcaaaggaagagattgacgattgcggtggagttggtggcgaatccgtcgattatatttatggatgagccaacgacggggctagacgcaagagcagctgccattgttatgagagctgtgaagaacgtcgctgatactggacgaaccatcgtctgtactattcatcagcctagtatcgacatttttgaagccttcgacgaggtaaattgcataattggctcaataaactgaattgttatattttgaccccaaactgttttatcttataaaccaagtccaaacttgaatttgcagctggtgcttcttaaaagaggtggtcgcatgatctacacaggaccattaggccaacattcacgtcacattatcgagtattttgaggtaaatttgcataaattttacttttagtctatgattgtttttacaaagatatgttaacttcttttatttattggattgaaaaacagagtgttcctgaaattcctaaaataaaagacaaccacaatccagcaacatggatgcttgatgttagttcacagtcggtagaaattgaacttggtgtcgatttcgcaaaaatctaccatgactctgctctttacaagtgagtaaaagcttttaaactatgcattaataactgttattgttctaagaatgtggttgtaatgaaaacatgtgtgattgttataggcgaaactcagagcttgtgaaacagttgagccagccagattcaggatcaagtgatatacagtttaagagaacctttgcacaaagctggtggggacaattcaaatctattctatggaaaatgaacttgtcttattggagaagcccttcttataacctaatgcgtatgatgcacactttagtctcttctttgatcttcggcgcacttttctggaaacaaggccaaaatctgtaagtggagagtgaacatacctcttatatgacactttagatcccagtttgctaacattttgagttgtgttttgtcatttgtagagatactcaacagagtatgttcacagtatttggagcgatctacggtttggtactcttcttagggataaacaattgtgcatcagctcttcaatatttcgaaacagagagaaatgttatgtaccgggaaagattcgcagggatgtactcagcgactgcttatgcattgggtcaagtggtgactgagataccttatatattcatacaagctgccgagtttgtgatcgtaacatatccaatgatcggtttctatccttcagcctacaaagtcttttggtcactctactctatgttttgctcactactcactttcaactaccttgcgatgttcctcgtctccatcacgccaaacttcatggttgccgcgattcttcaatcgctcttttatgttggtttcaaccttttttcggggtttttgatcccccaaacggtaagatcacccatcctttagtttcttgaacaagaatctttaccaagaagaaaatgttttgtaatgtattcttttggtttgtgaaaattgcagcaagtaccagggtggtggatttggttatattatctaacaccaacgtcttggacactcaacgggtttatctcgtcccaatacggcgatattcatgaagagatcaatgtctttggacaatccacgacggttgcaagattcttgaaagactattttggatttcatcatgaccttttggcggttaccgcggttgttcaaatcgcttttcccattgccttagcttctatgtttgcattcttcgtgggcaaactcaacttccaacgaagatgatcatgccaattagtcttcatcaatcatcattttagaataaaataataaaataatggtttttatttttgtttgtgaaaataaacatataacatataacttttctttttggtatgtatatgattttgaggaaagtaaacaaagcattgtctatgcaaaacaaataaccaaatcttgcaagtatcaaaactatattacttattacttgtcttgacaaagacgagtacttgtttttccaagtcgaatacaggataagtaacggatacgggacaaataccatgtatttatgcccacccatatcgacagacagtcagtaatcaaaatttaccttcaaatcaagaaaaatgggcaatagttaacttgagtgacaagtaacaaactaaaatgaataatcatgcataaattataaagataacattaaaccattttccattttatataatttgtacaaataacttttaagttatataaaggaattatttagaaatatgcttgggtaattgtgttctcttctaatttcttattatatatctctagaaactttttttctcaaaagagatttctaaactgatattacatattttttttttagtttttttttgttgttgtaaattttagacatctatttttagacatctatattaaacgattaaatatttcattatcattataaaatcataatgtatttatgtataaaaattcaaaatatactactttttgtttaaaattttaatattacttctgtttggcaaattaaataaaatctttcgaatagttgacatagtataaattagagaatataaataagaaaaccaaagcggtcaacacaagaggatcggtttgttcctttcttcctcctcgtatacgaatcaatacgcatttctccaactccatagccaaaagctcgacgagatccaacagcacctcctgatctgcatcgttttcaacttagcttctcctgtcaatcgaaatccctaattatacattgatcggattcaatcgagcgattcgagagagaatcgcg

SEQ ID NO: 9639 - DNA, 3000 bp, Unknown
  misc_feature (1)..( 3000): cDNA_ID_2184686_gDNA_ID_1972164_Annot_ID_179709 3000 nt of promoter + ATG
atggtagaagaaggaggagttagattgagagagaaggaatgatgagttagggttacagcttgagagatagaaaatggatagaatttgagacatgaagagaaagccatagttttcagtttccagagaagatgatgagagtgaagcaacaaaatgggtttaaggattacaattttttgctaaccgaccggttcgttcgtgaaccggacaattattaaaaattcgatttaggttttttagcagtaagccaaaaagtgagacgctttggaaaatggaaagtgattcaatgcaaaagagcaaaaagtagtaagtgattcataaaccctaattctgattgtggacgaaacctaattagaatcatttttgaaatggcgacacagtcagttaacgcagtgatcgttgatcttcccggagatgtaaacgacgacggcgataattccgattgtttcatcttctccactcctcctctctctgcacgtggttccacaaagcgtgatgctatttccgttgagaattacgatcgtgatcggaaacttcaacgtctctgggtctaccctcctcacaaaaccgtaatcaagtcagaatctccaatttacatagatcttgatctttacgatgatgaagacgatgatatcagaatcctctgtttcgcaccaccaatccacagagaaaagggtcagtcttcttcgtcaaagacggcgactttcgactgtgagatatgtgttgattcaaaatccataattgagtcgtttcgtatcggtggatgctctcacttctactgcaacgactgtgtttcgaaatatatagcagctaaattacaagacaacattctctcaatcgaatgtcctgtctctggttgttctggtcggctcgagccagatcagtgtcgtcagattttgcctaaagaggtttttgatcggtggggtgatgctttgtgtgaagcagtagtgatgcgttcgaagaaattctactgtccttacaaggattgctctgctttggttttcttagaagagagtgaagtaaagatgaaagattcggagtgtcctcattgtcatagaatggtgtgtgtggagtgtgggactcagtggcatccggagatgacttgcgaggagtttcagaagctagcggcgaacgagagaggaagagatgatattttgcttgcgacgatggcaaagcaaaagaaatggaaaagatgtccttcttgcaaattctatattgagaaatctcagggttgcttatacatgaagtgcaggtatatatatgtatcttcttcttcttaacaagagtgtttttaaaaaacattgtttttatatatctttttaaacacattttggcaggtgtgggttggctttttgctacaactgtggaactccatcgagggaccatactcattattgttataattgtaagcgttgatatttagcatcagcatttcttattatataggtctctaatctaaagctaagcttaagctttaaggatatggatttctatttggtcttgatgctttgtacctattttcgctatttaggtaaaaaggtaatatcaatcatatggacaataatttatcgtgttaacaatgtaagatcctagaaacaaaaattccttttcaacttctagcaccttaactctgttttaccgtatagaatgcaacctttgtcttatttctttacataggtcttgttcctctctttgaccatccaaacttcatggactatatcaggctttaaacttcttcttaggtctaatctcttttgtttcctcttgtaacatctcttaggattttctcgtttgagatcatcatacctaccatatccacataggattctacattctctgatacctctaattcttactatcatcaaaaatatgcattgaagaagggtgagaaagggttcattattaaataaaaacctttatacattaatctacatagatatgtacctttggtcttcatagctaataccagattccgttacatttgccaacgaatctacttaattccagccacagagagaacaattccagtcactctaaagtgactttgctactacgttgtctacatattctctgaaaacatgatattatctcaagttacattaaccaatatgaatggaaaaaatgactgttaatgataacttattattttaaacagagccgatccttttaaattttgaaggctaaaaaagccaataaaaaaaaacaaacagaaaaattaggacagttgttttgtaaatttaagatttttttaaaagaatgtgtgatgtagagagtcgaactcgtcacctcaatccaacgcaacacgttacactagaaacgaaaatttcagttctcccgctaaataaatttcccaccaataagatattttaaaaatctgtaatattatccatcaaaatctgttttattaatttaaaatagttggtcatcttctctctcatttaaaagttaaatgtggaccgctaaacaaagcattacttccttctggttcgttgccgcgttacacgttccctctattttctctcttttccctctcttatctcacttccggaaaccctaaccctaattcgtttcctcttctcttaccttgttcggatttctttcgaaatcgatttctctaatcgttttctgcaaatcttagatccacaaagttctcttcccaactttcgattctggtcgagcttagggtttccaccccgttttgttcttaccactatctctgtgaatatttcgactttaatcatctccatatgtaaattttagggttactagatcggtacatttctccatttcgatttcttctgagggaaaaaaataaaaatcctcaaacacaagagagtttcttctccgatttggattgggaccatcaaacgtgttttacggatcgggtttgcaatatcagtgtaccccaaaacttggaattcgaattgtttcttaagccttacaaatctcagagataatctcagtcacagtacaagtgctaatttcttgagaaattttacaatg

SEQ ID NO: 9640 - DNA, 3000 bp, Unknown
  misc_feature (1)..( 3000): cDNA_ID_2184672_gDNA_ID_1972164_Annot_ID_179704 3000 nt of promoter + ATG
caaactccattaaagagaaaatctttgctcgtttctcttaaggcccattgctttttatctgaagatgatttcaagagagtgccctgtttttttgtataaataaaattttgatcttttgctcgctttatacacatgtgggaacggttttgtcggtggagacatttatggattcgtgaactgctgcaaaaattatgcgtttcttggacgtttctgtaactttctctttattagattttgtatcttgtgtctctgtgtccaccattgcgttgtgtgtattcaattgatttccccaggtgttgaagattgttatttatatatttaacttattttatgcacagagatctttagtataattcatgaaaatatggttttatcttccatgatctaggggaactaaaacatttgtaaagtttgagcccatattttgtgtttgttgcttttcagagatgcatatattatggttgttgttctgtttatgaattgttatgtgcattgttttgcagcaatggcgccaccgattgaggtttctaccaaaagctacgttgagaaacatgtttcacttcctactcttaatgagaggatactttcgtccatgagtcacagatcagtagctgcacacccatggcatgatctcgagataggtaagctatacgtaaaggtttctttttcttttttttggctctaagatcatttcattgttttttagtaataactcttataccttttttgcttcgcattcctttgtttacaggacctgaagccccaattatcttcaattgtgtaagtgttttgctaaagctctaaggattgaaaatatttaattatattgtcacaaaactgccattatgcgtattcggagatgctgcagttgtttactatttctacagaatttacatatttgtagcattcactcaaagaaaattaaaacattcattggctatatatcttgaaacctgaattgagtctgctgtagcatatgaaatgatgttcatcgcctgattaggaaaccattttatgggtttaatctttgagatattgttgtgggaatcattaaccaagcatacggaggcattattacaggtggttgagataggaaaagggagcaaggtgaaatatgaactcgacaaaactacgggtctcattaaggtataaatttgattgcattaactttcttcgctgtccctttcattattagaggtacgattgtctaaactttacacatattctcaggtcgaccgtattctttactcatctgtcgtatacccacacaactatgggttcattccgcgtaccctttgtgaggacagtgaccctattgatgttcttgtcattatgcaggtaacatattttttcatacaattttgagaacctgcataattcattacataatgtttcttgttctattttgatttgtgcatctgataagctttgaagaagttcaagcgctcaactcttagctatagactctactttataactgtgtagcttaggaatgaatgtagcagatgagaaatgttgccagtcagttatcgagcagttagtggctgctaggcttataaaggtgtctcagcatattgtttagagtgtggattttctagtgtttactctggaatttaaaacctcttattaatcaatcaagtctataagcatcatcagcatctcagtctgtcttatttgactggtagaaaacacatctcatgtgaatcttgttgaatattttctacaggaaccggtgatcccaggatgctttcttcgggccaaagctattggtctgatgccaatgattgatcaggttagatattcaacgtacttgtcatattagtacttataaaagtaacagagattgaaactagaagctctttctgcttgaatagggtgagaaagacgacaagatcattgctgtctgcgctgacgatccagagtatcgccattacaacgacatcagtgagcttccgcctcatcgtatggctgagatccgccgtttctttgaagactgtgagtgttcttttcttacaaacttttggttggttaaggatgatatgaggctcatactcttgtaatcttgttgcagataagaaaaacgagaacaaggaagtagccgttaacgacttccttccggcaactgcagcctacgacgcagttcagcattccatgtaagtagccttcatgaaacttactgttatttacttcatatattatgaccttgtaaatagccgcaatttgtttatatcaaagaataactaactaatcaaattgggacaactcttttgtgtcatgtagggatctctatgcagactacgtcgtggagaacctaagacgttgaatcaccacctcaagcaatggaatgaaagctcacaactgcattattcacaaatataaatatacatataaatgtcaggcttctcaaaggatatatttgttgtgtatgtcctctgatgaatccggtagatgatgccgataattcttttttttttttgtcgtatgaaaccgataatcaaagactaaaacagggatttttctcatttgtggtcatcactttttaaattttggtgtcatttctcatcttaatcaatttgtttttgagttttattcttctattagatcttttatacatcaaagaatagatgaagattcctccctaaaaccttatagtatgtcatttattcacaatatgttatacgtgttaattttctctcttttagtatactctttttttttctttcagattccatcccaagttgcttaaattttgttaaaaccaactaaattccatagttcaatttacaaatctgtgatcagatgctatctaaatgaatattaccattttagcccttaccttttctgaaatttaccacgtttacctcaatgaaccgtcatcgcaaaaccaaaaaccctttcctatccctaaaacccgagagagcatcttcttctcctcttagggtagaagaaggacgaaaatcggaggaggaagaagaagatcgattcgatttgtgatcaacg

SEQ ID NO: 9641 - DNA, 3000 bp, Unknown
  misc_feature (1)..( 3000): cDNA_ID_3610085_gDNA_ID_1972164_Annot_ID_179698 3000 nt of promoter + ATG
caggccagtctaacttcgcacctcgtctgaagtatttctcagagcgccggctgcaagaaccgttttggttttgatataagaaatgacagttcaagttattttctgctggtatctgatgctgcaaataggatgatattattgttcttactcggctctgagcaccatatgaggtggtaaaggtcctaggaccctttccatcatggccaaatgttccaagttttcatgcgtttggaaaagcgcctctccctgcaaggtttaatccagagaaaacgttgatggagacatggtgagatgaatagggtggtgtaccggaagatatgcaaacataaagttactcaccgaacaaagttcaacaagtatgcaaccaatactccacagatcacatggatagttccatccaacccctgcaataaacgttccaaactcttaaataccatgactacacaaaaaaataatcatctacgtagatgtgtcagagtcataaacgtttacctaggataacttctggtgcgcggtaatgtcttgtggatacaatgtagttatggtcttgatgttcaaatgttgtacttccgaaatcaatgagcttgatggcacttgacttgggcagattcttgaagtatgacccatcttttgtgggtcgggatagaaactagattttcatgaccacacataggaaaagggtcaagagttatacaagttccttcatggatggatatcatattagccatgaaaataaatgagtccagcttggagatgattgattgctcaccttataatcaggtattttgatatattcagacgataccaaaagaatgttctccggcttcaaatccgtgtggatcagccgtaaatcatgcatatctgtcagaatggaatgagcaaagtctgagtacactagtcaacaaaagtctccagaaataactgtctgagcaatatggattccatggaaattgcattatcgaaagaacattaagtaataactattaacgcctaagtcttgtatcaaaaagttaagaaaaatgatttgtggcactaatggactactatatagaagaatgggtcaagaatattccacacacatgcaacagactccaaaagttgtctgccaagctcccgaacaagatcaatgggaaatgaacggtagctgtttttgcggagaaaatcatataagcttggtccaagcttctcaaatacctgttgaaaccatttaaacccatgcgcaagttcttttaactcacataacatttgggcgtgaagaaattgcattttcccctcaaacttgtcaaataaaggtaacagcacttacaatacaaatatgattacgatagtcaaaccaattccgtatttgcacacaactgcaaggaattgaaaagcttataccaaatgtaataaaattaaaactagcgaagaaatagtaagaggaaagaaatattcttaccgagaaccaccgacatcatgccttgtaagcctctgcagcacgtcaatttcgatcatggcagcttcacgatacttgtttatggaccgtataactttgattgccacgacttctttgtttttattatcaaagcattccaatacttgtccaaatgtacctgccaaaatacaatccaattgattaagataactggcgaccaaataaacatatttctcctacactttgaaaaacagaataatctaatcataatgattatataaacattttcgcaagagatgactaaccttcacccattttgctgagaatttgatctgcacgcacaatagaagaggcatgtcaatgtaaacctccatgataaagtctgtgaaacgtaacagataagatgtcgaaagactctgtaacataagactcacatcgtggagtcaaagtatccccaacaacaaagacataatggccgtctttatcatctggtctccagggaggagagccctgacgaggaaggccattatagaacatgtttgggtaaacaaaattgggaactaaaccactcgcaaactccggaccatagtacaacggaggttgaaatacctgaaagaaaaaaacacatcagctgaaacttagctcaagcacacaaataaaaatcttaatttcttactagttaacacaattcgcagtatcttatgaaaacaacaaaagaacagtccattgataccaatacaatatgtggacaattcgttaccgtgggtggaggaggaggaggaagaagaggcggagcagcatcccaagtcaatcggggacgtttcctgggacgcttatcaacgatccgatgagggaattcaacattcctctgagtttctaagatcatcgcgatcgagctagctttatcacgatacacactgctttgcataaaggattagaaaaatgcaaatccagagctgaaattcagaaacccagattatgaacagcgagagaattgcgattgaatttcgaatctaattagagggataataagattccgaaattcgaaaccctagttatcttcaatttgggggggatctatctccagaagataactaaaaaaggtgggaaaagtaacagaaaaatatattaaaaaaagtggaagtaatgtagctaataaactaaccgcaaatttctctcacacagagtaatttaaaacgttgaattagtcgctgtcgtaatttgatcgccggaattcagatcggagaaacaataaaaatgctcactgaattggaattgaagaaaaaaatctcaggagaaaatatttaacagcgaaagagactgaaatgagagagagagagagaacctgaggaagagaacagcgaaggagcgacagaggctctggaagttcttaatgggcttttttagtcaggcctttattaaatatatgttgactaaagaaacgacatgatgttattactgttgaggataaaaacgacgtggagttcagttatttaatatcagaacaatggggtgttttctccaaagtcttttaatatggaggagacgggagagtcgttgaacaagaaaaataatctgaagcagcc

SEQ ID NO: 9642 - DNA, 3000 bp, Unknown
  misc_feature (1)..( 3000): cDNA_ID_2990072_gDNA_ID_1972164_Annot_ID_179697 3000 nt of promoter + ATG
ctatattccgaggaaaagaagatttaaattatgaacatagatgcagcaacaaatcaaaaggtttggatactctgaaaacaataaaagtacataaacaaaatccatgaaacacaatctagcaggacaggtaagagcttcacacgtttgaattagaacacacagaccccaaaagaacaacaacagagagaggagaagtcatcgactgtgaaggcccattagagcagcgctgatccatagaaaacagcttctgcaggacccgtcatgtagatatggttgtcttcctgtttccactctatctccaatggtccgcccggtagatccaccgtgcatttctgttccaccataaaccaatacatatatgaggaactcaaggtcaccacatgcagctaatctcagctcatgacaatctttaagctccaatgaatatccaagaaacatttgtgtgagagtgaagaaccaaaaaaaacgaatacaagattctcccacaagagacgaagcgaacgaaaagtacttagtaaaatcataatctcatcaatcgtctaccaatcaaatcatccaaccattcaatgcaacattcaggtttcataaaaaatgcttaaaaactgctaatccagtgtaccattttgcaaactgttatctagttttttaagttctgaaattccaaacttaccctgtcggctcgaccttcaaggactgctgcaacaaccagagcacaagctccagttccacaggccaaagttgctcctgcagttttaagtatgcgtaagcattaagcatataaggatacagagactgtttataatcaactgagaattatattcgaagattggggggaatttgcggacctgctccgcgctcccacacacgcattttcaaatgagaacgtgataagacctcaacaaattctgcggatacacagaaagaactgtaagacaactaaagggatataaatccaaatataagcgagaagtcttgctgtatcagtcaatggaaatctggatacatctgccgatgaatctccactaacctgtgttagttcgagctgggaacatttcatgatgctcgaactttggaccaatctctggtaagttcaaatcatcaactttcagattctggttgacacaaaccaaaattacaaatgataagaaattcacgtgtagacaaataatatgattagaagtctagtaacgaaacacgcaccggtccaccctttttaccaaatgtgatacagtgaggattgcccatactaacacacgtcacattccagcttactccatcaacaactagctctgcctcaacaacagcttcacctttgttccctgacaatttcgtgggcacatcttgtgctttaagaatcggtgtccccatgtcaaccttaacctgtaccaatatcaatcacaaaaaataaaaatccaaactttaccttacccatcatcatgaatacgactaaacctaatatgagacatcaatccaaatgatctacctgtccgtcatcttgaatttctggaacaatcaacccggcaccggtatgtattgtaaaactacaaaaacaaataaatagacacttaaggttacatcaagcttgactaaactcggaactctcaagtctaaacagatatttctcaatacagatagagatacctatgttttccctgcaaattctcaagctcagcaatgaacctagcaaagcatcgaactccattgccacacatctacaagaacaaaatcaaaagccaatgacttcgagcgcaacaacatatcaccagacattatcatcgaaaagccccacctctggttcactaccatctgaattgaaaatccgcattgcgtaatcagtaccattgactcctggcattgcaaaaatcactccatcggcaccaacaccgaagtttcgatcacacagcttcgccgcctgttcttgagtaatcttaggttccgatgagtctctgttatcgacctacaaaatccaattccaaagacgaaaaatttgaaaacatttgtaagaattcgatacatttcgggttaaattaccaaattgagaattcaacggtgaacaaaagtaccaaaatgaagtcattgccgaggccatggtatttcacaaagtgaagaactccggtttcttttttgtctagaaaactcgccggagaaaatttctcagctgtgacggcgtccatggaagctgctgcagacacacgaaggctagggctcttaaagcaatattctttctcaaagaaaccaaacgaaagagaagatacggatcctagattcctggagaacgcattcgacactctgcgcgattgtggcgcgacggagacagtgctaacggcggctatctccatggctgcttcagattatttttcttgttcaacgactctcccgtctcctccatattaaaagactttggagaaaacaccccattgttctgatattaaataactgaactccacgtcgtttttatcctcaacagtaataacatcatgtcgtttctttagtcaacatatatttaataaaggcctgactaaaaaagcccattaagaacttccagagcctctgtcgctccttcgctgttctcttcctcaggttctctctctctctctcatttcagtctctttcgctgttaaatattttctcctgagatttttttcttcaattccaattcagtgagcatttttattgtttctccgatctgaattccggcgatcaaattacgacagcgactaattcaacgttttaaattactctgtgtgagagaaatttgcggttagtttattagctacattacttccactttttttaatatatttttctgttacttttcccaccttttttagttatcttctggagatagatcccccccaaattgaagataactagggtttcgaatttcggaatcttattatccctctaattagattcgaaattcaatcgcaattctctcgctgttcataatctgggtttctgaatttcagctctggatttgcatttttctaatcctttatg

SEQ ID NO: 9643 - DNA, 3000 bp, Unknown
  misc_feature (1)..( 3000): cDNA_ID_2184640_gDNA_ID_1972164_Annot_ID_179693 3000 nt of promoter + ATG
ggatgcatgcatcctaatccttgaactattatcataacaagatgaaataaatcgcatttgattattttttgtcagttactcaatattttattataacatcttacaaattatattacgactctttacggtagatagatatactatattatgtaattatatagaatatgatactacagcaaatgactgaaacttatagcatattgataaaatataaattttataaattctatctaatttttttttaaccacagttcaggaaattattttttgcttacaaattttttttcagatataatatttttactacttttgggtagaactttcatatatctctctatgattttaaccactgatatttggatgttatgaataagttttttttgtcatatactaaccacacttaaaagagctagagtatatgatcaataagattttaaatttgttcatatacgagtaacaacacttaagtagtgtccaatataaataaaagatcatttttgtgaattgatatatcacaatttcacatatattgctaatttagcctcatgccttgaagtcctgtgtgaagatttttgcataagatacacacaacaaaatctaacaagattgtgagtgtttgtaaatagtagattatgttcgaccagttatttcatggagaaggagacgtttgacatatcaacaagacaacaagccaaagacaaaatctgtgaacatggacaaaacaaaaaataataatattctttatatacatatattaaattaatttacggtggtataaatatttacgtaaatactatggaattttaggtcaatctcattgtttctctttttattatttttcttaaaacaattacggtaagagttttagggttatagatctattttcttacatctacataggccataatgaatcaaacgcataaccgtttcatgagcatcgactacataggtcaaggaatctgctttaccttttttttatttgtcttttgttactgtttttttcgtattttttctacgcctgataacttttcccaattaaatactacaacttgcatgtttatttatttagctttaatatggttattaattggtactttattgacttacgagtagtcacgaagacgaatcttagcttgtccatgcagctgtacttaactctaaacattggtttttgtcaacaacgtttttcggttttacaaattgttcattcatataataatcaaatgttagctaaagctgctaatcgaagaaaatagtatttgtgctatacacgcatgtccgaataatactttttctttcgtttaataaaccgaaataataccaattcttcaatatataatcctttcctgtagatgtagttttggaaacgttccaaatttagtccagtggtactttataatacaaaagttggaaaaacgtttaggttttgtgacctcggtggtctagctattacaaaaaaaaaccaagaaattgaatttatttcgaaccatcatattcagttttgtttcactgattgtaaaaagaacaacaatcataaaagtaatgatatgtgtgtaggcgtctaggtgatctatcatctatggatgcatcaacgtctaaaaaacctccataaatcaaggaagacatgaaaaattgaaagttaaagatttatttgcttttatattttgttcttttctattcgattttttttttccttttgattttttttttttgtttgtcttgcggcgaataaattttgaaactacactctacacacatttgtgcatatatgatctttatcttatgttcttctctaggagataaataaagagactatatagtcaattcatgatagttagtaaatgcaattaatgcgtgcatatagtatgtgattaattagcaaaacattatgcattaaaattataatctaaccgtaaatttaatacgaagtaacttcaagtaagttagcggtttgtgtttggaaaaatgtttcatagtcgtcattaaacctgttttttttgagcaatgtgtcagattaattatcttgaaagcgaaggctgtaagaatttctgtcattttctacttatagtcatatttggtgagctcacgaactaaccctttattagggacttgaaaggttctactatttgtcactgttagtatacatttcgaattttttatgagcataaatttttgtttttctgttttttcgagtaattagcatagatttaagaggataaaggaccatatagttgaatagatttcaagtcttgcttaacctaatcttctctaggaagagacttgtagacaagagacttcagtcagaggttaatataaaatatagatgacttagaaacattcttaaatctgagataagggtaaaatatttttaaaattttattttaactcactttttagaggaaacaaaaaacaggaatagaaaacttaagccataattctattaagttaagattatatgtcggtttgtatttataaaagaatggttagtgttagattttataattaattcaatttaagaggtttcaatgaattatttttatttatttagataatattaattattttagttagattagatagtaaaatttaattggctaattaaaagaaaaacttaaggttattaatttttttgttaatgtgttcttaatttattttgttttttgtttttaatatttagtttctatttaagtgttgtataacatgacataataattaatttaaactaaaaaaggtgaatacaaatgttcactcctagattgaacctaaaaattgtcccgaaagaaaatatcgtttgctatatagatagaagaagaacataatacagaaaacttggttatttattctaaacttggttataaatcttgataaataattccaactttgttgaagtttgtttttacggtaccaatttgttggttattgattgtatactgtagtactatttctttattttttagaaaagaaatccgacggtacgacaaaagaagaagaaggaaaatg

SEQ ID NO: 9644 - DNA, 3000 bp, Unknown
  misc_feature (1)..( 3000): cDNA_ID_2724591_gDNA_ID_1972164_Annot_ID_179691 3000 nt of promoter + ATG
attctctgaagcactttgacaaccatgtatgcactggtagagtcaagaccagaagttggctcatcgagaaagagaataatcgggtcatggattatatcggttccaattgagacccttctcctttctcctccagacacacctctgtgtccctcatcaccgatcacggtttttgctgcgttcctcaggccgagctgatcaatcagagcttgaacccgtgccttctttttcttcttagaaagcgagcttggaagcctgaactcagcagaaaacatcaacgtctcttccacggtgagcatcgggaagagaagatcatcttgcatcacataagctgatatgactttatgcaggctagattcaagaacttccccatttaaagtaatatcaccgcgtaggctctcttttgaaatccgattggctaatgcatcgataagcgttgatttccctgacccgctcgctccaagaacagccatcatctctccttcccgggcttcaccagaaataccattcaggagcaccttagtattcatctccatatcattaccatcaaaaggtgaattcccacaacaaggaaagggcttaaacttcttcttgatcttcacgctgtaagtcaagtctttgaaggaaagaacaaacggagaagaagaaggcacacgagaagacggaaccgaggaccagaaattggacgcaaccgcaatatccatagcccgactctggtcatccccctcatcttccacactcatgagaagttctgcaagtgtgacagacacccgcgcagtgtctctgtgacatctctgaagctccactgacttgtggatattgtaaaacagagggaggccatcgccattgacccgtttggccggagataatataccgaacaaaccagacatcacgtgaattattgtctggttaatgttttggcctcaggtaatgtgtctaaaggtcttacccacagaacaattttgatcgactttataggatatttggatgggagaatgagggagaaacttgtcaattagtttggtgatctctaagtatctaactttgagttgttctgggttttgtagcttttcatatttacatgtacatagcttttgtttatattttcgtatgtatataaattgtaagttacgagtaggtgaggagttgggcaaatccatccacatttttccgttattgtatgtattttttcttggggcttaaggtactctgtaaaaaaatcctattttaggtggtttttgtttacaaagtggaaaagtttactccatggaattacgtgtttatttcatctgtatataatgtatccggagtttatggaattgcaataagtatagcttatgtaacatgtcaggaatagaatttctccttgcacatgtatgtatgtcacgaatttcttaatctccttttgtttattatagtcacgacccgcgagttttctataatcacttacaagctctaagacttgttttttggtgcgtgagacaataattgactaggggttaattggatttccaactattttgaatcagtgaatatcttcgtacagtaactaaagcacgctacgaatatactgtttgttgtatcaaaatcaaatcatccaacattttgaacatttatttagcggttactaattaacttttgcaattagttaatatcaaacacataagatattctcataattaggatttggcatggtactatactaagattgtacaaaggcatgccattatgcataatgaagctaatggcgtgttatctttcaattgtttgtttaatcatgcacaccattttcgtcatataaaaaagcgtaagtgaagcctatttcatttcaaaaaaaaaaaaaaaaaattataaggatcattgatttgtacttttgtagttggtgaaacaaaaaggaaatgaatgtgaaaattatggcagaaaaacgtgcagatgttcggctttgatgttgtagagctacacacgaaaacacaacaaaaattgtcattaggaatatgtaatggaaactttatataacgtgatgagttagatttaggcatatggaagtttggtgtagctgttatatctgttttcttgattattttacttttgataacccatttttacaagagttgtcaagaaataatagaaaactatatacttagtatcatcagcttgtctctatcaagttgaactaatgatttatccaatgaaatacataacatttcttatggaatgtacactttcacacagagaatgagtttatattattctggttaagtttagtaagactttctttatgtaaagattgttttgaaattttgtgtttggtagaggatattttgctaagtttcccaacataattttgttaacactttgagatttatcaggtaggactagatcaaggaattgaatccctcaggtttgagatttcgttcaatgctaatatttgttaaatcgtacgagaaatttttactctcgtctgttgagtaacagcatgagagagttttcattcaaaaaaaaaaaaaatagcataagagcatatctctaggcataacattttgtgggctattaaggggccaaacttgggcatccaattgttaaaagcccatattttgtaagcctcgaggagttttttttgtttgtttccacatttgcctaaagttttgtatatgttcattgaataatatacaaatcaaacgcaaatcacattaatgatcccctcaagaatatatatataaaaaattgcatatattattaaacaattagtgaaattacttaattagattatctgataatcacatatagattttagaagcgaaacatatatatttgctctataactaaaacaaaataaaaataaaaaagagagcgaaggattgcatcaagtaatcgccgtgtaactaactacttttgcattcaccatcgctcttacgtttgaatctatccagatccaaagctcttcttcttcccggcaattctgagatctcattttcaccggcgacgagctttaatcggagaacg

SEQ ID NO: 9645 - DNA, 3000 bp, Unknown
  misc_feature (1)..( 3000): cDNA_ID_2184612_gDNA_ID_1972164_Annot_ID_179686 3000 nt of promoter + ATG
agtaacacatgagttagatatttgatatttacagtaagaagtaccaatcgaataaattattatgcaaagaagagaagtgatgatacttactgctccattcaaggaattgatcgccttctgaacctcttgggaagagctaagtgtcacaaatccaaaacccttggatctaccgctgtccctgtcgtagataaccctagcttcaactacctttccttgctcgttaaacaagttctcaagtgccatgtcatcaacaccccaagaaaggttgcccacgtagagacggtttcctgaacctgagcccgaaccggaccctgaccccgaaccataactggaacgttgagaccctccgtaaccaccaccactacgttgagaaccgtatccaccaccacgctcggaaccataaccaccaccacgctcggaaccataaccaccaccacgctcggaaccgtaacctccaccacgctcagaaccgtaacctccacttcttggtcctctggagaaggattcctctcttttaggtggaggagggccagcattgactctcaaaggtctgccttcaaattcctgaaatgttaaaaatcaacaggattaatgaaaacagccagtgtagtaatgtaagaaatccaaaagacaagcttgaaggtatgaacaacaagacaatgtgacaaaaacaaatgtacaaatctaaatcggctacttatatcccaaatgagaaacacgaacaacctagaagaagatgcatcttatcagcagaatataaaacaacatcaaccacgaagtctccacaaaccaaacagaagataaacaacactatttctctatctcaaacgttcatacaatccaattcatggaattccacattacacacaagccaagaacaagaaacaatacaagcaactcaataaacaaacaagtccacacaaaactcttatcaacaagtaaagacacagtagcgaacacaagtatctgcttacatagccattgaactgttgagctgctgcttcaacttccgctgcggttgacattgtcacaaatccgaaacccctgctccggccagtcactttgtcatagataacctacaatatcaaactcatttcatcacaaatgaaaacaatctcaaacctttagctatgttctcactttaactctactcaaaacgattcaaacccaattaagaaagataattaatccaaatctgaaaacagaaacctaaatttatcttacctcaaccatctcaacatttccagcgctctcaaagagctgagcaagctgagcgctatcaacgttaaaagaaaggttaccaacaaagagcttaaggtcaggagagaaggagttacgctccacaggcgctgaatcgtcaccgtcagcgaacatatcatcttcctccacctcaaaatccgaagatacagcaacgtttctaacgaaacgcgacgggtactcggcgggggatgagcatttgagggcggaggaagcgaagatagagacgaggtggtcggagtgaagtttgaaggagagggaaggaggtaagacggagacggaagcgggtctggagacgcagagaggaagggatttaggattgaaagcagagagggaagaagcagaggcagacatggctaaagcttgagagaattttgctctcgaggctaaagctttgagaagctggtggtgaagagataaggtttaagggttctgcgagataacaagtccagtttttgatatttattggcaaaaaaaatggaacttttcgttttttctttgcaaaaaataaaaatctttatccacttgaaatatctcccacttggattttttttttacctactaaaatctgtgtcagtcaaaagagttggtaaaaataaaagttactttgttacataaaatataaaaatagcattgatcttattgtttgattcattaagtacgaaaatatgacaacacaaatataaatgttgtgtttactgtttactaatgaaatgaaaacagattaataaataattatattgaaaatttagaaatttcaaatatacttttttttttacagtaagcttgaggagcttaaaagaagagttactcaaaccaattgagttttttttttctgttatatagtaatttttcaatgaagtgaatggtatgtgtgataagatctggtgcgtccaaattggatggacggtgtagattaaagagaaggaataagagagtgggtctagtgagaagataaggccattactaaaagccaaaggaaaaaatgcaactagagagactgtacactgaggctccagtatggatcttcaactcgttcttaactattaagtaaccactgataccataattttgaggtttatgtaatattgatacagtttcacttgttttccagattttttttgtttgtttgtttttttcctttttgttggaaatgaaaatcaaaggtaaaaataataggcaacaaaaatgaatttatagtcatgagtaagccttgcacaaattttcaattaagattccaaatatagtgtgttccggcttaagttaaggaagagtatgtaactgactaactgttgtagcattaggctcaatagtcaatactaccagaagatgccatcttctcgaaccaaatcatcaattctgtcccaaagcctcctctccggttcacgtctgtattcaggagacaatggatccgagagataaaccctagctctccattgctgaggtttaggtttggataatgaataaaattagcaaagagttacttattagagccggttaagctggagatgtctagtctgggatcgggtatttcccaaacccgaatttaaccgtttaataaccatcccggttcagattcataataagaatgggtcccattgatagccacgtgtcgctagcgaagacgtaagaagagattgaaaatggctaaggaacattgtccggcggagaatcgaagaagagaagaagaacacaacagtcagatactttttcttcttattttgtccgtaccgaaatcggaaa

SEQ ID NO: 9646 - DNA, 3000 bp, Unknown
  misc_feature (1)..( 3000): cDNA_ID_2184601_gDNA_ID_1972164_Annot_ID_179683 3000 nt of promoter + ATG
gggcccttgttagtactacagctgcagttgatatggtcgtcatttggctcgttcattaacatcaaattaaatatgatttgttgggaatcaaaaatttctaaccaaaaaacaattaaaataaagttatctgtctgatagaattagaaagcgaggagccttttcatcactgctcttctgcttcatctgtattcggcgcacacacatccataaatgcatctatcaaatggatatataacttatttaatcacatataatatacataaaattgaattatattaggagttttttaccttttattgtttcaattttaatttactcttaaaaataacatacacatgttaaatttgttaacaaacctgaatttaggtccgtttaacagtatcgtgaatataaataacttttaaccgaataatataattctcttgcatctaaagagaattattgttataagatcaaaagcaaacgaggtttacttttggttatccattgttggtatatatataaccacaagtcataaccatttgagatctttgaaaaatgaatgttgaatatatcaagaatgaactaattagtatgtggttttattagcatcatagtcgaatataataatattataaaataggtttgaaagttagaaacccaagaggaatgtggagtggagtaaaaaaacaaaacaaaagagttaaatgcgcatgcaagcatgcagatacaaatacacattggtttcaagaagtaattatttgtttataatctctaaattaacccaaaatatatacttaaatctgatagggcagcttgcactgagttcttgggattgcaattttctagtttaatttcacacacacttattatatatttgtccaattaagtatgagagtatggggtgactgtctaatgtccatatggaagaaagtaatttcgtagcatacggtatacggagtaaaaacagctagctgcagttccatactaatacagtaccataagataatttaataacttaatagcatgtggagtctacaatttcataatcaaattttcctatgtaatagaatgcttgtgtcttgtggagtgaattcgtctcataacgaggtgcatcagtatgcaaatatatcaaattattcatcaaagtccaaagggaaaaaaatggcctccttcctcgccaatttacatgtactaacgatgaaaaaaataaatcatgaaaccctaaatttgcttattcttttccttttatatattgaacatgacttgtgtacttgttttcacgtgctcatggaaaacgatgtcaatatggcttcatgtttctatctcatcatttgaacgaacttgctactagctaaagataattcaaattcattgcttccaagccaagcaaaatcaaccttttacatacattgactacattgaagtaccctcatttgttgtcacattggatccttatagtctatcattgtgttggattattcgtaatagatgtaatcatattcttttacgttaacaacaactatgtatgaataaatttttactaaaacaaacggccatgagtaagatatccattatccaaatgcacagggatatgggtaaagcgagagcttttaatatctctacaaaaacattattataaaagcaccaaacaaaaagtaaagtaagtggagtaaatattcaaaataaatgattttggtatatgcttagaacaagataggaggagggttgtcttcatagggagtgtaaatgatactagtacattgataataaaagccataactactcatcttgtgttccttatttcaatcatcaatggcacattgctccataacccagacatcatcatttataagtataaatttttatatgaatatggtacatgtctgtgtatctcatcactaatttgatcacactttcatttaaatattacagaatagagagaggtaaaagtaaattatgtttggacccatcttatatgttcagatatatgttgacaatgaaatgtttttatttgcattgtcgaaaatgaaatttttgttctgttcttcaaaaagggaatcaaaaagcgaggtagctttatatctaaatcaatttctttaatctaaagatgttttctttgtcacttcccattatctttcgcacgacatatattaaaatcattatgaaacattttttagggatatttcattttcaatatgtaatcttctttaaaatattatgattattaatgtatatggttatatccaataaatttagtaaaaagaaaaggagtttgattcaatatcatcaatctctaattttcgtcaagttggagttgtaaaaatcttgaaattcataatatagaaatttcgtcaatattatgattatttaggttatttatctatgtcaagaaagcttgaatctttcttgttctgagattgcttacactaatttcccataaactctcaattaaacatccataccattttgaattttatttttaggttccaaagtctttggagttagtaagtagaaaatagaaagttatagaaatacattcataagtgtatagttcaatatagaaaaataaacgaaaatgtggaagcacaaagaagacaaatagaggaaaacacaaagaagtggtccacgcgtgccaacatgaagtgtatgtgcgggtggctgcgacgcgcatgcttcaatctctcacgtgtgaaaaatcccaaaaatgaaatttttttccaagagcatgacgagaaaacgcactctctaactatatattaatacaacaatccccaactctcgaaagcattttagtaggcaaagaaaagtttcgagctttttcttttggtttaacttcttcttcttctttgacacttgtacgttttgtacctgtcgtttatgttctttaaggaagcaaaacccaattgagagatttcattaccaaaaatacaaaggaccaaagcttcttgttttgttttgttttttttcgggtaaaaagtttagattttttcatagcttgagctctcatcgtaaccaatg

SEQ ID NO: 9647 - DNA, 3000 bp, Unknown
  misc_feature (1)..( 3000): cDNA_ID_3042814_gDNA_ID_1972164_Annot_ID_179677 3000 nt of promoter + ATG
tacaagattcagtccgatactgatgccggtggcgtagattgcggcggagttggaatcctcggtatcgcttgggcctttggtggtatgatcttcatcctcgtctactgcaccgccggtatctctggtatgatccttctttaatcttgattttggtttggtttagattaagattatacactttttgagtattagaattacaattaaaccgaataagctgaataagttttacttatgtaagtacaacttgcaaactcaaaatttagacaagtaaaaattatatggtatggttttggtttgtttattcgaaattaattattttgcaaggaaaaatattgcttggttgacattactatttaatcggtttaaaatcttaggtttaaaagacgaaaatgatttgtttataaaacatttaataagggtcatgatcaaatcggttcttatccgaatgatatatatctaatctaagcctagtaattattttaagcaactgactaaccctgtcttaaccagaattgaaaccggttaattaattgcttgttgtaccttaattctcaagtactggtaacattgtcaactctttttgtttccttaggtggtcacattaacccagcggtgacatttgggctattcttggcacgtaaagtgtcgttacctagggccctattgtacataatcgctcagtgtttgggtgcgatttgtggagttggttttgtcaaagccttccaaagctcttactacacccgttacggaggtggagccaactctctagccgatggctacagcacagggaccggtctagccgcagagatcattggtactttcgttcttgtctacaccgtcttctctgccactgaccccaaacgtagtgccagagactcccacgttccggtgagtcacatatgtagtgctattaatcttcaatatggttaaccgactcaaaaccggaaccaaagcaaaccaaaccaacatttgatttcaatcatactaataaatttgaattttgatgaaataaaaggtgttggcgccacttccaatcggatttgccgtgttcatggtacatttggctaccattcccattaccggaaccggaattaacccggcaaggagtttcggagctgccgtaatctacaacaagagcaagccatgggatgaccacgtaagacctcaacgtttctccattacattcaactatatttttcatttttacaagggaataatgttttgaaattttggtgattacaaacagtggatattttgggttggaccattcattggagctgcgatagctgcattctaccaccaattcgttctgagagcttcaggttctaagtctcttggatcattcagaagtgctgccaacgtctaaacacatcaaaccagatttctcaagaataaatgaagttgtgatctctctgtacaaatctaaatcagtcacttgcagttttcatttccctttcttatatttgtgttttccacttgctcttttgtgaattttccttcggtgtaattgttttttctttcgcttttaaacgagtgattggaattataatcaatgaaatcaaagaggttcttatgcgttgtgtttacattaatactagtactaaagttagtttccttagagaataacaacaccatggggccatgttcttggtcttgtttacgtcctcctcaagatgctcagtgaataagcaggattttggagaaacacatgtctctgctttaacgcaatcattatctttctagaaaagaccattcctttatgtcttcatacatctcaggcggataaagcctagcgtgcaccagcagtaagttttagttactctctgaaaccgccattgtccattaaccccatatgcctcaaaggctcacagaaactgttacattcaagattcaacatacttagtcgtttgttacttgacaattatgaatcatataggaaatgctcgaacttggctgaggattgagagtcttacccttcagaatctgcattttttatgagaacgtgaagaggtgtggccgctcaaaattggcctcttggtggcctagcctcagcctctgagactgcctaccatccaaatcctttaattacgaaagtaaaacatgtgttagatgtttgatcatttactgtaagaagtactaatcgaataaattgttatgcgaagaagagaaatgatgatactactgcaccattcaaagaattgatggagttttgaacctctcgggaagagctgagtgtcacaaacccagtagatcagatttgatatcgagaaagtttctaaagggacctcatacagtagtaagaaaatgacgaatgtagtgatacaataggctgggatgcttacgaacgatttatgttgtttactctggagatgcttggcggacaattcaaagatttggcaaacaacatcgcataatgtacaagaaaaggcatattcaccccatctaatacacgtctcccgaagcttcctctgttcattaaccgtagacgagaccttcctgaacccgttgcatctgtgtgggaaacaaaaagaagaaggagaaaaacttgttgtgctggtaaattatttcacctgtgagtgagaggacaaaacacaccttctcgtaagtcttctggccagagccaccgtgctggaaattttggaggaaatggacatgcctgaaaagttgtgtctcccctccgacgtttgtcccacattacaaacgtttgatcaggtaaatccgaccttgtttattatcgaacctgtaacacaagagagaagctttagagaaagatggagctatcagcggagagaggagatcaacagaatcttcgagcgcaagtaatcgttttgagttgaaataaatatagggtaaaactggtattttatatgggccgatacgtgtggccctgtatcttagcccacaaagttagttgacctgcttttctgatcatcttcctcccactctctttcatctttttgtaatcgatttgcaatttcaatttcgcaaagttggatcatg

SEQ ID NO: 9648 - DNA, 3000 bp, Unknown
  misc_feature (1)..( 3000): cDNA_ID_2184569_gDNA_ID_1972164_Annot_ID_179672 3000 nt of promoter + ATG
ctgactgttgctgacggaaactctagctcccaaccgtaacattgtcgccatttcagttaaccttttttaatccaaacgagttcttcctagcaaaagaaggttcagcgagaaagacatgtcactaaacgaagcatccaactaaccaaacaaagaattctttatcttcgtcgagaatgaaggcaatataatccattatatcaaacttcttcaaaacagatacaactgaatattcttgtgcaaactcatatgtagatgaacaagttggatatcaggacgggcctgtttcaaggggagacaaaaaaaagtaatcaaataccttgtatatatatacatcattcaaattatattaaaactcaggatcaagccagttaatttcacagcataaatgctttagcaacaaagtggttagtttcacagacattttatcgagcaggtggtgtgcacaatgtaaaacaaagaaaaacagaaacctttgacgtaagattttgattatttttccgacaatgtctgagtaaatgagaatggtggaatctggctccaatttcaatgattcaaattgagggacaaggacgaagaaagaaccgcgttatggttttagactttttagtggtgtggtgaaatttacgtcgagttttgaacgatacatatggatacgagttacggtttcaagtatggttcaaccgacgcgaattagatcgaaccgaaaatttgatcgaaaaatgaaatcgttgtccgccagaaccggataaaaccggaaattgggaggcggatgaaattagtttttgactttttgtacataaccaacccatcatcagtcgatcactcactctcggtcactgaaaattaaaaaaagaaacaacactagctaatttcaaaatgttttatgatcaatggtttataataatttctaacatttttgcataatcatcatcgcatggtggtgtttaattatttaattactagccagacagtgtagtgaatttattgttgaaatactttctttttattcgtcaaaagaaaaatttgattagtagttcagaagtcactagttaatactctaataatctagtactagtgaatataatgtttttacaaaccattaatgtaatcaagctaatcgatcgttagcataaatttcaacgatattttctcccaatttttgttttccgcccaaatatatagttaaagttgtgtggaaataatatgttaagtaaattagcaagcgtgtatgataaatgaagatagtgatgattgattttgcattgtttcttttaggagatgtgtatgtcgtatttatcatgcatcggttttctatgaggtggtgtgaaagtgaaacgttacatgcttcaatatatagcactttcaaatgtatgtagattgaacacggaaggttaatgtgtttttgtgaaaaattgtgacaattttatgaaaattttccatttataaagtatatagatatgctaggttagtgtcctttgtgtgtgagtgacttatggttgcgtgaccgttcgttgttcataagtagcaatatgaggccaaacaatagcacgtgactcgggcgcgtctacaaggcgcgtagttaaaaaaacgccccctccacgttcttctactttcggtccattctatcaattaatttcaaaatagcccctgatatttattgatctatttcattaccaaccccacaagtttttttgattatccaaaattttaattttaatttttcggaataaccaaaaggaatccaacgtaaaaggattataaaaataactaagtactgaaaattgaggtggaaacagcacaatcattacttcaggggttacttttgataaatattgcagtttagttgaaaataaatgtttcttcagtgggaaaaaacgactcgcgagtccagtgagaaaaaaagaataacaatccgacgagaaagaggaaagatcaaatcatctaagtgctggtgccttgattctgcagttctccattttaatccaacaaaaaaagaagctgaatcgacggtataggtgaatacttcttcacgactttttcaaacactcagaaacttctcttcctttcacattgatttattcctaattttagtgcgattttttccttttttttctcagaagtttatcaatcttgttaggtagatatttactactagtttgttttttctactaatttgctgaagaaagtgttaatctttggttggtttaaggtataaatttgcttacatctactcaaatcagctaacttttattttggtttggtagcttaaagattcagtcaaaaaaaactttaatctttgttttcctgcaaaaagcaaaagtgtttctgtaataaaacacctttttgcagagaatgttaaaagattctctagttttaggctttatgtaaaaacgatttttttgctgggtgttctgtttttggatctgtgtttcttttttgggaagatccacccaatgaaaccaaatctcacattacaaaatgacaagaaattgtctcttcttcccaataattccaaaactttgatttagtaaaaaataaaataaaataactgggtgacttaacaaccagaaagattatgtgtaagatattggtgctttctttgcttgtaatagggtttatctttggtgatttgatgaatcacattgacggcaacttcttttctaattacacttctaaatattttatatatttggaattgttccaaatcattacaatattcatttgttgtctctttgctttcgtttggtggtaataggagtctctttgaagctaaatgtgtaaatattattcttatgtttttttcgtacacttgcttaagctttctttcttccctgagtttggttgtctatatgcttatgataagttttttttttccctctgttgcttctttctcacactttccattggtcttcatgtactatttgtcagattcttcaaagaagcaatcataacgcaattgattatatccccaaaagaaaaggtttttaaactccaaaaatg

SEQ ID NO: 9649 - DNA, 3000 bp, Unknown
  misc_feature (1)..( 3000): cDNA_ID_3042826_gDNA_ID_1972164_Annot_ID_179666 3000 nt of promoter + ATG
ttacaagacatcctagagtgatgaagaaacttcaagaagaaattcgagcaacactcggaccaaacaaagagagaatcacagaagaagatctagagaaagttgagtacttgaatctggtgatcaaagaatcattcagactacatccaccagctcctctcttgctcccaagagaaacaatgtccgacatcgagattcaaggctaccacattcccaagaacgcccatgtaaagatcaacacttatgcgataggacgtgatcctaaacgttggactaaccctgaagaattcaatcctgagaggtttttgaatacctcaatcaactacaagggtcagcattacgagctcttgccctttggagccggtcgtaggaactgtccaggtatgaccttgggaatcaccattcttgagctaggtcttcttaacattctctactacttcgattggagtttacccagtggaatgaccattaaagacattgacatggaagaagacggcgctttgaacatcgccaagaaagtccctctgcagctcgtaccaactcttccataatcactcgtgaataatagtattaaataagatgatcaagatttgtatgtttgcctctatcatactacatttggtttttctttcctttttttcgtgttgccatattaatatatatccatgttttataatgtttcttatcttcaataaaaaaaaagtcatattattaagatttcaaagttctttcaaattttcattgaagtggtctttatcaaggaaaacggcagcgttttgtatagtcactactatgattgtgacctaggcactatgatccgattgatgaaatctccaagtaagtaagtactagtagtataatcctgacctgtcatcgtctactagagactggatcatacagttcttcatagactctgctttagcactgtttgcatcaaaagcaaaccacttctttttttttccacaagcaaaccacttcacaaggaagaaataaacttaataatttttcactccccccaaactttcattattggtataaaaagattattttgtttgttttttcgtgatgatacacagaagggccagacccaaacaataggtgaatactgaaaaataaagaaacttgaaaaagcccaaactccatgaagggggaaaccaggcccaatacgagcaaaacagaggcaaaacaatccgatgtccaagatcgtcgaatccgggcccatatccggaaatccccacaacagttgaccaaataaccaagtcaccttgaagaagcgccggagttatcaacaagttcgttcatgaattcatacctgagttcacagttttctgatattggaaggtaaaattaaagtcattaaaccaaatgattcatgttttttatttctttttttgttaaatgaatgagttccacaaaaaatgtttagatttttagattaccaaattagttatggttacacgaatcagttccacaaaaatatgtttagatttgtaaacaaccacattatgttgcagcttggttagagagaccactaaatctaatcttatgtttttttggggcttctctccattaaacaccttaactaaatcaatcctctgcaaaagcaaaccatttactacaaaagcctaaccacatgcattgcgcgcctatatatcgtctccggtctctcgagaacaaaacgctcttcactccaaatacaaagaaaaaaacaaaaccaagctaaggcaaaataaaagacaagaataatgtctatcttcctcctatgtatcctcttccttttccctctctttcagatcatttttaaaaagcttttaccttcgaaaagtaagcttcctccgggacctacaggtcttccgatcataggaaacttgcaccagcttggaagatcgcttcacagtgtttttcacaagctctctttataatatggaccagtgatgcttctccgttttggagttgtccctgtggtcgtgttctcttccaaggaagcagctaaagaagttctcaaaactcatgacttagatacttgcacccgacctaagctagtcgcgaatgggttgttttctcgcaacttcaaagacattggtttcactcagtacggtgaagactggcgagagatgaaaaagctggtggggcttgagctctttagtccgaaaaagcataagtctttcaggtatatcagagaggaagaaggtgacttgctggtcaagaaaatatcaaattccgctcaaacacagaccctaatagatttgagaaaagcctctttctccttcaccgccggtacaatcttcagactagcctttggacagaacttccaccagtgcgatttcatggatatggacagacttgaagagctggtgctagaggcggaaaccaacggatgcatcttggcactcacagacttcttacccacgggtcttggttggcttgtagaccggatatctggtcggcattcgaggatgaataaagccttttcaaaactcaccaatttatttcaacatgtgatccatgagcaattaaagattggacaactccaagatcattccaacctcgttagtgccatgttggatatgatcattaggccctctaaattcagttctttcaatatcacttccaaccatctcatagcaatgatgtcggtaagtgctaaatagtaacttaattattaataccaatctttaaaattttatgttacgaagctaatgttatagcttggagagcaagttaactcgtgataggcaaacatttcctttttatggtccattcttctttgttattctgtctgaaaatcaaaatcctaaactattacgtatgttataattattcaatcaggatgtggttttggcgggagtgaatgcgggaacaatcacaatggtatggatagtgacagaactaattagacatcctagggttatgagaaaactccaagaagagattcgagcaacacttggatccaacaaagagagaatcacataagaagatctacaaaaagtcgagtacttgaat

SEQ ID NO: 9650 - DNA, 3000 bp, Unknown
  misc_feature (1)..( 3000): cDNA_ID_3042822_gDNA_ID_1972164_Annot_ID_179668 3000 nt of promoter + ATG
tctaattaggattgtctgctaccctttgctattgttatctgtctgatagggtgacactaaaggatcaggaaaaggcggggaatcgagtgcaaagagagatggtcaaccaagccaagtgtctcaggtaatgactcggtcttctccagttgatatggtcgtttacctaagcattagcttctccagctaatttattgtttccctgtctttactttctgaacagttctcgcaggttcctcaacaaggctcattctcacagggtccttatggaaactctcaagtaagtgttttccgacaaaagaaatgttgatacttataaatgaattcattctctacatagagcagagccggggtataaagagagaatattattaacaattaaaggatttaaggactttaatagactcgataaaaccgtcatatatgcattatccactttttgaaatctagacataggttctcatatgttccagtctctgaggttcggcaatagcatcgagcatcttgaagtgttaatggtatttgtaatctatcaatatgcagataattgattaaactcgtttgtgaatgtagggttcgaatatgatggttcaaatgccgggcacagagtagtactaggacactattcatcacaatcttccgagactcgactatgcctgttgtgtctgagaatctgagtgatccactttccatagatatggattgtggtatctcagtttttgggagagagaagatttgtatatgattgtgttgtagggagaagagtttggtttgcttatgataagaattgaaaagcaccttttttttcttttgactgttatgtttcttaggttttggtcttaagcagaagctatttatcaccacttcattggcctgttgattctttcatgcaagtgagcccgtaacttttataaaacaacatcatgatttataattatctctttgattttttggtcctaaattcgagtttcatttgacatcatccattgataaaaagaaacgaaacttgatattgaatcgttgtggtgtggtaaaattcacgatctaagtttgtgataacactccgtttatctgttggtgtatattgataaggctttctgttactgctcagaatctaacacatgggacatgtgaatgtcatatggaacatgttcatgtttatgggcctaatcttgatcaaacaaaaataaaaactttgaaatttaagaaaaactgaataacagaatctaaatgaaacaatagtaagaataaaaagaccaaaaactctttaaaagagcaaaaccaaaacctaaaactcttgaactaaactcaatgcttagtgatgaggtctgaaagggtaactaccatctgttgacggtaggtgacaacttcttcttgggaacattcgggaaagtaacagcttcggttgatggttgcaccgtgactcgaagcttaatcccagcctgacaaagaccggtctttaagcttacaaaataatgcactcctggtttagtgagcttaatgagatcgtgtcccgttttgtacacagctacagtagaagtcgattcgcaagatctgaactcaagttcatcggtgatttccctaacgtcgttgagttccttgttgtattggaaaaagagagtatcttcaacatgaaactgtttaccctcactccacttgtaatagtagtaactgtaataaacgctccatcctccgtagtcaccaactctgtagatcttaccaaaaggaaggatcttgctcggtggtggtggtgaaggagtaatgcgacgtgagggttcatgggtcttgctcggtggtggtggtggtggaggagtattcggacgtgacggttcatgggtcttgcttggtggtggtggtgaaggagtaatgggtcgtgaccgttcatgggtcttgcttggtggtggtggtgaaggagtaatggctaatgggtcgtgaccgttcatgggtcttgcttcgtggtggtggagggatcggacgtgacttttcatggacgacaaaaacgtctagttccagtccattgacgcattgaatatgatttgagctgatgaagtagtgaattcctggttccttgagggttacgacatcatgtcctgtattgtaaacggctttaggagaagaggagttgcatgactcgtactttaaagcatcggagagttgagtgacgtcgttaacgttctgatggtattggaagatcaaagaatccccgacgtggaattccttacgctcagcccaagagttcgtcttcccactccaccctctagaacctccaactttgtagattttcgccgagcagcaactcaagagaatcgtgatcgcgagcacaaagccaaagatcttctttgtgatcatgttttgatcgtataagaagaagaaaaaaaagaaagatgatgagatctctaaactcgttggatcaggaaaagtatttggagtagagtttatgaatgtgtttgtgaaaaataagtcacgtatttgctctgtttatatagagattaaccatcccaaatcataatccttgtcttcttaggatttcgtttaatttatcctctttttctttatatacaaataaaattcaaaacttttttcctaatgtaatgaaaaatcttatcttgttttattttatacaattacaaaatcttagaattctctattagttagttcatcgtatttcggtcgacggctatatgtttggatattgggttttacgcattaaggcccatatgaggtcaagtttgcttttttttttatgggctttattaggcttcaacgagattagtttttaaaagtaagaaacaaaaataaaaatggaacaaatccaacggtcgagagtcgatcaaagacattacacgattcattagtgaacaaccgcgctcactaactcaaaaacccttgatttctcaaagagtgggaacaaatcgaatctaatcttcaattcaaaattttatcttcttcctcagtctttgggatctttgagcaaactcaacatttcgatctctctgttcaatg

SEQ ID NO: 9651 - DNA, 3000 bp, Unknown
  misc_feature (1)..( 3000): cDNA_ID_3083090_gDNA_ID_1972165_Annot_ID_179728 3000 nt of promoter + ATG
cttgttcaacaatgaaactcattggtgcacactcatacaacagcctaagttttccatttttgctctttgcgtcacgagggtacccgtaaatcccaccatacaataaagtcctgtgaaaatctccaaccaaacttccaatgtaccttgcggagtaaggcttcccagttggaccagggtccttaagatcatcaatgtacttctttagtttatcgtcccacatctggtaattcccttcgttgaaagagtagattctcccggctttggggatctcaatgttttcttgcgtgaggacaaactcaccgtacattggatcgagcgtgaaggagaaaacgcctttgcctagagtaagaacgaagatgaccgagctcgagtacatacagtagccggctgctaacaagttgttccctggctggcacacgtttactatacacctttgttcttctgacccaagctgcaacaacattataagccaaaaggtcacctaatttacattgtaggatctctatctcctaaagatatatggaagtggaaggaagagtagtatacagctgagatatcgtcggagtcgtcgacaatgcattcgtcattggggctatagataccgaagatagaaccagtagagacggcagcgtcaatgttggaggaaccatcaagagggtcaaacacgacgacgtagttgccggagtaactctcctccaccgcaactggcacgtcctcttcctccgaggctatgattcccgttcttccacttgatctcaaacagttggaaaacacctgcactcaccaccactcaatctttattatacatccacccattcccatgaatcaactatgtggtctacactaatttatcacaaattcaaccaacaaaagcagagcatgtgtaaaaagaatgagacctcattagagatgacgtcaagcttcttctgatcctctccctgaatattaacggcgccttgaactccggtcaggttagagattccggcacgttgaacaagtgaagcgatctgcttacaagccaatgatatactcgacatcactatcgtcagctctgcatctatctctcctttcatctcttgtctcagcaaccagcccgtcaacgtttgaagttcgtatccactcttcttcctcgccgccgttttcgtctcagcagcatccgccgctacggccatacacctcactccactcgcatactgatggttcctcactccagttggtgctcgtttcccgttgttggagaagagagatctcggtgaaaggattgaaggctgggatgatgatgccacgtgacgtgagcttgagagaagaaggtgagacgacgtcgttgttgcggcggttgctgccattttttctgtgttgttttgaaaaaaactttggaaggtttggttttggaggagggagagaggatcggatattcggattgtgaggtggacgaaggattcgattcatgtgggttccacttatcttgtgttatgacacgtggctttgctcttacggacctaaacaaaaagataagcattaagccattaagcataggccagttttgttttgttaatggcaggtcaaagataataaagagttgggcctgatgtaaatttttgttttaagcaaacccaaaggaaattggccatataaagtataaaccaaactaaaccgaagaaattgaccagcttcctacaagtaggtgttggataagtttcttgctctagaattaaaaacaagtacattgtagaattgatgaatgcaatcctagaaaaaagtcaaagaatgttggcttttgatcgatgaaatgcatgtactacaccactaggaaatttattattctggctgatgtgctctgcatcaaaacattagttattcgtttacgttagaagttagataaccagctagtggcagatgttaatctgactttttttatttattactgatttataattagacttgtcagatataatgtatttaggatgaatttcttgagtttccaagttactagttcaaccgaaactataccaatttgtataattttgaagtacaacaagtcatagagctcgtgtgtaaaaacaataatagtaacgcgttgagacaaatacggacgtgaagacatgtattgtaagcacgtcgctttgtttccaagtaacaccctcacccgaaaagtctaataatataatgaaaaagataatccaactaaatcttttacaatatatctaaaacttttgattacgtttgaccaaacattaaaagattaattaagtagtatcatgtagacgatttcaaagaatctgagcaaaagtctcctgtgaccaaaatactaataagctctgaatagtaaaaaaaagtaaataaaaaaaagtttgaaaatacataatgactcatgttaatatcatttaaagtattttaatctggattaaaaagctctagttcattgaatcgttgattaaccatagcagcaactcgacaatatataaatcatctttcgtatgcaaatttttgtcaacctttgaacacactagaattaggtttattttattaacaaaatgagaattttttggaatcccacgtccaagttgatgacttttttgtgatttccacaaaatatgcatataaatatcaattagattacaaagacattaaaatagaaaaattacagaacacaagaatttttttttgcaattactatacaaaatgtaatctttactgttgacaaaagaaaatacaattcttactattatagtaacaccatagatagagaatgtcataaagcaaaaaaattaaatagtaaatacaaatcattcttttttcaaatatttttaacaaatcattcttgtatatatgtacacacacaccccacaacatcccttcaacatatacgcgtcctatttccacgttctctctatattacatttttccttgaaaacatctcgaggttcaaaatctttaacccctacaaatcaagaaaaggagacagaggagaagagagaaaagaaaaacgcagaaacaatg

SEQ ID NO: 9652 - DNA, 3000 bp, Unknown
  misc_feature (1)..( 3000): cDNA_ID_1380437_gDNA_ID_1972165_Annot_ID_179741 3000 nt of promoter + ATG
aaaaattccggtatgactacaacatcttaggcaatcattcaatacgttaaaatatacttaattttttacactaaaataacaactagtgtttttttttggttaaggaaatatcaactattattacttaggttttggtacaatttgtctttgaacaggaagaaaaattcgaatctgatcaagtactgtctaacaaaggtcgtctcttgcttgaaacggaggttgggagaaaccagaaaagaccacaaccatccgatgaaggagacagacaaagtaagaaacaaaatacaagtgaagatgacgcatgcaaagataaaccatcgtcagtttttagtactcattacaggttttaaccaaaaatagatattaaaccatttgagaaagcaataactcttatttggatatcagttcattattccgtattaaagccgttggtttttgtacaactgagtaataaagttcatgttgagtatgtcaattattggatttgggagttccaaagaaaattttgaagactttatgtaaaatggaaacatctggtggcgaaaagaaatgaaaattggagtttccattcaccatacacaaaacaaaaaaaaaaaaaaaaaaaaaaaaagcctagatgtaacctttctttagcggtcataatataatgttttcgtggatgtgaattcttgacgcccaaaaataaggaatttttaattcatttatctaaccttttgataaaataaaataaaactacacgcttatttcaggtttgatctgttgtgagattagttacaactttttaaaaagttaatggcaaacaaagttgtcgtcgatagtgatgatacctagattaccttttagcttttctttctagagagttatcttcccaaacagctctcaagtatacgttttagctagcttagagaattgatcttaatttcagaaagaaaaaaaaaaaagaatgctttgaattgaagcacaaattggtttttcttaattggatttgaagaatcaatggattagactagaatcaaaaggtcaactactatgattcccgtgaaataataatcaaatatgagtgatccaaatttctatataattgcacatcattgatttgtggatctatcaagtgttatcttttacttatattttcagttagatctgacaacaattttcgtacttattctattaaagttggacctcgcaacaacctttcatatcaacgttgaagttttatagttaattattagttcttgattttaaaatgtgtcaaatgatataatgattagttcaaagttcaaaccactgatcaaagattacttactcacgttgcacaaaatccaccttgaaacatcatagtctcgatgtcacatcccaacaactagttaatgttttaacaaaaaaaacaaaaactagttagtgtacttcaaaagtatatattggtataactgattagacgaatatgtaagaaaagttgactacaagagtatggaagccgtggtaagacttccaatgaaataaaagcaatcaaagcacactgttttttacctattttatttatttatttattttgtttgcaactaaacgtcatcaatttaaaaattgttaaatacatcaaatatgttttctttataaatatcaaatttggtcagatatattttctttttcaaatttagcttcataaacatcaaattttacttttggttttgtctctttagtttgttgggcttttggagtaaagagttcaagtccaacaactaagtcgataaacagccaaatcctcgtagataaacaggatccagctacatatgtcgattcacatgcatcttttaatattcgtcctcggtgaatctttagatcaacggttactttattactaattgtcattagcacctcttattttagcataaccaaatcaaacacctttaattatctttctaatatcactaccctagtttatattttaagatccactgagaccttaaagctgaaacaatgtttttaatcgagggagtgattagagatttaatcaaatggatttagactgaaccaccaaattgaatattgaatctagtgatgtttttggctttattttcacatatccaaaatcaaacatcaaccaaaaccaaatttaataaacctaactatttttttttttcaaaatcgacaatctgatatttagagtatgaacacaagtttcaaataaaaaaagaaagagtatgaactcaattttataagaaaactccaaatcatcttattgaccaaagtgtttgtattcacacttgtatctttcttgttttgagtaggagttctttcttgttatctttctggtaatgtcaattccgtaatatcggataaaaaacaaaaagagtccactaaagttttggtggatgattaacacgtccttcgatattgatctatttacactttggagtcaaaacaagataatatcaaaatctgatagcacaataggccttgcggctctaactgaaatatacaaaaactcaaagggttaaactgcaaacatgagaagaaaagtgagcaacgctcctttctatttccttggatataaaagctgtacgggaccagagctctgcaagtcttttttataagctcatgctcattattactccgacaagtgccgtgtaattcctcgccctcggctactcttttctcttcttgcctctcgtctccgccgctgattcagctgccgccgacaaaggtttctcccttttttctaagtcttttatgagttttcctttcgttacaagttacaaccataacctcatctggtcacacataaactataatttcagagcatgaaaatttcgtacttgcttgcttcatctgcatatttcgatctaagcatctactagtcaatttctttcacgtatatttttaagggttttctcataaccttatacctgaagtatggatctctaaattggggatctttaggtatgtgtttggtacatctttcttgaaaaagctaaactatttttctttattaggaatatg

SEQ ID NO: 9653 - DNA, 3000 bp, Unknown
  misc_feature (1)..( 3000): cDNA_ID_2184752_gDNA_ID_1972165_Annot_ID_179746 3000 nt of promoter + ATG
ggtcatgacaaaactataatgtatggatggtttaatttgtatatttggagagcttgaagccacacttatagaagaaatataaatcaaagtagagaaagaagtgttttaaatgcgatttgagctgccaactaattccttacaatctgcctaaattatgtgacagtaattaagaatctgatttgattctttatctgactttttcttctactttaaaaaggttgaagaaaatatctacctgtatatgacacattgactaacacgttttactaattttgttgaatcaattatgattatctcaaaaagattttaagacgaaaaagaacaaaatcaaatctctgttcattaaagtaaataaaacatacatagagattaaatacaaaccaattcaaataccaaaaaacaaaacaagaacaaagtgtggtagaatctacagatctgattataacttagtcgaatacttacagtgttgactcgtaacattacgatccgaaacagagatactgagatcacacgaagaagacgattggactttaatcttaaagattttaagaacggttactttaccagtgactttaacaaaagtattaagcggaatgacgccagccatgacgtcagataaaagctgcgtttcagagagtaaccgatccgccattagcgtcaacgttatattcaacggcaccgttttccgcgccgcgattcggttagccggaagaggagcttcaccgatcacttggcctctgtaattcaacaacgccgacgacgaatcgtagctaaacccgatgcggttagggtttttgagagagagatcgacgttgagcgttaggtttaggaggactttgagaaggagaggattgacggaagcttggagacgatcaacggtgacggaatcgattgtagtagttgggcgttttggtttgaagagagtgaaagctaagatgacgataactatggcgattaggagaatgagaaggatagtgaaacagatacagattttgcagttgcgtttccgccgcagttttttagcggttccggtgttagcagattgcgtttccatggaagaagcgtttggtttgggtggtggtaacatggctgttgctggcttctcctcttcctttttatcatcgggtttgattgaaaaatcactcatagttattactctctttgttacgctttgtggttctctcgctgttgagtttctcaggggttttggtttatcctataaaggaggagaccactatttgtacgcggattcgttaccagtttttaattacatgactcaaacacatttcattttaataatttgttattttacattttaatatttcttgattttccacgagtatattttttaaaaaaatagttaattgatgaaaattacattttcataaattgggaagaatttgatgagatactagttttttttttttttttggtgtatgtctgtaaatggaatctcaatttaattttgtaacacacttctaaattcataaaataagtatttagaaaaataaaataaaaacggataaaagtataaaacatacataatgttcgtcgaacgtcgtaaagacagctctttataaaaatggttgttagttgaattttattaaaatcggtattgattgagttgagatttgaccatttttaataatgtttcgaagacgtgcattaattaattcagctggacgtggaagaagggagatgataaaaataataaagtgaggttagcggtagaaatcaaatacttcacatggcttttgtaaagagaccatgcttgatgcatcatccgtcgcttttgcctaatttcgtgtggttattacgtaacatattcaatgactaattcaccgtctttttctgggcccatttcttcatttacacgggacgacttctggattttggcccgtttaatctgtctctcttattaaattcatcatgcatttgaatgcccatttgttttattgactttttgctgttgagtttctgacatttttttaatcccacgatagaagttattagaatcacatcattgaaaagtaagtttccaataatttacgatacttttacctaaacatttactctattttttagtttttttaaaaaaaattattagaaaattttgaaagtcaactatagtatttttaccaaaacgcattgaacaatagcatatgaattagaacatattcaaattctcaaatagattgttttagtgatttagtccaatgtattagaacaaaatttaatgatgtttcatttctaaaccttttatcttacaaattggataaccaatcaatgacttttacttataaaataatatggctggtaaacaaaataacaaataaacataaatatccaattccaaaataataagtcgatgccggattttgacaaccaaaataacggtgtaagattgttatagtgtttgtaaacatgattgatggtcgtatatgaaagcaatacttcgtataattaaaaaaacttacatgtgtgactatgtgatgacgttttttcgtgtagttgactcatgaattttttaaaaatactaatagtaaaacaaaataattaaatattttcgaagaattctatcaagcaaactaatcaattgtcacaaggtttattgggctgggccatccatcacagcccataaaagttaatttctttcaaccccttaaacgctgcgttttaaaaatattcaatattaattttatctttctacgatctacgatgcttcggattggttcggctggttcgtgctcgaaattgagattttgaaagaaaaaaagagctctgaatcattgaaatcagcttaattccaatctgaatctgcaaaaaagtcttacgtcacactcccatgtagtagccgtcacttctcgtcttcctcctagagattacccaactctctcgcttcttctttttcctcttagggtttcttcatcctttagggtttccacaaaaattcaaaacctacttggaaatatttgggcttgaagaaggaagaattagatg

SEQ ID NO: 9654 - DNA, 3000 bp, Unknown
  misc_feature (1)..( 3000): cDNA_ID_2184760_gDNA_ID_1972165_Annot_ID_179749 3000 nt of promoter + ATG
gaaagcatttttaccaattgaagctcacaaaacaaaatgatctcatatctgcatcaacaactgtttttcaatattacagagcaaaagtgaaacaattgagcaaaataaaagagatattgaccttagacaagctcaatgtaagccattggagcattatcacctctccttggaagagttctgatgatcctcgtgtatccaccgtttctctcaccgtatctatcaggaacctcagcaaacagagcgtgaacaatctgtttctcgtagatatatcccaaggcttgtcttcgcttgtgcaacgaaccgtctttagccaatgtaatcatcttgtcaacgaacttcctcatcgcactagctctagctcgagtcgtcttgattctcccatgcttaagaagctgagtcgtgagtcctcgcagaagagctttgcgctggtccggtggtctgttcagcttcggaacacgtcgtccgtgtctcatcgcgtagatacgaccaccaccgtcaacaattttgaatccattctcaaagctttgccaatctgcgttcgaaattcgaaaaccctaacgactttggagattcaaattgagccaaatctctatgaaaagtggaaatttacctggaagtccgattgagaggagaggattgaccggagagagaccggagaaagatgggagtgaaggagaagagattgggagacgaagagtaaccggacggcgagaagacgaggaaggtaatcggagtgatgcggtggagggaagagctgatttgagagaagacatactccagactctgctcacggaatctgtaggagtcgccattgccatggacattggaatcgccattagattgtgatcctctgcaacaaagcggattttgctggtgttgaatggataagggatagaggaagaggactttgtttatcagaaaccttttgatgggccttaatgggcctataaactgtaactctgtagcgctttgccaacaagagactttttaaggtttttgttgccaaacagatatttgcatttgggctatgtaatgttagaattattttataatgtatgctattgctagatattgtttaagtgcatttgtgatttacaaacatttcatttttattttggttttaatgagcatttctattatagagactttgatgttaataaatggtgttctaagatatattaaaatattttatatactttcttaaaattggataaattttgggaaaatccttaatatcagttaaattgaagataaagagtattaaaaaaaactatgtagtaaaatacatttcacattttttgtgtataatagtacatggtattcgttaagatcactcaaaaattaacaaattaagtctaaaagggcagaaaagactattcaaatatggacttggagaaagacattcagctttttacgctgagaaactttcatattgagccgtgtgtttgtgttgtgaagagaagtaataaaaaataatttgaagtgaaaaaggagaagaaaaaataagatcgtagaaagcgtggatggtttcttcttgggttcactgccatgcgattattaaattggccatggggctagtgtttgacgtacaaaagtctaaaaattgtcagtcaaacaggtccaaaactttgtaagaaaaataatataataatagcaaattttctaaaaattgttaaaaaaagaacaaaagggaaaagatgaggatgcagatgaaagcaaaatgtcaaacactagtttcagattttatcgggaactggggtttgacagttggtgtatgtatgtaatggcctctcatcaaaacatgtgcatctttttccttttttgttatttactgttttagctctacgtcttgtccaattcctctcaagtaaaatgcctttaatatgatactaatatacaaggggactaatgctttttcccttttcttatccttgttttgtctaaatctttacttggattcctttatttttctcctctctttagattagtacggtttaaggaataccatctttctaattttagcacaaaattgcaagttggtgccccatcttagtaagcacatcgtaccacactttgattgtgtgagagacttcttcatcccatctctcataccaaacctaaatcaaatgactagtggtgcaacctgctgactccatatgaccataactaataaatcggtttatgaatccaactcatgtagctctatagaatagaaacccattcatttcacataatgaactgaatctgacattttatttacatcatttactactcaattttgtaattagcaagatcatctttttcattattcaacaattttgatattccataatttattaactttgtcatacatcataatattctgaaattttgttatatattgtaccggttccacgaaatagagctctattattatagaccaaacaaacaaaatattatcttcttgtggttagttcgagagagaggtcaagaagaaacgaaatggatcggcaaacggaagacgtcaaacacacaacgacgaacattttccgatcacccacctaatctcttcccatttttattatttttcaaaactcaaattaattaagaagaaaaaaacagaaacagagagagaaagagttaagatgaatagagatagaaagagtcattaaatgtacgaagcgacattcacaataattcgaaaggtggaagacgacttagatacggccaggcttcactgtcctcctcgtcctcctcaattacccctaacccctttttccgggattcatctccaacccacatccttccaaattctcaccccctcactgagtttttgctttttctcctcatcggagatcgtgaagacgatcaagtaatttaagaatcccaccattgataaaagagtctagcttttctactaccaaacctttttctgtttggaaattttcgattttggatttaacccttttcttaccttatttataaccatgcaatctcacgaccaacaacccttcaatctcc

SEQ ID NO: 9655 - DNA, 3000 bp, Unknown
  misc_feature (1)..( 3000): cDNA_ID_1023634_gDNA_ID_1972165_Annot_ID_179748 3000 nt of promoter + ATG
atctcttccttcctctctcttaaagcctccgccgtatttgtttggacggcgggaacagtggccgtcactgtctctggttgcggtggtgcatcggtagaagaattttctctttcttgctgctgaatcggaggaggaggaggcttatgctgttgttgttgttgttggtgctgctgttgctgttgtggaggagaaggattgttggagatctgatagagaggttcgaaagtttgaggagaagggtcagaggaagaggaaggatcaaggagcatgagagatcggagcctgtattcaagaagagcaccgagatttgggttacaagggaagataatgtctctaacgttttggataagttgaggaatagagactgaagttgaggaatggataaggtctctgataatggcgtcaacccatacagtaggtgaagcagaagaagatgaagagtcttgatccattggttgtacggacatcataacattccgaccaccacggtctgaaggaaaaacgggaagaccagagaagccacaaacagagagtggtgggtttggttgagaagatacagtagccgccgccgtaagagacggtggttgttgtggtgtgacagtattgtagttggagtcaagaaggtgagagacacggcgaggaggacgagaggagttgttgtagtcagggttagaagacatctcggaagctaatctttttctcaccatcactaaaggaggaggaggaggaggaggaggaccacggttgttgctgctgctactaccggaagaagttgttctcagaggactatgaggaggaggttgaccaccgttgaaatcgccggattccgccatggagattgaagggttgttggtcgtgagattgcatggttataaataaggtaagaaaagggttaaatccaaaatcgaaaatttccaaacagaaaaaggtttggtagtagaaaagctagactcttttatcaatggtgggattcttaaattacttgatcgtcttcacgatctccgatgaggagaaaaagcaaaaactcagtgagggggtgagaatttggaaggatgtgggttggagatgaatcccggaaaaaggggttaggggtaattgaggaggacgaggaggacagtgaagcctggccgtatctaagtcgtcttccacctttcgaattattgtgaatgtcgcttcgtacatttaatgactctttctatctctattcatcttaactctttctctctctgtttctgtttttttcttcttaattaatttgagttttgaaaaataataaaaatgggaagagattaggtgggtgatcggaaaatgttcgtcgttgtgtgtttgacgtcttccgtttgccgatccatttcgtttcttcttgacctctctctcgaactaaccacaagaagataatattttgtttgtttggtctataataatagagctctatttcgtggaaccggtacaatatataacaaaatttcagaatattatgatgtatgacaaagttaataaattatggaatatcaaaattgttgaataatgaaaaagatgatcttgctaattacaaaattgagtagtaaatgatgtaaataaaatgtcagattcagttcattatgtgaaatgaatgggtttctattctatagagctacatgagttggattcataaaccgatttattagttatggtcatatggagtcagcaggttgcaccactagtcatttgatttaggtttggtatgagagatgggatgaagaagtctctcacacaatcaaagtgtggtacgatgtgcttactaagatggggcaccaacttgcaattttgtgctaaaattagaaagatggtattccttaaaccgtactaatctaaagagaggagaaaaataaaggaatccaagtaaagatttagacaaaacaaggataagaaaagggaaaaagcattagtccccttgtatattagtatcatattaaaggcattttacttgagaggaattggacaagacgtagagctaaaacagtaaataacaaaaaaggaaaaagatgcacatgttttgatgagaggccattacatacatacaccaactgtcaaaccccagttcccgataaaatctgaaactagtgtttgacattttgctttcatctgcatcctcatcttttcccttttgttctttttttaacaatttttagaaaatttgctattattatattatttttcttacaaagttttggacctgtttgactgacaatttttagacttttgtacgtcaaacactagccccatggccaatttaataatcgcatggcagtgaacccaagaagaaaccatccacgctttctacgatcttattttttcttctcctttttcacttcaaattattttttattacttctcttcacaacacaaacacacggctcaatatgaaagtttctcagcgtaaaaagctgaatgtctttctccaagtccatatttgaatagtcttttctgcccttttagacttaatttgttaatttttgagtgatcttaacgaataccatgtactattatacacaaaaaatgtgaaatgtattttactacatagttttttttaatactctttatcttcaatttaactgatattaaggattttcccaaaatttatccaattttaagaaagtatataaaatattttaatatatcttagaacaccatttattaacatcaaagtctctataatagaaatgctcattaaaaccaaaataaaaatgaaatgtttgtaaatcacaaatgcacttaaacaatatctagcaatagcatacattataaaataattctaacattacatagcccaaatgcaaatatctgtttggcaacaaaaaccttaaaaagtctcttgttggcaaagcgctacagagttacagtttataggcccattaaggcccatcaaaaggtttctgataaacaaagtcctcttcctctatcccttatccattcaacaccagcaaaatccgctttgttgcagaggatcacaatctaatg

SEQ ID NO: 9656 - DNA, 3000 bp, Unknown
  misc_feature (1)..( 3000): cDNA_ID_3084009_gDNA_ID_1972165_Annot_ID_179758 3000 nt of promoter + ATG
aataaaaaccaaacaaaagcttcaatatgattcacttaaaatgtggtaagtaggggagatgaaaaggacttatcttatagaaattgagtcgtttattttgttggtccaccatacatttacatgaaatggttacatcaggacgagtgttgtctgagacctagaaaatcagaaaccaaaaccacaaaagaattaaaatgaaattacagacacaatcatgaatctctaacataagaaataacaaaaccaccttcacgtgatacaactctttggtttcttcaacacaaaatcccattttgtgtacagctctatacccaacattttcgacataagactttgggacatttgtacgaaacattttcttcaatttctccaaagtgcttttagttaacggaccatctcttagagttcctgatgaactaacactgcatcaatttgataagataacaatcggtaaacttgtttattcaacataaaaaagacttgattagcgagaaatgcgcaatccaactatagtttctaagttgtctagatagtagataaccgactcaactatagtgtccaagttgtcaacacagtttcaatccactacaaaccacctacggtaattacaatgctcttaaaccaacactaggctaatcactaaccctgccccaggtaaaacagagtttgtgtgtgtccctaaaaactgaaaatttgaggagaagtcaaaaaccttactcatggaaaacaacattaccaaaccgagcgatcagtctgagtttgacatcctctgatccaccataacctagcaacgtcttctttgccctatcaaatcccattataatgtcatcctccactttctctgtcacccataaccatggattttccagttttcccaaatcactcttcgctaagattaccaaagatttttcttctgcgtctttcctccactctgaagaaccgggcacaagttgaaagttgctatcctctggatccgaaccaacgagaaaccatctagaaatgtaaccgtttgcgtagattatctttgtattagtactcccgacgtttttattgtgttttttaagaagagaaggtggaacagaggatgctctcaatgcaacattttcaagtcgtttatgtggtggaacgtaagacatctctgaaacgaatatatgatactaggaaaattaaaagctgattccaaaaagataactcaagtttccgagcaacgaagtatgagaagaagaaacaaaagagtaccttttaattatatcagcttaggtcattcaaaagaagaacgacgatcatacgagaggaaactgaaaaggcgcagagcagtgaactgaagtggaagagacgagacggtttggtctttttatcactagaagtttagtcttggaaatgtgcataatatttaatttcatttcaattttcaaatcaaaaaataaaaccgataacgaaactcttgttatcatattatgagcgttgataatttagagaatctctgttcttttagaaaattgtatgaacattttgttaaataaataactatttttaaatgctaaacctcattgtttagtcctaaatgttaggaatcttagtattcatttttttttcctcttatgatatacacttccggtttagatttctaggacgttttaaatttaattattactgctaataaaaatagttatttatttttaaacaattaaataaaacaattgtatctctagagtaaaaaaagttttaaaaattttggtgaatgtttttatttggcaacccaacttaattcctgaaacgaatcacgagaattatttaacgtactacaaaaggtacatctaattttctaaaaccgaattagactatcgtcttggttgtttttggatgttgcatgtctatattatgataattattctgtaagcattacaattaaatcgtttctgtttttactaaaggagttttgactgttttaaacgactgtaaacactcgtgtgtctgcttaaatcatgtggaaagttaaatgataacagttagaacatccaactttacatatgctttgattagacattttctacgatatgtttcggattgacacgtgctaatcatatctgatcattttcccattttacatatgttctaattaggcattttcgacgatacattttagatcgataatgtgttaataatcatctgacattttttactttgtatgttctaattatgtatttatacgataaacattagatcgacacatgcaaaacattcgacaatttgttgaacactgaagacctaatttggtataatacagctcagcgaagatacgttacaactaatttggagcgtttatagaaaatataggcaaatagccaaatatgctaataaaaagatttagaactttaataggtaatttaacacattttataacacacaagcatatatatttaaaagggaaaaaactagtcaactttcatagaccatcattaccataataactcaattcaatcaaattttaatttttggctactatttttcttttctaaaaccaaaacatcatcatagtagattcttcaattttaaaatatagaattcaaattgttgaccagggaataaatagaattgcaaaaaaacaaattaagatattttacattccaacttttcccccaaaaaattagagaaaaaaatcaaattaaattcaataattccaaaacataaaacgtacaaaaaagttaatgataaaaaaacgtaaaaaaaaatacaaaaatacaaagaaaaaagaaagacagcgtggagagtaaagctattggtagcatggctgcaacagaaggccaagtgtttggtcttacaatttcatttttaactctttgtgttaattaacccaattagccctttcctccttcagggtttatttaacttgccctttctcgtttcctcctttttttcttaaaccactctgcttcctcttcctctgagaaatcaaatcactcacactccaaaaaaaaatctaaactttctcagagttta

SEQ ID NO: 9657 - DNA, 2239 bp, Unknown
  misc_feature (1)..( 2239): cDNA_ID_3042854_gDNA_ID_1972165_Annot_ID_179757 3000 nt of promoter + ATG
ttccaagagcttttgtcccaaagatgagcctcgaatctcccagtccatctatgtctgcaaaatcccacaaaacaacatgcaatcttacaaatgcagttttaagacaaaacccaaatccaatctcaacaaccaatcatttaatttccaaaaaaataaaaacctagtgactcctctgtagatagagctgcgtcgggtagaagcagggcttgtcgggttatgagatttatcaccagaaggagaagatttcttagcccttttggctcgtttaggccttggagcctccgactgaataggagaggaagtagtagtagaagaagaaacagaggaagatggagaagaagaacaagtggaagtggttaagcgcttcttcattaaactctgagaaagtttagatttttttttggagtgtgagtgatttgatttctcagaggaagaggaagcagagtggtttaagaaaaaaaggaggaaacgagaaagggcaagttaaataaaccctgaaggaggaaagggctaattgggttaattaacacaaagagttaaaaatgaaattgtaagaccaaacacttggccttctgttgcagccatgctaccaatagctttactctccacgctgtctttcttttttctttgtatttttgtatttttttttacgtttttttatcattaacttttttgtacgttttatgttttggaattattgaatttaatttgatttttttctctaattttttgggggaaaagttggaatgtaaaatatcttaatttgtttttttgcaattctatttattccctggtcaacaatttgaattctatattttaaaattgaagaatctactatgatgatgttttggttttagaaaagaaaaatagtagccaaaaattaaaatttgattgaattgagttattatggtaatgatggtctatgaaagttgactagttttttcccttttaaatatatatgcttgtgtgttataaaatgtgttaaattacctattaaagttctaaatctttttattagcatatttggctatttgcctatattttctataaacgctccaaattagttgtaacgtatcttcgctgagctgtattataccaaattaggtcttcagtgttcaacaaattgtcgaatgttttgcatgtgtcgatctaatgtttatcgtataaatacataattagaacatacaaagtaaaaaatgtcagatgattattaacacattatcgatctaaaatgtatcgtcgaaaatgcctaattagaacatatgtaaaatgggaaaatgatcagatatgattagcacgtgtcaatccgaaacatatcgtagaaaatgtctaatcaaagcatatgtaaagttggatgttctaactgttatcatttaactttccacatgatttaagcagacacacgagtgtttacagtcgtttaaaacagtcaaaactcctttagtaaaaacagaaacgatttaattgtaatgcttacagaataattatcataatatagacatgcaacatccaaaaacaaccaagacgatagtctaattcggttttagaaaattagatgtaccttttgtagtacgttaaataattctcgtgattcgtttcaggaattaagttgggttgccaaataaaaacattcaccaaaatttttaaaactttttttactctagagatacaattgttttatttaattgtttaaaaataaataactatttttattagcagtaataattaaatttaaaacgtcctagaaatctaaaccggaagtgtatatcataagaggaaaaaaaaatgaatactaagattcctaacatttaggactaaacaatgaggtttagcatttaaaaatagttatttatttaacaaaatgttcatacaattttctaaaagaacagagattctctaaattatcaacgctcataatatgataacaagagtttcgttatcggttttattttttgatttgaaaattgaaatgaaattaaatattatgcacatttccaagactaaacttctagtgataaaaagaccaaaccgtctcgtctcttccacttcagttcactgctctgcgccttttcagtttcctctcgtatgatcgtcgttcttcttttgaatgacctaagctgatataattaaaaggtactcttttgtttcttcttctcatacttcgttgctcggaaacttgagttatctttttggaatcagcttttaattttcctagtatcatatattcgtttcagagatg

SEQ ID NO: 9658 - DNA, 3000 bp, Unknown
  misc_feature (1)..( 3000): cDNA_ID_3042858_gDNA_ID_1972165_Annot_ID_179755 3000 nt of promoter + ATG
aaaaaagagatttagaacatcaaattgctacagattcagcaggagatacagcacaaagaagatgatgctattatttgccagaaaactaaacaaaaagtctaagtcaacgcaggaagagacaagatatcaagttatcaacacaatagcaagacccacatgcaccagtataaaagaaagagaacaatttgataattcagcagagatagtgacaaaagaaggatctttatagaaaatcccaggaaacaagccatgcaactactcataccacaatgcaaaacaaaacaaaaaaatctagactagctaaatcctctaaacaaactatacaaacctgaggctcaagtttagggaatttaagagtttcctcaacaacaatgtctctattccacttataatccaaacgagcagtccaaacaacatcagacaccgttgattcaccgccgccgtatacaatctcagaacccacagaagttacggcgatgtcaggagtcaacaacggtctcttcttcctcagactcgagtaagaactgaaagacctcccggtgcaataaacaagcaatgaatcatggcgatagtgagcttcccaaagcgcattgaatctaagaaggtcattgttttcaggatcatcgtgatccacctgcgaatttggtgagaattgtttaattttgtggaatctaagagacgaattggaaatcagaagtgtgagtgagagaggaaatagaaattaccaatgtgcaatcgagatcagcaactagtatgagacgtggtggtccttcaagcctatccatcgatttcaggaacccaggtgtttctctttgcttctctcttgtctctttgctcaactaactttttggttcctttattcttgacttccttgggaagacgaagtttttcttttcttattcgaacaattctgtcgagtatttgaattagttataatctttctttttttaattagttagaaatttccttaagcacgtatttatataacatgtcaacgcaacgaagttccccctcaaaattcagttttatgcgtgcgttattacgacatgatagatcctgacgaccaccacatgatgcattactagcaatggatgactcttccttatcattcattttatattcagagaaaatgtgcaagagaatttgcttggtaagtccattggtgacaaaaaatcgatttagtttgagtggaaatagagaatcataaacaataccaaaattgttagagatgtatgtagtgatacaaaaaacgatattaaaaatatatattgttctggttctattatttgttatcgtttttatgattggtaactattaataataatttttcaattatagtggtaagaagttatcaattaaagtcttgttcttttgggtctaactttggatccgattgttaacctataaaagaatacaaggaatgaaaagtaacatgactaaaaaagaacaaacaggaaaagaaaaaattataaaataagaatacaaaagaatgagtgtagaagaaaaatagaacaaatgttactgtaaatgataaccaaaacatagaacaaatagtaacaaaaattaaaaaataaataaattattttcttaattaaatagccacgttttcacgtttttttttctaattttctataaatttaatttttaattaataaatgtttaatttgtttttctgtttgttcctcatcaaatttgagaaggaacaattttcttctacgattcctcaaaaaataaggaatgattaggaatagtgtggggtctacatgttacaatttggaaaaaaaatactactgaatggtaaaaaaaaagaggaacatgttgttcctgtccattccttttctaaaaagtggtcaccaatcggaccctttattgtgatttactaaccttttcagcggtaaaatattatcgttacactttcacaaataatttgctagtaacgttaagtgttagtgacttatatgagattgttcaagtttattcgacaaatgaaatcctttcgatctttactttaatgtgtcaaatatcatgtccactttcaaataaagactcttagcttgaaggaaaactctacgaaaaactaacgcaatatgtcccatttatatggaagacgcgcgatgttaaaattagatactgaaagttggagtctaatacattagaaactaatgatcattcaagaaaaccatagattatcacagtgacaataggcacaagtcccactccggctattacaagcattgttagaaaaagtttaggtgggacaaaagatcacaccttgcatttagtcgttacacgaccatccatcaaatagaagagatcgaagatcagctggaagaaaagctagttttaaaaaaaattcttacttgatttgaacataatacgatatgattaatgtgtcttaaaaagcatagaaaaacacatcgaaggccataaacgtgagaacgattcaaatgacataatttttacaagaacaaagaccagcaaatccaacttaccaaaaaataaaaccaccaaatcctagaaggcaagaatgtgtggcaaaaaaagaaaaagaatgtataccatttggatgggaggtccaaaattttcttagaaattagtaacttaaacttttaaaactcatacacatatggattatatgttgaaaaaatcataattcagaaaaggatcatatataactactaatatatttttgaggtctttgtttttagttattttattttattttcttaaactcgaggtctttgttttaacaatttttctaatttcattatcttacaaaaaatctcaaattttaataatataaatatttgtcataggtacgggaagagcggtttgttttccagcgaaaaaaaaagaacggtttttctctatttgttgttgttgtttttttttaattattttcgcccctgattttttttaattaatgaatataatttttgcaatttttcgtgggaggctaaaagaaaggcgaggaggaagaagaaggaaccagcattatat

SEQ ID NO: 9659 - DNA, 3000 bp, Unknown
  misc_feature (1)..( 3000): cDNA_ID_3042864_gDNA_ID_1972165_Annot_ID_179753 3000 nt of promoter + ATG
gtaactttcactagcaattgtcattgattcccatcagtataacaatcaaccacagccctgtatctctgtaatctatagaaagtaaatcccatgactatacctttctcaaaagagagctcaagtcctgaggatgagactttgcaatatccccgatctgcttggctgcagttagccgagtagcttgtgttgaaccagctacaaagaaatgataattaaggagaacatgtaccttcttaagcgattatgatacgaagaaacgcaacaacaaaaacgaagcattattggtaacaaaggaaataatcaggaaaaataaaggatactgtccaacaaagtaaggagacgattgagtcgggaagattgttgctgtgccatgaaggacacaatgacaacaacgttgatgatgacgatgacaagagtgaacctcctcttagcttcacttccacatccaagctcatccaaatcacttagcgaaaactaataaccctacaacacagacacacacactctgcaggtaaatcaatgaccagaaaattatcgaaaagagaaatcgaaatcgcgcattcggatatagaaaatcaaaaagcttgggttaaagcttttttagtaattcgattgggtcgggataggcgtttctcatcttcatcctcgtgaatttctagggaaaatccgagaaagagaagaatactaaatttgataagagaaagagaaaattagggttttgttttaatacctggaaaaggctgcgaggttctcaagagcagagaatgctttgggtgcttcatatataatgctggttccttcttcttcctcctcgcctttcttttagcctcccacgaaaaattgcaaaaattatattcattaattaaaaaaaatcaggggcgaaaataattaaaaaaaaacaacaacaacaaatagagaaaaaccgttctttttttttcgctggaaaacaaaccgctcttcccgtacctatgacaaatatttatattattaaaatttgagattttttgtaagataatgaaattagaaaaattgttaaaacaaagacctcgagtttaagaaaataaaataaaataactaaaaacaaagacctcaaaaatatattagtagttatatatgatccttttctgaattatgattttttcaacatataatccatatgtgtatgagttttaaaagtttaagttactaatttctaagaaaattttggacctcccatccaaatggtatacattctttttctttttttgccacacattcttgccttctaggatttggtggttttattttttggtaagttggatttgctggtctttgttcttgtaaaaattatgtcatttgaatcgttctcacgtttatggccttcgatgtgtttttctatgctttttaagacacattaatcatatcgtattatgttcaaatcaagtaagaattttttttaaaactagcttttcttccagctgatcttcgatctcttctatttgatggatggtcgtgtaacgactaaatgcaaggtgtgatcttttgtcccacctaaactttttctaacaatgcttgtaatagccggagtgggacttgtgcctattgtcactgtgataatctatggttttcttgaatgatcattagtttctaatgtattagactccaactttcagtatctaattttaacatcgcgcgtcttccatataaatgggacatattgcgttagtttttcgtagagttttccttcaagctaagagtctttatttgaaagtggacatgatatttgacacattaaagtaaagatcgaaaggatttcatttgtcgaataaacttgaacaatctcatataagtcactaacacttaacgttactagcaaattatttgtgaaagtgtaacgataatattttaccgctgaaaaggttagtaaatcacaataaagggtccgattggtgaccactttttagaaaaggaatggacaggaacaacatgttcctctttttttttaccattcagtagtattttttttccaaattgtaacatgtagaccccacactattcctaatcattccttattttttgaggaatcgtagaagaaaattgttccttctcaaatttgatgaggaacaaacagaaaaacaaattaaacatttattaattaaaaattaaatttatagaaaattagaaaaaaaaacgtgaaaacgtggctatttaattaagaaaataatttatttattttttaatttttgttactatttgttctatgttttggttatcatttacagtaacatttgttctatttttcttctacactcattcttttgtattcttattttataattttttcttttcctgtttgttcttttttagtcatgttacttttcattccttgtattcttttataggttaacaatcggatccaaagttagacccaaaagaacaagactttaattgataacttcttaccactataattgaaaaattattattaatagttaccaatcataaaaacgataacaaataatagaaccagaacaatatatatttttaatatcgttttttgtatcactacatacatctctaacaattttggtattgtttatgattctctatttccactcaaactaaatcgattttttgtcaccaatggacttaccaagcaaattctcttgcacattttctctgaatataaaatgaatgataaggaagagtcatccattgctagtaatgcatcatgtggtggtcgtcaggatctatcatgtcgtaataacgcacgcataaaactgaattttgagggggaacttcgttgcgttgacatgttatataaatacgtgcttaaggaaatttctaactaattaaaaaaagaaagattataactaattcaaatactcgacagaattgttcgaataagaaaagaaaaacttcgtcttcccaaggaagtcaagaataaaggaaccaaaaagttagttgagcaaagagacaagagagaagcaaagagaaacacctgggttcctgaaatcgatg

SEQ ID NO: 9660 - DNA, 3000 bp, Unknown
  misc_feature (1)..( 3000): cDNA_ID_3042868_gDNA_ID_1972165_Annot_ID_179752 3000 nt of promoter + ATG
cttccatgttctaatgtctagctcgtgtttacagagggaaaagtacggtcttgttcaacaaaagtcttactgagttataaggtaaaccttgatttatgatccttttaagatttcaaacgattagattggttaaataatattggaaaaaaataactgaaaatgggttaaaattgaaaggaggaaaagcaaaggctgacgtggatgcacatccaccaatcatggttagatgaatcttcttcagatgatcaagaaaaatggattttctaaaggattatcttaatctcgactgacatactaaagatgacatctgtttgggacagaagctaaccaaagagcatagtgtttgttttgtgttatgtttgtttggggatggtgtgagtttgataaagcatgaaggatactaaaagctgaagaaggtgttgccatgtcttggtttcgtttcattaatacttttttacatatttgggttaacttaaaactattaataaggaaggttgggtcctgaatttggtctgttcatgaccttttgagggcagggagagttttgggtctctacaacaaaacctacatttctttagtcttacaaaacctaccattgtgtttgatttgcaattcttttttctggtttatatggattgttttctactatttctgtttgtttttgttgagaaactatttcgattttttaaaccatatacaaaacgctccaccaaactcacaaatcccgccttggatactgtaatctgtttttataaaaaaatgatatgatggagagaagaggagacgcaagtcacgggacatgatttcaagcataagtctaattactaattaccaccactttccgtaattaacgccctttttcactttatccactttttgttgcccatcttctttatattatttctttctccaagcccacactgctcagtttcctggtcaaatggctacctcagagactcgagtcttgttcttatctttgtgtctcatccttggcaaagtagttttgtctcagtttgatgagttatggctagtaggggacgatgatccactcaacgccttgcagacgaggcgtgaaagaagagaggagaggtgtgattactcggtggggaaatggacgttcgatgaaacgtatccgctctatgattcaagctgtccatatctgagttctgcactaagttgccaaagaaatggaagacccgactcttattaccagaaatggagatggatccctaaggcttgttcactaccaaggcacactccacactcctcttacttcttacattacttctttttaaaatttctgtctcatcaagtaaaaaagttggtttatattggctttgcatggttaattgcaagatgaataaattgactaatgaaaaatgggaaagagacattaatattaaccaaaatagtggctctttccatgatggtgtttaggtttgacgcattgaaatttcttgggaaaatgagaggaaaaagaataatgctggttggagattcaatgatgagaaaccagtgggaatctcttgtctgcttagtacagtctgttcttcccactcatcgtaagaagctcacttacaatggtcctacgatgtctttccattctctggtaattaataatcacaaatctccttttgaatcacatatacatcattggttagtagatgcaactattaaatttggttactatacaggattttgagacatcaattgagttttgttgggctcctctgcttgtggaactcaagagaggagttgaccgtaaaagggtgttacatttggactcaatcgaagacaatgctagatattggcgtggtgtagatgttcttgtattcgattccgctcactggtggactcactctcagagatggagttcgtaagtcatctgaataaacacttacatctttccttcaaaagcaaatgattagtgtataacggttcatagacgtctatgttcattgtatttgttattgtgtctcattttacatcagatttgggatttgtgacagtaacgcaagctattgatgttttaggtgggattattacatggatgggaataagatcttcaaagctatggacccaatggttgcttatgagagaggactaaccacatgggctaaatgggttgagataaatcttgatccatccaaaacaaaagtcattttccgcactgtctcaccgaggttttttcttatattctcctcttaatctcaacatatatacaaaatggacaccattaattcatgtacataaattcttggcagagagagtggtcagatgtgctacaaccagaaacatcccttgccttctttatcttcttccaccaaaccccacgtgcctcaacagtcaagagtgttgaacaaagtgctaaggacaatgaaataccgagtgtatttatacgatatcacaacaatgtctgcgtatagaagagacggtcatccttcggtgttcaagagagcaatgcacgaggaagagaagcaccatcgtatcgctggaccttcatcagattgcagtcattggtgcttgcccggtgtcccggatatttggaatgagatgctttcttcaattatcttaaccaatgctgtatgagctataataagagtctgtttttactcatgaacaatggtgttacttatatgaatcagtggtttatatattacatatcctttcccagctaacaaatatcccaatatcaaagacaagacaactcaaaggcctttaagcataaagttcatgcatcacaatgattttcgtgttttggttatttcttacctaactcaatttttttcctaaaacgttttaggttaagttttggtgttttcatcaaaatggcaataaccatttgattagagttttacagttagtgaagttctcaatttttgaataaaataatatttttaaaattgtaaaggcaatgagtcatcattattctgtcgtattctccgtcgctttcattttcaactactttgaagctgcagatctcttttggagattcacatg

SEQ ID NO: 9661 - DNA, 3000 bp, Unknown
  misc_feature (1)..( 3000): cDNA_ID_2184768_gDNA_ID_1972165_Annot_ID_179751 3000 nt of promoter + ATG
tactccatgtgccctgacactcatgttggtccttattagtatgacggtgttggatgggctccaaaggaatacaatactggtgagaaacaaaacactggagggcaggcccagggtgttggggaaattgaatcccagaaagggacttctgctccacagtctggctatgtgtgggatgaagcatctggttattactatgatgcggcttctggatactactacgatggaaattcaggtcggcatttacttatattgttatttatttctttgaattgattgtatggttgggtagctgcagctctaattcccatatctggcattgcaaaacatgtaatgggcaaaagtaagattgatcctgttggctggttgtatagtcctgctatagatgtattctattataggataacttcttggcaaaaataagtcgtcagctctggtttgttcaaactatcctgttcttttttatgattgtggaattcttatactatgtatgcaccaaactagcaaacatcgagatacaatcaatcaatcatacaagtgtatgtcttaattagacttttaaataatggctgtagggattcagcaagtgttatatgattactattatggctgctgttggacttccaatggaagttttttcttttagttattgctgagttatgccttcttatatatgtgtatgtgccttaaaatttcgcatctgatatggcacaatgatagactgttttaatgatcttggttatcactaggcacctcttcttggtgtgtggtgatgggaaacttggtttcactggtataagaagtgggtaatattctctattaatcgtatgtttctaaatatacaggtctctattatgacagcaatagtgggctttggtactcgtatgaccagcaaacacaacaatatgttccttgtcctgatcagaacaatgagagtaaagtaacagaaaaccaaccagactctgccaagaaggagaaatccagtcaacaaaaggttattatctcggcggctactacccctaatgtagaaaaagttctgtccttaccagatgcggttcaggcggctgctgcagcagcaattgcatcagagaagagagagaaagagagagtgaaagagataaaacttgcatcaaagactagcctactcgccagcaagaaaaaaatgagtaacgttttaacaatgtggaagcagcggagccatgaaacccaaatacaacgtccctcaccctcacttggtgacaatccacctacagtttcggctgaagcaaggtcgtctttctccactggacaatccatgggcaaactgaaatctgatgtaattattgcgaaggagagaagtacctccaatcatggagtttctgccctgacaactgcagaaagctcgagcagcagtacaacaggaggaactttgatgggggtgatgagaggttcttttggaggaactttgggtggagcttcttcttcagctagtgtacaaatgccgccaatattaccttctgcttctccagcttcggtttcagtttctgggagtgggagaagaaggttctctgaaacaccgactgcagggcctactcatagagaacagcctcagacatcataccgggaccgtgctgcagaaagaagaaacttgtatggctcatcaacatcaagtggaaatgatgttattgattcaagtaagagcccttgactctagacttttctaaaaatagaatcctgaaatgaggtttttattgttgttataattgggaaaatggttcgtttaaatgaaggtgaggatttaatggggttgaggaaaggttcatcggatccaacaccatttcctcctggtgtgggtggacgtgggattacaacaagcaccgaagtcagtagtttcgatgtgattacagaagagagagcaatagatgagagtaacgtgggaaacagaatgctgaggaacatgggttggcacgaaggatcggtaactttaaaaaccagaaatttgattgatgggtaacgtttatatgttaatggtgattgttggattgtggtcagggtttggggaaagacgggagcggaatgaaagaaccggtgcaagcgcaaggcgttgataggagagcaggacttgggagtcagcagaagaaagttgatgctgagtttgaggttcagcctggtgacacttacagaactcttctccataagaaagcacttgcgagatttcgtgacatgtctgacaataattgactctctctgtgtgtaaagtcagttggaaacttctaaattccgttgtgcttaaactgtgaaagtgattttgattttgttctttttgttaaattattattaatgaaaagagacagattagtactacttgagtttatatggaccttaaaacctttgtattattaatgtatctggaggcaacaacgacccgaagacaacaacagtatttaaaaaacttaccaaaataatatatgctttcaaagcttttaattacgaaagttagctcacaaaaaatatcagataaatacaactgtttttgaaaatttcagaattctattttgttaatgaataataattaattgttatttcatgctcatgcacattaataacctaaaaagtattgtttgcaggtgttcgagaagaatatatgcattgatgtatatcaatttctaggcattacttttttttcatcataattgttagtaaaggtgacatgtaaaactagttaatctcgtgtctgtcattggctcttcccaaaaacagattggttaatacgttagttggaaccattgttataatggctgggtttagttgctgccggctatttccggataaatgcctcaaaagatctttcagtgaatccaccgtgatttgcgttgtcataacgtgagatgcaaatgaagagcttttctctgttaatttagtttttacacaaccctataaatatagttttacacttaaaacccataccaattatttttgaaataagttggtattgcccaacttttttatcaaggttttttcaac

SEQ ID NO: 9662 - DNA, 3000 bp, Unknown
  misc_feature (1)..( 3000): cDNA_ID_3042840_gDNA_ID_1972165_Annot_ID_179742 3000 nt of promoter + ATG
aatcccttttttgttagcaatttcattatttactaggtgaaaaaaaagagattcaactatatttctctgctcattatctgtctatggctacgtatttgtgtttctcttctcattatctgactatggctacgtttatgtgtgatggtttcgggttttgtaacaattgagtgtcaatgcttaatgacttcgtgtgtattgtatttgtatctctggacacaatctatataacaactttagtctcttgtagccataatcatctagttcttgtgtatgttggtttatgatgtgtttcttttttaaatcaagctttgttctagttctctgcgcattgcatatactgagatatttttagctcgttgataaaacatataaactacaatgttactagagccgaaacaaacaacatcagtcaaatcatatcccatttaccaaattgtcaaatagactgtgtaaactgtaaagtaacaataacatacagcacaaatgagtcatagtagacctaacgtagctgatagctaatagctatagcatctctcttacaaactcaagtgaattaggcacgaagaaacgacacaacaaggagccaaagatgacaaaaatgtcaagctgttatatacagaaattgcatggataagaaagacactaaacaaaccagctctcatgtcaacaacaaaccggaagctcatttgtttctcttatcagatatggaagttcatgctgaggcaaaacaaactggaaacttgacctcgactttgcattcagacgaagctctttcgaacattaggagatccaacatgatctgcagctttttgtcatctccttttacctgaccatgaatttccaacagctcaagactcggcaatttctccaagatatgctttatttgcaccatctctccgatatctcccttgaactgggttatctttagaacctcaatatggcaggacgataagaaagaatacacctccaaacaatcgcaaacagtgttctcatccccatagtgattagtagtataatgcaaagcctagaaaagacaggaattttgagattgaagattttgactctttagtttgtccaatatacttttgggggtcttaggtcatacctgaatggtgagagtctttagatttggagatttctcaagcagaattggtagaacattccaacagaaatctacttcagtgctaagtgataaatgaaacaggttttcaaacactggtactgcttcttcgaagaaacaaaacacctgaaacagaattaaaaacaactaagtcagtcattacttgagcaaacattctaatcactagcaagattgatatgatcttagtatctcaatggttcctagatttaaatttcctcatgctctactagttgttaagctacagtaacatattaaagagaaacaatagcgatcacttacctgcatcgtgtcaacaacgcctaagctcagaatctgaacattttctaagcccttaatcagattcttaacatcgtaggtatcgccaaccataaaaagaggaagttctagcttagcttcaacaagggacttgagatcaacaactggatacccatctcggagaacatcaaagtattcgaagtattcaagactcggagtatcaaaactaattgactcataactagagccatcaagatcttcccagtcttcacgccgaatagtaagtttcttaaggatcttactagacacaatgcgagaccattcccaatcttcacggttgttcctatatatcactaaatcctctagcacagggcaagcagaaacaagccttgtaaacgcacaaccaccacttttatcaatgaaccgaactttatcaagaaagagagtcttaagagctggaagcaaagcgttcttagggatattgtcaataacaaaatcagaacctagtttcaatttcacaactttcttgcaagtgaagacctcaaatggcaatttgtaaacttcattgacattgatgtccaattcaagatccaaaacacctcgattcaacacattgcgtagacattcgttgacaagatggtacttagctgaatcaaattccaaagaacgtagtttcaaagagaatctccttatacggtaactgtcacgtcgagctagtaatcgagaaacgaaatctttgaagcttccattagtttcaaacgaaggattataaccaacattcgatatgatcgtaaccagattcggggattttttggaggctatgtttaggttccagagtttagaaacgatctcttgaactctcacgatctcactcatggtttcatgaattgtagtcgaaactcaaaagcgataaagaaacgcaattgacgaaatttgatgtacgagtttcacggtgaacagtgattttagcgtctatatcggaggaatcacatactacaccggaaaaatccagtataaacggcaaaatccgccggagttacagttacaagatcagagcaacgacactgctctcgtgaagaagaaagagtaaaaagcgctcgagaccctctcttttcctcattttagtcttcactttatcaactttatcttgtaaaaactaaacccaagagataagcccaaaattgagcccattatgacttgaaacttcagctaatgaacttgggcctaacactaatacagataaaacacagattatatgtacaattttcctttttcgagattgaaagaaaattgattataactaaatcatttttttctctaccatttcgtggaaacttgcattgcctgcatattggtttacaactatatactgactattttgtcttcgacaaaaaatatattaaaacaaaaaagtcttaaacgacgtcttaggaaggacttgcagtgaaactttacctcacgccaagttggacttggttaaactttttcataatatattaatagaaacaagactattcaagactcgagagagtttaaatagaaaacgaattagttgtgtattcaaaccaaggaaagaaaacgagagaggtacgtagaagaaaatg

SEQ ID NO: 9663 - DNA, 3000 bp, Unknown
  misc_feature (1)..( 3000): cDNA_ID_2184742_gDNA_ID_1972165_Annot_ID_179740 3000 nt of promoter + ATG
ttgtttcttatcttttggttaaaaatgtgaatcttttggttaaaactaattaagtttgttttttctcttgaagggtatgactcttttgacattatcagcttcagttcctggacttaaaccaggtaactgcaatgctgatacttgtcatccaaattctagtcagactgctgttttctttgtcgcgctttatatgattgctcttggaactggcggtataaagccgtgtgtttcgtcctttggagctgatcagtttgatgagaatgatgagaatgagaagatcaagaaaagttctttcttcaactggttttacttctccattaatgttggagctctcattgctgcaactgttctcgtctggatacaaatgaatgttggttggggatggggtttcggtgttccaacagtcgcgatggttatcgcggtttgctttttcttcttcggaagccgtttttacagacttcagagacctggagggagtccacttactaggatctttcaggttatagtagcggcttttcggaagataagtgttaaggttccagaggacaagtctctgctctttgaaactgcagatgatgagagtaacatcaaaggtagccggaaacttgtgcacacagataacttaaagtaagaaactaaagtttgaatctttatcctaacttcaaaaatactctgttttcaaatctaaagttttgaaaacatctcaggttttttgacaaggcagcggttgagagtcaatctgatagcatcaaagacggggaagtcaatccatggagactatgttctgttactcaagttgaagaacttaagtcaataatcacacttcttccagtttgggccacaggaatagtcttcgccacagtgtacagccaaatgagcacaatgtttgtgttacaaggaaacacaatggaccaacacatgggaaaaaactttgaaatcccatcagcttcactctcacttttcgacactgtcagtgtactcttctggactcctgtctatgaccagttcattatcccgctggcaagaaagttcacacgcaatgaacgaggcttcactcagcttcaacgtatgggtataggtcttgtggtctccatctttgccatgatcactgcaggagtcttggaggttgtcaggcttgattatgtcaaaactcacaatgcatatgaccaaaaacagatccatatgtcgatattctggcagataccgcagtatttacttatcggttgtgcagaagttttcacctttataggtcagcttgagtttttctatgatcaggctcctgatgccatgagaagtctctgctctgctttgtcgttgaccacggttgcgttggggaactatttgagcacagttcttgtgacggttgtgatgaagataacgaagaagaacggtaaaccgggttggataccggataacttgaaccgaggccatcttgattactttttctacttgttggcaactctcagtttcctcaacttcttagtgtacctctggatttcaaaacgctacaaatacaagaaagctgttggtcgagcacattgatcaagaaactggtgtggaagatatttggagttaacagtatttgtttgaaaagtgttttgcttgtaaatgttttttgtatgtggtctagttgttgttggtgtgttaggtttgttttggttttgcttatgtatttctgaatacttccagtcttccacttatatgtaaaaggctattggtaactattttatgagctttttgcttaaagctttttgaccgtctgataatatgtcctcctatattttgccattgctcttaagaaacttattatatacattggaagttataagcaataagctgggaaataaaatcaaaaactaaacaacagcatgggaaatcttaacaaaaagcaaagcacataggatcctattgtcaatacatatgtaaacttactactagacattaaacaaagagatcaagtattttcttctgtttctttgaagatgtctttacttttgactatatatctgaactgtttggaaaatgctcaagatcaggatgcataaggaagcccccttggcttcttggaggttgtctaacaagattgagacaagcaagcgtcaaaaacagattttgattctggggtttatttgttcagtaaaacccatggtttatatatatatagtcagaaacaagctttttattgagctcaactatatgcacatagaaaaagagaaagtttttttgtcattttacgaatgtggtggtgcgatgaagccaggtttggtcactaaatgagcggaagcggaaatagccagcaggactatctggaaatgaaaccaaacctaatcatttaacaaagtataatcaactctagccttgcaattatatggctaagaaggaaaaatttagaccataataagagtttagaacaaacaggtagaagtagtagatgtattaccttgatgaaagaatcagagggcgtaaaagcttatacagaatctcattctttaaatctgtcactaacttatctaaattcttaaactgttcacggacattgctgctagtgctctcagtagtataattcctaactctgtattagtgctctcagacgtggttattacgaaatgcaggcataaaccaacccgatcatacccatcacattatcagaagtcgccatcaaagagatcaccagaaatcttgggaagcaaggaacctaagttggtctgtcaattttgagataatgggcctatctcaaaacagtatcgggctcgtctgcaaaataagaaaaaggcctagaaagtcggttattacacgtggcatccttttattgtatatttacttttccgtcccttacattttcttatttaaataatctgttaacttgcttcttcttcttctttcttcatcttcatcttcatcttcgcttcacaatctctttgagacttttgcatcggagcaataataatatattcatcgcaaaatcagtgaattttgatattcaaatcttaatcggcgatg

SEQ ID NO: 9664 - DNA, 3000 bp, Unknown
  misc_feature (1)..( 3000): cDNA_ID_2184722_gDNA_ID_1972165_Annot_ID_179733 3000 nt of promoter + ATG
aaaaagataagcatttttggggttttacaacagtgaaaacaaagatagggaaaaactcagaaacgagggagacaaaagttgacacctttaacgctttttcacattgtccaagtgcttgacccatacctctctgttcttcctctctctcttcccccaccacagtcaccactttactcttctccatcaggggtccgatcccatctccaattttaaaccctagaaatcaatctcaaaagcaagcgtgcttcattaatggcgagcttcattctctccaggtcattactcgttctactcctgtctctcaccgcattactctccagcatctcgatttcggaagctacctcatcgttctcgttcacaagctccggtaaaaatgcgagctttgagtccgaagactttgccctgtacggcgacgctaagctcgtcgacggcggatcttcgattcagctgactgactcagtgagtcacggtggtgggcgagtcatctataagaaacccattgagtccatgaacaatataaaattcgagtatttcaccggattctctactttcttctctttctcgatttctcctagtcgtggtgggagactcggatttgtagtgtttcctgttaatgaaacgtttgatcactctttattccaagtaaagttcgatacttttgacagtttcacccaaattggagattctaatgtcgcggtgattgttgatggtgctacggtgtctgagaggattcgcaatttcacgatcgcaaacttggagaagacggagaaggttttgttgtacgcttggattaattaccaagctggtggcaagttcttagaagtccggttaagtaaatctaaaagctttgaatctgttcttcctctgatgtttgatcagattgatttgtcacaaatgttgagagatgaggatgagttcatggttgctgtgaattcgtatagtgggaatgtaaatcttcattcttggagtttagaagtgagacactccgagtatgagcactcttgggcgccggtgcttttggaggaacaacttagaaaagaggaacaacttagaaaagaggaggctgcgaagaagaggacaagtgataggatgtgggaggttgtcacttgcttcgtcatgacctttggatcaacagggcttgtgttctttgccatgatgcatatatatgcagctttcaaaaggaacaatcttgcgatggtgatgcaggaggaatgtgggatcaagaccaaggagtttgggtataagaagatggagaaaatggaagttgtgacgagtaatgctgatgcgaaacaagaaaggaagtgaagtcatgtttggtgatttttgtgtgtttaggatatgtgaactgttaatgtagtcaagtagattcttggtaactagttatccacgaggttcttcactggctaatgtaaccccttcttattttcatgtgtgtaagcttgcaaccttgttaccatttggcattttagtttgatttggcatgtaaaaatatgagaagaatgttgtagaatgcacaccaaacttgagtgcgagggatgacaaaaacaaattccaactcctacacaaaatagatttgtaactaatcacaatcatttgaagaacgcaatgtagtttatcttcatctacacaaaatcttcaaccggagataagcttcaagacgatgactgctgtgttaatgagcatgaggggtagcctcatgtactggcaggcatggatcagaccaatgatttggcctttgggagagtttcttctatcggtttggtggagttctccgagtgtccatcctcttggaacaaggaaacggtcttcgttgaggattgccagtgcatttgcaaagagcagcagaccttttaacaatgtccagaagcccattcttttctgtgatgcatagagctcaaaatgatcagaatcagggaaagagagtggaacaaagttatcttttaataggtttagaaacaaaatgaatggagactaagtgcatgcaaatgtaagctactgatgtgttctgtagatctaaagcgcagagaaccatgaagatagcagtgcaaaatcttgtttctaacacatcaaaaaagccaccagattgaacttattcctgccttgcaataatatctagaaatctaaacaatggcaggacggtcaccgagttagcattccaaagagccttaacctagacatattgtatatcaacacttctgaggatatgctaatcacataagcaacataagtatgcttcacgagaaaagcaacaagctcgatcaaccctaagagcactagatgagattttcttgtggatctgcttcaacaaaagtacacttagtcaatcacaacatcttgaatgaaaaaagaagaagagaggaatcctgagacttcccagtttcagcaatcaaaagattactaagtttcatcacaattcacaagtgaagaagacaatctatcaatgaacactttgtctaaaccaaaatgtgaaaatagatattagagcaaatgcataccgattaagctaagcttggtacagaaacagagaatacacaatcccaattttaagctatgcaataaattacgcaggaatcataaaccttgaaactgctgacctaaacatgagatcgagaaagtaaatgaagatccaaggttgctaatagaagaagcagccaaactaatcgatcaattcccacaaggaagcgaaaaacccaaatctagcaacaaccagtgaagaaaaaatcaaaatgaaggagctgaatcgagtgcaagattaccgtaagaaaacgctccggcgatgaagacggcctgagaacgagagaattgaatccgtcggtgaggtttaatttgtttcttctttagaaaattgaactgatttttcttcttcagcattaagtaaaaacccgaaccgggttaggattgacccggtttgaataaaagtcgggtcaggacccgatatgtttttttttgaagaggaagaagatttggataaaccctgacagtggtgtcaaaaacccatca

SEQ ID NO: 9665 - DNA, 3000 bp, Unknown
  misc_feature (1)..( 3000): cDNA_ID_2184734_gDNA_ID_1972165_Annot_ID_179737 3000 nt of promoter + ATG
aataaaaattctatcagttgttacctgttcgagggtcaaaaacatgattacgttccatgagccaaggcgtccaaagttggggatgaaacccttgtaaaatgccataggaccctgtagaggaaaccgtaaagagtttgtaacattttctgggttatatctagaacaatggaggtatcagaagcagagttgcttacgtcgctcttcagagttttgacgaagcagtcaatggtgcccttgtaagcaccagaatctcccatcattcttgacttaacctgccacacaacaagatttaagtagacaatcaggaaacgtggtgaataaactcaaggttcaatgtcatgagtaaatactttaccacgtcgacaggagagccgatgcagacagcaaagaatcctgctcccagtccagatagaatatgtgtgacaacgttgtcagtgaaacccggaatcttcaagatcgtctgaacacaaaaaaaaaaaggaatgttggttgcttcaaatatcaggatctcttatttagaaagagagacagagaacatattagtttcatacctctttcacttgatcgtaactcgctaattcagcagcattgataatagcgtttcttgctacgttaggtccaagaccagtccaaagagctcggactccttcctgtcagagccacattaataagatatgaagtagagttgaagcaacttatgcacaatctcaacttccaagtcgggataactacctgtctcacaattgttgaataagcattcagcgctccagaataccgtcttggcgcacctgcagctagttttccttcggcctgaagcctaactttcacaagatcagtgggatttgctaccatgatacccagtgcacctgagagttagacaacaaaaacagcccaactaagtgataaagaggaaatatatattacgtgttttttctaagctggtctatcgttatgctcacctgttgtcaaaccagcaagaattttcttgctcaatggaacatcacctacaaagtcttttccaacatacaagtttttcacctgagtagaataaattggttaaggctttaagtagtaactaggaaaacactgagtttaagcacttttctggagcatgaaagaagaagaatttgtaacccaccggctcatacattccaatcctaagacctccaaataggcattgacgatgcaatccaggtacaacacctttccatagtgaacgtaacccttcttcccttgctatggtaccaacagttcccaacaatcctcgatatttaggcagagtaacatcaccagcaagagcagacttttggagctgaagcctaactttagcagtgtccaatggaattgtgcatacctggtccagagagtttaattgcataagaacagaattatctgacgaaacaacacagccaaagagaagatacatgttgttctgaggataattaaacattatacagttgcgttgcatagcaatcacaatgatcaaatagattccattttcaagtctcataatcatttcaatgtttcgcaaaatcatatctaaagcataaatcaacaacactacacatgccaaaattcaatttctagccacagatctgaccgattattccgagatcaaatcatttctatcggaattacgtaatctggagaaacactatagaagctaaaatcaaaattctccagctatacgatgataaagacaaaaaagacaaagatcaacctgatcagaacttcacaaataccaacgaaattcgaaaatacatttccgcgtatagccaacaaagtctagatcgcgacacacatttctcgaacgaacaaatagttttccggtacaatcgaagcatactcagcgataagaaaaatggagttaaaagagatgaaaaattgaggaatccggcgattacctcgccgacgcaagcagcgaaggcactgcaggcgaaagttttgggcaaggaaaggtcggatttaccagccgccaccatcttcgatccagaaaacgcgaattaaagagaggaggttagggtttcgaaatcgaagaacagagaagagataatatcgggaagagggacgacgacgattacggctaaagcaacttggcctcgagtagtgtttcagttatagaaaagatcgtccctctctctctctctctgcgcgctacgaaatgagaaaggagtgggcgctttacttatttatacacacgtgtgtgacgacctgttttgttaaatagtatcatccatcgattatgttgctttcactgtctgaagaaaattcccagtcaaataaatgacacagcaccacgctggatcgaatttacttttactaactacctctctaaataatttcatttctttttaatctctaatccgatttttttaagttctaataattccattagtttaacatcgtgagaggtcgaagttttgtatatttggtacaaagttgattagctttgtagcagtggcaataaagtcagtgcgtcatcttctaggtctacttcacatcttcgtcacaatgcagagtgccctcgatgataaaaagtttaagtatcataaacttaatcatcataggttagtatctcttagctatttcaaaagaacacgttaatcactcttttgcctatatttgtttaatctaaacgatatgacaaattatatttatacactaacatccaaaaaactattcatataaaaagatgtgctacaaacgtgacaaactcttgaaaattatccattcacatcatacataaaaaatgtaaaacctaaacaaaaaaaatgattagaacagtcacataaatatataattagacacactggcgaatataaaaaattctgaaaacaaaaactcagcttcggcgaatttcacggtgacggtgactataccagaagatacatacatggtcaactacttcctccaaaacctaaaaatcaaccctctctcttctttctctatctctttccttttgtctaatcttcaattccctatttcaccggcgacgatatg

SEQ ID NO: 9666 - DNA, 3000 bp, Unknown
  misc_feature (1)..( 3000): cDNA_ID_3042876_gDNA_ID_1972165_Annot_ID_179738 3000 nt of promoter + ATG
tgcttcatttttagtaaatatcttgtggtatcaggtcaataagagtgccaagatatagagagaagacctcgggtcagtccagaaagattcatggtcaagcagaggaagaacaagagttgcattcataatcttggcaacagcgaccatgtcacatatctgcatattggtcaaaaccaacaaagaatagtacatcaaaacacttgactatggagaaaacggagatcaataccctctaatatccttttgaagtaaactcaccccagttctcatctgattcaatcctccatttgcgtgtactacaagatacccattggtttggcgttgcagtcctagacaaagacataaataccagattttgaaaaatcagaactgcaaacgagcttgaagaagaactaggaattttaagatagcaacatactcgtatagttcttagggcgcgtcacacattggcgataattcccgctttcaggtttctgccaaatttccggaatctgtgagaagagacaacaaaagcataaatccaaatgaccaagatcctcgaaaatgaagtcaaacagaagaaaaaactatcttccttacattgcaaaaacagaggaaatgataaaaaaaaaattagttaactatcaaaacatgtaagacctccgattacactgatcacagagaacttcgcgtactttaaatatgttacttaacgaatttaagtcaagttacaatttaactcaacaaaacaggttagacactaacacagattaaaccatatagtcaacggtaatgaactattaatcaaaccaatatcaacttggatccttatggaacttcaagattacatattgcagagctagaggattataaagagtttcaatttcaagtcttcacaaactagaacacaaaatgttatggattctgcataaaattagtaagtcaactaaaatggtaggaaggtattatccacacatcgaagccgcctataattccattgactatatattgctcgtcaaagtctcaatccaatagcaaaaaagtaaacctctcataaaaatcgccaccgagatattgattgttagaaaagctattataattgcacaatgataattcagttttgcaatcattaaagttgttgccagaattcatcttattacctaccccactaggccactacttcttcttcttcgtcccaaaaggagacactaatccaaacattgcaatctgtttacactaacttcgcaatcttaggatcatttctaatgaactgttcaacaaaaccctcaaacaattcagcaggaacaaacacataattaggattgatcccaagtagtatctaactaactaaaaaaaatgctgaatttgatcacaaagattgaatttttaaatccctaaatgtttaaagtaaagaagatgaacaaactcacgggaagcttttcgagaacacgcattggctgagaagaagcttggttctctgcaacttcacgttgagccattgaccaatcatcacgaagcgttctaacaacaacaaactccttcaaacgagcgtgatccaccacgcggacaccacccataaggtagactctaaggaacacagacgcaaccacaagcaacattagaagacccaagatccgacgacccacgtttctccccgatctaaacccttgaccaatcacaaccgtcgatgcaccaccataaaacggaatccagaattttcggaggagaaggtaacgaatcaccggatgactgtaaaatcggtggtagtgatcgtgatggtaatgagatccagtagatgaagcagagctttccgaagatggtgacgagtcttgaccagtcgcatctcctccgtctaaatctgttgatccaacgatgggttggttaattgtattgcagtaatcagatgaattcgagggtcgttcggagataacgtctagagaatcgccaacacggcggcgagtggtgggtgcaattggtacggggttaatcgctccgacgactgacatatcgtcgccggtgaaatagggaattgaagattagacaaaaggaaagagatagagaaagaagagagagggttgatttttaggttttggaggaagtagttgaccatgtatgtatcttctggtatagtcaccgtcaccgtgaaattcgccgaagctgagtttttgttttcagaattttttatattcgccagtgtgtctaattatatatttatgtgactgttctaatcattttttttgtttaggttttacattttttatgtatgatgtgaatggataattttcaagagtttgtcacgtttgtagcacatctttttatatgaatagttttttggatgttagtgtataaatataatttgtcatatcgtttagattaaacaaatataggcaaaagagtgattaacgtgttcttttgaaatagctaagagatactaacctatgatgattaagtttatgatacttaaactttttatcatcgagggcactctgcattgtgacgaagatgtgaagtagacctagaagatgacgcactgactttattgccactgctacaaagctaatcaactttgtaccaaatatacaaaacttcgacctctcacgatgttaaactaatggaattattagaacttaaaaaaatcggattagagattaaaaagaaatgaaattatttagagaggtagttagtaaaagtaaattcgatccagcgtggtgctgtgtcatttatttgactgggaattttcttcagacagtgaaagcaacataatcgatggatgatactatttaacaaaacaggtcgtcacacacgtgtgtataaataagtaaagcgcccactcctttctcatttcgtagcgcgcagagagagagagagagggacgatcttttctataactgaaacactactcgaggccaagttgctttagccgtaatcgtcgtcgtccctcttcccgatattatctcttctctgttcttcgatttcgaaaccctaacctcctctctttaattcgcgttttctggatcgaag

SEQ ID NO: 9667 - DNA, 2055 bp, Unknown
  misc_feature (1)..( 2055): cDNA_ID_2104915_gDNA_ID_1972165_Annot_ID_179729 3000 nt of promoter + ATG
gaattctccggcgacattagccgtctccaatatacatcttttcccggaagcggatattgagaacgagcacatatttgttggcagattctcgcaaacaatgttttcccctacaatttatagaagagaaagaaaaaaatacaataagaatcttaaaaatcaaagattcgtatgagaattaacgctttcttttttcctatggttgatcttatatctttcgtgtaattggtcaaactatgaaaatctagggttcttcctatgctgatctaaagactgatgaagattttcaatccaagacgttttgatgaatgtaaaatatgaatatgtttgtacgtacctatagccgcatggagaagacttgagagaatgagaaagattggcaatttgagggaagaaaaagacattgtttctgcgtttttcttttctctcttctcctctgtctccttttcttgatttgtaggggttaaagattttgaacctcgagatgttttcaaggaaaaatgtaatatagagagaacgtggaaataggacgcgtatatgttgaagggatgttgtggggtgtgtgtgtacatatatacaagaatgatttgttaaaaatatttgaaaaaagaatgatttgtatttactatttaatttttttgctttatgacattctctatctatggtgttactataatagtaagaattgtattttcttttgtcaacagtaaagattacattttgtatagtaattgcaaaaaaaaattcttgtgttctgtaatttttctattttaatgtctttgtaatctaattgatatttatatgcatattttgtggaaatcacaaaaaagtcatcaacttggacgtgggattccaaaaaattctcattttgttaataaaataaacctaattctagtgtgttcaaaggttgacaaaaatttgcatacgaaagatgatttatatattgtcgagttgctgctatggttaatcaacgattcaatgaactagagctttttaatccagattaaaatactttaaatgatattaacatgagtcattatgtattttcaaacttttttttatttacttttttttactattcagagcttattagtattttggtcacaggagacttttgctcagattctttgaaatcgtctacatgatactacttaattaatcttttaatgtttggtcaaacgtaatcaaaagttttagatatattgtaaaagatttagttggattatctttttcattatattattagacttttcgggtgagggtgttacttggaaacaaagcgacgtgcttacaatacatgtcttcacgtccgtatttgtctcaacgcgttactattattgtttttacacacgagctctatgacttgttgtacttcaaaattatacaaattggtatagtttcggttgaactagtaacttggaaactcaagaaattcatcctaaatacattatatctgacaagtctaattataaatcagtaataaataaaaaaagtcagattaacatctgccactagctggttatctaacttctaacgtaaacgaataactaatgttttgatgcagagcacatcagccagaataataaatttcctagtggtgtagtacatgcatttcatcgatcaaaagccaacattctttgacttttttctaggattgcattcatcaattctacaatgtacttgtttttaattctagagcaagaaacttatccaacacctacttgtaggaagctggtcaatttcttcggtttagtttggtttatactttatatggccaatttcctttgggtttgcttaaaacaaaaatttacatcaggcccaactctttattatctttgacctgccattaacaaaacaaaactggcctatgcttaatggcttaatgcttatctttttgtttaggtccgtaagagcaaagccacgtgtcataacacaagataagtggaacccacatgaatcgaatccttcgtccacctcacaatccgaatatccgatcctctctccctcctccaaaaccaaaccttccaaagtttttttcaaaacaacacagaaaaaatg

SEQ ID NO: 9668 - DNA, 3000 bp, Unknown
  misc_feature (1)..( 3000): cDNA_ID_3042953_gDNA_ID_1972168_Annot_ID_179773 3000 nt of promoter + ATG
caaagctatttttgcaaaaattgttatctagttaaggaaaagttgatagctttggaacagttctgttattgatcgagattcaacacttttgaagggtcgtatttagagggttgtaagatacatcttcttttggtgtttgcgtctatagggtattgttgaataaaggaattctcatgattcgttataaatttgcagaggttgtggaacatttcgtctgctaagttcctcaaaacatacactggccacgtgaacgcacagtattgcatttcctctgcgttctccgtcacaaatggaaagcgaatagtcagtggatccgaggacaactgtgtacacatgtgggagctaaactccaagaaactgctacagaaacttgagggtcatactgagaccgtcatgaacgtagcatgccacccgacagagaacttgatcgcatcaggctcgctcgacaagacagtaaggatttggacacagaagaaagaataaatcatcactctctctcttcagaaatcaaacatgtaggtacatgccaccttcttcatgcagtaatcatctgttgcttactaagcttgttagattgattctagcctcattatgtaaaagtctaatttttgtttggtgtaagggaagtgcaacagactgttctaaacttgtaatagttctctgtgtgactcagaactatttaggtaggtcttaaggcaaagactcctgcaagtgcaaaggcatttgagagaatgaacacaaatcttcataggtttaccctttactcattgtatctattaagctgatgcaatgcttcaccaatactattggttataaagtagtttcaggattgaaaattgttcatctgaaccatattgatgggtggctcatgggtcaaagtacagatatatgactataagtagataatgtatggtagttggttactttggttggccatgatgatgaagcttatggtcccctggtcctgtcccattttttacttttcattttcacttttatcgtaaagtcttcttttttttaaaccctacaagattttgaaatggaccacttgaaaatttgaacccactctctctttttttgttttcaatttcgaaaccaaaattttttaacaaaaagatgactttgtgacctttgttctgtcttttagctacacaccagtgggctgtttgcttttacagcgtgtctttctgtttacatgattcaagagaaagcaacagttcctaaagactcagtcatgtttgtgtctctcccaattgatacaaagaccaaaattcagctttggttcttttgtgtaaaagttctcgagatatgctaataagattaaacataaaaactctcaaaaagagtataaattgaattctttatgattgtagtagcaaacaataattgttaggtttagtgctatcataataatctattagtcaggttaaatatattcgatttggtaccaaatacgaaatcaagcttcaacaaacgaatctgcaatacacacacacccatccaaaagtatatcttcgacattttccccaaaaaagtatacatttcctaacacgtgcttaccaattcttatcattcgaagtaaaccattaaacaagaaatgttttcattattataaatttttcactaatataagtttattatttagtgcaagaaagtgcgttgcagatgaaaacttattctattgatccgggtccataaagaagaaaacaaaaattcacctaatacgagtacgacttattctagtggctacatatttccctaatcatgtgactaaaaatctgctttcaaaattttgacattcagtatttctttagatctatatcattaaaaattcatttttttcttttgcattttgattccatatttaatacaagattaaaaaaaaaaaaactaatatgtttgttcactgagcaaaccattattgttgatcagtgaactgtggtaactggcaaaagaagcaaatgattcgaaatcctactttcttacaaaatcaaattggataattttgtgagataataaaaaatcagtataaataaaataaaatacatgtcgggaaaccattattgttgatcagtgaactgtggtaactggcaaaagatgaaaatgatgcacataggactgtgtttaactgacttacttccactaatcaaaagtacgatcgtatccctacccatctctcgaggatcttaactgttgccgtgcgtcatctcaaggttgttctcgtcattatcagtcgatcagagtacagagaccggctctctgggttttgtcgatcatgccattgccttggggcttgttgttgtggtccgtcctaaggatagaaatgttattacaaagctttttaaggggttctttggttaattaagtgtttcgttttgcttaagagaggttaaagaagcgggtgtctcaataagttttggtaagtttgtgaatccccagtggtggactccatcttttcccgtcgaattataacatcaggaccgttcatttcaacatcatcaattaattcattatggggtttatctttaaaacatctttttgaatttatggttcgctttggtattgcattattacacttgtatacctgtgtaataaagtgttggattttgtcaagattaggtaacatcacgtttcaaaacaacaaggctccaaattaattaacattttcttcatgtaattatcgtttttgaatcccttcctttctaattccatgtttcattaaatccaccacatgcatatgtttctatatatgttaaataaacgacttttcaagtttttaatttgtgttttctattttcagaaaatttatgtgaaatcaaagtttcttaaaaatctccctccaagtaaattccaaaataaaataaaaataatacttttacaatatacaaataaaactcataaaaaacacacacacaatcttcatcttcctcacttactctcaccctttttaaaaccaaaccctaacttacacagaaagagaagaaaaaaaacaaaaaaaaa

SEQ ID NO: 9669 - DNA, 3000 bp, Unknown
  misc_feature (1)..( 3000): cDNA_ID_2036719_gDNA_ID_1972168_Annot_ID_179797 3000 nt of promoter + ATG
gtcttgtttgggacaagatgatttacgcatgtctgcattgtatacttacgtataatatcaatcgctgcaacatgtaatggagatcgagactactagctcttaatttatgagctaaatatataaagaaactgactctaatgacacttaatcatgtagattcttcgacttgatggggatgagtgggctctaaagacatgatgcactgagcagttcgtgattttggagaatgtgaggaaaggtaactataggaattgatcactaattcgatggtatatcggattggcaatgtaacactcataacttttgatggtagagagtttgtggatgtcaaatatcgttcaactatgagaaataacttgacttctatagttctatgagaatacagtgaaataatgccactttaggtaatgaggttttgttgtgtcaatttataatgatgatgactgcaactaatacaatagaaatactcttgtatcaacttaaaatcgttgcggaaaaggttcaatttgtgtctaaacatatatgagatcacattgttaattgtatagcagattcaaacatatgttttaaagaaaatgaatttactgatatagaagggactaataaaaggcaagaaaattcgtaggtcgattatggaagattaatgaaaaataacaaactaattcaacaataacatagttctaatcaaattgtttttttcttgctttgtcgttatgactttatgccattttattctaccatttttgtctacgctttcgtcattctcggtgttaccaatcgagcccatgacatcggtaaacatgaatacactataatgcattgcctacgcatatgtttatctttagtattttaggctttagctcatttattttaacgttaaagaagtgtgaaacaatcttttaataaatgcaaaagtagaagcacgaaggaataaaaaaggtatataccgcattcctacgcgtattctatatgtttgattttctagccattttagctttggactgtcacgtgagtcgtgacgctctaccccctaaatctatgtctatagtagtatgtacatatcagacacatgcatgaggcacctatatatttgtaaataaattatacactatatgacgtatggattcaatgataccaagagtttttgcttgtaacgcccaagattttcgaaacctacaatctaggatctaaatagtgtacctccagttataaattatatttgtcgctctagataagttagagtaatggccaaatctcgataacaatttatttgtgatctcctcacatgaatttctttggaaccaaattaatcccaaacgataggattcaataatcagttaaagttttgtagtattcgatagtgggttagagtaatgtagtgatgcaaacaagagtgctaatctattgggtctatacattggatcaaatttaatatatgggccgaactatcataccaagcgtcatgctttgaagaaagtagttgaaccaagccattatacccttttaactactaactaacccatctcaaatatccagatttaaattggtgtccatattatatgaaataagttaagactgatttgccaacaaggcaacaacaccttaataaatttaaacatctaactgaaagaaatgtatttaatcatccaactaggtacatttaagaatagatcacattcataattttgttattatcatttacaacagtcatcatggatttgtcttctctttgatcctgtcttagtgtcttgaaatctttgagcatttcttcttcttcgtctcttataatatatttaaaaggttatatatttacatatatacaactttgatttcgatactcttgagaatccaataatgaaagcgaaagtcatagagaaagagaactgcttcgtatggttggttaaggctccttttcgtctgttgatcatggcacgtgacgcctacatacgaagcattacgtcatgctccggcgccggaatttattccggtggtggatcatctggttttggtcaactctccggaaacttccaaatctgcgatccgcctagcaccgcccttcctcgaagctttaccttgacgtcggcggcacatgatcaaggctgtctgacacgtggcggacaacctacgattgcaatgagacaatcattgtccttggatcatcggaagaacaatagatgcgttgttgtgatgggaagaatagatgaggagatgtcttgtgatgatgatgatgagtttcaagaagaagactcttttcttgattatggtaattgcgagattcttacaaaagaaatagaaaaaccatctgttgaccaaaaacataagcctctaggacgattttgattttgatttttaggtttattattaggttgttgcattgtgcttattgagaaatatggatcaaacacttgaaaagaaaaatcattttgtatcatttaatattatttcttgtattacttataattgatgttaaaaaaaattacatacgattctaaaagtggtgatgcaaataattcacattgttttgttaacaaccaatgcagttctacatgattttaatatcatgagtaatttctaaaaacaaattacaacaaaaattaatttcttttaaccacaataacttcacaaaattacaaacataaaatacaaattcaaaaccacaagcacaaaaaataataatttagaaagtttatcaattactatttttgctgtaagaaaaaaagtttctcaattttatttttgtctgcaatatctttacagattccaaaacaaaacaaaaaaactatctttttatttatatatatatatatatatatatatatataaatgtaaacttcctcataagtaaattaacaagaatatatatcaaacaaaatcttgtaattttttaatataaataaagctaaacctttacgaagaagaaagactctggtgattgattctccaaagtctaaacctagtaaaagccaagtctcattcctcgggtgaactcaacaaccgacg

SEQ ID NO: 9670 - DNA, 3000 bp, Unknown
  misc_feature (1)..( 3000): cDNA_ID_2036698_gDNA_ID_1972168_Annot_ID_179801 3000 nt of promoter + ATG
aagaagaggctgcaaaatcatatggaaacaaacaattgaataccgaatcgaaacataaattagataccaaaaagaaccaatctttcatgaaattttacgattgttagaagttagaacctgttctacatgccttgaaaaaacgcatcttttcaactagattgatgttacaccgatagtttcttcataaaccacattaaagatgctatcattcttacacatagctaaaattggcaatctaaaaagaaaacaaggtcacaccaaatgcctaaagtttgctcttttaaaaactaaaagatacagaatctgcctttatttgtagaaccttgtcaaaactagcccacgataagaaactagaccacgattcaaatactattgagctgataacggtgatgtaatttggttgcaacacgatttcaattgaagaagaagaagaaatcttaaggaaggctctttacctacgaagccaattgagaaaagcttccaacaaacccattgatgatgatgattcacaaaagctccgacaaacagatccgcctgagagaattctcctccacggatctctctgagaagcttcttgtcctcgttgatctctgtcgatgatatctctctctctctctgtccagtgacggcgaattaaaagagtcaaagacaatgaatttggaccgttcgattttttatctggtataccaaatcaacggtacagatcttgtttaagtttttggttgatagaccgagaatcatggggttgctatttaaaataaatattttaaatttggattggccaatcagaggagagacacggtgacagatacaccagaagttcggaagaatgaatggatgaattactcaaccactcgcgtttatgaagcgcgtgactaacacgtatgtaccgtccgttgtttttttttggatgggtggtgccgccaaagattttggcggtgatatgatattggatagtgatcgggaagtgcacttacacgtgtcatttccaataatttatgggttgaaaacatatgtttgatgagttcttagtcatgggcctttatttgacccactagtgatgagtcgacccatcaatgattttctcctttttttattttcttgtagtatatgatgtttttgcttacactttgcatttcccatttaggacaaattaacattgaaatggacaaatggtattcaagtcatgtttatcttctacaagatacactatttgctttgtttaaattggggtaagttttttgattaatgaaaaaaaacattatgcttaatcggaataagtaaaacataattcaaaatagctttcacttgctcaaagatacaattatcaagagttggcttcattaaactgtaaacataaataaatgaacagcggagatacaaaaaaaaggtgaagaatgaattggtcaaccactaaagcagttataggtttaacacttttttattgcatgattaattatccaatagttgacaaaaaagaaaaaataattatccaattattgatttataaaaataaaaaaagttctacactagaacatattttaggaaccagagctgtaatttaatactagtttaatgtgtatgtttgatttatttgttaacaagaaatattagtaatattagattttatcccgcggtacaccgcggtaacaatttatctttttaaagttagtataattttttttttcaaattgtatctatctataatatatttttattttatagtttacaattgttattaaataacgtcctgccaaactcatcccgccaaacctgtcccgtaaaaaaaccatttatttatattaatgttgatcttatttatgatatgtttataaatcattgtctaaatatttttgtcgatgcgagatgttgaacctacacattttttgctaattggttaatatatgtttatttttaaaattttgaatcataaaatatgacagaaaaaattaagatttttttaaactctatatattatataatgatgttaaaaaattgtaatatatcaaactttttataagtttaaatattaataatgttttataaattttaaatatataaataataatatttaaaaaattaatatttttgcttataaggtaatgacataataactctaaaagcaaagatttagaagatttaaatttttaattaaatattttcattaataaataattaatctcagtgacatgacattgtaaataagttcaaatacaaaatttatttatttaaacaaaaaaggtttagtaagaataatatttatttaacaaaaaactttgttttaaaatattgttaacaaatatgtttatgctaattttaagggattgatttgaagtttggtgggattaaatttgattgataatgtgattgacaatttaaatcaaaaattttaaataaaattaattattttgaaaaaaagatttaatgctaatagcattaaattgtaaataaatctaaatttaaaatttatttgctaaaatgcctgcaaaaatgtatatataggtcaacaaaatataagtgttttcatcgaattacttttacttgtcgtctaattttctctcatttgttactattttaagccatttttaattgaaagaagtggtacatatatagcattaatgaatgctatactcaaggagaaagtatattaacgggacaatcattaaatttaccagaacgacaagatcccaataaaatgaaataaaaccaaaaaccaactcagatgagtaaacaaagtatcattcatcggtctcgtcttttggtcgcacgtctgaatccatcatcatcatcaaagacctctctttgttcccgtgacagatccttcttaaccaaacctcaccgacccttgtctttatttccccaattctactcctgggtttcgtaattacgttcccaggttcgagctttcttctccggagaatctgaaatcgaacaatttagtgtctttttctcagacattgtttacttctgagaaagcttaggtctttagactctcattac

SEQ ID NO: 9671 - DNA, 260 bp, Unknown
  misc_feature (1)..( 260): cDNA_ID_3042902_gDNA_ID_1972168_Annot_ID_179805 3000 nt of promoter + ATG
cttaatggactcctgacattccaagcgtaatgttcttttacaaagtaaaaaaaaaaaattaaaagaagaaatggcttcgcccgggttcgaaccggagaccttcagtgtgttagactgacgtgataaccaactacaccacgaaaccttttgttgttacacgtccgttaatcattgattttaactattattgacttggacaattttactgccgtcactatctctatttggtttcctctctctcaaattctccgatcaccatg

SEQ ID NO: 9672 - DNA, 3000 bp, Unknown
  misc_feature (1)..( 3000): cDNA_ID_2036690_gDNA_ID_1972168_Annot_ID_179803 3000 nt of promoter + ATG
gaaacaaaccttatgtgaaactagaatcaatcaaagactcaagttggaaaagaatcagagataggtcttctacacatgtacatcaaatgtgaaaactgttcagtcggataattgcatttgagatatgtttttttagttctatcttttttctcgaggaaacgactattttttaaggtaatgagaaagaatcagtttcatagaaatgaaatgatttgctgttaatcagagtggcaattcttttaaatccacagtaatgcttatgccaaacaaaaaattacaattgaaaaccaccaagttcgaactcaacctataccacaaacgtcttagacaacacaaaattgcagagataagtgtgaagagacgaaaggattggtctgataaattgatatgtcgtttaaagacacaaactcgtcattccaatatgttcaaaaatgaaaaccactgtcgaaaaatggaacccccactatcaaacgaaataacctaaaccaagaacactactctagagaatcatttcaactaagtcaccacataaatgaccaatatcatcaattctactgcaatagactgataaacgcaagactcctatgtcaaatcaggagttcaacaccaatctcaacacacatccaacacataatcaaaagctaaaccaaacaaacacatcattataaagaatgagacaaagagataaacttccataaccaaacttcaaatactcaaaatcaaaacataagttctcatgtctagcaccataaagatccactgacaacattccaaaatatccaaaacttgaaaattaaaaagcgattgaagataactctaaaagataaaacctttcaagaagatttcttcttccttcttacttaatcaacgttctgcataacatcctcagacgtaaacttagtacccttctccttatcagcagcagcacgtcccttagccttcctctccaaaagcgatttcctatctttatcaagacgaagcttcgttatcacaactttcgacggctgaatcccaacgttcacggttgttccattcaccttctccctcgtgattctctcgatgtgaatcacccatttgcgacggtaaacctgaacaactttgccttcacgtcccttgtaagtaccacgaacgatctgaacctcgtcgtctttacggatcggcatggatctgacattgtacttctgacgaagatcggtggagagaggagagctcattatcacacgcctctcgctggaggaagctgtgaaatgagccttcctgttctttctgcgagaagaggtcactcttgggttgtacttcatcttcgccgccgggattgagagagtctctactcttagggttttttaaggggatgaggaagaggttatgagtgtgtgtgaaggttatatagttaggttttgagtggagctaggtttactcgatatattagggctttgttatgaatgggctgggcctgttttagattttgattttaaagagttttataatgggcctcttctatgttagctacacttctggcctagtaaaagttaattcattcttggatgcaatcagtttagcgaaagaggtaaaaacaaaacgactacactgatatagttggtattctcatgttgtaataggctagctgtatcatgcaatttagagaagttttgtatcatgcaatttagaacttttatttttgagagaaacaaaagcataacgtttggatgatatattaatttaaatagagttgtgtttcaattcatatattctgcctttttagattcgattttcaaaaacacgatgcactagttgtaaaaacgttatttttatatatttaatttaacattatattcaaaaaattaatattaatttaacaaaaaaattatttttcaagcagctgtttacactttgtggagagaaagaaatgcaaggcttcacactactgtctccaaaccggctcggttacttgttaaggaaattcaagcttacaggtctataccgtcaccttttccagtacaaaattagtccatcttcaacctttcctagttcatctacaacctatcttgcttcatggtttcgctcctttcatcgatagcgaatcttttgcgtcattgatcttaatcttttgatatgtttcggtttcttgtcttgtttcatgatttctttgagctttttcattttgcaggtcaaattgtagttttcaaatgataccttggatttgagacatcaggaaaataaataaaataattagaaaattattattattattatatcagtatgtttttatacaatatattagacattcataactataatgtgatatacatcccggagaaaatctcaggtcgaaactcttacattttagaacccattgccaatgtttgaacaaggacttccaaagactcttggatatatatattttcaagcaaaataatgatgttgtacataataataatcagaggggctaacaaattatgaaagaaataagtatcatatgaagtggactttgtattaaactggccgatcaaaactaattttcttgtggtggttggtgcaaacaaattgatataaacaaataaacaatccatgttttttacgacaacgacaagtatgtcaattagtaaagaaaaataaccgatcaaacttgcactagtactatatatacacaacaatttaagctcaatttaaacctaaatgaaatctcgtgaaatttgaatgttagaacgaatgtacattttggagaacatgtgggacgtggtccctctatatgaactagaaggtttatggtgaagaaaaaggaaaaacgcatttaaagactttcacgcatataataacgatcacaacaaatcctcttaaattcatttatttcccatattactcacatttattgcccattcactgtccaaaatttccttctcttcttgatactaaaacctaaccggcgaattcgaatcttctcaaaactcacacaaattattctcattctttgatctcttctctctcggaaaaaaagacatg

SEQ ID NO: 9673 - DNA, 3000 bp, Unknown
  misc_feature (1)..( 3000): cDNA_ID_3042908_gDNA_ID_1972168_Annot_ID_179800 3000 nt of promoter + ATG
acatggttaaatgaatcatgaaaacacatcccacaactgtagatactaaaccaaacggtgaacaacgcaaaaacgttgctttcttgttgtgtttgttcttcatcaccctcatctttgtttccaaagatttatctccacaatacacaacctatgtagatccatccacacaaaaaaaaaaaaaaaagaagtatacaagtgtaagtgtctaaagttaaatacaagtgttctataactaattactcttttgggagatgaaattttgaccttataacagatttggcttacacataagagggtcaaattgtcaattttagcaagttgattagcacaaatttcgataccagatccaaataagcacaagctaaaccctaaagacagctaatttccagcggaagatgaacacaaaagttcaataaacacagaaaactaggagacagaaaaacctcgggatcttacctgaaaaagaagccggagctgaaacttccgacatgtaatgagagtctaaagacctaagctttctcagaagtaaacaatgtctgagaaaaagacactaaattgttcgatttcagattctccggagaagaaagctcgaacctgggaacgtaattacgaaacccaggagtagaattggggaaataaagacaagggtcggtgaggtttggttaagaaggatctgtcacgggaacaaagagaggtctttgatgatgatgatggattcagacgtgcgaccaaaagacgagaccgatgaatgatactttgtttactcatctgagttggtttttggttttatttcattttattgggatcttgtcgttctggtaaatttaatgattgtcccgttaatatactttctccttgagtatagcattcattaatgctatatatgtaccacttctttcaattaaaaatggcttaaaatagtaacaaatgagagaaaattagacgacaagtaaaagtaattcgatgaaaacacttatattttgttgacctatatatacatttttgcaggcattttagcaaataaattttaaatttagatttatttacaatttaatgctattagcattaaatctttttttcaaaataattaattttatttaaaatttttgatttaaattgtcaatcacattatcaatcaaatttaatcccaccaaacttcaaatcaatcccttaaaattagcataaacatatttgttaacaatattttaaaacaaagttttttgttaaataaatattattcttactaaaccttttttgtttaaataaataaattttgtatttgaacttatttacaatgtcatgtcactgagattaattatttattaatgaaaatatttaattaaaaatttaaatcttctaaatctttgcttttagagttattatgtcattaccttataagcaaaaatattaattttttaaatattattatttatatatttaaaatttataaaacattattaatatttaaacttataaaaagtttgatatattacaattttttaacatcattatataatatatagagtttaaaaaaatcttaattttttctgtcatattttatgattcaaaattttaaaaataaacatatattaaccaattagcaaaaaatgtgtaggttcaacatctcgcatcgacaaaaatatttagacaatgatttataaacatatcataaataagatcaacattaatataaataaatggtttttttacgggacaggtttggcgggatgagtttggcaggacgttatttaataacaattgtaaactataaaataaaaatatattatagatagatacaatttgaaaaaaaaaattatactaactttaaaaagataaattgttaccgcggtgtaccgcgggataaaatctaatattactaatatttcttgttaacaaataaatcaaacatacacattaaactagtattaaattacagctctggttcctaaaatatgttctagtgtagaactttttttatttttataaatcaataattggataattattttttcttttttgtcaactattggataattaatcatgcaataaaaaagtgttaaacctataactgctttagtggttgaccaattcattcttcaccttttttttgtatctccgctgttcatttatttatgtttacagtttaatgaagccaactcttgataattgtatctttgagcaagtgaaagctattttgaattatgttttacttattccgattaagcataatgttttttttcattaatcaaaaaacttaccccaatttaaacaaagcaaatagtgtatcttgtagaagataaacatgacttgaataccatttgtccatttcaatgttaatttgtcctaaatgggaaatgcaaagtgtaagcaaaaacatcatatactacaagaaaataaaaaaaggagaaaatcattgatgggtcgactcatcactagtgggtcaaataaaggcccatgactaagaactcatcaaacatatgttttcaacccataaattattggaaatgacacgtgtaagtgcacttcccgatcactatccaatatcatatcaccgccaaaatctttggcggcaccacccatccaaaaaaaaacaacggacggtacatacgtgttagtcacgcgcttcataaacgcgagtggttgagtaattcatccattcattcttccgaacttctggtgtatctgtcaccgtgtctctcctctgattggccaatccaaatttaaaatatttattttaaatagcaaccccatgattctcggtctatcaaccaaaaacttaaacaagatctgtaccgttgatttggtataccagataaaaaatcgaacggtccaaattcattgtctttgactcttttaattcgccgtcactggacagagagagagagagatatcatcgacagagatcaacgaggacaagaagcttctcagagagatccgtggaggagaattctctcaggcggatctgtttgtcggagcttttgtgaatcatcatcatcaatg

SEQ ID NO: 9674 - DNA, 3000 bp, Unknown
  misc_feature (1)..( 3000): cDNA_ID_2036748_gDNA_ID_1972168_Annot_ID_179789 3000 nt of promoter + ATG
tttattatattcgcaagtgttataacatgaaaaaaaaaatttagatgtaatggcaatggtctagccaaaatagtaaaaacaaaattaaaaaacttctgtatttaaatactgttttaaaaataaaaaattagatgtaatggcaatggtctagaataaaaccgtattaaaaaactagtttggagtaaagaaaatacggttttattctctgacaaaacatatattctctttattgttattgaatccactctaatttttttggttagaatttaaattgaaaagtatggaccaaaactcatacttcttttttcacaacataaattctaaccaaaatattttttctatatgagtatggacctaaatttctttctttttgctgtatctttacattccaaggttcgctaatgtgttagcagatttttaggctaaaaatgtcttattgtttgtaatgctacctcctataatgaagttcaattctttcagtaagggaagtaataataaaagatgaactgaaaaaaaagcactcaagaaagtccaaattgttttggatttggtcataaatctcatggtgacatttatgaattatctataaaaattctatatcaataaaagttgacaaaagaaattatatatatgtatcaatcaattttcgatttgagataagcataattttattcatttttcatgtggttttaattgttctcacgtatatgtttgaccattgaaatcaatcagttattactgtttggcgcgaccttaactagttagtcatcgaaatcaatctagaagactaaaacggaaatgagataattattaacgtcaagaactttctattcttactaaattcaacgtaccatatctagaataatggattttatcttcactaatctacaattaaatatttgttttttgttaaatgacataaagataggccggagcttctacttctagcatattaaactagccacgacatggagttatataaaatttgaaaattaagtaagaaaatatcaagttgctcaaaaaaaaaaaaggggtaagaaaatatcaaaagagctattaagaatttggtaagaaaaaatcttaggtatctgaaaacatggcaagaaaaaaggaaaaggagaattattcatgtccgaagaagaatatatgtttatgttgttggataaaaagaaagatgatcacgaatattttggagttgggatcttgaccgaagaatgttgggttacttaataaatcagcaattaaaaatgcttcttctttaaactttcggtttctgaagatgagtacttcattatctatatgtattaagataacgataacgcttatcaacattcaagggtttatctatcattttccagacctaccaaaaaagacctttcataataatttcataaagccaatgaaaacaagattaatttttaaaaaaaaacaattgagtgatcgaatctcgtagacaaaaaattattttacttattttttgaaatttatttacatgacattaggttaaatggttaaagaggaaagttttgtttcagtttcaccatgacatgtcagaaatttataatttatgtttccacataatcagcaaatgatttaaattcactatccataactcttttttaaaagtaactcttatattaatcgtacgaacttcgaagcaggctggatacacgattaccgactcagttaactgtctcttatgcatatgatcatgtaatctcttatgcatatatgtaaaaagcttacgacacgtgtgacgtattttacaaatgtgaatggaattaaatattcatcatgtgtttgaaaagtgtaagaagactttactaacctcttttccctattcttttgaccagatttttgcataatatatatgccttattatcccatgcgtgttttatgagttttttttttctttttctgaaagattgtccagagtattttatttattccttttcatttattttgtgatcttattatgttagccatttttgttgattgtcacccaaaaaaagaagctaatatatggtcgtaactcgtaatgcatatgttcgtttattcatttatttttcgatagatcggtggtaccttactactctagattgtggaaataaacaaaataagcaattcaactatgacgtgggatgaggttttctatcttcgacgacattctagaataccttacaaaactacaccattcaactgtttttgataaaatatttggtttagtttcacaggtatactttccattcatatgcacgtgaagaggatcattaggtgaaccttttccgctcttgcatatatgcccaccaccaaaccaagtttatttaaccctcgacgaaatgtttttttctttaatcattacacacacatttatattattgagatatatgacttgactatgattttttcacattatattatatatctttggttggctataaatctactcatattacatgcaaaacatggcgcacaaataaaactttcttcgcactaaaacatacgataagcataaatgttcgaatagcccactcattgtttaatttgaaacattttcgaaattaaatcaaaatgtgtatcgtcttgttctcatccaacggtcaccttttttccgtggtcacatgatattttgcttttttgagcaatcattcacacacagcaacaacatcaaataatttagtagggccgtaaaattataatctaacacggcatgaataaagagcatcttcttatataattattactaactaacataaaactataattcaataattaaaatttgagcgatatatatgactcgttttatgacgccataaaggtagttaactttaccctttataagtttctatggttcacatttggcagcatctcgctatttgtcaactcgtgtatcactataaattcacctaactggcttcatctgctattcatcctcacatcttataattctctatctctcttctcaggctcccattatctttctctattttgcaaatcagt

SEQ ID NO: 9675 - DNA, 3000 bp, Unknown
  misc_feature (1)..( 3000): cDNA_ID_2036791_gDNA_ID_1972168_Annot_ID_179776 3000 nt of promoter + ATG
aagcttctgttccatgcccgtgctgcgcataacctttgatcatacaattgaaagataccgcattaagttccggcattctatcaaatacccaccttgcgtcttgcaggtttccgcttttgtaatacaacgaaatcaacgcgttgttcacagagattctattcgaagggatgtgagatttgatcgccaagccatgaatctgcttgcactgagaaggagaggagagattcgagcaagcgcttgtgacacagacaaaactgcaatcatcaggtctatgtccaatacgttgcatctgtctaaaactcttcacagcttcttcagagagttcctcgttcattgaatatccagaaatcatcgtattccaaacaaccaaatccggcgatagaatctcttgaaataccttctcactatcatacataccatcacaacccccgcattttgagtaaaaatcaatcaaaccacttcccacatgtgagttctggtgaaatccagccttgatcagcttaccgtggaactgacggccaccgatcaaatgatccaagctagtgagagcatttaaaacacttgccaatgtaaacatatcaatcttgaatcctttaaagatcatttctttatacaaagctaatgcctttgctccttccttgtgctgcccataagccacaatcatcgaattccacgaaacttcatctcttaattcatccatcccataaaacaccgataccgcctctctcaaaagcccgcctttactataatacgtaacaaacgcgttattcacagacgagtacgaatcaaaccctcccgagacagagaaacagtgaagctgctttatcaaatcaacacggtcacaacaagctgctatcaaccctgataacgtaaacccatcaacctcaaatcccaattttctcattctcttaaacagaaccattgcggcaaaagtttctctagcatcagcgtaccccgagataagagtattgtaagagacagtgtctggttggggaatttcgtcgaacaactggcgtgcaatatggattttcgaatctttcgcgtaagctttgacaattacattgtaagagaagacattgggttcttccgtggagtagaacgcggctcgtgcgtaggaaaggcgaccacatttggagtagagattcacgaagtgatttgagagataagtggacgaagctacaatggatttcacgtagagcgcgtgaagtgatttcccagtgaagagatctctctccgctacagatttcagtagaaggtctcgaaaagttttgaacttccatggcgtctgattcatctaatagtgacaagtgaacctcagagattgtatgtttctcgcatttgcaagttctgttttcagaagaagactggtaaacaaagtcataagttttcgtttcgtctcttatttttcgttaattgacttgggcttagaatctgttcaaggcccatttattatgggctcgtttattttttaatttttttgggcaagcacgtgatgatatatacagtgggatgttatttgtgtgcgaattaaatagagtttttgtgatttaaatgttatatagaatctgttgttattcagttaaaattttttaaaagtttattaaaatctagtgtattagtttaaaatttgtaaaatgcgatctaaaattttcatgcagttatttgattcatacttttagaaagtcaataaaatttttgtgttattcaattaaaataaaagaatttatgattattaatgaattaaattattatgttattagtttataacttttgatattttcctttacaaaataaagtcatcaaaaatatcattaaaatagaaagattatttggaaaactttataagattgtggaaaactaatcaacaagattatagaaaactctctagatctaacaataatttagaatctttctattctttattttgtatgcttttattaaaatcgtcaaaaaaaaattgtaaattagaaacaataacatctttaaatcaaaagattcataaccagaaattgtgaataatacacttttttttttaatttggaccttgtgtctgattaaccctagtggcatgatcatgaaattatcgagttcggatctaaatgtccaaatccgaaatggatcttaaaattttttctaagcttagtcttactggcttcggagatattcaaattcccaaaactcccaatcaaaatttactatttattttcaatttggcggccactttttcttcagatttaatatctctaatgtccactagttttgtattataagcataaccgcagtaataatcataaacatctcagataactcccgaaacacaattggtgaaatccccaacacaatatcatgacattcgatctaaaaatagattttgtattgttttggtcgctaattcattgtcatgtatgtatgggcggtgaccgaaaacgcgttttatggacaaaactaattttgttttgtttaactatgtgtcaagctttctcttttctctattctacttcacctatccaattatcattattatcgttttctttatatctctcatgtgtttgtgtaataatatatatagtgagggttaaacaatattattctacttcctctaaaattttataacgttttagtctacttctgtttttaattaacccaatttcacacatacttcaaaatttgaaataattgttgagtctttttcaatttaactttatatagagataggaagagagattttctttagatttgtagtataagattagcaaaatatatactaactgacgataaatgattactaataaattactagctacgtgacgtcaagtaaaaaacggaagtatatatatatatagctcccacaagcaaccacattccacatctcactcttcagtcttcaccaactaactaaaacctaattcaacatatctctctcatttaccgttctcccattcttcattagtcatctttcaataaaccaaacattctttttgatttttatatcaaaaaatg

SEQ ID NO: 9676 - DNA, 3000 bp, Unknown
  misc_feature (1)..( 3000): cDNA_ID_2036781_gDNA_ID_1972168_Annot_ID_179779 3000 nt of promoter + ATG
aaccagtaatcatagcattccaaatcgcaacatcatctctctcaggcattttatcaaacacctcaaaggcatactctatatcaccaagcttaaaacttgcactcagaagcgtcgtccatgaataaacatcaggttcatcaatctcgtcgaacttcttcttcaacgaagctaagttccctaatctctcatatagcgaaagaagcgtattggaaacgtgagagtgacacaataaaccagagcgaatcgcatagcaatgaacctgaccaccaaagatagtatcacggaggtgcctagctgtagtaatagctaacgagacactgtactggtctggtctcagagttgtgcaacggtgaacatcggcgaagagcttgagagcgtttctgttctcgccggaacgagtgagacccgttagtctccggtttaaattgagcaacgtggtagagttttctgctatggctgataaactctctgttaaacatagagcttttctcatcagtcatctatagctctgtgagtgaagaaagttgtctcttttaggtttagggctttagttttctgctatatttgcaaaacagagaaaaggagaagactttataagacgaaaacgccgtcgttttagagtgtgaagtgagagatgcgtagattctctaccattgttgatcttctcatcagcaaaaaaccatcttctcaagcaaattctagaattgatctcatttgtaaaaggttccatatttcaagagttctcaataacgatttcgtagaatcaacagagagaaagaatggggttggtttagtttgtccagagaagcatgaagatgaattcgccggtgaagtcgagaagatttacagaattttgcggaatcaccattctagagttccaaaattggagcttgctcttaacgaatcaggtattgatctgcgacccgggttgatcatacgagtgttgagtcgttgtggcgatgctgggaatctaggttatagattctttctgtgggcaacgaagcaacctggttattttcatagctatgaagtgtgtaaatcaatggtgatgattcttagtaaaatgcgacaatttggagctgtttggggtttaattgaagagatgaggaagacgaatccggagttgattgagccggagttgttcgttgtattgatgcggaggtttgcttctgctaacatggtgaagaaagcagttgaggtgctcgacgaaatgcctaagtatgggttagagcctgacgagtatgtttttggttgtttgttagatgctttgtgtaagaacggtagtgttaaggaggcttcaaaggtttttgaggatatgagagagaagtttcctccgaatttgcggtattttacttcgttgttgtatggttggtgtagggaagggaagttgatggaagctaaagaagttttggttcagatgaaggaagctgggcttgagcctgacattgtggttttcactaacttacttagtggatatgctcatgctgggaaaatggcggatgcgtatgatcttatgaatgatatgagaaagagagggtttgagccgaatgtgaattgttacacggttttgatccaggcgttgtgtaggacggagaagagaatggatgaggcgatgcgggtttttgttgagatggagaggtatggatgtgaggctgatattgtgacttataccgcgttgataagtgggttttgtaaatggggaatgattgataaaggttatagtgttttagatgatatgagaaagaaaggagtcatgccgtcgcaagtaacatatatgcagataatggtggctcatgagaagaaagaacaatttgaagagtgtttggagttgattgagaagatgaagcgaagaggttgtcatcctgatcttctcatttacaatgtagtgataagattggcttgtaagttaggggaagtgaaagaagctgttcggttatggaacgaaatggaagctaatgggctaagccctggagttgatacgtttgttattatgatcaacggatttacaagccaaggtttcctaatcgaagcctgtaatcacttcaaagaaatggtaagccgaggaatattctctgcgcctcaatatggaacgctgaagtcattgcttaataaccttgttagagatgataagctcgaaatggcgaaagatgtatggagttgcatatccaacaaaacctcttcctgtgagctgaatgtatcagcttggacaatatggatccatgctttgtacgcaaaaggtcacgtgaaggaagcgtgttcgtattgtcttgatatgatggagatggatttgatgccgcaacctaatacttatgcgaaacttatgaaaggattgaataaactgtataataggacgatcgctgcagagattacagagaaggtggtgaagatggcaagtgagagagagatgagttttaagatgtataagaagaaaggtgaggaggatttgattgagaaagctaaacctaaagggaataaagaaggaaagaagaaagggacagatcatcaaaggtataagggaagaggtgaaagaagtagggctaaagcattgtaacatttccaaaagaagcatgtttagatttgtagctgaattaaacagtgtttcatgtttttgctttgtttcatcacattagttcggcaccgttgttaggaatttatactcaaccgaattaaaccgagattattactgaatcactgccaattttgtgtaaccgaatgagtaaaccgaaacatatccggtttaattcgattatagtctcaaaaccgacaaataaaccgatccaaggctaaatataaatggaatcgagtcttcacacaaacaaagtcactgctccggtgacgaacgagaagctttgttccggtgacgatcatatttgatatttgtggatgagcgtaacaacaagttttggaatttggctgaatcacataaaccttgataatcaagcaagtttcttgtataacaacccccatttttgtaatcgtcgtttcaatcgtatctcaatg

SEQ ID NO: 9677 - DNA, 3000 bp, Unknown
  misc_feature (1)..( 3000): cDNA_ID_2036752_gDNA_ID_1972168_Annot_ID_179788 3000 nt of promoter + ATG
acgagttacgaccatatattagcttctttttttgggtgacaatcaacaaaaatggctaacataataagatcacaaaataaatgaaaaggaataaataaaatactctggacaatctttcagaaaaagaaaaaaaaaactcataaaacacgcatgggataataaggcatatatattatgcaaaaatctggtcaaaagaatagggaaaagaggttagtaaagtcttcttacacttttcaaacacatgatgaatatttaattccattcacatttgtaaaatacgtcacacgtgtcgtaagctttttacatatatgcataagagattacatgatcatatgcataagagacagttaactgagtcggtaatcgtgtatccagcctgcttcgaagttcgtacgattaatataagagttacttttaaaaaagagttatggatagtgaatttaaatcatttgctgattatgtggaaacataaattataaatttctgacatgtcatggtgaaactgaaacaaaactttcctctttaaccatttaacctaatgtcatgtaaataaatttcaaaaaataagtaaaataattttttgtctacgagattcgatcactcaattgtttttttttaaaaattaatcttgttttcattggctttatgaaattattatgaaaggtcttttttggtaggtctggaaaatgatagataaacccttgaatgttgataagcgttatcgttatcttaatacatatagataatgaagtactcatcttcagaaaccgaaagtttaaagaagaagcatttttaattgctgatttattaagtaacccaacattcttcggtcaagatcccaactccaaaatattcgtgatcatctttctttttatccaacaacataaacatatattcttcttcggacatgaataattctccttttccttttttcttgccatgttttcagatacctaagattttttcttaccaaattcttaatagctcttttgatattttcttaccccttttttttttttgagcaacttgatattttcttacttaattttcaaattttatataactccatgtcgtggctagtttaatatgctagaagtagaagctccggcctatctttatgtcatttaacaaaaaacaaatatttaattgtagattagtgaagataaaatccattattctagatatggtacgttgaatttagtaagaatagaaagttcttgacgttaataattatctcatttccgttttagtcttctagattgatttcgatgactaactagttaaggtcgcgccaaacagtaataactgattgatttcaatggtcaaacatatacgtgagaacaattaaaaccacatgaaaaatgaataaaattatgcttatctcaaatcgaaaattgattgatacatatatataatttcttttgtcaacttttattgatatagaatttttatagataattcataaatgtcaccatgagatttatgaccaaatccaaaacaatttggactttcttgagtgcttttttttcagttcatcttttattattacttcccttactgaaagaattgaacttcattataggaggtagcattacaaacaataagacatttttagcctaaaaatctgctaacacattagcgaaccttggaatgtaaagatacagcaaaaagaaagaaatttaggtccatactcatatagaaaaaatattttggttagaatttatgttgtgaaaaaagaagtatgagttttggtccatacttttcaatttaaattctaaccaaaaaaattagagtggattcaataacaataaagagaatatatgttttgtcagagaataaaaccgtattttctttactccaaactagttttttaatacggttttattctagaccattgccattacatctaattttttatttttaaaacagtatttaaatacagaagttttttaattttgtttttactattttggctagaccattgccattacatctaaattttttttttcatgttataacacttgcgaatataataaatttggaaccatatggccattctgaaaattccggtttgcatgtgaacactcgaattataatatggtacaagtagtaagacgttcacattttaatgatgactaagtttcttcaaaaaaaaaaaaaaaaaagtgtttattcaaaaaaaaataaaaaaataagaggtgtttatttttgtgaaccgtcagcattaaccgaataaaaaccgaaatttttgtggtcaaaccaacaggttaataatccggttactgttattggtaaactttattttcaaatgtcgaacatatgggcttaaagcccactactagtataaagaatagtccaacccgatccaagctaattcgacccgtttgtttctgatcccaccattgttaacttaacgaacccttttttgttcatgcatgcaaatgcaatcatgctcttcttctattttcttcgatacaattttctcgtctacagacgtttgtttctctctgtaaggcgatgaatcgcgaaaaattatacggagctgacaacgacgatgatgacgatataggtgaaggcctcgaagatttaagactccgagaccaattccggttcagttggagtaatgtcgtcagattcggagagtgaagacaaagacgaagaagattctctgcatttgaaacccttcacgctattcgtagacgataaatatctgcttatcaaaatctcggtgagctcattggttaagttaccgttcgatatttgtttaattgtttctcaagaacctgggatcaacaacaaaaaaaaacctgggctcaacaaaaaaatcttcaatgagggtattttcgtaatttactgtcacggaaatccctagtgccctaaaaagaagctgtccatttgtctattgtctctgatcttatcctgtcttttctcgtacttcaatctctctttctctatctcgatcctgtcgtgttcgtacttgatacctgaagtccgctaatg

SEQ ID NO: 9678 - DNA, 3000 bp, Unknown
  misc_feature (1)..( 3000): cDNA_ID_3042949_gDNA_ID_1972168_Annot_ID_179774 3000 nt of promoter + ATG
ccagaggctagacttcacttgtgacgatgtcttggactctctcaaggaagacaacatcatcggtaaaggcggtgctgggattgtctacaaaggcactatgcctaaaggcgacctagtcgcggtcaaacgattggctacaatgtcccatggatcttcccacgatcacgggttcaacgccgagattcagacgctaggtagaatcagacacagacacatcgtgagactgctcggtttttgctccaaccacgaaacgaatctccttgtgtacgagtacatgcctaatggtagccttggagaggttcttcatggaaagaaaggaggtcatttacattggaacacacgttataagatagctcttgaagcagccaagggtctttgctatctccaccatgattgttccccgttgatcgtccatagagatgttaaatccaacaacatcctcctcgattccaacttcgaagctcatgtcgccgactttggtctcgccaagttcctccaagattccggtacttctgaatgtatgtccgcaattgccggctcctacggctacatagctccaggtaacaaatttgcagaaaatggcatttaatcaaacacttggtggtgaaatgtaaaatctctgaacttgtttgttccttgttgagcagagtacgcgtatacattgaaggtagatgagaagagcgatgtgtatagtttcggtgttgttcttctagaactcatcaccgggaaaaaacccgtcggagaatttggcgacggcgttgatattgttcaatgggtgagaagcatgacggattcaaataaagattgtgtgctcaaagtaatcgatcttagactctcttcagttccagttcacgaggtaacacacgtcttctacgttgcgttgctctgcgttgaagaacaagcggtggagaggccgacgatgcgtgaagtcgttcagattctcactgagatcccaaaaattcctctttcgaagcagcaagcggcggaatcagacgtgactgagaaagctccggcgattaatgaatcgtcgccggattcaggaagtccaccggatcttttaagtaattagactttccggcgattgggtttggtcattgaggggcaaatttgtctttctaattttcttgtcaccgacgtctcggtagtggagttaattacttaattagcccgttgttgtctggttccggttaaggcaacaattagtggtttaactcttaaggttgttgcatttcttttttcactgctgccacaattattcgtgtaggaattttgaatatgtacattgcggttgaattttgcatgataagtggttaatttcaggaaatcgaatttcgagaacattatggcttatgcatatcagcatatatatacatgcagttatgtatatgatcaatctgcccccggttcaagtatgtcaattgtgttagaccaaaaaacacttttgccccttatattcttaagaacttcatttagtttcatactcaagcaaaaactaattttttagagttttcgttgtcttaaaatgaaactagtgtctccattatgctggaatcttgcttatgagttgttacattacatattttattctcacctttgcttttacccttttggattgtatctggttgtggtagctgttgtgtcacaacaagacattccatgtgaaaaaaacacagagagggtgaaaccaaggtatgaatgtgtttgtgtgggactgaagatgagtaacgctgagaagagagaaagtgaaagctcactcacaatttgtccaattattgcaaatgtatgggtagtgtgacactagtgtcttaatgaattcagatggtcctaagatcttttttccactctattcccttgtcttgaagcaaaaatctaattttagacgaagcatttatgacatctccctctcattaattacaagccatatattcaactttgattttgactcatcaatatcaaaaaatctttagactttaggtgttgttgctatccttggtatctagtactttcttcgataaccatgactattatattgagataagaaagatataaagaacaataagaatattagttatgatattttagatgtattatgttcaaaatttcttacgttcgaatgtacattgatgatcttgtaaacctaattaaggagtgcctaactctagaattaataagtcaggagttagttatcaagaaactagaaagacttgaagatggattaaagtggtaattaatgtttttcagaggccaagattctaattaagagatgggaaatggcatgttccattctctagcttcatatatacacttatcgggtgaaactaccagattacgaatagccattagatgactaacaattgaattcaatttaaatcatccaaagatatattttatatattgagattctttcttcatctcaaacttctaagttctaacatagtcatgtagttgaactttcgggccgaggcccataacaactccatctacttaaacgaaggttagataaagggacgaacaaaaagaatcagtctggtgtcagaaactagagtatgtacttttgtgtttgaattgtaacgtttgtttctttcttcagctcttcattggtttatcgacacagtacttatgtcactccaattgtgagaaaatcattctgcacagtcgtttcgaaatcaaggaaatcaaacaagagcaacaacaatccaaagagtaccaaaatatatttggctatagagagctatcattgtcttgtacacttgtccatgttgggctatagatccatatttgtgttgggctaggctcagtttttcttaataacacaaacttacttatcaaacacgtgttgtctttttggttatttaagtagttgacaaacaaaagtacaaataagctgttagggcaaaggagcaaaaacgaaaccacagagagaaagcctccgtctcccttatcaaagaagaagaagacgtgtataacaaaacactagacacattgtgaagatagaaaaaa

SEQ ID NO: 9679 - DNA, 3000 bp, Unknown
  misc_feature (1)..( 3000): cDNA_ID_3042984_gDNA_ID_1972170_Annot_ID_179837 3000 nt of promoter + ATG
actcagcagacggtgaccaattctgggaacatagtggggaacttgacagaagtgatcgaaattgatacaccgattcaggcggttcgtaaagtggactacctaagcctgttggaacttatctcacaacttgggacgaagcacttcttgggtagttcaaatcaaattgaggggaacgagtggagggcacgttttgtacggaacttttggtccactctctccctgaaggattacaagaagtacagtgtccatttcttggaaggtgatgcgcataactagtggcttacagtaaataaattcaaaggtgagcgtatcaaaaccttcaacggctttgaggacgagttcaacaggaagttcttcccatccgaggcatggaacctgttgagagttacttcttggatcttgtccagggttgccgtacggtctgcaaatccgaagaggaattcaacaaaccaagacgttatgtgggaagagaactcgaggacaaagtagcgcaagtttgttgatttctccgaggccatagggtagacttaaggacccattgctcggtcagtaccttcaacattgtctaagaactggttgaaatggcgacattgatcgaggcaaacctcgataaggagtataggatccgcccaaagacgggtgataatccaaagaatgaaaagacaagataattctaccaactcgacgataaaagcgaatgctgggatggaaagggggcatgtgagaggtgtggaagtatgagtcacagtacccaacattgctcggggacaggataaatgcagacaagagtgataccagatcaccaaaagttgtgctaccgctgtagtcagacggggcattacataagggaatgcccgcagctacaagcggaggggtcagttggtgaaaagggaaatcgggtagggagtgagccatccggacaggccaaaagagttgccatggcaccccgcgtgtaacacccccgaaccatcctaaaactaagaacaatttcggaagaaccacgtatggttggcaaccgccagcacacaaatccgactaaagatcacccaaggccaggcccgaccatagaagaccgctcctcgcgaccacgagacttaaaggctttgcaacccataccgcgaccgcgagttgggattagtccggactagactactgagaggatacacaagatctttaagaaaaaccaatttcttattcatatagaatgtattaaaatacattaccaaatacaagtataggattttggtacaaaagccaaaacttaattcagtcgtacataaaatacaaaaataccatctaccaaggcaacacaaaactaaaccatgcttaaactaaggtttacaacaaaggttacctgcaaaagagagtgggggatgagcgctactcgcccagtaactcctagctccctctaacaggcaataattccctaacccaaaacccaaaataacaagtagtatgcggaagtataacaatattgaaagcataatctcaagaaatcaataaaataaacaatcaagctggttaccatgagtacgtcaactaaatggaaccacatgcaacacgcaatcaagaataactagaaacttaccttgattcggctgaacggtttagactcgatctaatcctaatctaaaataagccttcgatcgcctaaataatctacttggtagagcctcgacattagagctcctcgggatgaactagtcgtacctgaagaagaactagtcaacactcgctcatggactttttagagagattttggcgtttcggtgtgaatgaagaagaataaggcagaatgactatttataggggtggtaggacggtttgggaagcaccaggtggcgagataggctcaaccgagcttatttgtaactttatccaaaacctgcagacagacttgaattattatccatacacggataaacttggacgatcttatttgtatggaacggatagacatgaatgaacttatccacaagttgatccttatctgcttccatacttatccaaaatttcatacttatccacactcgttcttatttgtacctcatccttatccactcacgtccctatccatacttcatctttatccactttcgtccctatccattattgttcctatccataaccatacttatccaaaatctcatctctatttgatttcaccatacttatccaaaatctcatcttcatcattataggccactcgttcttcttacctgcttacacaaaagcaacactctcggctatacactaggcccgatcagttacaagcccatatcatcaagcataatctacatgatccattccctcaacacatcaacacattaatctcagtcagtctagtccatgttcctcttgactcacccatccggttccccgaccacttgctcacaagtatccccaaaactgcgagatcgttggtcggacgaaacaatactcgtcccgtaaggacttctttcgaatgctccgattgtatggcctgctaaatctttaacgaaaattcctcggcctagtcctagtcttggtctgaggcattacactgcgtgtatgagttaacaaaggaaactggcggggccggtaacttcaatttgatcactggtaagtcaataagccatcctagtaaaatataaacaatgcatatcatgtttgggggtagggtactcaacattgagacgatgtatggggaccctacatatttgactatggggctacgcagagttttgtgagaaaagggaagttccataaggaaccaaaaatgtatcctaccgcagtgaatgttgcgggcaggcaggctatgacttaatcatcatactgctgattggttaggcaagtttaaaccaaagttggactgtcactgtagtgacccgcataagggcaccgagaacgggcaaaagaccatatgagagaaagttgccctaaaaacacggctgattgatcattcatgcccaaaagataataaaccatcaacggggaaaggaaatatctatttgggcaaag

SEQ ID NO: 9680 - DNA, 3000 bp, Unknown
  misc_feature (1)..( 3000): cDNA_ID_2185103_gDNA_ID_1972170_Annot_ID_179840 3000 nt of promoter + ATG
cgaaagaacgaaatcacaaggtaaggtcagatacatcccacatgaccgtagtatgcttatggagttaacttggatactcccaagttccacacactacgaccttccaatcgacaatatgaaacgtgcggttcgttttcaacgcgcatgaacatagagtcctcttactaagtctactgaatactagcgagtagtgtcttgacaacgcaaccatccctctcgaatgaatggtgctaagctaacacaaccactcctataggatatggtgcttcggtctcaactgtcctagctattcgaataaacaacctcaataataacaaccacaaagcaaagaaaagagagaatagagaacatgcaagaagaaacgaaaatcaaacatgcaaaacaaaaaccggaactcacaatcaccgatgaaccttcctaacttgaccgatggtttctactcggaaactctctcagactatgctgaggctcggcgatctctaactctctcttgggttaaaagactcggacgaactctctctcacgggttaaaagactcggacgaactctctctctcacgggttaaaaggctcggacaaactctctttctctcttggtttgggcagagctttggtgcgaaggcttctaagggttaactaagcgagggttgggttctatttatagagtgaggacttgtgtaagggaagggagataaaacttggtcaccaagttggctctaggacgaaacttgctcaccaagttggctcgcccaggtggattcggctctaagttggctcggatggcttgggacgaaacttggtcaccaagttggcttcgcccaaatggatttggcttcaagtttcaagacttgggctctactctggcttctgcgggttataaatactcggcccctcttctcattctcgcaccattctctcttctttttctcttgcccttctttcttgcccgggatcaatgcgcggggtactacattgacagccgctccaattctagcagtgcgggagccaaataaaccatatgctctttataccgacaactcaagtgttggcttgggatgtgtccttatgcaagaaggaaaggtgattgcctatgcatcacggcaattaagacgacatgaggagaactatcctactcacgatttagagatggctgctgtagtattcccattgaagacacggagatcatacctatacgggaaaacaatacacatgtttacgaacaaccaaagtcttaagtacttattcacgcagccagatttgaatctacggcaacggagatggatggaattcatcaccaattatgatatgaagatttagtatcatccggggaaggctaatgtggtggcaaacgccttaagttgccgaaaaacggaagtagatgttgagaaagatctagagtcactaaccgatgagttcaagaaagtaagtatgttaactttaaaaggtgaatctagtaagcccttgggtttgcaagctgtgactcaagcaagcctacttcaccgaattcgagaggaacatgtgcaagatgaaaagttgcaagaaatcgtggagaaattaaagacattaaatggtccgaatgctagtggttatcatctagctgatgacgccactttactactcaatgggaggattacattgcatgcccgtaaaggattacggtaagaaattttgagggcagcacatacttctttattaagcattcatcaaggaagtacaaaaatgtacaaggacataaggaggtattatcattagcctggaatgaagagatcagtggcaaagtgggtaatccaatgtgattcatgccaaagtgtgaaggtggaacatcaagtgcaagtaggtttactacgcaaactaccaattcaagcatggtgataggagtcaatctcgaatgcgggaacagaagaatataaggattctacaaattcatgtattttggggaaagcaaaatcgtagggttactacatgggaagatgaagagacgttccatgcaaagtatccacagttttctgaacagaaaatgaagaagatgaagccggaccatccaatccttttggaattcaagatgaattctattaaagggggagaatgtagtgacccgcataagggcatcgggaacatgcaaaagactgaatgagagaaagttaccccgaaaacatggctgattgaccatacgtacccaaaaggtgataaacactcaatgggtaaaagaaataactatatgggcaatgatgggcaacacgggtgtgtcacgggcaaagtttgccccatcggatatggtttctgagtgttccggatatggtttggttgcatgatcatacacttttacattcattgattgatttcgtgaatcatataactgatgatttatgacatgaaggatggatattggttgcatatgtgatcttttagattcttatgctacagttatggatgggaggttgttttgagatattaatgattttatttgttagattaaccatatgtttcataaagtcttgaattcttgggtctttgtacgtggtgcttgtggtaggaggcaaagaccataagcataccaagatcgtgatatgtctgacgtttgtagggaaccgtgctatgatggggtcttgtaacgctattaattgatcgccatgtaatgcgaaggacttgaagagatggggctagctatcctggccgagtgtctacacgacggtgtagcgttttggtagagatgatccagttacatgactaggaaacccatgaggaacacgtaagggcagtgttaacgagtctgtgggagcagaagctcttcgccaagataagcaaatgcagcttttggcaaagaagcatatggttcctagggcatatagtgtacaaggaaggcgtctcaatagatccataaaagataaggactattagagaatcgccgaccccaaaaaatgcgaccaaagtaaggagtttcctagggttgacatactattacaagaattttgtgaatggattcgcaacaatagcccaagcc

SEQ ID NO: 9681 - DNA, 3000 bp, Unknown
  misc_feature (1)..( 3000): cDNA_ID_3042980_gDNA_ID_1972170_Annot_ID_179843 3000 nt of promoter + ATG
taccataaccaccaattcagccctctcacgacaataacctttattaccataatcataaattaagccctctcacaacaataacctctattcccactactcccataaccataaattaagccctctaacgataataacctttattaccattaccataaccataaattaacccttaattagcaccactttgccataaccataaattaacccttaattagcaccactttgccataaccataaattaacccttaattagcaccactttgcccagccttgttcttattctcattcttcttctcatccttcttcttcctctattgctctttgaatattgtgtcaatctctgcatctcattttcttagcctccctctagcctcccaatcatgcccttagcgtccttaatcctctacaaatcacggaggctctttttcttcttgctctcccaatccttcaccatctttttgagttcagctataacatcgtagtcttttggttgagattttctcaagtcggccacaatctcaccttccacctcttgacaaatcatgaaatactccggtatctaactctattgattattcataagcagcttcaacctacggctctcgggtttggatgtaaagatcacactttcatcaacaagtgtgaacgagtcatcaaagacaacgacctcaggttgctcaaagacattctcctcttccttcaattgcttcacccacacactcactccaaacatgccaagatgattccggttattaattaaacttatttgggtgatattctctcgtccactatcgaatctcctgctggatcccaaaataaaaaccttcagtgcattggtctttgatgccattgttgttttgaataaaaaagaaataaatgtgtgaagattgagttgaaagcaagagaaaagtataatgtgaaggcagtgtgagaacccttccgctgtttatagccactaaggcctccattcgtaatcttcgtcaaagttatgatgtaagaagatcttcaagagttttaatgtaaactttcctcttttgagttctgatgaagaatatgcatggaacctttttacagagagttgaacggacttgttttggtgttttcctttctttttttttagtctcataccttaagattcaagatttttaatgtatgaaaagatttattaggtgagatttgtttctggtaatagaagattttattagatcatttatgatgtgcttttggaaaacacgttgtagagaaaatatacaataaacacttgttcaaattggatttgtacaaattgtcatattatgacccatgcctttacaacgcgagaacagttctgttgcgtccttctagtcttaggtttctatatttattatgtccaaaccacattatacattagggtttaacaatcaaatagaatggactactttagctaaatttttatctaacattttattcccatgttgatagaattctggctacctctgccaattgcttcatggtatactgattcttggtaactcaaaacccatgagtgtggcttgaaacaattatcaactaaagtcttgcaggaaatgttaaaactattcacagccaccaatgcatgattacaagggaaccttagtttatcatacctctgtcaagtgcactgcttattttcaagatcaacaacatatcttccacctaacatgtcaagtatctcatagctccagctgatgatccgttcaaccttgcttacattagttgttaagatgattttgtgatttgcttgtcaacttccggaggaacagtacctttatgttcttgagattgctatttagattttgaacagtttttcttttgtaatgtcatgagtagatgtaatgaatctagtaattatgatgtattggatggtagttttaatttaattaatttgtcttaaattagatgaaagagtaagtgatttatattgtctatgttcaacaaatactatagcttaataatttaatatgattacaatttatacatctgagtacgactaatagaagtatcttaataaaatagggaattataaggatgtctcaaaatatgaacaagtagatgcaaattgaatatgtatatttatatccacatttagctgaccattcgaacatatccaaccatttgtgtttttgaaattattttggaaaatgtgttcgttattcatgttgcaaaatcgaaagagtctctatcagtcatgcaaacaaagatatgttgacaaaaaatacttatagtgagagaaagatgttcgctaatttatatgttaaatacaacttcataattacatctacttaacatttttgaagtacaaaataaggaatttattgggtcgggttttgttttgggttttacccactttttttgaccggatctttggcccaaatcatgttaattggcccatcaacctccaagatttcgtctccttcaaatcctctcacacctacattcactcacacaatgaatcacggaaaatcaatctcttaatcaaggcacaaatctattacattcagttttcctaatctatcaaagaatctttactaatcaagttgttgatattataacttccatgaatcttacctatcatttacctataattgctaatcgaatcaagctcattatattctgactatttatctttcaaaccatttatattcactgtcctatgataacgcttatttgaaatgcagttaccaaaacaatcaaatccatatctactctgtttggaagttacattcaagatatgacagtatctacttaacatattcaatcgccttcaatataaagatattgatcaagccgcatatccagcttcatttatttgcagagaatattcactgattgattctaaaaagattacgcctactctataatctaaaaccctatacaatctcacaacactataaatatactctatattgcataccatttctacacattgcagaatatcaagatatcgttccatttttgagaatcactttgcttacctttcaa

SEQ ID NO: 9682 - DNA, 3000 bp, Unknown
  misc_feature (1)..( 3000): cDNA_ID_2185107_gDNA_ID_1972170_Annot_ID_179841 3000 nt of promoter + ATG
gccttggaagtagatatgaaaccgttagggttaagtgtggcagacaaggccgacttactaacgcgaatctgtataggtcaagggaaggatgagaacttgaagaaggtaccaccgaatgagaaaactgagtacgaaacatcgaaaaacgggacaatcgtggtcaatggataagtaagagtactagacgacaaagaactcaaggaagatattcttcgagaagctcaccaattcaaattctcaattcacctagggatgaacaagatgcaccggaacatcaagaggtactaccaatacaaaggcatgaaaagagatatagcggaatggatatcctagtgcccgacctgaaagtcggtaaaagccgaacaacaagtctgagtggcttgttacaaacgatgtcaatgcccaaatggaaatgggaccacattacaatggactttgtaactgggctgcccactacacgggcaaagaaggacgcaatatgggtgaaagtcaatagactaaccaagtcagcccatctcattgcaatcaagaaaatggatggagtgaaagctatagccgatgagtacattgatgagattgtaagatttcacggtgtaccggtgagcatagtacccgttggagactcacgattcacttcccatttttggaaggcattccaaaaagctttgggaacaagaatcaacatgagtaggacctatcaccagcaaacggacaagcagtcggaaaagactatacggacgttggaggaatgtctacaacaacagtttccaagtgagtatagggatgtctccatatgaagctttatacggctgaccatgccgcacaccaatgtgttggacacaagtaggagagcaaagcatgattggggcggacttataaatacaacccattcggcaaagcttgtggacacaacactatacaccaaaactttcaccaaaacttaagagagaaattggaagagaaacactattctttcgaagggtacaagcgacggaaagagatagtggatgccttggagatcaaacctttggtaactcccggatcgatgaatccggcggaggccgagaaaacaactggtctaatgaccatggtgaggcataactgtaccaacgtgagattgaacgatctatgaggggctagggaatttggttaacgcatcctacttatgatattttgttctaacgatatgtgatatgtctgggggtgaaacatggggagcatcatagcatgtgcatgatcgcttagtgtaaaccacaacaatcttatctttcgttgatatcaggatatgaccaagttcgtgggaaggatttggcttagcgggagggatggctttccgggcaagtgggaggtgtcatcatcgcttccaagtgtagttataatgaagttccaaagaagaaagatgacagacaaagacagtggttgtctcagaacaagtcaatgacataattccaaggaggattccagagaagctacccgacccacgacgctttgtacttgattgctcaatctcacctgacaggtttcctagttctctttgtgatcttggctcttgtatcaatttgatgactcattctattgttgtaagacttggaatgacatatttcaaggctactaggattactcttctcctaggtgatcgctcaaagagaatccctgaaggtatcttagaagatgttctactgaaaattgcaaaatgcttgattccaaccgacttcgtggtttttgaatatgaagaagaacctccagattcccttattatgggaagatcattcttagctactgctggtgctcagatagacgtgaagcacaaccaaattgctttgcatatgtgtgatgttattatgactttttacatggacaagatgaggaaaccacctatgattgatggtcaggcattctctgtagagacctctagagacacaattgttgatcctgaccagctactaagtacaagcaagcgtccacatgaatcaagctccaaaatatttttatttattcatcaatatattaaatttgagctcacataaaagaagatacatgtcaccttgtatatagagataactttaatttattatatactagataacaccggcttaaataggggggtgtaagaaataaatgctaattttaatctctgatatttgagttctaaatcgtagttaacacattctattatgtgaattttaacaaaaggaaaaatttcttttacgataggtgtatcatgacgtacaaacatcagatttatcaatttgcttgatataaccaattacatgtgtatgacaaaacaaaattaatttaaataaatgtatatttattaaaatttaaaattcaggatattttaaaatttagaatttaaaatatgtatcatgtaacggttttgtcatatgtttcaattttgcaaaattctcgctatttcggaatcaaatttttttgagagatagtttacaaaattgttgatcgacaaatgtgattgtcgttctttttgttagtatcatctaaaatttgtgatcagagactttgatttttttttcataatttgaattgctatttttatttaataagatacatatagcttccatataattatcctcgttactttcttaaaataaattctttttttctaaataaagtaaaggtttgttgcactttgaggcactttgggaaaacttaagtgaatatagacactttcaaaagttgagggactttccctttttgtttagtgaaaaatgacaattatgtctccgaaaattagaatccggaaatcatgactaattggtcatcggttttggtattggttaattcgaaaaagtaaaaacggttaatatgtgcagtttaaaggagcggatattaagaaaggagggtcgtccaatcaaaacaatttcagcatagcgagatgatgatcttcaaacacaacaaatttacgttgtgttagatttgctttttgaaaaacaaggagttaaaaaaaactagtttctaggtttcaatttttggcttattaag

SEQ ID NO: 9683 - DNA, 3000 bp, Unknown
  misc_feature (1)..( 3000): cDNA_ID_2185095_gDNA_ID_1972170_Annot_ID_179838 3000 nt of promoter + ATG
cgatggggcaaactttgcccgtgacacacccgtgttgcccatcattgcccatatagttatttcttttacccattgagtgtttatcaccttttgggtacgtatggtcaatcagccatgttttcggggtaactttctctcattcagtcttttgcatgttcccgatgcccttatgcgggtcactacattctccccctttaatagaattcatcttgaattccaaaaggattggatggtccggcttcatcttcttcattttctgttcagaaaactgtggatactttgcatggaacgtctcttcatcttcccatgtagtaaccctacgattttgctttccccaaaatacatgaatttgtagaatccttatattcttctgttcccgcattcgagattgactcctatcaccatgcttgaattggtagtttgcgtagtaaacctacttgcacttgatgttccaccttcacactttggcatgaatcacattggattacccactttgccactgatctcttcattccaggctaatgataatacctccttatgtccttgtacatttttgtacttccttgatgaatgcttaataaagaagtatgtgctgccctcaaaatttcttaccgtaatcctttacgggcatgcaatgtaatcctcccattgagtagtaaagtggcgtcatcagctagatgataaccactagcattcggaccatttaatgtctttaatttctccacgatttcttgcaacttttcatcttgcacatgttcctctcgaattcggtgaagtaggcttgcttgagtcacagcttgcaaacccaagggcttactagattcaccttttaaagttaacatacttactttcttgaactcatcggttagtgactctagatctttctcaacatctacttccgtttttcggcaacttaaggcgtttgccaccacattagccttccccggatgatactaaatcttcatatcataattggtgatgaattccatccatctccgttgccgtagattcaaatctggctgcgtgaataagtacttaagactttggttgttcgtaaacatgtgtattgttttcccgtataggtatgatctccgtgtcttcaatgggaatactacagcagccatctctaaatcgtgagtaggatagttctcctcatgtcgtcttaattgccgtgatgcataggcaatcacctttccttcttgcataaggacacatcccaagccaacacttgagttgtcggtataaagagcatatggtttatttggctcccgcactgctagaattggagcggctgtcaatgtagtaccccgcgcattgatcccgggcaagaaagaagggcaagagaaaaagaagagagaatggtgcgagaatgagaagaggggccgagtatttataacccgcagaagccagagtagagcccaagtcttgaaacttgaagccaaatccatttgggcgaagccaacttggtgaccaagtttcgtcccaagccatccgagccaacttagagccgaatccacctgggcgagccaacttggtgagcaagtttcgtcctagagccaacttggtgaccaagttttatctcccttcccttacacaagtcctcactctataaatagaacccaaccctcgcttagttaacccttagaagccttcgcaccaaagctctgcccaaaccaagagagaaagagagtttgtccgagccttttaacccgtgagagagagagttcgtccgagtcttttaacccgtgagagagagttcgtccgagtcttttaacccaagagagagttagagatcgccgagcctcagcatagtctgagagagtttccgagtagaaaccatcggtcaagttaggaaggttcatcggtgattgtgagttccggtttttgttttgcatgtttgattttcgtttcttcttgcatgttctctattctctcttttctttgctttgtggttgttattattgaggttgtttattcgaatagctaggacagttgagaccgaagcaccatatcctataggagtggttgtgttagcttagcaccattcattcgagagggatggttgcgttgtcaagacactactcgctagtattcagtagacttagtaagaggactctatgttcatgcgcgttgaaaacgaaccgcacgtttcatattgtcgattggaaggtcgtagtgtgtggaacttgggagtatccaagttaactccataagcatactacggtcatgtgggatgtatctgaccttaccttgtgatttcgttctttcgtggggtgtgcttgacgagatgcaagtgaccccaaggggttcgaaggacccggagagactgggttagctacccaagggtcggtgtcgtttacacgacggtgtagccaaggtgatgttccggttatatgcctttgtggttataactcgggtgttcacgatttgtggaggcatgaagtgcatccgggccctaattaaaactttaagaaacgttttgttcttgttgtgtttgtgtggtttactaccttctctatgtactatgattatttatgttatgcatgtggggattatgggtggggattagactaacgtttctttgggaacccgagctcattgagtaatgctagattactcatgactctacttgttttgaaggtaacctttgaggggattagagggagtggtgaacactagggaacccggagtagtttttcaatgtccttttgtaaaagttaaagtatgtattttagaatcgtgtacttttgggcctcatgccttggccataaaaacgatgtttatgttgtggtttttccttgtattttcataactctttggtaatgaaatcggtatttattttaaagtatacgtgtttcaactgataagacttagtccgagtcgacacaacacttgggtcaagtgagggttggcaagcctaaatggatcccaagtggggaaataggcaaccttgagtgggctaagggtcggaatgtgtttccgaacctcggctactctatg

SEQ ID NO: 9684 - DNA, 3000 bp, Unknown
  misc_feature (1)..( 3000): cDNA_ID_2991013_gDNA_ID_1972172_Annot_ID_179852 3000 nt of promoter + ATG
tccggcggtgttggaccgtgccgggaaccaataggccttgaatcgctacatctcggtgacgaatttcggcaactagtgacgactttacctcccgagaaccccggcggttcgttcacggctttgcttgagcttccacctacacaagcagtggagcttctccatttcactgattcttcgtcttctcaacaagcggcagtgacagggatcggtggagagattcctccgccgcttcactctttcggtgggacattggcttttccttctaactcagttctcatggagcgagcagctcgtttctcggtgattgccactgagcaacaaaacggaaatatctccggggagactccgacgagctctgtaccttccaattcaagtgctaatctcgacagagtcaagacggagcctgctgagaccgattcatctcagcggttgatttctgattcagcgattgagaatcaaatcccttgccctaaccagaacaatcgaaatgggaagaggaaagatttcgaaaagaaggttagagtgagagacaaatgtttttacttttttacatttgatccttcgtttcatcagattgattttttatagggtaaaagctcgacgaagaagaacaaaagctctgaagagaacgagaagctgccatatgttcacgttagagctcgtcgtggtcaagcaaccgatagccatagcttagcagaacgagtaacttgcatctgccttcactaatttttcttttttttggtattaatcagttgattaattcgctaattgatcactaatttttggattataggcaagaagagagaagataaatgcacgaatgaagctgttacaggaactggtcccaggctgtgataaggtttgtctcttagatatagacgtgtaatcaatttgttaatcaatcattaggtcttcatttgtgattaacgacattatatttctctaattgattcactccaaaagtaagaatttattattagatgatctagtctttttgttaagggtcttaatccttcacacctacttttttttttcttcctaaaaagtggattgcttaattgcttttttattaagaaaagtggttcctggtgtgccaaagtagccagttgggtaattgtgtagtaatgcctttagagatctcaactttatttttttatttcgtgtggggagaaatatctcacgggtacacacttagctttaaggttaactcagtcacacggaagtgataggaccttgctttatcgaattctttttccataagtgtgttcgttgagcttgaagattagtctataaatgacgagaatgaccttaggaagtgtgctagctgtaatatgccattaaggttttgggtttaggggacagattttggtggaaagatcaagatcaaagtgtgttttggggtccatcttttgatgataagtgggaaaaaagttgcaatctttctatggaaggtgaggaaggggtagtatcgtctctaacaagttcggtatctatcaaggaaaaatagaaaatgactcttagaaggacgattaaagcaaatgatcctttacaaaaattgatatgctttgagtcccacatacctaattagttggaaacatgatgtgacactcccccagacagctaattaatcatccctgatgttagaagttagcagcaattattggtgtgatagagatgatgatatggaacatcagtgtttgtttaaaatttggattctataggtgagctgtgaggacttgattgattgttcctttagcccccctagggtatactgattacttgtgattgtagtagataccatttattataatagctttagattagcacgtcattctcttgctgcttttttcactgtgtattttggaatcttggtattttctcgttgaaatattggatcatcttaacaatagttagctgtctagaaagaatttttggtatgtgaaagcagatctacctaatatgaatccgagcttatcagaaagtctttgacctgcagattcaaggtaccgcgctggtgctggatgaaatcattaaccatgtccagtcattacaacgtcaagtggaggtgagactttccgtggtccaatttttgttctttatacctatattttacaatagccctgggcacaataaaagggtcaactcaaaacaatttgaaaatgaatagaattatgtgccgcaatctcatgaaactgtgacttgtgtttccacagatgctatcaatgagacttgctgcggtaaaccccagaatcgacttcaatctcgacaccatattggcttcagaagtaagtatcaaaatctcaaacaataatttggtcattctgattagtcttctctaggaaaaatttaaccatttcatgtgtttctcatttaagttaaccatacctctttgagtagcttctagtttctatcacaaaaggagaaacttttggggtatttattgatacaaacattaatttagaccattttagtgtaaggcataggaagatcacaacgtctactctcatgaaggaaactcagggaaaaataaatacacaacacacacacacacccaatgcaaataacagtagtgggtcaaaactcggaccacctttgttctgtaaaacctttctgtgtcttctgtgacttatgtcggatgtgttacttgatgaaccttttaaaaaaaaagttaattcatccctcaataatttctgtgggtctcttccaaaatcttgttatttcaaagtgacctatctaatttcatgatcacctgtggattctcatcaaaagttttggaccaaactaaataaatgctccctctctctttcttcttacagcttgtaccaccattaaatagccagggaccctctcatcaaaccttgttcttttaggataataataacacagcaacaacagttgacttctttgactagatcaagatctctatgaatgatccctttgctgatatcttttccggttttggctctgtgtttttttctttgacagaacggttctttaatg

SEQ ID NO: 9685 - DNA, 3000 bp, Unknown
  misc_feature (1)..( 3000): cDNA_ID_3043077_gDNA_ID_1972172_Annot_ID_179866 3000 nt of promoter + ATG
tttattttctgtctatgtaaaagccatcatgattcgtttaggtgaatcagaagaaaataactctgggtaaaattccaaaatgtatactatcaaatggatatagatagacgacaagttttaaacgcgttagcgaactcttcttgtggctttggtattttagtttattaggtataaaatggaaatcatccacacttcggagcaattgttacaaaaatgcgattatctttctaccgactaatgttgggtagacataattagtttacaaaatgttctttttccatttgtcaccaaagttttcttcattattttatgaaacaagacttgggcagttggacatatatactatattagtagttaaattgcatatgtttgatctgttgatttgtatattcagttcttaaactaaataacaagtactaactatatttcagtatttgtatataatcatttagtatcgaaacggtctcgtggtcgtggcacctttaattgctgagagggccgtcttttacttttcgttctagctttatgatgtgccaccgagtagttaagagaatgcttctgctccaagtattttgacataatttaatcaaaagtattagctactttacacggacaataatctaattttataattagagtaagatagaaattaaagaagatattggtagtcgttgcaaatgacacgtgttgatcatgctttgctcgcatttgtatagcttcgacttgaaggatttcagtccaccgtacgtttaccacgatcgagtcacccactacggtcataactaatactataatttgataagtgtaataagaagacaaatgataaaaaaaaaagaagaagacaaatttgctaagatgacagtttgtaatccatatcttatcacatctacaagagagatatatacaactctttttcttaagagatgattaatgcgttaaacaagtttaaccagttatcaaaaatatgtaaatcttttctccagaggtttaaagacaacgtcacggtaattgtttcgtcgaaaaatgactattttaaactgtacggttcatggtcactttttgtgtatttacataaagaaaaaatattaaattttatactcagaattaggtatgggcacgaagcggatatccggaaaaattatgatatttgttattcgattcgttttaaacgaatacttgattttgtgattcgctttacttcgaaaatttccagatatccggaatttcgaatatccggaattttttgtgatatttgcggatatccgctttgatacatttaaatattaaaaaaatatgtatactatataactatatcatatattcaaaaaatttatccgtgcgttccttaattggtgtctccgtgtgcttttaaaataagttctaaataccaaacataaccgttgttggtatcaccggtcaacaaaatattatcaaactaattccaaaactaaaacccgatagttttttgatgccattgatcaaaacataacataaaaaaaaatgatcaaacaaacatcttaacataaaaacataaaatgacaacaatacacaaactatttatgatatctatatatagatatactatattttctaatatatataaaaagatacggatcgaagcggatattcgattttttaaaaaacaatatttattatttgattcgatttttacgaatactatatttttctatttgctttgctccaaaatcttacgaatattcggatttttcgaatcaaattaaatcaaataccgaatcgaaacggatcaaatcaaatcaaatcagaatattgagctagctgaatgaatgagataacctaagaatccaaaagttgatagtgttccctttccgaattccaatagtagcttgataacatttatttaacggcgataaattcaaccgttagtttgattaccaatcaaataattgcttgcaatagacggatgaaacgagtggtaagaataggtgattgaaacaaacggttaaaagcttaaacaaaataggtgagtttgcaacctctcttgttcaccattggaatattttagttatttaacgtttcttagatttttaaaactgtaatgtatttgaattatttactaaagagttttgtttttctttgttttttaaatatttttagttatttattaaatattttaatttagttttttttttttactgtttaaccgtttgttactaatcataactattatttaacggttcattttaaattatttatcattttttcttttaatatattttctaaccgtttttttttatcagtcttttttgtaagtgttaaataaaataaccgccttatttaaacgatattaccaattggtttaattttaggttgttcatcttttctaaccgtttttttctacccgcctttttctgtaactgctaaaaaacataaccgtctcatttaaacgatgtttacccattgcaaaccattttccttaaacaagcggacaatatttaaattgcaatgaaagcgagttatgagttcttttggcctaaacttcccaattttatctctctttttcccactaatcttctaacaattttaattaacagtgacaacttacaagtacttaggtaaccaagtatatttccctattgtaaaacctaattatgagttgtgatgatcaccttttctccttttgacgaacgcttaggacctaacttattgcaacaatggcctaactaaaacttaaatgcgatttgcattcaattctcaaatgggcctctttagttaacatgttatctccgttcatctgacgtgtcatagctcagatcaaaggttaatctactcgtaaatccaacgaccaaagaaacgaagcgtacgttactaacatacacgtgcacgcactgtaaccatctctctctctgctcttctccttcaatgaaatgattcgtcacccaaagaaagatctgcaacttcaccaccggaccagtctctctctatctcttctgtctctctacctcgcgcgacgaatcaatc

SEQ ID NO: 9686 - DNA, 3000 bp, Unknown
  misc_feature (1)..( 3000): cDNA_ID_1558032_gDNA_ID_1972172_Annot_ID_179868 3000 nt of promoter + ATG
gatgaaacgcggctattagctgtcgtctcttatccaaccgaacccaacgagttcgaaaacgagtagaatgtgaaagcacgcgccaaaaagggggcgcgtgggtgaaatccgtatccatcttcaacgggcttaagatccattttagtcagtctcagtgatggtagtgagaagaaaaagcgtcattcttacgtttttcttttaagtttcactcagagacagaagctagaacaaagaaaagagaagccttttgaaagcaatcaactttaatctttttcaaccaacactagtactctagctgttgctctttctcttcgttttcttccttccttcttctcttagatctctttcttttaacttgagtcttatcctttggatttttattcgatttgattcctccgtttggtttggtcagttttctttagactcttagtctttcctctgatctgggttttagctgtagaaactcgtgagttagatcgattgagaacccaactataaattagtaaaaagagaaaccctttataggttttttggggtttttgtctcagtctgaccaatgggttcacaggtgagtctctgtctctctgttttgaagagattgtaaggaaactagggcttgttttcttgtttagactgttcatgcaattagttttcgtggaagataattgattgaacttgcttgtagcttagttcttggtttctattgagctctaaaggataggtttttaagagatgaaattgtttaatgtctcgtgactcaagtgttgcttatatatgtttcctttgttcagatctttttggaaagaatttgtatttggatgttgttaaataacttgttcaatgcactgcttctaatgcatgaaaaaaatggaatcttgctttcgtgtttatgattgcgcttgtgttgattcttcaatgaatagttcctcctctatggagtgtctgccagtttgaatgatcctctacttttgtgcatatcgaaaaaaatgacattgcttttcacactttttagtctgcattcttcaacaaatttctatagtgtttgagtttagttcgccttcattgtgttgttgtgaggtatgagttactactggtaattaaaaagcaaccttttcaacttgcaggtttcttgtctagttgcttgaggtttttggtttttggtttgaatagagttatgagaagaggtagaggaaaaggcaagaggcagaatgctactgctagagaagatcgagggagcggcgaggaagaaaagattccagcttttaggaaaagagggaggccacagaagccggtgaaagatgaagaagaagaagaagaagagctagtgaagaagacagatgaggaagaagacaaggatgatgatacaaatggttcagtaacaagtaaagaaaatgtgacagagaatgggaggaagaggaagaaaccagtggagtctaaagagagcaacataactgaagaagagaatggggtagggtcaaaatcaagcacagaagattctatgaaatcatcgtcgtctattgggtttaggcagaatgggagcagaaggaagaacaaaccaagacgagctgctgaagctgttgttgaatgtaatggggtttgaaaagaggttcttaacgcttttgaaaccgcctttttggtattttttttgttgtttttgttagatacttttgctgttataaacccgagtttgatgcgggtgcgttctggtttcattacatggaatcaaaacttcgatttttcggatattgctcttccctcctagtttccatggcgttctgaaactcactctttcttttgaacaaagtggagcctaaaaatgctctttgacggctatgcaaaaatgaaacagtcataagttgtgaaaagcgaaaaagaaaaggttcattgtaggaagaaatatcaagaagatttgtgatagtcaagccagattagtggggggggggggctttaggccttttttcaggttgtatttttgtagaattttggaaatcaaaacaaaggaacttaaagcaaaaagtaaaaggaataatatcaaactgatacacacaaccctaagaaaattcaagtacacaatttctgatggatacatgaccgtgaaaatcgaacttcccatactctctttttgcataaatatttgttcaattatcaagaaagattttgcataggatatggtgagaagaagaagaacaaatctcattgcttaaaagaaaaagaatcactaaagtatttttagaaagaaaaaaaaatagaactaaactcaaaaagtgttcaataaccttctagttcctttgaagagtcacatccttagttgagttccaacactctggtctatctgcccataatcctcaattctttctactttagaattttaaaaatgagcaataaagttgttgtttctctttaattagaaatagtatttagaagtagttaaatagccatccatttataggtctgtgatctattcatatttttacaaactacaataaagatcaatagttttgtgattttatcatcattagactattttagtagtataaaactagtatacaataattagaataaattagctgtagatttttacatgggagttatgttccctgatctggtctggtctcgtttaaggatatcattttgtacgttaaagaagaaaaatatccttatcctcccttttgtgtttatttgttcagatgttacaaaaaccaccaaaacgcaccaacatcccaaaacgcaaacgctaaaaacacgtagctgtcgtggactagtgtcaatcactcttgagtgtctcttcttttgtcagcttctctttctttctttctctctcttctcttctctctgattctttaaaagatagcaacatctaaaatctgcaaaaccacattttctttcctctattctcctccgtccttactatttccagagttcagtacttagaaagaaagagagtgatgagcagaagcatctctttctctgtctgagtaagaggaagccaaaaccataatg

SEQ ID NO: 9687 - DNA, 3000 bp, Unknown
  misc_feature (1)..( 3000): cDNA_ID_1456224_gDNA_ID_1972172_Annot_ID_179877 3000 nt of promoter + ATG
taaagttgttagagtacctccctgagcgagttcccccctcacgagtgtttgaccaagagaaacctcgggatccacccaacgcagtctttaaaaagtactcaatttggtatccctcatcaacttcgctaaaatcaaaacatcctacataaatgaaagcattgttggagattaatatctacatgcaaatactgaaaccaacaaacaacaccttttaaatttcacttaattgacttttccttaacataaactatatcactagcattggtagctacacagtctataaaccttccttcattgtagaagcagttacactaactatagttcaaccattgaggagaaagcagaggcaaagaagagtagttgtcttacttacttttatccaaatgttgagggatgtgtgttttaccattccgattccttttggaaaccctagagtactgtttctcaaaccatgaggtgtgcttaccagagtaatcaaacccatcactccatatctgggaaaccaaattacaaaaattgcatcaaaattgaaagctttttagttcttacattgacaaaagaaatgtttcattacgacaaaacaaaaacagagacttgacattaccccaaataagtgttgtgcaaaagcattcacattacgacgcaaatcttgctttgccttctttcttccaaaccttttgcttcgagcttttgaattctgtcagaagatgatgtcaaatcaaaacgagacttatccacaagatcaaactctgagaataaggtgatattgatccaacacaattcaaagagaggcacaatccaagcatcgattgagaatttgcagaagaggaaacataaaagagagagactgacagattgatgtttgcgttgtaagataggagtcgaatggaaaagagctgttttgaggtgagaataatagtcttgcggcttcagaatcgctgctcttatggcggccatcatctccggcggccgaagagatctaaccggaatgttgccaaaccagcatttcaagcagaggtcgaacgcaacaaatgcaaaacagagaagaaagcccaattcgagcctcaataataaagcccaacattatctttaaagcccaacgtacttacccatcgctttttgttttttgtttttggtgtcacaaaagcaagccctcttaactttgacaatgcgatatttcgctgtttttgtatgacgacgagtaaaacaccattcgagagagtgattgatgtttgcttgcttgtatcggaagggatcgttaagttcattgttaaaatttaagaaagtctttgaattaagtagagactttttcgagcttaacattaaaaccaaaacaaacaaaaattacgtagagagttttttaagccaataatacatagagctgtaattttgtttggtgtgtagtcgaatgtaattgtgatttgtgaacctaatgttgagtagggatgatgatgtgatcattgtgatgtatatgtgaatggatgtgaatagtgaaagataattacagtaaatgtggacagtcgatagttcacacaaaagaaagtttctacgccatgtaaagaggagaagaaactgttactgtgatgaacttacataagtcaagcttgactagcctttttcaccttcctgtttcgagattcctccactaattatattacacggtgtgttagacgtgcacaatattgaagcaaactcttgtttcaaataaaacgaacacgagatccaaaatatcatcggaacacaagctaatataaaaaatttggttatgattggtgtcgtgacttacacgcaaaaaaagaagaagaactcgaaagtgtctatatttatcttatgaaaagctattaaaaacaaagctagaaatatgataagttcttcacattctaaaaggttcagaatctttggaacaacatgaacagaagagaagacaccaagcatgtcaccgttagacccatgtttgaaccgtcaacggaagcgctgttgcgatgatgagagccaccgccaaagaaaaaaataccaccaccgccacgaccgtgaccaccacgaccgtgacctccaccaccatgaccgccaccaccaccgccttttgcggcgacggacatgatcaaaagtgttaaaattagacaagcggtcacggatttcatcatcatcatcttcggtgaggaacaagacttcatcatattcttcagagaaaatatataataacctacaaaaacaggaaaccgatcttgagtttaatctctatatataccgagaaaacttgaagaaaatattaacttaattagggtttcacataaacaagtctcacctaatatactcggattccaagtgatgagacaaggaaaaagaagattcactgcaatgtctaaagtcctttaataagctcgagtctttccttttttggaccaagaaaacgagctaatggaaataaatatatgttaaaacctctattaattcgatatgaagcacgcggagtatcattaattacgattatgtttaaccactaataatgccaacattattttttccttttctctacttctccttcttcatagtttagagtttagactttctttatgtgaaatctaaatgttcttcattcatatttattgttttctattggatctaatatcttttgagtgtcatagggaaataaatgcacaaaatcatattgtggaggtaaatttcgtatagttgtttgcctgttttatatcatgaatgttcttttagtattctagtaaaaaattaatattttgttgcattttacatttaaaaccatttcccaaaaattttattagacctttattgtatgttctaatattattttgttacaagatttttttttcagatattattatctttatttatgcaaattcagaatttaaattaaaactgataaatttagttgggttcttctgctgctgctgctctcgtcttcttctacctactcattcctcagactaataaaaagccaatctttgaccttttcccccttattcaatg

SEQ ID NO: 9688 - DNA, 3000 bp, Unknown
  misc_feature (1)..( 3000): cDNA_ID_1443114_gDNA_ID_1972172_Annot_ID_179884 3000 nt of promoter + ATG
ccaccaagagcaaaaccatcatgctcctgttgtggttgatgatagagactcattctcaagcattgcagctgttataaactctgagagtcaagtggatactgcagttgagatcgattctatggctctttcgacatcgtcctcgaggagaaggaatgagaatggttcgagggtttctgatgtagacagtgcagattctcgtccgcctaggagaaggagatttacttgagaaacataaataagaaaagctttcaacctggaagctgacgatgatgatgattaagaagaagataagaagaagattgtgtaactttatttttcttgtgttgctttgttgtaatttgtttttgtatttttctcgatagggatggttttttttaatcgaaaattttctttcatcttttttttcttctgacggtaaaatatcataaacctttgaatccaatatggaatgtgttcttgataactattcttataaaacaacaaacttgaaaattttaatcgatttccaaatgataattagatagcttgaaattttgttggatttgaaaatcagtaagaaaatgtagaataaactattaacctttttaaaacaaaacttttaggcaaaatgctaattttattattaagtaacatggtgtgttttttcaactttgtagactaaagcaagttagtatataaatcagttatgaagcaacgtaacaataagacactttggccgagtggttaaggcgtttgcctgctaagtaaatggggtttccccgcgagagttcgaatctctcaggtgtcgtattatttttattttcttttccttgtcccctaacttttttttttgacagatttgtttagaaacgatgattatatggtcgtagaaaaatccaatttttttttgagagtacatgtcacatgcgcacagcgacatccgacacgtctattattttctgttgaatcatctcacttcatatggttttcttcaacaattatttcacttctgattacaacaaaaaaacttatttttatactatcatatgatattttcttggcaatataaaaaaaaaaaacaccgcaaaaatacattcacacgaggggagacaaaaaataaataagaacccccacaaaaacagacatcttccaccattttcaggctttcatcatttattaaattataaagtttcttggattcttgttaacttaaatataagctgccaaatatatatcagcttacacttataatggtcctgttttaattgaatttaaccttaaatctcattggaaagtgattgacaaaattcaaaaaaattatgaggaaaaatgaaaatttgaaaagtgaaaataaaataaaaataaaaactcaaatgatgtgtgcgggaaacgagcgacgtcgcgttattcgatgcacgaactcgagccaataagatgtttttaaatctaaaaatggctattagattcgtcattacttttgtatttttccacaatttaaattgacttttgccggagatgtaacttttaaactattttactacttctttttgtttttactcataaagatcacaaagattcactcacaagcgtatgtatatctgaagcaattaaaaatgagaaaatatttgtccttttacagtttttgtttttcttctctgttacaaaaatgtaattacatctgaaaacaatactagaaaaaagaaagtaatcgagcgttgtaacgcaccataatggagaaaatagtaatacaattatgaagatagtacaaaatctcagatgaaaatatagtaaataattgtaattaaatgagataaaatcaatttctaaaaaaaaagtaaaaccaccttcgtgaattgtgattcggtgtttttaaaaagtggggaataaagacaaaacagagaccaccaccattaatggctttcttcaccgatacgaacaagacaggacacaacaaactcaatcccagcctcctcctcctccgtcttctcccttattcccttttcgtttaatcccccaattttttcaattaatccctccttttctcctcttaatctgaatccgaagcaacgcataatccataacaaagtctggaaaatttcttccgggtaagagaaaacttcttctctttcttttcaatttggggttttttattttgaaatcgggaacaaaagatccagaattacctaattccgaaatttattatcgggttggattatcgtgtgacgacgaatctagcttgctttttggggggggaaatataattctcggaaggtcaatttttttttttgcttcattttgttgtctttgaatcttttggtttatgaatggattgttttgaaattgtttcataggtcaaagagacaaagatattgttgagatttatgatattgggatttgtatttttgaacaccgtttctctatagatttctgctttaacctgatccttttaattgcaaaattgtgaaactttgcttgcacgatctttgtttagctttcacaggttagatgcgttggttcttgttctctagttagatctattttcatgtttatctctgtttagttagattgaaaagagaataggtttttgtttgttctcttggaatttttctcttttgatgtttgatagtcctgtgattgattactgtttaactgttgaagtcattggaatgtgcaaaggtctagctttgttcatagctttaggcctattgctttgtttacctatctgaaagtgcatttattgttttgcttcaaatgtttgattattttattttattctttgttgcttaagaagctataaaaagtaaaagacttgatcagctgaaccaagtatctgccccttaatctacttttttccttctcaatatatcaactatatgtattagccttctcaatataagcttgtattgctaatgattccttttttcctgcaggataataaagagatccattaggagtaaattatctgacaagagaatacaaagggcaatttcattttagttgaattagggatttgggctcgtc

SEQ ID NO: 9689 - DNA, 3000 bp, Unknown
  misc_feature (1)..( 3000): cDNA_ID_2185338_gDNA_ID_1972172_Annot_ID_179879 3000 nt of promoter + ATG
ttcaacagaaacaacaaagaaactctaatttgagtctgcttataaatccataattctcatccttggaaaaagtaaatttaccgagtttaggagtttgatgtttgctgttgcctttgtgttattatctttaatgaatatttccatattggatagactcaccaatgtcgaagggaacctcctgccacaataccaaacagatgtaggaatgcttaaaaactctctagatataaaacgaatgtttatttgattatcgatgagcaagaacactgactcgaacataacccgaacagcaagagaaccaggagtgttgactccaaaccactcaaaactccatctaccttcaagataaggagacctgacaaagctagctattaggaagcatcaaataacaccttaaagcttaaaactttgaagctcaaaatcgagcaacatacgtggttggtctaggagttggattaagccgctcaagattcgttatcctttcattgacatcaatcttttgcatatcagtgatcttccctgtaactagagcctcaaatcctccagcatcattgaactgtaatctcaaatggtttcagaactccaacagagagcaatcaaattattcactaagcaatctaatgatgatttccaaaaccagatactaaattcaacctaatttctaaccaatcacagttgaaagtttcaatttttaagaatttttcgaagacttacggcgagaataagcgattccttagcagagagacgctccatttctctggcgtaaactgaaggaatcccttgaaccgagtcttgaaccatagctctgcatatcattctccggtaacaactcttcttctccgactgaaaattgagagaaacccttgacagtggaggagaagacgacggtggtgatacagaggatgagaagctcaatcgaaccgcagaggtcccagaaaccgaaccatgttggatcaatgccattgaataagggggaaaaggtcaaagattggctttttattagtctgaggaatgagtaggtagaagaagacgagagcagcagcagcagaagaacccaactaaatttatcagttttaatttaaattctgaatttgcataaataaagataataatatctgaaaaaaaaatcttgtaacaaaataatattagaacatacaataaaggtctaataaaatttttgggaaatggttttaaatgtaaaatgcaacaaaatattaattttttactagaatactaaaagaacattcatgatataaaacaggcaaacaactatacgaaatttacctccacaatatgattttgtgcatttatttccctatgacactcaaaagatattagatccaatagaaaacaataaatatgaatgaagaacatttagatttcacataaagaaagtctaaactctaaactatgaagaaggagaagtagagaaaaggaaaaaataatgttggcattattagtggttaaacataatcgtaattaatgatactccgcgtgcttcatatcgaattaatagaggttttaacatatatttatttccattagctcgttttcttggtccaaaaaaggaaagactcgagcttattaaaggactttagacattgcagtgaatcttctttttccttgtctcatcacttggaatccgagtatattaggtgagacttgtttatgtgaaaccctaattaagttaatattttcttcaagttttctcggtatatatagagattaaactcaagatcggtttcctgtttttgtaggttattatatattttctctgaagaatatgatgaagtcttgttcctcaccgaagatgatgatgatgaaatccgtgaccgcttgtctaattttaacacttttgatcatgtccgtcgccgcaaaaggcggtggtggtggcggtcatggtggtggaggtcacggtcgtggtggtcacggtcgtggcggtggtggtatttttttctttggcggtggctctcatcatcgcaacagcgcttccgttgacggttcaaacatgggtctaacggtgacatgcttggtgtcttctcttctgttcatgttgttccaaagattctgaaccttttagaatgtgaagaacttatcatatttctagctttgtttttaatagcttttcataagataaatatagacactttcgagttcttcttctttttttgcgtgtaagtcacgacaccaatcataaccaaattttttatattagcttgtgttccgatgatattttggatctcgtgttcgttttatttgaaacaagagtttgcttcaatattgtgcacgtctaacacaccgtgtaatataattagtggaggaatctcgaaacaggaaggtgaaaaaggctagtcaagcttgacttatgtaagttcatcacagtaacagtttcttctcctctttacatggcgtagaaactttcttttgtgtgaactatcgactgtccacatttactgtaattatctttcactattcacatccattcacatatacatcacaatgatcacatcatcatccctactcaacattaggttcacaaatcacaattacattcgactacacaccaaacaaaattacagctctatgtattattggcttaaaaaactctctacgtaatttttgtttgttttggttttaatgttaagctcgaaaaagtctctacttaattcaaagactttcttaaattttaacaatgaacttaacgatcccttccgatacaagcaagcaaacatcaatcactctctcgaatggtgttttactcgtcgtcatacaaaaacagcgaaatatcgcattgtcaaagttaagagggcttgcttttgtgacaccaaaaacaaaaaacaaaaagcgatgggtaagtacgttgggctttaaagataatgttgggctttattattgaggctcgaattgggctttcttctctgttttgcatttgttgcgttcgacctctgcttgaaatgctggtttggcaacattccggttagatctcttcggccgccggag

SEQ ID NO: 9690 - DNA, 3000 bp, Unknown
  misc_feature (1)..( 3000): cDNA_ID_2185355_gDNA_ID_1972172_Annot_ID_179886 3000 nt of promoter + ATG
cttatatcgcattcattataatcagatcattagttccaaatttgaaatactcaatcatgtaatacttatagacatagatattcatctgcgtcggaaaaaaaaaaaatatatatatatatatatatataccattcacttgcccaaactttagcatttttacataattttcaagtaagatcgatggatttctattgtttttgcgattaaatcccgcggctttttgttcgacaattgctttgaatttacaactttttatataaaaagatcttataaaagaattcaatggcacacattacaacatttgaaacattatcttgaagagatttttggcggactagacatcgaaattcggaaatttaatgaaatttgaacccattatagtatggactattgggtgcagacaaacattcaccgattgccatagccatttgtgatgtaatcggctcaaacccattgatattagtttggtgttttatttcaatattgactatgcacggctcacatagtcacatgaagttcttacaacatgacagtagaccgtttttcaactatttattttcaaagattatactttgtgttcgtttaaaaccgtaagaaaacagaagaatgaacttttgataatttagtatttgtctataataatagggatttttcaatcatcaggtttatttctatatagtatcatccgtacatattatcgatcaaggatgatgaatcactctcgcatcatcatgatctatgacttaacttgataataaattaatcatgttttagatctttgagataaagaattcagcgttatataactgcatttacctaaatgatggtgacaattcgaattacaagtaaaataatttagaaactatattctataacgcatacaagattaaattttgtattgttgttgtagaattcttcaactgaagtatatgaattcatcttttaggttttgcattcctcctgtaaacggaagcgctagtttattgttgtattacttgactccgatcctgactaattttgtccaagagtcccattgcttatagctgtttaaactttgaaccaaatatcacttcaagaaatccacgcatagatacagatgaagcggattcaggatttgacatctagttgttataagatttatattaatatttgaaagtggtagccatgatatcaatttagagaaaaccaagtaaaggaataatgaaaataatataaatgatcatgatggtgtgaccaatatttccttttagagacacacattaatatataccatataaccttgagattaaaatagtgaattaagtttcaagctgcatgattatagttgtagtttttctctaaaagaaagtcaaagaaataaagaaatcataatcattaagcttccgggaatgttcctaatgtctcctgatgggatataattttaatttgaacaatagctaaataagggctgcataacaatcacatatcattcgagagattgttgcaccaactcgtggttgtaaacttttaaatgaattgtttcctcatttataaaaacgtaggatactataaatataaagaaatctaccaataagtcttaaagcgtttagctgtaaattggagaagaaagaaattatcacctttttgtataaaaataaataactaaaaataaagagatctaccaacaaatcatagagcatttataattttaaattggggaaacaatttctataaatttaatgaaaaagtgaatctataaagattttttttctgtagaattttattctataaaataaagaaatgtcccaataagtcatagagcgtttgtaaaaaattggggaaaatattttctataatttaatagaaatagaattaactccaaaaaattaattttcttcatattttacccatgttggggttttctgtttctgtttttttgtttttttttggtttctttgttgattttcaaaggattcaccaagtttataacccacagttctgacttcaaattttcgactccttttggattgaagaaatattttcaagccaaagaagtccacgtcaggtacttatatgtactgtcgaacatgaataagatattttgatacgtgatttgtagttaaaaggttatatatatgtgggtatgtctgtttatatgtgatgtctgcaaaataaatttaaataataaacttttatacatctcaatgtgttactgttatcatacaatttttcatgttgacttaatgaatattcacatacttaatttttctttgggctctcctatttcaacgctcatttgtcaaattttttttttttttttttttcgtatttgaattacgttacttaagtttggattaccccttatctttaaatttggtttcaattctctaatgattattaaaaaaaaaaattaagccttttataaaaaaaaaaggtttcagttatttgtagaagtttaattgttatttcttgtcgaaacgcgctgatgtgagcattattcaaaattagggttccgaatgttgaatatcatttatgctttgcaattacaacactgtaaactacacgtgtcgttttctaaataagaaaataagattgtcatgtacccaaaatataaaatcgtcacggaacaagaagctcctgactaaggcatggatcagacaagctttgttgatgcttttgcatgtgggcaagtaccagggctgtctctatcatcatcatcatcatcatctctattttcttattccatacaataatttaataaataaccacaaaaattcaatgaacgcacataaaatatcttataatctatctataaaaaccaatctctgtgtacaatcctttatctttttctttgttcatcacctgcaagcataaaaattctcctgaatatcatcggtatatactttttttcatttaatagtttatttaattattctaagggggtttccccttcaaattctagtagttaatttattcatgttttttttgtacgatgatttgtttaataattttccagaaatg

SEQ ID NO: 9691 - DNA, 3000 bp, Unknown
  misc_feature (1)..( 3000): cDNA_ID_2185351_gDNA_ID_1972172_Annot_ID_179885 3000 nt of promoter + ATG
taggagtaaattatctgacaagagaatacaaagggcaatttcattttagttgaattagggatttgggctcgtcatggctcctggaggcagtgctttgaaagaagtcatggaatctaattcaacgggaatggattacgaggttaaaacggcaaaagtggaagttaataataacaaacctacaaagccagggagtgcagggattggaaaatatgggatccattcgaacaatggtgtttacgagcttcttgaatgtcccgtctgtacaaatttaatgtaccctccaattcatcaggtcagtagtatatgagcttgaacagatttgtaattgactaattgcaatgtttcatgttctaaatgttatttaattctacagtgtccgaatggccacacattatgttcaaactgcaaactgagagtgcagaacacatgccctacatgtcgctacgagcttggtaacataagatgcttagctcttgagaaagttgcagagtctttggaagttccatgccggtaccaaaatttggggtgtcatgacattttcccttactacagcaagcttaagcacgagcagcattgcaggtttaggccttacacttgcccttatgctggttctgagtgttcggttacaggtgatatccctacacttgtcgttcatctcaaagatgatcataaagtcgatatgcatgacggatgcaccttcaaccaccgttatgtaaagtcaaatccacatgaggtcgaaaatgctacatggatgcttacggtaaaactttctttcgatatgttttcttctttttatcaaaggtttctaatttaaagtctgattcaggttatttcttcagatgaaatttttatgcaggttgtgattttatatcatcatatgactaagcttttacattcaccttctttcgctgttatcctcaaccatgaaatattcctggctttagctcttttctacaaaatacagattggattctttagaaggaactataggaatctctggctctgctcttttatgctatttttggatttctattttgcctattaaattttgaccttgaacaatccggtgccaaactcccttactagctgctattccggttcccgctttgctcttctttgttagtccaattttacggtctccttaagtacctaccatagggtctcttagtcccactttaatcctcacacttaaacttgaatctcagttactaaaattttgtttccaggtgttcaactgttttgggagacagttctgtttacacttcgaggcgttccagctgggaatggctccagtgtacatggcattccttcgttttatgggagatgagaacgaggcgaagaagttcagttacagcttggaagtaggagctcatggacggaaattaacatggcaagggatccctagaagcatccgtgacagtcacaggaaagtccgggacagtcaagacggactcatcatcccaaggaacctcgcactctacttctctggaggtgataggcaagaactcaagttgagagtgactggacgaatctggaaagaggagtaaacgaaaaacgaaaaacgaagaaaagaaggaatcgattgaaaaatgttgtacataagaagaagcctcgtggaagagctaatgatcatatggaagatttgaagtttgttgtctggttttagtgtggtataatggattcttctccaatgggaatgaagatgagatgatgataatgacaaatcttctatgatgaatcagtttggaggagccattgttactattttgtggctgcaagaactatattatctctgtattttttgttttttttgttgggatttcttttgtggtttcagagaatgtaggaaaaagtaagacatggttttggctatgttcttgttgtaaaaccaagttcaaaacagattggtgcactttttatcttttcacaatggtgattttcattcagtttagacttgatatagcaagctcgatgtttaggcattacagcatgatgacaacacgacaacaccttacccacatagacacacttttactcatttgaggaaaggtaactaacaaatatgaaaaccaagcaaaattttctatatctacaacgtaaatatcttttccttttgtttttcgtttttgttgaatcaactcttttttctattgcaaagtttgatattttgattctccatttgttattcacctgttcattctctttttggtgcacgatctcttggctctcagagtttgtagttagtcgtagttgtgcaatcatagtaagtggtctcatcatatcttgttgcagagagaatttagactttgtgttcttcttcttaatgtttttgactttgtgtatgattttgtctggtgtatatatagttactaaaactcgtacgaatagtttctttttcacattgtgtttcttgtatgtcgccatacaaagctagatatctctttccctgcagaataatacagagcacacggagacggagtacatattgttcagcgcaagtgaaacctggatttgaacctgatacataaatttgttatcgtttggtcattttaaccgctccctctaatatttacctcctttttataagttacacatcttttacatatctctctctctctctctctctctctctctctctctctctttctttctagaatatattgacgcagccgcgaatctcatcgtcatcgtcatcgaccaagaggaaccctgatttgcggcttttcttcctttcaatctcaattcgattcgttttctttctgttgaaggatctgaccatccagattttcccgggaaatttcataatcagactcttctctttttatcttcattttatttccagaaatcccgattcatcgcgatcgattgttgattgctgtatttctccgattggatttggtgtttttgtagtccgatttcacggacttgaatccgataggattgttttgtttgttgttgataatgaaaacattggttgatgaatacaagagactgtaaatg

SEQ ID NO: 9692 - DNA, 3000 bp, Unknown
  misc_feature (1)..( 3000): cDNA_ID_2185323_gDNA_ID_1972172_Annot_ID_179874 3000 nt of promoter + ATG
taaaccgcgggttaaacccttgttcttctgcataacacagtgcttaatttgtttattttatttagttttgatcgaaaattacagtaagaattcacaaggattaatgtactggagtctcccgtttcagtaaatacatgtatcaacaaaagactaaaaatggacaaataaatccacgcagattgtaaatcagccaccactaaatactaacttctcacaattctcactcttttgctattgtttaacctctttaagaagatggataaatcgtatcgttgattaaaaaaattagataaccaagaaaaaaaaaaaaagtgtgagcaaacaaaaaaaaccctaaatcgcgcacaaacaaaacgaaagcccagcgtaaaggcctctttaatataaatgggctttctaagcttatatatatttacgggctttatgtgtgtacagagaagaaaaaaacagacagaagcagaagggataaacaaacaaccaggcatttgtccacctttcattttaagcattaaccatcttatcttttcgccttggaacttccccataattacaccacagactagtcttgattatcggttatttttcttattacacgagggtaaattagggaaaaacacttctggagcctttatcctcatgtccaaccaaaatctttacacaattcctagttcttaagaaaaaagtggaaattttcctttaaatttagtttaaaactcatacaaatccttctactcgaccactggtactctccgtaagctacttgctgaattcgattattgattttgggcgtagaagaagatgaaggcatcgatgaagtttcgtgaagagcaaaagcctctttttagggctaaagttcctttaagcatcttaggtttaccctttcaatctggaatcgtcgccggagaatccaaggagctcagtctcaatctctccactttcttcgaatctggcccttctctcaaagtcgcttaccgtccaaacgattcgtggaatcctttctctctaatcgtcaaaaccggatcgggatcgttcggttctccgatttcaagctctatgctcatgagcgctgaattcaatctcctaggtcaaggaaaccctagctttatgctccacttcaaacctcaattcggcgatttctctatcaaaaagtctcattcttcgtctggatttgagaggaatttgatcaaatcgatgaatggatctgtttccgaagatgattcttcgattgaggtggtggatactccagcggtcaatggatgcggcggaggatttagaaaagtcacggttctgccgtcaacttctgctggagatatcgctggattgttatctggcgttgaggttgcggcgaggacgtctctgcctgtgagaggacgcgccgttttgaatttccggtggggcgttagggttcctacggagatcagacgcgatttcgatccaacggctgctatttcgttgaggagattcccttttttggtgatgaataaaataggaatcgaacacgtggacggcgcagatgctaaagtgaccaaatccactggtgatccgggtaaagtttcgggtccggctcagttcacaacaagtggtgacgtggcggaggtgatagaggagcttcgaacggagaacaagcagttaaagagagccgttgaagatctccgggaagtaatatcaaacgtccgtccatactcgccggcgacaattgattacggatcacactcgaagtatcgcgaatccgagaggaacaacaacaacaacaacaacaacaacaacaacaacaacgggagatcgagagctgatcggtggagcagcgagagaacgacaacgtctgattacggtgggaagaaaagcaaggaagagggcaatgtagctgaggagctgaagaaagctttgaaaggagctgcttgaagcttctatggcggctattggtaatcgcaggctttactcgaattacaattacatttgtcgaccttaatcagctattgcttttgtatatatatgcgttgaattatctggattagatttgcacaacttgttttgaatcttttgatggaatcttcagagttttgtatgagattatgcttttcaattctctttattgaacttatatgcaggttgattgttgaattgatttgaatcagtattctattatagtatcaatcaatctgaagcttgatggtgatacactgagctctattaccttgaacgtattttgtatatcttctttttaaggcattggcaagtgtagttgaattaaaagaacttatctatgcattacaattcgagaagagtttgggaagagatttgccggtctctctaagtagcagcaaaactatatttgtcgatggcaaaagtaatctagacgatttaggacatctcagtatcatcctcggaagacatagtcatatagatacgaaagatccggatgctcatccatcaaatggtgaaggtcaatgttatggtgaacaattagacacaattctttgtacattgcagaaaatctgaaagaatgtattctctacagtactcttttttatatatttagtttggattaaacattagctgcttccgtacaatccaattttaaatgttatgagaaacgaaattggaccctcttggtgcttttggttccaaaccggtaatgccgtaatggattcggtgtaaaggttgggcctactaaagtgtgatacgacaaaaacgagcaaagtttttcaacattctctcaattggtgcgcctttgcacgaacatgttatcaacgaaacattacataaataaaaataaattctttgtcagacagattaaaaaaaaaaaaaaaaaatcagtctcaaggttttttagtggaggcctagagcaaagatttgcagaagacgattatttctatttcagttctacaaattggagaagtgacaataagcaaaatccactttgttcctttttacatttacttaatggcaaaatcagaaaacgacaaaaattctccagagaaacaaacgtggagcacaatg

SEQ ID NO: 9693 - DNA, 3000 bp, Unknown
  misc_feature (1)..( 3000): cDNA_ID_2185300_gDNA_ID_1972172_Annot_ID_179867 3000 nt of promoter + ATG
gttttctctatggaggcgttcgagcatctgcgttttcttgttcagtttggtgataagggatctgatgtatctccattgagccaagctactcctttttttgcaaattctgatccggatatgcccgctgttccagtccccgcttcccaagtgcatgactggcttctgcaaaacatagcttccgctttagaaagcattactgagagaatttctggaaaagagaacggaccttctaacgatcaagatgatgcgatgtcagatgtttgtgctgctccgaacaaggttgcacctagtactagaggcccgtgtttaatcgagggagtctccaagacttcacttgttaagcaagcctccgatctaaggggtagatctgtgaaggtctgactgttccttgttccgtttttcttccagtcatggaatctctgtgcaagcatgtcaactccttgttttgtgtatttttcaggttgtcaattgccatgattctgtaatttatcttttagcaccattgcgatatgcaactgtgcacggatgttctgatactactatagttttgggagctgttggcaaggtatggaaacaatgcttcttccttctttatcttttctgaagatagtcaaagcaacatttaacaagttataatatctgccaacttttattaaaagatgtatcaaacataattccgtatttatttctgcaggcaataaaagttgagcactgtgaaagagttcatgtgattgtagctgccaaacgagtgtgcattgccaattgtcgtgaatgtgtattcttcttgggagtcaatcagcggccacttattgttggtgataaccacaaactgcaggtgaagcttctctttaagattgtggtttaatttacaagttttatgtcatgttgctcttatttacctttctgatattaaggtaaaaaaaattgagtggctagactttttactagatttagtttggttagtttggttaataagccgtttcggacacgtcatcaagtctagtggaaacaaacttggaggggtggctagactgctgctagatacgtttagtcaaatgttttcctcaagaaggttttactggtttttaagagtgcgggcattgtcagatattgcttctagtgattatgggcttctatttttaaagtgctggcatcaatttgactttgtttcaggtcgctccatataatacattttactctcatttggaagagcacatgagggaggtagggcttgagccaacgatcaacaaatgggacaaaccattggccctgggagctgtggatccacatgactccctgtcacatcctgccggtgttgctgatgcacaggctgaatcagctgcttctgtagaccctgaccagttcgtaaactttttggtacattttctatttgggtctaacatttacgtcaataattggtgaatgcttttcagtgtcatgaagcatctaatgacgtgtttttcggtggtatcaatgacaatggcacagatcccaaactggtttagcggcgcggagcttggttcgacgaaagacaatccatttccattgccagatgcttatatggcagctcagcagagaaacgtatgttttaaagttatacttaaccagataaacaaatgcatttgttatttttgtccatatctgatcttgtatctgcaattttttttgtcatcagcttaagaactttgaagaaacaagacgatcgttaaaagaggcgcctctagaagaaaaccggaaacgagagctatcaagtgcactccatgtttatttcaaagactggctttacggtaagaaaactttctctgaatcgatccctactttactttattgatatgcatcattcattaggttttgacttagtctatgtttttgttgcgacagcatctggaaatataaggcaactctactgcctacaaggtgactaataagaataatagaccaagcggaaagtgtcttgttcatgtagagctccttcgatcatatttggcatattgctagtgaagaaaccccaccccaagaccaaaagaaaaaagaaaaaagagaaatcagcctgattcagtgatttgtagtttggaaccaatacttcacaacgtaacttatctgcacagaaatactctcttaaagctttcgtttagattattgttttcttgatttctgcttttctttccttgacatttcaatccatcgtttttgttcccttctctattgaaaatctcatcttcaaatagagcatgatgacttgaattgttataagttataacttgtaagcaaaactgttttgatagatagtcttgtcttggtcaaatagatttaagtggacgcaagagttaggctactaccatggtaggtgcaaatttctgaagaagttttagagctccaaaatttctcatatttgcagaatctcatattcgtagaaacatccaaacaatgcaacataacatgaacatctcaagatacaaaaacagaaggacatgggatggaacagagatatccatgagcgcaggatccagctaataatgagttcttgctactttagtcattgtaatgtgtgctccattgaagaaatctctcttagctctaaagttctgcaccaactgttcaacaccaatgaacacctccaatggcagcaaaagtcagcccgtggcttcccatcatcttcaacgttctgatgagtcctggaagagcaacgtttctttcaatacgagggacgtctttccagttgcaaaaccagtcacagcatctttgaatgtcttcatcatcgctccattttcctcttccaagtatctcatttctgtaggatccatgataatttcttcaaccgataaagcttagtcctttttatgtcaaacgtgatctaacaaagaaaattggcagcaacgacatagtggagaacacagccaaatactattattattgggcctaattaaagcccattaatgattctctttttttttttgttgttctcccttcctctcagcgcgaacgcaagctccgtcggca

SEQ ID NO: 9694 - DNA, 3000 bp, Unknown
  misc_feature (1)..( 3000): cDNA_ID_3043081_gDNA_ID_1972172_Annot_ID_179864 3000 nt of promoter + ATG
caaaaaattccggatattcgaaattccggatatctggaaattttcgaagtaaagcgaatcacaaaatcaagtattcgtttaaaacgaatcgaataacaaatatcataatttttccggatatccgcttcgtgcccatacctaattctgagtataaaatttaatattttttctttatgtaaatacacaaaaagtgaccatgaaccgtacagtttaaaatagtcatttttcgacgaaacaattaccgtgacgttgtctttaaacctctggagaaaagatttacatatttttgataactggttaaacttgtttaacgcattaatcatctcttaagaaaaagagttgtatatatctctcttgtagatgtgataagatatggattacaaactgtcatcttagcaaatttgtcttcttcttttttttttatcatttgtcttcttattacacttatcaaattatagtattagttatgaccgtagtgggtgactcgatcgtggtaaacgtacggtggactgaaatccttcaagtcgaagctatacaaatgcgagcaaagcatgatcaacacgtgtcatttgcaacgactaccaatatcttctttaatttctatcttactctaattataaaattagattattgtccgtgtaaagtagctaatacttttgattaaattatgtcaaaatacttggagcagaagcattctcttaactactcggtggcacatcataaagctagaacgaaaagtaaaagacggccctctcagcaattaaaggtgccacgaccacgagaccgtttcgatactaaatgattatatacaaatactgaaatatagttagtacttgttatttagtttaagaactgaatatacaaatcaacagatcaaacatatgcaatttaactactaatatagtatatatgtccaactgcccaagtcttgtttcataaaataatgaagaaaactttggtgacaaatggaaaaagaacattttgtaaactaattatgtctacccaacattagtcggtagaaagataatcgcatttttgtaacaattgctccgaagtgtggatgatttccattttatacctaataaactaaaataccaaagccacaagaagagttcgctaacgcgtttaaaacttgtcgtctatctatatccatttgatagtatacattttggaattttacccagagttattttcttctgattcacctaaacgaatcatgatggcttttacatagacagaaaataaaaacttgttaaaaagcaaaagcagtgaccatttatttgtttgtttggataaacgaagataaaaaaatcctatatcaagtaaaaaaagcatgcacatgtctagatagataaaacacataaatgtaggaattatgaattcggatcgtgatagagatttagacgtttaaggtaaattttgaaggaaagaaagataaaataaaaatacttatgtagacagacaacaagataaaacgaaatgggaccccctaacttatttatttcgttattgaccagaaaaattaacaaaaaatagtaacggggtccagcaaaaagcaaaacacggcttttgtataaatgtacgtatgcttcacccaaaacactcgaggatgaggaatccaatgacttcttcaattccatagtgtttttcatttcttttgagtggccagatcaattgcacaattatgcaatagtttgtctgctaaaattccatatttagtaagttaataagagggattattataattttgtaaaatttgaccaccgttgaaagattacgcaggaccgtcgtctcccacacgtgtgtaatgtagggtatttcaaaactgagagaagtatgtctttgcgtgtttttatttataaatggaccccacctcgatttggtatgcaacagtgcctctcttttttttgtatttcaccgagttaaaaaaagaaggaaactgtagaaaaaagcagaagaagaagacgacgacaataaaacacaagagagagagcacacacaaatcccttcttcaatgtttatttactctctccagaactttcttttcccagtacttctcctctgctttttattacttgtcttcttctctctttaattttttataaatttaattttgggttgaaaaaaacgaggaagaagagaggagaggagactctttcttttagtatttatttatggaggaggagaggagactgtcttaatcgtttccgggtctcttattctgatccattcttctctcaagatctaaggtttgtcttctttaccttccctttttttttttaatcttcgtctaactgctattccatgtattttgagaattttattgagtagagggttctcttcgttgtaacttactctaatggctattttctccaactcgcatgctctctgcttcttcttctttttttccctttccatggttttattttctctctgtcgttttctgtgtttggtgttgtctctcattgaaatcgagaaacaaaagaaggaaatttgggttttaaaatcttcacccacagcgtaattcgcgttgcttcattgtctttttggtagttctgtttccgagaagaagaaaaaagtatgttttctctcgatgaagttgcttcatgaatatgttttttttttttttggattcatgaatttgtgccgttagattctgccttggagatactaacgaggtttttttttgtttaagatctagaaaaaaaatatacgatgctttattcgagattctttttcaactttattatttctctgcattttcatcacctacccaaaacctgagttttttcacttagctttctttgaaatggttgtgttctctcagatttactgattttgaagtggagaagaaattagttgtctcgacaaaccccactagtaagttttttaactcttttttaagctaatattgaatatgaatgtttaataatcgtttttgtggttttggaactgtgtaggaaactttgtttagtgtgtcttcttaaagcctgcaagatg

SEQ ID NO: 9695 - DNA, 3000 bp, Unknown
  misc_feature (1)..( 3000): cDNA_ID_3043101_gDNA_ID_1972172_Annot_ID_179853 3000 nt of promoter + ATG
caaacaatcttttgatgaaaataaaaatgttatagttgacgatagaaacgagcaatgcttcatataacgtggaacaattgcattacatagacaattgcttgtggacattcgtactctacataaaattagtcgaagttagcaaaattcacctaagatattgaatcgtttgtgatacattgcttcttccttttgggggtttgatattaaatgcttttacaactatatttccattgacaatctacctttataatgattattagctaaaccaacttacaaacaacgttttgacaaccataattgttatgcacttttcaatagtcttaactctgcttacggatgtcgtttgctcagcaatttgggaaatgggaataactcatataaagagatatgtgtgttgttgtgtggatcccatgcatgtcaggtttgtaacagctgtcgaataatgcaagctacatagaaaaataaaacattttcattaaaacacaaaaagaagaaggttagagagagctattcatttattcatcgaaacattttaatatgggaagaagggaattcccacaccactccactacgaagagaggcttcttgggccagtgtcacgtgattaacacgcggatccagacccactcatatataaacgaattatctataatattttctaaacatatttctttattcatcgcacatttttttttttcatgcttcacgtatacatccgaaaaatctttgtggtctcgcccatatctatccttttaaatccatcatgatcccaatgtgatacgttaataagaccatctgcaatggttgtctctattttttttttgtaaatatagaagagaaaatagagatttctatttttactccaataattcttcaaaaatagaaatctctatttgttagaaagaaaaataggggaaaaaaatagagatccatatttttgtttctatatatagagaaaaaaatagagatctctataatggaagtgagaatagagatgagttggagtgtaataaaagcaaaaatagagtgtagagacaaaaatagagatgtgttggagatgccgtaagtattgtgaagataatcctcacagctttctcagcaataaaagaaaatatatctctttaattttttataaaggttttatgtgtgaatattaaaaactttagtctcatatgagttcgagactgtgctcgggaacaaattttataaagataaatcatctaaaattgaactgcgtttataatggcaaagactttgcataattagaatgtttcttattgataaagactttgcatgtttcatactcattttgacatctaattgaataaaaacagaaaagagccgtatagcttcaaaatctttatatttagaataaagtgtatatatgtgaaagagtaacacatatgtacgtaggaattaggttggttaaagaattggccacatcaatatctgagacaccaaagaagtaatggacgttgggagagtaagtaacgttgccaaattggaaatgccaaaaaaagattgtacctttcctctctttgattgagactttactactacaccaaaccttacatcaccaatcgctgaaagtgaaaccgatattttagcacatttatattccacttctacacctttttactaaatttcagttttgagatttacttacatgaagaagaaattggctaatcaaaataatcaagcaacgatgatttgttgcaatgaaatggaaattgggatttgggctcagattattagagcataagtggatttcctgttcggcccattgtgtgaaacaggttattccactggacccatctgttcatctttgtcctcaaattttcctctctatccccaaaacacccttttaaagaagtaacattaattgtttttttttttccttttaataaatttataagatattttgaattaatattattagtacgtctcaatttttattttatttttgccttttatactctaaagtttttaatacttgatgaattttgaatatttttaaaaaataaaaaaaataaaatatttttaaaaaattaatattacgcttggtagatttcatccaacggctgagataattactaaaatggtgttttgagctcaattatttttccatattaaaaagtgtttttggttcttggttatttacaggtcaacaaaataatttgacaccggaatcggagtccgtggaaagtcagaaaacctgatgtaacaccatttatggcattaactactgataataatactatacgaaaatccaattattataccgagaaaaaaagaaaagtggtcagagacagcaggctggtcctgctgaagaataaatctaatctaccgattcgattaaataaatatgtgccgttttctggtacgccctattcaaatcatttttatattatagtatcaaaatacttcaaaaatttactaattacaaaattaaggagtgataaaaaaagtttataatcagagataaaaagtcaccggttaaagcccaaaaggcccaagtaatatccattgggatccagcaaaatatataacaaaagaaccgtaccgtacctacaataaccaaaattggttttctctttcttttgtctaacagtggcctttatttaacagacgcactccactgctaacgttgctttcgtcctactcttcttctggtgtaaaagcttttcttccacacacatttgagaaagaagacgaagaagaagagagaataactattccttcttcgccaagttctctgagctatagaagaaggagggatttcttcagaccgccattgttgcccaccttctctcctttctatttttcgccgcattttactcgcttactgacaaaagtcttctactcaagtctctctctcgctctctttggaggctcaattagggttttgttgtcgtgagatttgattacacaaattgctgaatttggtttcgattattggtgttattgttttcgaagatttccagtgagtttccgtttatg

SEQ ID NO: 9696 - DNA, 3000 bp, Unknown
  misc_feature (1)..( 3000): cDNA_ID_2185273_gDNA_ID_1972172_Annot_ID_179858 3000 nt of promoter + ATG
acgtgcatcatcattcgtctgatggtaaattccacaatgggaaaagagtttatactgattactctatcattggtaagtgtccaataatattgttgctcatcttagtcttatgtcgaccgttgtttgatcagaaaatgacaatggttttttaggtattccgggggatggcagatgtttgtttcgttctgtagctcacggattctgcttacgctctgggaaactagctccaggcgagaagatgcagagagaactcgctgacgaattacgtaccagggtaagtatctatggttaagagtttttatctgtcatactttgccaccaaagatcaaagtaactgttgaattggattcatatggcatcgttagtactttttctctctgcttcagcaaagcctaggtcttaatttcatctatcaaagttcctatctatgtgttatctttgaatgtgataggttgctgatgagtttatccaaagaagacaggaaacagaatggtgagtttttcatgctttcagaccaattttcaacttcattcactggctatggactactcttaaacttatacatcacatttgttgatctcttattaattacgaactactagcagctttttctttgcatctactcattctgatgattctcatcaggttcgtggaaggagatttcgacacctacgtcagacaaattcgggatccacacgtgtggggaggtgaacctgaactcttcatggcttcacacgttctccagtaaataacctcatcctctctgttctttttggttccttaacgttcatgatttcagtttctcatacacaatctagattgaaatctaacaaactccgaaattgtgatcataggatgccaatcacagtgtatatgaaagacgataaagctggaggactgataagtattgcagaatatggtcaagaatacggtaaagacgacccaatccgagtcctataccatggttttggtcattacgatgcccttttgcttcacgagagtaaagcttcgattccaaaatctaaactttagtatacttagttttgcatctttgacttttgtcaggtgttgatgatgtttttgtttactgacacaaccactatctgtatgccttgtagaatgtaacctttttttaccttttactttgaataaaaattttcagtttcaaatgatatgctcgcttcaaaatcttagcttctggatagatacaaagcttattgtagatactcgaaaagagtatatgtggtcagtgtgatatcaggccattgtggttgaaaagttgaataatgatttaaaatggtcccaaacgtgacaaaagttagttctacttcatagaattgagtggattacacactagagacattgtagctaagaaaagtgtaaaaatgtcggactagagaactattggtcacccttgaagtcgttgacgacatcgtatgggatgggagtgatagtctccaaggtcataccttcgaccatgaatcctagtttgggtcctttaggctacctctttgtgctaatggtttctcctctggctttggatgcagccttgagctcatcatttttcttcttcctcagcttgaactccacagcacatcttgactgctgcacatgctccacaagaacatggatcctcttccttatgatcttatcgccaatctgataaacccacctcaagcaaaaactcaaaaatcagtgtagagcagatattgtcatagcttctatagagacaaagaaagaagagtaactaaatctaaactgtgaaagtacaaggttagtgtatttgttctttgatgattataggttgctaatcacagtatatatgaagcacaagaaagttagtatatatcgcaagttagggtgaaaagtaaaggagatcagattaaagtcctatatcccatggttttggtcactacactgcctttttgattcatgttaagcaaaacttcaatccaaaagtaaaggatggatatgcttgttttgaaccggtatgaatgccatccggtacggttgttgttggggacataagtgggatattcacatgcatctttgtaattggtgactttttgtcaggtggtgatatattttttttttttttatgtttctgacacagccaccacaatctatagtatgtcttataaaatgttacctttcaagtaccatataccctttaatttgaataaaatttcaaataatttggtcgtttcaaaatcatagcttgtgtgccacacattgtcaaaatcgtgataatacaaactacaaagttcataatatttgtgggcactcaaaagatatggtcagtgtgatataagtagtgttgttggtcaggccactgtgcttgaaatgaaatgatttttttttttaactgaaaaatgaaaaaaactaaaaacaatacttcaaagatgttctgtttgctgatcaagccaagtaatgttcaccagctaagtttagtaattagtgttgtttaggttcatgtctcctactacaaatgcaaattcaaaatcttgtcgtcagactcggtttccaagtaataaaaagcctaactcgtgctcattttccaacaaaaaccaaaaccaataatcatctacatcaccatcttaacaccaacaaaatttagaattttttaaacaaacaattaaaaagcacagagcaacacacctgcatcagtcaataactaaaaactttggatttatcaatcaaaataactaaactgtcacagagcaacaacacattattttattagtatttcaaatttatatccattaccaaatacatcttccaacactttttaagctcccacaagaattcaaaaaactttcctatgtctacattacaaccacgttgctactttggaaccccatcaccctaattcctctctttcgtcttcttcttccctcgtctctctctctccgcaactcctcgttgcatcactttacattgaaacataatctgtagatattaaacaaagtcttttgcaagattctgattctctagacaaat

SEQ ID NO: 9697 - DNA, 3000 bp, Unknown
  misc_feature (1)..( 3000): cDNA_ID_1021348_gDNA_ID_1972172_Annot_ID_179856 3000 nt of promoter + ATG
cttccattatagagatctctatttttttctctatatatagaaacaaaaatatggatctctatttttttcccctatttttctttctaacaaatagagatttctatttttgaagaattattggagtaaaaatagaaatctctattttctcttctatatttacaaaaaaaaaatagagacaaccattgcagatggtcttattaacgtatcacattgggatcatgatggatttaaaaggatagatatgggcgagaccacaaagatttttcggatgtatacgtgaagcatgaaaaaaaaaaatgtgcgatgaataaagaaatatgtttagaaaatattatagataattcgtttatatatgagtgggtctggatccgcgtgttaatcacgtgacactggcccaagaagcctctcttcgtagtggagtggtgtgggaattcccttcttcccatattaaaatgtttcgatgaataaatgaatagctctctctaaccttcttctttttgtgttttaatgaaaatgttttatttttctatgtagcttgcattattcgacagctgttacaaacctgacatgcatgggatccacacaacaacacacatatctctttatatgagttattcccatttcccaaattgctgagcaaacgacatccgtaagcagagttaagactattgaaaagtgcataacaattatggttgtcaaaacgttgtttgtaagttggtttagctaataatcattataaaggtagattgtcaatggaaatatagttgtaaaagcatttaatatcaaacccccaaaaggaagaagcaatgtatcacaaacgattcaatatcttaggtgaattttgctaacttcgactaattttatgtagagtacgaatgtccacaagcaattgtctatgtaatgcaattgttccacgttatatgaagcattgctcgtttctatcgtcaactataacatttttattttcatcaaaagattgtttggattatttagtcgtataatattttgaaacatatcaaacatcatgaatgcacttcacctcccaaaataagaagtctaagtccagtgctaaatttggttagcgtcgtaatgattataaatcgtcaataacattgaactgtccaagtgtatatatatatatatacttaaatgattacgaaggagacgtctctaaattttctacgttatacgtttacacgtatagaattcgtcgtacatttaaatacacgtacatgtatatacatatttggcacaatgatcgatactgatacagtgttgtgtaatagtaaatagtaaatacgttataggtaatgagtgatgcaagtcgaaacacttctatcgatcattgttcacatgttagtttcgttggattcaaccgattttcttataattcattatatatacattcaacttaaagaatgaaattctactttcaaatgcattaattgtaagatagcattaatttgctcatttgcaaagatactttgttatatgtgtctgattaaaaaaaaaacgaattgatgtcagaaatgagtgccacaaaatctgaacacaaagaaatacaacaaatcgtcattgtttgtaccttaatggtttgtttaagatccattgtaaaacaatacctcatcgtaacaatgtgatcatataacattataagttgatgcgtagacatggattagaaataagagtctcgcatacacacacaatgaaagaaaaattaaaattgataaggtagaagaaaatatagtgatgatgataaagaccggaacatacgaagggcccaggagacaaggacgaaacaaagtgggcccataaaagaagtacccaaaaaaaaggacttgtgataaagttgggcccatcgtcgatgatcccctgtgaatacccgaaggccaaaaatgatgggggggacccactgaccaagttgcacggcgagtgatgtgttctgtttgggtctaaatgggccgcgaaaacgatgggcccaacttattcattgctttgccagagtcctttgtgttgtttgtagattgtagtactaacggcaagctgttcgagactattgccagtttccggaaaagttttctgacacagactaactttttgttgggtttcccattccaagtatcaagatattattagtttaatctggacgaacgtataaataattcatttcgaaaattatcgtatgtagtaaccaaccagttcagtattcttaagtgaaaaaagtacaaaatttcaatacgatcaaatatgtactagtttaaaaaaaaaaaacatttctcatgcaaaataactggcaaacataaaaacgggttgggtaacctgaaacaaaactccagcccaaaatgatgcccgcttatacggcccaataaagctaaagtttgctgcgaacttaaaacggcagcgtttgctaattagattgagtaaagcgatttcacggtgcaacagtcgaagcttctcgacttgttattgtttcgtagcttcgtcggtccaacaagaccttgcgctagaagaacagtttcggctttgttttgttcaattctcacctcaccccggacagagtccaaaacaacggtttatttcttgcgtttgtcgggaaatcagagttgagtataataaacacccttcacgacattctttgcttgtccaccttggtaatcctccattcactctcttcacgtgtttctctcttgataattctctgatacccgtacgcaattttatctttccttcttcgtttcttcgatttcaatacgtttggattgtgtgttggtttcatttttctgatattagaaatttagttgaaacattacctgcaaatttgcagttcttaactagatagcttgctcttttagcgatccttaaggtatattttgttatctagttatgattttgtttactataccattgcctcattggatctatcaatgtaaaagacttggaaattgcgttgttgttctttgtgtaggtatctgaaattgggggactcttattataaaagat

SEQ ID NO: 9698 - DNA, 3000 bp, Unknown
  misc_feature (1)..( 3000): cDNA_ID_2185379_gDNA_ID_1972173_Annot_ID_179907 3000 nt of promoter + ATG
ttcaacaatcgagattgcaaaactttctctccgtttagagttacagagcctctcaagcttccctcagcaactctccccgctagtgcatcgatcaacgttgattttcctgctccacttgcaccgagaacggcgaggatatcgccgtcagaagcctctccggaaacatcatcgagtagagtctttactccgttttgccgtgagaagccaaaccgccggcgaagtgtgacatcgtattgaagattgttaaagtttaagacgtacgggacaggttttacgtacaaggcttcgacatctattatgtgatgtgcaggatcgtcgctttttacgccgtcgccggaatctccttttcggaaactgtcgcagtctttcagcaactcgtcgagggttggtgatccgatgggagtgatatactgagtttccgccgaaacacgtgtcatggcaatctttctaccgctgagtgatagattcatcggacggcgtcgtttagagttttggcttaagaaatcatcaaactgattgtgaagtatatatggtggaatctgaaagttcttagtagtgatattttttatgatgggacgtatagtttcatacgttggttatttataagaaaaatgtaacatgtgttgtaacttctgtaactaaaaaaaaatattagatagaaatttaacgttcgtgtgggtcgtggctagtaataagagtgaacaataattcagaagtttcgttttcgacattaaatgtatgtaaaaagcaaaatactgtgaattacgtggtcattaaattcttgataagtcttaaaagaaaattcaaaattgtatacagtactttgattttggcttctgctctgcaccacgagtcgcatttaaatttgacatatgtgtctcatcaaccaaatttgaagaatgtgttcttgtacatacagcagagaacgtttgttcatagtaaccataacacattctttggttttaatatcatccaaaacagttttctactcctaatcaccaaatcaaatattaacaccgacacgcaaaatgatacaaaatatgtatctccctttattaatatatgtcgaatcaattgatgaaataatccaaaaaaggaaccatgctgaacctagtgaggaatgcgttgacaaatatgcatgtatacagtagatgtggatgtcaaaactactaagagaacgactctctcttcaatgtggctccacaaaacggttggtaatttgggatggccgtagtttccattaattggttaaactccaatttcccaattttgttggattcatgattaatctatcttcgtagaatattggataaattgtgatatcagagattcagtatataactaataataggttagaaattaattcacaaaaaacaactttttcaagtcaactatagtttataaacaaaacaaataaagagagttaactaaaatttgtgtgaagcatgaaggagcccacgaaattatctcaaagtgtgtggctcgtaggatttgacaaccaccatcatcatcgccatcccttactgattacggtacatgatttcatttaatgttaatttcttaattttcttttatttcatgaagtttcattttcgacataaatgtatatttaggaaataaaaaatcgtgattttcgtgattgttttttttttgaatccgtgataaaggcaatttggcttcgtcaactcgatggccatttcattattatccattatcaaagctaagatagttaccaaattttgtttaaagccttgtttcgatgtatatataaaacatgttctctctcgttagtaaccaatcagtttcaaagcataacatgtaaaattaatacttttcttttctttgtcggccacaaacacattcctttgttttggaattatggttcgagtatacacaatcgctaattcaacagttctactcctaagaaacaattcaagttttaacatcaatacacaaagccaaagggaaattccattttttatatacatgttggatgaatgattgacgaaaatatcgaatcgagtcaaacgatcgacaatgaaatgataaacatgtaggaaaggaaccgattgagatatgaaattcgagagattactaaaaataggaggaggaagccggtcctaacatttatgtggcctaaagcatattttaaaaaattatatataaaaaaaacattatgaaaaacaactaaaaatcatctattgttactcgaacatgggggagattgaagatttactaatggagtttagtacaatttcaaaggagacgttaatggctaagttttgtttgaaattgactattggatgacgactattggatgatgtaacccatacaccaaatttgtactagttacttcaaagctgctgtgacatctaccaaattgtgtttaacgcgatgtttctatatcaaacatgtcactcgtaagtcccaagtactctaataagtagtctaagtttaaaaccttatcgcctataacaagacatgtaaattagtactatcatttatttttggtcggcatggttgttacggcaataaatacattttactctgttgtttctgaattatgacagtaccggtattgagattttgggggtcccaaatatgaaaaacagtcaatatttttctacaaatataataaaatttgaattttaatatttcaaccaattattgagagaccgttaaacttacaaaagataccgtcaatggtaaacgagagattactaaaaataggagaaataagtgcaatttcaaaggagacgttaatggcaagtttttctcttccaaaattgactagtcgatgatgttaattgttaatgttgtccacgtgactcatacataaaccaaatactgtatgtactaaataatctacccggtccaaaccggtttggtaaactgaatcaccgatctagagaatcaaccttacttgtgcctttctcgctcaagtagagaagctcgacggtaaacagaaacacttgatacgacgtcgcataacaacgaacg

SEQ ID NO: 9699 - DNA, 3000 bp, Unknown
  misc_feature (1)..( 3000): cDNA_ID_3043144_gDNA_ID_1972173_Annot_ID_179911 3000 nt of promoter + ATG
atcaactaaatatcccaactttggcatgcccatcactgataaagcaactctagacacacagaatcgattaccaccatcttcaaaaccgccatattcatcacaaagctccttaaaacatgaactgatcactgaatgaaacttagtggttttagccaaggctgaaacaagggtcttatgaagaggcaaagaattctccatgaagagtatctccaagtaaaacctaatagcttcccttacagaaactgtctctctctcgcctccttcattctcattggccttggcgagaaactctccgaacgaagcaacaactttcttggcgtgattaacttgcgcgtagattgaattcaacgaaaccaattcttcaatgttggagtaaaacttgggacaagactgagacaaactagattggctcaaagaagcagtgaacgagctggggaacagaacagcactgtaagtataacgatggcgatgctgcagagctcgccacttcgcagacatgtttcagtgagctgaggaaaaacagagaaacaataaaaatttgaactttatttttttcacttgaatgaaaaatagaaaatatggtaaaacagattaaagatcataccgggaaaagcggctaagtgtacgagagagcttattaggaggccggagcaataccagtgagtaacctaagaggcgacgcggcggaggcggaagaaagcacccgccttcaaatctttcaactggagaagatatgggccttacttgtgtttttaatgggcctgatttttagacaaatgagaaaacattttggttgtctaggacgactgcttagttgtgctataatgagttcttgaagccaatatttcagttgatttgagtgtaaatttcagttgcaactggttgcatagctcatcaacacagttcgaacatggtaatgctcttgtctcagattgcttataaaacaattagctaggttcttagactgtcccaaagtgaataataaacaggtgatgatgttaagtggcttttgttcgcagaatcttacgtttttgcagattttattgccgagaccaaatagatcagcccacgagctagttctcgaaagtcaaatagggtaaatctcaaatttataacaaagaacgtgcgtgagagatcatacaatcatgtttgaagaatcaaatctttaattgaaagaaaattcagatatattagagaagactgagggaggactctctgacagtagaaagataattaaactttgatggcatactttctaattggaaagtacatgtctttcttcttctctcgttctgtcttcagcgacgcctatccaatgcagagaaaaagtcatgaagtatggaccaaaacaaagcatgtcactgaattcaaaatacctggtgtttagtgagtctccttctgatggctctagtcttcttgggacggagatcgagtggcaacaacttcttgtttttgtatgcttctctaagagcagacttttgtttctgtgagctcacagtcaacacttgcgcaatcgacttcctcaccactttgctgcaacaacccaaaaacaaaagaccacaattagatccataataacttaatttgaggccttaccaagattgctaaaagtcctaaacaaaaacaatggtcttgcttgttcagagattcaaatagattatataaatatctttcttttcccatttcgcagacatacaagataactaaaaatcccaaaaactgcaacaataaacccaagactaatctaagcctcgattgttttaaacaccaatgttttggcgtctgtgtgcatagggattttgcttaagatgctaaagatatctaaaaacaatgaacataaaagcaaacacaagcaaaaaaaaactgatgactaaagactagaaatcaacaattccataagccaggtaccaataccatgcaaagggcaacacactaatcacatgaatgtatcaaaatgcctaatttgtaaacactggcaccataaacaattcaatataaatgcaattaacaattaaaaaatcaacaatctagtaatctactattctcagtagctttagatcatactcagaaagaggctagtgattccaatatcaagcagctcaaaatattccaacatttgtataataaggctgagagtagagaacaattacatcttagagagcttgttaggagcaccaccagtgaccttagcgacacgtagggaagcaagctctgccttcaattctttcaattgagtagaaagatccgattttgatttatctctcaactcatgaaccttgattctcgctgttcacggatccatttcaacacaacacaataagaaaatggagccaaacataagcaactcaaacaataatggtggaaatgattcaagagtagggacttacccatggcgtcttcgagccctctctgactcagtctctttgcactgctatagtaagacacctgaaaccctaaactgaagaagatgaagagttctaaatgggcctcaatgatataaatgggccttaagtttagtacagacagtgaataatttattctttttagtcatggttaatacgttaatctgactcaccatgtggtatttacaaaattaatcagattgtaatatgtcactttatgtataatgtttttgtaggattgattcaaaattgaccttcgtgtgtcttgcaaatatattttttcttttgccggcaatgtgtcttgcaaattttccatatatatcgaatttggtaatttgaggtcaaatgttatcttcccctaaagaaaagttaggtaattaacaggataaatttattttagtcagctggtcccataagtaaaacgcattaagcggtttttcgttaaaagcttaatctgatttgactctttgatctctccctcttactaatttttttttttggtcagatataaaactctcttatctcgtgatcctcgtcgtctatatattgaaacaaatccagttttctttcttgaaacgtataacaaaaatagaacatc

SEQ ID NO: 9700 - DNA, 3000 bp, Unknown
  misc_feature (1)..( 3000): cDNA_ID_3043140_gDNA_ID_1972173_Annot_ID_179913 3000 nt of promoter + ATG
gaggaagagacaaaccagatgatccagaagattatctcggattcatctaaagaatccgacgactgatcgcgatgttcgatcgttagatttcgaaaaccttatagtttatatatatgaatctcatgaaaacgatttatccctgacgcatgcatgtttataagtaaatcgttttttcatcttagcatcggtccaacaagcaagacagcaaaaaaaggagtgatgacactctttttggtacgttatacgtacgtggtccacataatattgcctctgtttaattatatataatgaaacggacgctagctcatacatggatcgatggtgtggtgttttaattgaatgtatcgtgtgtatatattttcaaataaactatttatttcgggttttggtcaccttaaaaggctttagcactcttggaaattttgtatcatggtttccatatgcttgcaagtttcggaacccaaaagtccagattttagccagatcagtaaaaacgttgatcagctgttttttggtccatgatcggctgttttttttttggggaacgtctatgcagccatttttgtttttaatagaaatttcttcaaattgaaaatttacattaattaaacaaaaacaataacatggagaaaaagttcttgaacaatatccaattaatttgcgattaagtggtcaaaatgtgtccgatcctatgatcagcccataacttgaacgttgttaatttgttataccttgtgcagaaatgtctttttgggtcaaagttcataagaaaactctcacttaacatgcgttgttaagtgagtgactactcacaagagtagtaacacgtttcaatttccagcccacgtaaatctagactacatggctcctatgtaataattctttctttttgttggtaagtaaacaaaaaattataaaaaggatttattcttacgttaacttgatataaaaatggaatttcgagagtatatagtatatacaaacgaataaatagaccggttgaaatgcaaaaggtatgtatttgccaaaaaacagagagttttgaatataaagaattaaagacaaagattgtcatttaactttctttttttcagtacagtaaacgtgcacaacacaatatagaccacacattaaacttataaagaagaacatacaaacgaaacagaggaattttctttcaacaaatgccataactcttcaagctttgtagtatgtaagataaacactgaaatggagaatggtatcatgaccatcagtaacatgttggtcttcctggttgtgtagagtctccacgacagcataccctttagcatgctcgaatctcccagttccacccacaacagcgatatgcgacgcatgagaagcggttcggtgaaccccaaagaagctgatggcatcatcaagggtgtcatgatgatcatgatcttcgtggagtaacactgtcaacgaaagggtctggctagttccatccaaagagctagcgagataaaacccttgggctctcccaatgatcgcagagcccaactcatggccctcggtgagctcatcgtcaaccacggtgatagagccaaacataagctgttggagggcagctatgggagggagctgacccgtggttacaaagggaaggttgttggagctaagggatccttgagagttaccgttactgttttggattacggtgttggcttgagagccactaagtcctgttaggagtggagctgtgtttggattgattaagttgttgatgctgtttgcgttcacaagcggcactgcgttatctactgggaaaatgttgttgctggatttagaaaacggtattccattcacctctgtttgtgctactatccctgtaaccacacgtgctgatgggtgtgacccgcctagcacgtcatgcataaagaactctaggattggctcgggtcctcccgtggcgggtcctgggagaggaattggtgttggagttgttgttacggcttgtggactatcatcttcctcttccggtacctgggggactaattgtggctgagtttgaacctcatcgagaagtcgagcggattggacattggaagctatcaagagaaagagaaagattgtaaggctaagagctttggccattgttctttctttttgttttggttttaggtttgtgtttattttctaaggctaatgggtttgtttatataggaagcgcggaggatgatgagatcatggagtggagttgttgttgttgttattgtcgttgcattctcatactctagttgattaatggatttaactaaacctctaggttttattcattttaatttgctacttactcctcttgcttcttctagccttcttgatttctttgacctatttttgtttctttctatctattcgttagaaattagaataaatcatgttaagaaattaaatggaagagagatcttaattagccatgttaatttcatacataagtaacataattatatttgcaatattaaccaatcacataattatgcaataccactctatttttgtgacttcacaaatttaatgagagaaaatgttgtcattctatagtttatctttatattaagttcaatttcttgtttccaccaaaaaaaaaagttcaatttcttgtaatcaatttttgttaatgaaaaatgataatcggagacaaaaccagtcttggactcttgtcattatttgggcttaaatctaaaataagatgggccaatattgctatattagatccaaaagttaggcccatgattgaatcaccgcctagcagaggaacaccacttccgtcgtagagctttggagctatggcggtaattcattatatagggtttattctttccgttcctcaccaaaatctgccaaatccgaagttgcagatgcgctaggagttcacttaaactcggagccaaaaccatcctcaagtccttccagtttcggggattctcctaaatcctagccgttgctggtggttgtagcttgctagtttgagagatg

SEQ ID NO: 9701 - DNA, 3000 bp, Unknown
  misc_feature (1)..( 3000): cDNA_ID_3043120_gDNA_ID_1972173_Annot_ID_179923 3000 nt of promoter + ATG
tatattttgaacacggccggattggttgtcttatgattaagtgaatgctttagatctggtgacgattggtatatgagatatatagtagaatgatagaacatcagaaatactataagtcaccatatttttaaaaaataaatgctatagaatttttgttttggtaattgttataactctacaaagttatgtgttatagagttttactagtttcatcgttatcatgtgtatagtataacacaacaaaagaaattttaaatatctgaaaacataaaaatttaataaaatgatgtgagtataagaaaaaaagaaagaaagaaacacgtaaaaaataaaaatcatcatacatataacaattttcaaaagatcaatgttactttaattagtcttttttcttatgtttcatgcaaatgcaatagtattacttttctttaatctaagattatgtgttgcttttaagcaagaactattcaaagagtcaaagacatgcatgtaaactttagagaacgggatctttcatcaatcttatttttttcccttttttttttacaacgaacgataggtagtaagcatgaatctggttcaaagtttggatcagtgtgggcataatcctggttcgctaaaaagaatcaatataatatatgttgagcgtaagagaagaaagctcatagttctgtgtagaaaaaacgtggagattggagagaaattactaagagagcgaagagaagagtaaacctagaagatacaaaagacgctatcaaaagattgttttatgtgtttatgaaacattcacttaggccagtataaatattaaatgtcattttgagaaagaaaaaaaaatggtgtcattttgaggatataaatattttctcaacaagatgttttagactttcaacataacgatcatttaaaactacataatttatctcttcgttaaaaacttaacattaacaaaaagttaaattcgacaagaagagtttattcaataagtatactgtatgtgtttattttattcacatgaaaagtgtcaaacaacacttgggatacatatttcatgcctaaaaatcgtataacaacatttaaggtaatcagtaaatttgatgcctaaactaaaatatgtgaccattttgaccaatgagcattttttggaaataaaactactgcatacgacctggtcaaacacatgaactgccactgcttttaaaactacctttttaaacttttgacgtccatttttatttactaattattatgttaatcaaaccactaacattatgattcgaaatttcgagtgatgattgttagaagtgatgtgaatgatgcggtataaaacaaattgtgatatatattcactcatatatatcaaaatcaaaatagcttatcgttccaaaacatgattgataaaatgtaattactattcaaaacttaaagccagtagttaaaataaaacaaaataaatagtatatgtttcatattaatgccaaaccaatattttgttttgatgaggaaaagtctttttttttttttctttttttttctcatagttaaaagacataaaaaaaattaatattacaaacaagacaaaaaaaaagaataaataaaacaacaatcattactgtcaaatcaattatcagagggaaaagttattaagaaatgtcaaccaatgagtatcattatcatcatgcttttttagacccttctttttaattcatcaagatttagtcttgtttataaatttgaagtaaaattctaaatgaatcaattctacaattttttccctacattattgtaacgataaaatttaagatcaacaattacttcgttaattttttttctgataaaaatatttgatatctttctgattatgatatattagcattgtttttgtattgtatgtatggtaattaattttagttcaaaagaataataaatggtttgattagcatgaatttaataaaaaaataagactgaataaacataggtaataaactttgtttcttttggtaaatgtaaaattagaaaaaatcataatcccaaggtaattactataattacattcaatgtcagaattaaacgtagtgaataaaaaccgtaaaacatgagaaaaacaagaatttattatctttgacaagcaataaatgaaatgctgacaaaaaattggtttcaaagtttcaacgcgtttcttataataagaattcaatttcgtgcagctaatcaggagataattatcataattaaattaatcgttactactttataatactcccaaaataatcgaaaacgaatttattttattgtaatttgtttaataataaagaattactgtttcctcccacttcccatctctcttttccttttgtgttcttcttcttctccgctttgtttccccaatctctctcttctctctctctgaagaaaaataaataaaagatctaactttgacggctctcttaatcttactcactccgtaagttccaaatctctctcctttactctcatatctatatcgtccgaacaaaacccaggagaattgcttcaccccctttttgggtttttaatcattttctcagattctcagtttctgtttccgtcttctagattctgggttcagtttctgttttgctcttattgaattttcttattcattttgtgtttcggagttattcatggtagctgaatttgttaattctgatgttgttttgcgttttcttcttttctagtttggctatgtcgtctttgatctgatgctgggttattctctttccctctgttttggtttcttttagggttttaagtcggaatagactgatgggagcttgatggttattgttagatcagatgtggatttaaagccttcgctgaactaacaagtctatggaagaagcaaagacccttgttttacactgtatgttgtgaggaatttgtctgattttgggtgataaaggtgaagtctttgagtttgtaattttgagataagattggatggtgggaagagaggatgcg

SEQ ID NO: 9702 - DNA, 3000 bp, Unknown
  misc_feature (1)..( 3000): cDNA_ID_2185443_gDNA_ID_1972173_Annot_ID_179927 3000 nt of promoter + ATG
tttgtattttgttttttttttgggggagaaaagcaggtgttgaagctattggagccatggtgtgaacttaaagacaaagtggttcttgtgacaggagcttcctctggtattggaagagagatctgtcttgatcttgccaaagctggttgccaggttattgcagcagctcgtcgtgttgatcgactcaactctctctgctctgaaatcaacagcttcagttcaactggaatccaagccgcagctcttgagttagacgtttcatcagacgcagccaccattcaaaaagcggtcagggaagcttgggacatctttggaaagatcgatgcattgatcaacaatgctggaatcagaggcaatgtcaagtcgagtttggatttgtcagaggacgaatgggacaacgtcttcaagaccaacttaaagggtccttggttagtatccaaacatgtttgtatgttaatgcgtgacgctaaacgaggtggctcggtgataaacatctcatcgatcgccgggatccggggtatgttgcccggtggacttgcttatgcttgttccaaaggcggtgttgacaccatgtcaaggatgatggcacttgagttaggtgttcataagatcagagtgaactcgatcgcaccggggcttttcaagtcagagatcacacaaggtcttatgcaaaaggagtggctcaagaatgttaccgagaggactgtgccgttaaaggtgcaacagaccgttgatccagggcttacttctctggttcgctatctcattcatgactcttctcaatatatatccgggaatacatacattgttgattccggtgctacattgcccggtgtgcctatcttttcatctctctgaaaatcgaaccttataatatcttatcttgtgcaataataagtgaatacatttactcattctctactactttttaagatttacatacatcgtcaaaaatttgcaataacaaaccagcagagacacaaaaagaaaggacagaaaaataaacagcctcctgattgtgatgctttggttgtggctaacaaaatcgggatcatctaatttgatcatgcgtcactcggtgatttcacttttgggattgaaacagacttctggtttttctccttccatagtcttcagttttgctagagactatcatctctttgttatgctctatctttgaatttcttgaagtcaaacaagacagctctatcggatgtactatggaatgtacgaccagagtccataacccattctttgcatgtgctttgagtgctcacagttaacaccaaaggttgcggaggctcagttgcaatattagccaattctgcatgtttctttctttgagggcattcccttttccagtgatcttcctttccacagataaaacaacttgtgttgttacttggccttgactggaatttcccatttccacttgaacttcctgtacatggccttttatttcccttattgtttgatctgcccttaaaatcacccaataatgcttctgaatctggttttgacacgttcagcaatcccttttctttcaactcaatttctttagagtatgctgaacttatgactgcatttagtgtcagggtatccttcccactcccatacttgagtgtatcaactagtgaatcatattgtggtggtaagccagccatgaattgtagagcctggtcttcatcactagtgttgatgtctaaacttgctagatctgcaactagcttgagagaagtatccagattttcttcaatgcttttgttctccaccatcttgaagcttgtgaacttgtgcttcaaatagatcatgttggctaaggtctttgtctggtagtttccttcataaccttccttagaatcagatcgcttagactcatgcttatcagactcttagctattttatctttctctgctttctttggatctaccctaggttcgcatccttcctcttgacttcccgggtctgatggtgtagcatcttcaaccaagacagattctaagcctagaatctccaactgacatagcatcttatgcttccacaacccaaagtctcctttgccatcaaacttctcaatatctcaaatcttgcatttgttggttccatagctagatgtcttccttacaatcaaacctggattgctctgataccacttgtagagaaaactgagaataataatagcttgtaaaagaaacaaacacaagaatttgataaccgagttcacggctaaccgctacgtctcggggaaggactcttatttccaagcttcactatatgatcatagaggttacacacaccactaacttgtgatgtccttggttctttttcagattttacacacaagaagaacaagattcaagaacaacaaagaggaagaagaaagcttgcttcggaagctctttatctatcttctcttgaactctctttagcttgtcttgtcacacaactaccaccacctctctttgtacgttgtaatagaaatgttatataggtgatatgtgatggaccacttttgttattctctcttcatgccattttcgtcaggcccactaaggcccaaaggatgtgtttagtcaaacccaaataacaaacttggtccccaaacaaaagaaaaaataattatatacagtatttgtttagattcttcacaagtactaaagtaaagaatcaataaaccaatcaatccgcgagaaactcatggttatataatatttttgcttgaagtattcatagttgtcaaaagaataaaagtaaataaataatactaaggataacaataaataaaaattatcaaacctaaagaatcagcggagacattggcacgttaaattgtctatttggtgatgaagaagagtgttgactaggatagaagaacctacgggttgggcataaacccgccctttgttatgtattatatatctaagttctatttgtacatcttagttattttatgggcttcttcttctcctccatcgagcacacacatagaaaacaaacaat

SEQ ID NO: 9703 - DNA, 3000 bp, Unknown
  misc_feature (1)..( 3000): cDNA_ID_2990233_gDNA_ID_1972173_Annot_ID_179929 3000 nt of promoter + ATG
cggattggtaacaggcataattggattgcttatcttctaattgttatagtccgcaataggcatatatttgatctactctttaatctattggattctcagtcttttctaatgtcaagaatcttcgtttgttaccttttatcactctgtttgtgccgacatttttaagatcatggtcggagaacaacatatgaagagaagagagaattggagcgtcaagaaataataatccaatatattaagatacttttggtttttagactttagagcattctatgaaagatcataaaacaatacagaataaaatttatggttttctaaaagaggaccaaaactccactcttctaccaagtggtccacgtccttccatattcctccaatgattcaaatgtaaagtttaagaacaaaatgtataagctgtctttgtagagcttgtgggatcatcagccttgtttttgcagcttgttagggcaagctgaagaaagatgacctttttctccgcactcgtaacagtttctctttttgatcttaccagtgctaaccgcagatgttaagcttgcatcattagctccatttgtcacatcaatggatatcggaacagtagcatagctctcatccatgaacgaaccaccattgttttcagtgtctcttgttttcttttgaagactatagcttgttacctgagtcggtcctgcctcaacagtttggtgatccagcgttgagtttgtgtgagaagtgttttgaagctttatgggacaggctgtagaaagatgacccttttctccacactcataacagttcctccttttgaccttaccagtgccaacagcagatgctgagtatcctccattataagtttcatttgtagaagcgtatgtctcattcatgtagtaagaatcaccactattctttggaagaccatagctttgcatagccggtctaccatcaacagtctcttgacccagctttgagtttgcctgatcatcagccttttgaagctttatgggacaggctgtagaaagatgacccttttctccacactcataacagaccctccttttgaccttactgctgctaaccgtagttgcaaagtagtttccgtcatcaacttcgctacgcccagctaaagccggtactggatcagcagcagcataagtatcttccatgttgtacgaaccagcattgttcgtttcaccaggtgtatgatcagtagctggtctgtctttaagtgcacaacatatcttgacaggtcttccgcaaataacctgctgatccagcttcagcgcaatcgccacagacacactatccttgaaatccacatgcgcataccctttaaactctcctgtttctttgtttttacccaaccgcacagagtttattacgcagtcagagaagagcttccgtatgtcacgctctgttgtgtcccaggctaaattcccaatgtataccctgttatagccatccaccatttctggagcgaaaccagaagatgttttccttcttggaatggaaggggtggtggttttcacgtattgctggattgtcaaatatcgatcacccctagtagtaaagtaaagaaaaattactcaaccaatatcaaatgtgaccaaggaaagtcttaaaatatttgagtcacagctatagattacttacatagcagctctatcaaaagccaaagcacgttttgcgccatcttcagtctgtataaatgaaacgaaaaaaaatatcaacacagtgtatgacacagtccatttaaccagtctctaatctccagccaccaaggcaaaaaactaactctaaagtctaatcccaaaacaacaacgatctatgttcttacaaaaacaaaaggctgcatcataacacagcaacgttacatggaaaaacttacgtcaaaagtgatgaaggcaataccactgaaagccccatcttcaggacgcatcttgcaatcaactttaatgatgactccacagcttctaaagtagctacgaatctcatcttctgtactctgataaggaatacccccaacatataacttgttaggaacaaccccatcttcttctttactggaaaacaaaacaccaagtcgattaatttacataaaattgaaactaacagagctttaaaatgaagtcggttaaaacaaacttacttgtctgtattaacttcaatctcttctaccttcaccttctcttctacattgccttcctcagccttctttggcgttttgtttacctttctcttcttcttcttcttcttatttttcttcttctggggtttttgctcttccttagttccttcatctccttctaactcgtcgacttccacagcatcgtctctctttctcttctttttaatcttcgtatcagtcttctcgcttgacccaccattcccaacttcattctctctgatttcgtcgtcttctctagcgaaagtttcgcaatttcttcgtttctctctcttcgacaatctgggtttgtggctagatgaatcaaggagcaatttcagagactgagattgtggatttgtttcggatacagagacagatagtgattcagccaaatcttgtcgaatcctctgcttcagcttcttgttcgacagcaccatcttcttcactgagaccgccaaaaacaaaaaacataaaaccctaattggatgattttgataccacctacatatgggccgggcttcagatttattatgggcttttcataaaacgtctactactgtaacaaagagccccaaaatgtttaactgttcatcctaatttgtatatttatgtaaaacacccattgaaactgtgcgttttggttacatttttgttatcttgcaaagatttattattttgaagggccatttttgcaaattagtgttttttttgtctctctgacatttttaaaaggtcaggaagtttcaaaagtggataaactgagaaagaagtgaatccataagagaagacaacaaaagatctatctctataccacatattacactttttctccaatg

SEQ ID NO: 9704 - DNA, 3000 bp, Unknown
  misc_feature (1)..( 3000): cDNA_ID_2185447_gDNA_ID_1972173_Annot_ID_179930 3000 nt of promoter + ATG
catacttggacctgatcacagcagtctgcctttctccagtcagtatccagcaagacacctctattatcagaaacatttagtaactgttaagcatcatcatttcagttgtggaaaaaagatgcatacaataagcgaaaaacaaacttaccaatccaaccagaaatgaaaacacctccagcaatgtacacgatcgtcaacgaaagctgcacaaaaatgagagcataagtaacttaaaagaggaacacatgattggagtacaaaaccagaaatgccaattccgagcaaaatcatgagttgtcagaagtttcactaacctggacgagtcggtcaaactggtgttcagatctctgctgactagaatcattagagaaagcaagaacatcaacaatcttggcgaagtaatgcaagtagacaataagcgcagtaccatgagcagcagcagcaacagagccaacaatcataagcacccaatcaaagcggtcagcgcaagcgaagagctgagagaaaggaacagcagcaggaggtggttcaagctcatcttgatcatccatctcttcatcagcctccgctagcgccgccgccgtgcccgtgccaccaccagactcagcaccagggtcgagataaggagaaggagactcaggtggctcggagacttcagagactggagttaatggttgcatatgaggcggagaccatccgaataaacctctagagatcatcatcttcggaggagcaccacacaaaacaccttctgtgttgaaaaccctagattttcagatttttagggattttgattttgtttttttcttcttctaaaattagctggatctgttgctaagtttgtagagaggaagaagaagaagaagaatcgtagaagaagaaataattttcttccgccttttttttcttttaattattttccaataattttggtgagattttttataataatttgtgttgccgttgcagtgtactgtgccgtcacctaccgtaacacaagagctggttctgctaacggacacagcgacttcgagtttgcatattttttatatattactggtgagctaattcttgacagagcatttcgattactgactttctcgtagctgtaacatgacactttataagccctttctggttagtagctgaagctacaaaactatgactagagatcaaattgaccaaacaagatgaagttaggttaaaagcagagagagaggtaaggaggcaagtcaagagttattgaatctctcttacaggaaaagaatattgttaagggaaagagagaagaagaatggacaaaaatacaagaaatgggcaaaacaagagacaaccaaagcaaacttgattacagtattttcaaacagtgatcttgaaggaatctaccacagtgtgaagcctatctttcatcttctcccacctcctttcattcgctcccgtcgtcagtgtgtagaagtttcctgcacagcaaaacgccatttctcgatgagcattggatactgcagtcagtgtgtattagatatgaatgtgagaattcatggggatgtatataccgttgaaaaccgtgatggtacccagagcatggcgagtgtagtttctagcttgaacagtgaactcaaactgataataagtcttcccatcgacatcatgctgcagcactcgaaacaaaaaccaaacaatcaaaaccaccctctctctctctcttattattacattcaagagcctccactcaattagtcgaaaaaagctatcaaaaggagcaaacctctgatgcatcaataagggttgttttctgatttggaggtgccaaaactttctttatcagtgtttcagctatctgtaaccaaaccaagttcaatcattaaagagagtgaaaaacaacaaccaaacaaaagagaagaacattacctgcttgggagggccaaattctttaatagtctgtttgctagttgggaccaaattcacactaacactttctaaaggctcaatcacatctttgtataccttatcttgaccttcaatcacaacttcctaaacacacattcaaaacaatgagacaagacattgtaattgttaaaaagtgggcaaagaagatcacaaaattgatacctgccaaccaaatggatagagaaacgcataagcatctttattgtcagagacagcaaggaatccttttttgctttctgcagcaactgagccatatcaaacatttcaaaattacacacaaaaattgcaaaattagtgacaaacaaaaagggtacttacatgataatggagctctactaagcaatgagatccaaggagcaacaacaccaaatgttacaatcagacgtctctgacatttatctgaaaaaaacgaaataaaaacacaaactttataaaagggtttgaagaaagattcgttttttcctcagagaagcagaatatagagagtaatttgaatcggaaacacgtaagaaaagacaaaccttgaagatgagaagaagaagacgaggaatggtgctctgcttttacaagaaatgaaagtcctttcttagaggaaggaatcacaccaaccttagaaatggagattggagaagaaggtgaaagcttcagagaagccattggagaaaaagtgtaatatgtggtatagagatagatcttttgttgtcttctcttatggattcacttctttctcagtttatccacttttgaaacttcctgaccttttaaaaatgtcagagagacaaaaaaaacactaatttgcaaaaatggcccttcaaaataataaatctttgcaagataacaaaaatgtaaccaaaacgcacagtttcaatgggtgttttacataaatatacaaattaggatgaacagttaaacattttggggctctttgttacagtagtagacgttttatgaaaagcccataataaatctgaagcccggcccatatgtaggtggtatcaaaatcatccaattagggttttatgttttttgtttttggcggtctcagtgaagaag

SEQ ID NO: 9705 - DNA, 3000 bp, Unknown
  misc_feature (1)..( 3000): cDNA_ID_2994155_gDNA_ID_1972173_Annot_ID_179928 3000 nt of promoter + ATG
gtcaaaagtgatgaaggcaataccactgaaagccccatcttcaggacgcatcttgcaatcaactttaatgatgactccacagcttctaaagtagctacgaatctcatcttctgtactctgataaggaatacccccaacatataacttgttaggaacaaccccatcttcttctttactggaaaacaaaacaccaagtcgattaatttacataaaattgaaactaacagagctttaaaatgaagtcggttaaaacaaacttacttgtctgtattaacttcaatctcttctaccttcaccttctcttctacattgccttcctcagccttctttggcgttttgtttacctttctcttcttcttcttcttcttatttttcttcttctggggtttttgctcttccttagttccttcatctccttctaactcgtcgacttccacagcatcgtctctctttctcttctttttaatcttcgtatcagtcttctcgcttgacccaccattcccaacttcattctctctgatttcgtcgtcttctctagcgaaagtttcgcaatttcttcgtttctctctcttcgacaatctgggtttgtggctagatgaatcaaggagcaatttcagagactgagattgtggatttgtttcggatacagagacagatagtgattcagccaaatcttgtcgaatcctctgcttcagcttcttgttcgacagcaccatcttcttcactgagaccgccaaaaacaaaaaacataaaaccctaattggatgattttgataccacctacatatgggccgggcttcagatttattatgggcttttcataaaacgtctactactgtaacaaagagccccaaaatgtttaactgttcatcctaatttgtatatttatgtaaaacacccattgaaactgtgcgttttggttacatttttgttatcttgcaaagatttattattttgaagggccatttttgcaaattagtgttttttttgtctctctgacatttttaaaaggtcaggaagtttcaaaagtggataaactgagaaagaagtgaatccataagagaagacaacaaaagatctatctctataccacatattacactttttctccaatggcttctctgaagctttcaccttcttctccaatctccatttctaaggttggtgtgattccttcctctaagaaaggactttcatttcttgtaaaagcagagcaccattcctcgtcttcttcttctcatcttcaaggtttgtcttttcttacgtgtttccgattcaaattactctctatattctgcttctctgaggaaaaaacgaatctttcttcaaacccttttataaagtttgtgtttttatttcgtttttttcagataaatgtcagagacgtctgattgtaacatttggtgttgttgctccttggatctcattgcttagtagagctccattatcatgtaagtaccctttttgtttgtcactaattttgcaatttttgtgtgtaattttgaaatgtttgatatggctcagttgctgcagaaagcaaaaaaggattccttgctgtctctgacaataaagatgcttatgcgtttctctatccatttggttggcaggtatcaattttgtgatcttctttgcccactttttaacaattacaatgtcttgtctcattgttttgaatgtgtgtttaggaagttgtgattgaaggtcaagataaggtatacaaagatgtgattgagcctttagaaagtgttagtgtgaatttggtcccaactagcaaacagactattaaagaatttggccctcccaagcaggtaatgttcttctcttttgtttggttgttgtttttcactctctttaatgattgaacttggtttggttacagatagctgaaacactgataaagaaagttttggcacctccaaatcagaaaacaacccttattgatgcatcagaggtttgctccttttgatagcttttttcgactaattgagtggaggctcttgaatgtaataataagagagagagagagggtggttttgattgtttggtttttgtttcgagtgctgcagcatgatgtcgatgggaagacttattatcagtttgagttcactgttcaagctagaaactacactcgccatgctctgggtaccatcacggttttcaacggtatatacatccccatgaattctcacattcatatctaatacacactgactgcagtatccaatgctcatcgagaaatggcgttttgctgtgcaggaaacttctacacactgacgacgggagcgaatgaaaggaggtgggagaagatgaaagataggcttcacactgtggtagattccttcaagatcactgtttgaaaatactgtaatcaagtttgctttggttgtctcttgttttgcccatttcttgtatttttgtccattcttcttctctctttcccttaacaatattcttttcctgtaagagagattcaataactcttgacttgcctccttacctctctctctgcttttaacctaacttcatcttgtttggtcaatttgatctctagtcatagttttgtagcttcagctactaaccagaaagggcttataaagtgtcatgttacagctacgagaaagtcagtaatcgaaatgctctgtcaagaattagctcaccagtaatatataaaaaatatgcaaactcgaagtcgctgtgtccgttagcagaaccagctcttgtgttacggtaggtgacggcacagtacactgcaacggcaacacaaattattataaaaaatctcaccaaaattattggaaaataattaaaagaaaaaaaaggcggaagaaaattatttcttcttctacgattcttcttcttcttcttcctctctacaaacttagcaacagatccagctaattttagaagaagaaaaaaacaaaatcaaaatccctaaaaatctgaaaatctagggttttcaacacagaaggtgttttgtgtggtgctcctccgaagatgatg

SEQ ID NO: 9706 - DNA, 3000 bp, Unknown
  misc_feature (1)..( 3000): cDNA_ID_2185436_gDNA_ID_1972173_Annot_ID_179925 3000 nt of promoter + ATG
cgaatgaccggtttttaccaaattctcatagaccatatttgattcttttgatttacttctggtgcaggactctctgtgcttatggaagttgatgttgggggaaacaactctcttgtacagtggggaaaaaacttcttcttcttctttctatcacatgaaaatcctcaagggccattattagtatgatcagattataaaattgtaaggttaggggctttatgaggattttgatggacttgttacaatgtttacatatacactcagcagcacaatagatttttgttaaacttacatgttattcaagtaaaagtactatgtagatgttgaagtctaattgaagaattagttaatgatagtcttaaacacttgattcacttgtcatccaattttggttttgcgcatagtttctcttcttttatttcctctctaaaacaccaaaaccaaacaaaatgtcattttccaatccttaaggtttcattcattttagtgattttttgggtacaaaattgagcaatgtctagtgacgtttttactcaaactcataaaccaacattctaatcagaatcacgatttggactttggtttgggaccttctttctacaccaactgggcttgtaatcagttggtagagaaagcccaattatatattatttaaggcccaaaataaatcgatctagggtttacggttttgtttcattttcacttcccttagaataaataaaaaccaccaagcaacttggatctactctagggtttctgtttcgccgctcaggttcgtcaatctctcgatatcctttctctaccttctcctcagctttctgagtattgaatgttgttgttaactgtctctgaatacgattgattttgtgtcatttttctcgtgcttcgtatttgttgattgattgatttacatgtcatgatttgaaatctttgtattgctaattgctattgctctgtttactgattttcttttctggggttatcaggtttcgtgaaaagaatctatcttgagcaatgtctccagctaaaggtacgcctttttttctttcattgttatctgatttgattctacatcgtcttctatttctcttttgcgtgtaattactttgtttatcattattcaatactgtgactgaacttactactgtatacagctttctgaaatgtatgattcttatctggctctgtaaagttcgtattttttatattctcttgctcgtacctactctgttatggattcatctgattatgtgcttgtttgtctgttatttgccaatgatcaaactttccttgaatgagatttgttaccagtagtgtaaatggtttaatgttccattatttttgcagttgatgtcaccaagaaagccgaccctaaggctaaggctttgaaagctgcgaaagcagtgaaatctggccaaatcgttaaaaagcctgcgaagaagatcaggacaaaggttactttccacaggccaaagacattgaccgttcctagaaagcctaagtacccaaagatcagtgctactccaaggaacaaattggatcattaccagatcctcaagtaccctctcactactgaatctgccatgaaaaagattgaagacaacaacaccttagtcttcattgttgacatccgtgctgacaagaaaaagatcaaagatgctgtcaagaagatgtatgacattcagaccaagaaagtcaacaccctcattaggtaaacactaaaacttcactgagatatgggtttatgtaaacatggagtgatgagtgtatgtttgtatgcaggcccgatggaacaaagaaggcgtatgtgaggttgactcctgattatgatgctttggatgtggctaacaaaatcgggatcatctaatctgatcattgtcgctctgtgattttactttttctggtttttctcttccatagtctcagttttgctagagaagttaagatattactatcaccatctctttgttatgcttttatctttggattcaaaaagattatatgtttggtatttgttgatgcgtcatagtttctattcagatcgtgttccaattcttaatgctacctctctaatcccggtttaacctggttatatcgtaccttcgtaaataactaataagtaatacccaacccaaaattcaagtggtccattggacccatctctttgtttagatgctttcaaagtacagaacaagttcactgtggtctgtggagcccaatctaatcaacaaaacaatcgatccgcgagaaactcgtggttgtaaaaaacttttactaaatgaattattgttgcttgttgccggaaaacgacagaaaacgtcggtatcattgaactaacgtcggtattattgaaccattgattgatagttggaaaaaaaagaaaaaaaaaagaaatcatatattccttttgttcctttttgtttgattttctaaaaaaagatatatatattaaaaaaatatattaaagttgattttaaatgtattattttttttgtgttttacaattttctataattttaaaccaataatattcaattatttttattaaagtttataatttatcagtaataactaataaatattgtataaaaaaatctaaaaaatcaatcttcttgaaacaaatatttttcttagaaaatcaaataaaaaagaacagatggagtatctatatattaataaagataacaataaataaaatcatcaaacctaaattgtttcccacgaatcagtttcgagacattggcacgttaaattgtcgatctggtaatgaagtaggctttacatgtagtagactaaagtgttaattaggacctagaccctacagatttgggcataaaccgtcctttgttatgggacgtgttctacttggtatctctagaaccgcggtctttggcagatggatcagattatatctttttgacacttgtatttatatatgttatatgttattggcttctccttccccattggccatcgaacacaccacacagagaaaacaat

SEQ ID NO: 9707 - DNA, 3000 bp, Unknown
  misc_feature (1)..( 3000): cDNA_ID_2185411_gDNA_ID_1972173_Annot_ID_179916 3000 nt of promoter + ATG
tgcaccacctttgtctctttttgcactgtctcgtctttctgctgtctcgtcttctgtgatattatttcgaacctcttaatgacttactagtattaatcagaaaccccaccaaagtttcattcttgagaaaaatcgaacgatagacattcaatatgggtagggtaatcaataattcttgatggctttgtcaatttggacaaaatgtgatccatgaataatatatagtctctttgctaaattatgaatatagttgcaagagaataaccataaattacaccagtatctaatagctgatttagaaaaaagaaagaaaataactatatgaagtcatgtaagactcagcttccacgaccacaagataccaagcataataaccatggaaagtagttatgatgtgccttaatttatttggtagaaaagttaaaaactgaaagttcatatttaactgaatgcgctttagaagtaaaatccggtatactatacgtatatgattatctctaagccaaaagaatataagtatgaacacagagaaaatagaacaatgaacagacagaagaaaatagagtaaactccgtagtaatttttatgtaatatatacgttactcgttacaatacatacactattttcttgtaacacataaaccgttttcaaattccttataaatgaaatatacgctcattataactacataatcactcatacggattcgaatgaactttgatagcatgatcttaagagctggataaggaagtatcttaggtaaaagaaataagtggatgagagagaataggcgtcttggtttgtaatcttgttgacgaggagagggaatgagagagaaagtgatcatgaatagggtttgaatttgattcgagggaatagttgctgtttcaggactcaaattgagaggtccacatgatgaggaatatgtgtagttttatttaatgtctgaatttgatggatccttctgaaacctttgatttcgacaaaacacccacaatgtgtttgtctctcacttctttacgtaacctttgtagattctctcactctctctcatgtccatttgcgccacgtcactcagatggttgtaccatttgcgattatttgatctcaatgtggattgttatacgtgacatgtcatcgtcctattggtttagaatcaaaaactttaatctcccgcgtccccttacccaaccaaaaaactattgatgatcactttgccttttttttggccgtccattattgtaacgtatactacacttgtcatggtggtacgactatacccaaattaatactttgaggagtcaattacgtagatgattaaattatgaatattatctggaagagatcgacgacatttggttggtgtaatcaactttttcgggggtttgtgtcattcataaataacaaaaatttcagaagaaaaagaactaagttaatcattagacagaaatttcaatagcgtaacttcaaaaaactaattataaaaaaacaaaatcaactgtgtaacttacgtcagatgtaatgtttattagatgtaataggttccactaatccatatcaatattatcatttatgagatggagtgggattttgtcttttatgctacattaacaagtacatgataatttctgggtttcttttaccggtcttaatattaataaacatgttggtatgcatggttaagagttaggacttaattaggaggaggctcatacatatatgacagaactgaaaaattcagtagcaaacatttatctataacatgtcgtgtaaattacgttggttctttttacgacagaggtttactaatgtatatggattatctcatactcataatatgtagttacaatatatatatatatatatatatatatatatatatattataacttttttgaatctagattatattcaaagaaaaaagaaacatttatacatgtgaatgcaaaatgcaaactttttaaaaaacaaattacaaagattttctatccttaatgttgctcgatgcaaaccacgtttggatctcatccgcatatttcttcacttctccttttcttaaagtgctcaagtgatttcaaatgttcttatcaatcaacttaccagttatatattttatatgcatggtattccctatttaaacaagttcaacattcctttaacaaaaagaaaaagaaaaaggaaaacaagttcatgcctctcttgcctcaccttaagagtagacgtaccgatgttcaggggcgacctaggcctctaatacgtcttcttatgatatttcaattgtcaaatcgatggtcacacaacggtagtcatcgtagatatacatttgatatgtttgttacaacagttatcttttctttattaatggtaagccttaacataagtgttaagacttatgattatatgccttgtatatttcgcactatggttttatattgtttcaaaaggaattcggtgagttacaattgttgaagtcattattttatttgccattttttaaagtatcaatcctttaaaattccgaatttatcgtttactctccttttatgtaatcatgtgctcttagagccaatacaactaactttcattttcttatataagttaaaacattaacaaataggtatagatttaatttctagaagattatggaaattaaaacacgactaagtgtttttttgcagaaaatgtatagagagagaggggccatggatcacgtggaggatgcgtgagatggaaatgaaaaaacgaagggagaagagagaaagagtgattttacaaatctcctctaatcctttctcagccaattatgatcaatctcccacgtggggcttctggccccatgcatgcatatcatctttcaactattcactcttttgtctccttcttcatctttttgcgtgatcttcttctatatatggctgtctttatctccacaagtggcttttagaaagaagactctcttttaagtttgggtgttaattctagggtttccattaacaatg

SEQ ID NO: 9708 - DNA, 3000 bp, Unknown
  misc_feature (1)..( 3000): cDNA_ID_3043152_gDNA_ID_1972173_Annot_ID_179908 3000 nt of promoter + ATG
tttcattactgatgtagcatttgggattctgggttttcaatatttcaagctgcttgacattgaggatttagtagctccttttctcagtatgatctggctagtgagaaaagtgaaaccttatcttccaaaaaatttggtttagcctggcttatggatttctaattattaattgcacttctgtaaaaaaattcatgttacctctttctacaagattagatatttgacacattcatgtgatttgtgtgcgtttatgttacctgcctggtggattttatgattgttaaattttgtgttgcttctatgttttgtgtgtgtgttttactcccaaatgaatccacatttttaccttcttgaacaaaagtcccttgttaattgtgaccgtaaacagagaaattgactgtttaaaaggatcaccaaatagaaattactcgcatgcttctgcttctgttgcacaccttgctcatatttccagtttttcttatgggctttgtaatttatcttgtctgcgatgtacccgttagtgtcttcaaaggaaaataaagttacttgaatctatgggcaaccaaagatcttcttgccttagacgtttatctatctttctaagcctcagttctaaagtcattatgaatctgaacagggtcttttgtgttgttgcagcaaagtggcgaggaagtcgaatgcgtaagggttgactgtgatctacagaaacaaaaatctactctaggagaggcatacagagaaaaacaagaagttgccactcgatctctgtcacaagaagacttgatccatcaggggaggactaaccaagcaccaggaagtgatggatttacttattcaattctaatcagtttagtggaattatactttgtctggtccatacgaaataacttattctctgcattgataatacagaatgagagaagaagaaaacattgtagaaagtaagacatcaaagtttaatattctcttgttgtatgtatacctctgttttgctgtcaaagatctttgatctcctctgatatatttaaactaaaagatttaattcttcaaacatatcattataccggagagggagaggttcatattctaaaacatgtaagcattccgagcaaaagaaatgtttatattattcatccaaaatgttggttcgtgtcacacgataatacacattgtagaaggaagactagaagtagaaccagctacattagagtttaatgtatctatataataataagtcaaaaatacccacttggattattatgttcttatcatttttggggttatcaaagatactttataaacttttgacttttgcattggcattgtctttactccgatgatctacgcctgagagttgaccgcttcacagtccagtcttcaaattgttttcgcacttacgatatcattcatttctgattcgttagggctcccccaagcttacaatcttccttagtaaagtttgggaaaaaaacaaataacataaacataatcaatctcaatctgaaacgaactaaacactactatagttcattttctctcatatgtatataacaagataattgtcaaaacaaaaactgtgagttgtaatcaaatgatggcattgatcaatagtcattgctttgttgattgaagaagattccacttttaaggaaaaaagacagctacaataactaaattctttaaggttcgttagcaatgtaaccgaatacgtgaagtaacactagccattgtttaaagaaagagagtcgtcgaaacaaaacgttgactagcttatatgctcttataatgatttagacaactcacgtatatacgacgttgaagccaaattagttgaaatgtatatgtaaatgtagttgactttggtaagcgaatctccattttggtcttttaagaatctgtaacgcctggaaattgccaatacctccggttcgtatatctttatatcatgatttatgagtgcgtatatttgactttttcttgcaaaaccatacatacataacatgcgaatgtcttgtgtctgtgtatatgatatctaatgtatgggaaaacttggaatataggttttattttcttctagacaagatcatgaagtatagtacgtatcttttatgatcatctttttggtcagacgaaagaatattagttttatataatacataatttgtgatttgtttttctatcctctataagcacaaacatatactatcagattatgacacatcaacagtgctaatataacattaggctgtaaaatcaacttaaatattttgtaacacttttctcttaactattacaataaacgtatagctgttagtttgcaaggacagcgttaacaacttattgtatcatagtattgattcaaaacgttaattactgtgataactataacttattaactgaaatgcagacgttgacagacacacaagaattgaaatgtagaaacgcgtttatataagagaacgctaaatatataaatttcggacttttctagtgaaactctattagtcttcttttttttctttggtcaaaaaacttccaatacgaaattcgaacaagaagtataattagtgatcaataatgcgaatgatgcaataaaaagtcaaatgaaatgaaattgatgaatttaactgttatataaaattataagttgacagaatgaaatagtcatataattctagttctagacgtggatagcaaaaactttgtcgcccatatgtatataaaatttgtactctagttatcttttaagtatataaggcttatattatacatcgaagtcaatggttctttgtggtctgggtctataatcacaggtaagcacatcgtcatcgatttcattttcaaagtcaagaccaatctcgctctctatataattgttaaaaaccatctttctaattaaaatagaaagagtaaaagccaagtaacaccattttaaaaggcttcgctttcaattcagaaagaagagaatagagagcttcttcttcttcaatggcgaaaatg

SEQ ID NO: 9709 - DNA, 3000 bp, Unknown
  misc_feature (1)..( 3000): cDNA_ID_3043148_gDNA_ID_1972173_Annot_ID_179909 3000 nt of promoter + ATG
tcatcaaactttttgacgtaaccatttaatcccccggatttaccatgcccttcatagtccattccatagaccgagaaacccgcattggccaacctcactgcagtgcctgatgaatatgttttaatatcaattaaaatgtaatcatgaatgtatatatattgacgagtatattataatcatgattttaaaagacggaactgctcatggtgatgcttgattccatggcgtagccatgacagagaaagattaaagcctttggttcttgctgctcctcttgtttccatgaacacgtgaaaagttgtatccctcgtgagttcgaaacataatcctaaacaacgacaaacgaaaccccaaatttttatataagcttaaaacaataattgtatcatgaatcttcgtttttagatacaaagcaaagagctttgcatgacaaaagagctaactcgtaattgaaaagagagaaagattaagacatacctctttgtacataaccatgatgttctatttttgttatacgtttcaagaaagaaaactggatttgtttcaatatatagacgacgaggatcacgagataagagagttttatatctgaccaaaaaaaaaaattagtaagagggagagatcaaagagtcaaatcagattaagcttttaacgaaaaaccgcttaatgcgttttacttatgggaccagctgactaaaataaatttatcctgttaattacctaacttttctttaggggaagataacatttgacctcaaattaccaaattcgatatatatggaaaatttgcaagacacattgccggcaaaagaaaaaatatatttgcaagacacacgaaggtcaattttgaatcaatcctacaaaaacattatacataaagtgacatattacaatctgattaattttgtaaataccacatggtgagtcagattaacgtattaaccatgactaaaaagaataaattattcactgtctgtactaaacttaaggcccatttatatcattgaggcccatttagaactcttcatcttcttcagtttagggtttcaggtgtcttactatagcagtgcaaagagactgagtcagagagggctcgaagacgccatgggtaagtccctactcttgaatcatttccaccattattgtttgagttgcttatgtttggctccattttcttattgtgttgtgttgaaatggatccgtgaacagcgagaatcaaggttcatgagttgagagataaatcaaaatcggatctttctactcaattgaaagaattgaaggcagagcttgcttccctacgtgtcgctaaggtcactggtggtgctcctaacaagctctctaagatgtaattgttctctactctcagccttattatacaaatgttggaatattttgagctgcttgatattggaatcactagcctctttctgagtatgatctaaagctactgagaatagtagattactagattgttgattttttaattgttaattgcatttatattgaattgtttatggtgccagtgtttacaaattaggcattttgatacattcatgtgattagtgtgttgccctttgcatggtattggtacctggcttatggaattgttgatttctagtctttagtcatcagtttttttttgcttgtgtttgcttttatgttcattgtttttagatatctttagcatcttaagcaaaatccctatgcacacagacgccaaaacattggtgtttaaaacaatcgaggcttagattagtcttgggtttattgttgcagtttttgggatttttagttatcttgtatgtctgcgaaatgggaaaagaaagatatttatataatctatttgaatctctgaacaagcaagaccattgtttttgtttaggacttttagcaatcttggtaaggcctcaaattaagttattatggatctaattgtggtcttttgtttttgggttgttgcagcaaagtggtgaggaagtcgattgcgcaagtgttgactgtgagctcacagaaacaaaagtctgctcttagagaagcatacaaaaacaagaagttgttgccactcgatctccgtcccaagaagactagagccatcagaaggagactcactaaacaccaggtattttgaattcagtgacatgctttgttttggtccatacttcatgactttttctctgcattggataggcgtcgctgaagacagaacgagagaagaagaaagacatgtactttccaattagaaagtatgccatcaaagtttaattatctttctactgtcagagagtcctccctcagtcttctctaatatatctgaattttctttcaattaaagatttgattcttcaaacatgattgtatgatctctcacgcacgttctttgttataaatttgagatttaccctatttgactttcgagaactagctcgtgggctgatctatttggtctcggcaataaaatctgcaaaaacgtaagattctgcgaacaaaagccacttaacatcatcacctgtttattattcactttgggacagtctaagaacctagctaattgttttataagcaatctgagacaagagcattaccatgttcgaactgtgttgatgagctatgcaaccagttgcaactgaaatttacactcaaatcaactgaaatattggcttcaagaactcattatagcacaactaagcagtcgtcctagacaaccaaaatgttttctcatttgtctaaaaatcaggcccattaaaaacacaagtaaggcccatatcttctccagttgaaagatttgaaggcgggtgctttcttccgcctccgccgcgtcgcctcttaggttactcactggtattgctccggcctcctaataagctctctcgtacacttagccgcttttcccggtatgatctttaatctgttttaccatattttctatttttcattcaagtgaaaaaaataaagttcaaatttttattgtttctctgtttttcctcagctcactgaaacatg

SEQ ID NO: 9710 - DNA, 3000 bp, Unknown
  misc_feature (1)..( 3000): cDNA_ID_3043196_gDNA_ID_1972174_Annot_ID_179947 3000 nt of promoter + ATG
atttactagcaaaaaattatggaaaatgaagcataagaaatgcttactgttgtgttggaaaacacggatagtagctcctgaacctcgagcgccgttgacaatcgaagtatggttcaaagaatcgcttattatcaaccctccctgtacagatggcagcacataaagctacaaaaacataggttttgggagtaacataagtgtccatcacaagatgtagcagcatatacttacctttccaatcaagacgggaatgatagccgagtttgttgcataacccatgccaaaaataacagcagcaggttgtccgacatatttagcaacacaatcctcaagttctgcatgcacagatgtagttcctgataacagaaacaactagtgtcaggcaaccacaaagagaagagattgttcgagacctaatacacaaagacgaccctgtacctgcatcaacgcgagagctacatgtacttgctgaaaatttcttcagagactcaatgacacgaggcgtgcaatattcatcgaaagaaccaaatccaagataattgtaggaacccaaattaaggcacctgctagtctttgtagttcgcctgcacagagttgcaaccaaaggtttattctttgacatcctaagtgataaaccaattctcaaccgtatgaatccaacctttacatttggtttcatattctcttaatgtgaccaaagaaattataattgttcaacagaaaaaaaagcagaggaagacagactcactttaacgtcttgttgttatcgtcagagactctctcaaccacatcaatccaagcatcaggtgcacttgaaatgggacgtccaaaacagtccttcacacataaatttaagaatcaaacaccaaatcattgaaacaaagacttcacaaaaggaacaaacgccgaattgagaaggtacctgaatccgatgatacaatcgtcggatgtagaaatcctcatgcgccaagcagatcggagcgtatccctaaacgaaatgtgaaatcagaagcgaaattagaaaacaacgttaaaagagattttcacaaacatcatcaaatcgagaatcatgtgggagacaaacaaaacctggagattgttggtgcgccaccaatcgaagattaggcgagagtaatcgcgaagctgaccaaacgcgaaaagcaagccgtagctgaaatacgttgatacagcggtaaggtatgggatcgtaatcattgtttcagctccgtgttcgtcttcttcttctccctctatctatctatctctctccctctctagctttgagtttgaatttcaatgttgagatctggaaaaatctgcaactagctcacgcgagagagacagagaagagagagagattttgaattcaacaacctcttcccctttcgtcgaagaatcagatcattcctgatttccttcttctctttttttttttttaaacgagggcttttcgtcaaacgtagccactaatttaacttattagggaatgttatgtgtattgatcgatgactatgaagagtaaagatctaattaatactatatactatacaatatcaaaaatgaatatttatatatagcttaaaatagagatatggaagattttattaattactgtgctgtcatcttttccttatttaaaaatgaatagaaaaacaattgattagggttctttaacgcatttggtttttttttcatgacattgtttctccacaatttttgggtttgagtgactcttagctccgaataataactgcgttttgcggtacgcgagaagtgcggtgcgattcaaatagtaacgaaaatacatagatacatatgtatatgtagagattttgatactgttacagcactgttgcggtgcggttttgagtgcggttttgtttaccattcacagctttagattcaaagcagattcaaactgttaaccagtgaaatagggattcgtaacaataactagaggtatgggctctttgtatttcaatttagttacacactgtttccttgtatcctttgcaattgagagaagtagggagagaaaaataaaatgtagcgagtataggagatgtgatatagcaatataattttcacttcaacgtagagtcaatcagtcaacttgtgttcttcgatttcaaaacccgtaagacaacgaccaaactcacttttcgttttataatattattaagcatgtctttgtcttcaccaattctatgttgtcatcttcttcgtcacgagtttatgggtatgccataattttaaatagttatcaccattcgttatccgtcagtttcatatgcttttctttcttttctttttggaaatggaaaataactctcattgacatcttccaaattcatatcttaactagtaggcagcccgtgccgtgccttgcacgggaaaacaacaataccaataatacattttgtttctttgaaatctgcaactatacacaaatgatgaatatcacaacctcacaaaatacaatgtgtatcattgctctataactctcaatagaaatcctcttcaactttactcaaattgtaatatctatatgtgtcaaaattggagaaaacttttattggaaacatcaaatgatcttacataaatacataaacttctctcatagacatagagaaaaagagaaggaatagatgaagaaaagaaaaaatatatagaaccgttttttcttctccaaaagcttaacaataataataatggagaaatgaattaccttctaatcaaaacgctttttttaactcgaaatatataagatgctttcacatttaaattattttacacactaaaccgtagaagaagatgccatgtcatgccacccatctctcaaattggttatcttcttcttcttttgaattgaaagccccaaaacatttgcatccattttgtttctatacgattctcgtaaacttatgtggtcattttgtcgagcagctggtgtgcatggaaaatgtaagaagataagaccaagtaaaacgcaacaaaatg

SEQ ID NO: 9711 - DNA, 3000 bp, Unknown
  misc_feature (1)..( 3000): cDNA_ID_2992991_gDNA_ID_1972174_Annot_ID_179959 3000 nt of promoter + ATG
atgacactctcttcaaaatgagtacacatttttagtacctcctctgctagtttagttaagttagtcccatactcttcaagtgttggcattttgctgtttccgctgcttcccccaccaacgcttgctgtgacttcattgttttccccgaccatacgtataacctaaaaatgatatatgtatctcaaaatgttataacgaaatggtttactaagacataacattaaccttagaatccagagttggtgcatttacctgtgtccgtatattactaggatctgcacccaaattctccaagacacgagctgccacaccctccccttcacgaagtagaccaagcaaaaggtgctctgaaccaatgtagttatgccctagatttcgaaatagcaaaacatttcccaaatggagaagaattagttagcttcatcagtcaagaaagcttatgtattgcacaacacataacaagctccaaggctaaatattcataatagaaatagacccataccaagttgtcgagcttcctctagtgacaactccagcacccgctttgcgcgaggagtaaatggaatctccactgccacgaatccactgcctctcccaattatcttttctacttccacgcgtgaatctttaagattgatccccatggatttaagaaccttggcggcaatcccagtcccttctccaattagacccaacagtatttgctcagtcccaacaaagttatggccaagtctccgagcttcctcttgagacagcattatgaccttaattgctttctcggtaaaacgctcaaacattgctttgggtacacatcggctagctttttctctcccagatgattttgcaagtttatacttaacaaggaaacctggactaggccttcccaaataatctaatgcactgggggcccttaaccctgagaagctctgaattgtcagaagaggtgcttgtaaactggacatcatcttcacacgccctcttggttctctgtattctgtggcctgaattctcagaacaggtgcttttaaactgctcatcttcatcacacaccctcttggttccctgtattctttggcctgcacatgccttccgggaccaaaaaaaggaggtgtaagaagagctatcgaccaagccatgatgcaatgttggaggctgcattgggtaatggtagaacatcagtattgctaattctcttaaacacgtatacagaaagagctcaggcacaaaaatacacaatttcaattcaccaactaagagcagaacaatgtcacaaaagcttgagctatgtttcttatctccaaactctccaaagcaaaacaagcaatcatctttgaacaaatcgaaacgcgaatacacaaccctaatctcaaagtaagcatttttgcatatcaataaaaccaaataaagagtacccagattcagaaaactcaaaatgaaaccaccaaaagaaacgaaaccaaacgccatgagaaatagaagaaaagaaaaactcaacctttaaaacagctcacacaacagagaagcagaaacctaaaagcttcttcaatgaaacacaacaacaacaaatgaaaaataaaaacagactgagaaagagagtgagtgtagcaaagaaaagggttttatgtgtagcaaagaaaagggttttataccgtcgacgcctttggatagcgaagttggagaaagcgagagactccttttattgggaaagagataggaaagtgaagaagaagatacccaagagacaagagatttctctattctctctctctttatcttctctcgcatcgccgcccttcatagattaaacacactcacctaccaaagttgcataccagccgttagattactcataagtgtattccaccgtcggatttaactactttttaaagagtcaacctcaataagaatcttgttcccaaagataagggtttgtgttgagtttaagaccggtttaatctgaaaactccgtcaaaccaaaaccaaaccgatttatcataaaaaaattcatatcatctacttccattggctagagacagattgtaacggtgtcgtcgtcgccaaacgatttgcctcttcctaaaggtaggttcttcatttctctcagtgcccctttgcgtgtttcagcttcttctttatgatctaattcatgtctatgtttcgtttgattctttgttcaattctgaattgagaaaatggcgattcgagatctgtctcttcggttttttagttcgactgatttgggaatgtgaagagatcagattgatttgttgacagagtcttgggggttttcaatcttattcctctagattttcgaaattcgattcctttacatcagatttcgcttaattctctgtcctagtgagttttacgatctttagtcttctggtttgtcaaattctatgtcttttcatgttcttctgagttttaatggttgatcttcaattacttggccacaatctctagagtttgagactcttgacttgtcttgcatatattcctctgtagattggttttatgtttggtttcaattccttgttgaactattctgatacggaagttttcctttctaaggtttggtgtttcctttttctgataaatagtgatgaagatcgattatgatgatcatgtaagaatataatctagctttggtgtttgtattggtttacctgagggaagaaaagtctttctctttgggactttaaactttgattacttaactccaacattatcatagttgggttctgtagttcatttcacttatagcagtaataactcattgattgatgcaatcaatcaatcctgtgatggaaatggaatcatggaaattgagggattcagggaggattgattgattagaatttcatatttatgagagaataagagaactgatgtgtgtttcttttcctacttcttaaagttgtgctctttcctatttctataagctcttgtggataacaacagttgattaacgttcttatgcttgtttagggtacaacaaga

SEQ ID NO: 9712 - DNA, 3000 bp, Unknown
  misc_feature (1)..( 3000): cDNA_ID_3594167_gDNA_ID_1972174_Annot_ID_179960 3000 nt of promoter + ATG
atagattaaacacactcacctaccaaagttgcataccagccgttagattactcataagtgtattccaccgtcggatttaactactttttaaagagtcaacctcaataagaatcttgttcccaaagataagggtttgtgttgagtttaagaccggtttaatctgaaaactccgtcaaaccaaaaccaaaccgatttatcataaaaaaattcatatcatctacttccattggctagagacagattgtaacggtgtcgtcgtcgccaaacgatttgcctcttcctaaaggtaggttcttcatttctctcagtgcccctttgcgtgtttcagcttcttctttatgatctaattcatgtctatgtttcgtttgattctttgttcaattctgaattgagaaaatggcgattcgagatctgtctcttcggttttttagttcgactgatttgggaatgtgaagagatcagattgatttgttgacagagtcttgggggttttcaatcttattcctctagattttcgaaattcgattcctttacatcagatttcgcttaattctctgtcctagtgagttttacgatctttagtcttctggtttgtcaaattctatgtcttttcatgttcttctgagttttaatggttgatcttcaattacttggccacaatctctagagtttgagactcttgacttgtcttgcatatattcctctgtagattggttttatgtttggtttcaattccttgttgaactattctgatacggaagttttcctttctaaggtttggtgtttcctttttctgataaatagtgatgaagatcgattatgatgatcatgtaagaatataatctagctttggtgtttgtattggtttacctgagggaagaaaagtctttctctttgggactttaaactttgattacttaactccaacattatcatagttgggttctgtagttcatttcacttatagcagtaataactcattgattgatgcaatcaatcaatcctgtgatggaaatggaatcatggaaattgagggattcagggaggattgattgattagaatttcatatttatgagagaataagagaactgatgtgtgtttcttttcctacttcttaaagttgtgctctttcctatttctataagctcttgtggataacaacagttgattaacgttcttatgcttgtttagggtacaacaagaatggaagaagagtatgagagtcgtcgattgaggagatgggaagagttggacactgacatcttagtaagaattttccagaagtttagcgtctttgagttgacttcgggattagctcatgtttgtagaggatggagagctgcttgttgcgatccgattctttggaagacggtggatttgtcaaacatgagatctagtttcatcaagatcccattagagccttatgtctatgtggaacgccgatctgatgaggccctaacccgcatcctgaaactctccatgaaccttagcggaggaagcacgaggaccttgatttttcatttcaacttgttcttgagtgatgatcagcttacttacaccgcagaaaggtatgtccttttcgttcttccacttatttgtcttccaaattgtttcatcatggccgtaaactatggttttttagtcaaaagttggttcagtttttggtttggttaagttcatgtacccactttcagtcaaaattgctgaattacaattaagctgaatctcgcaaatgctaaaagttgaaaaatttgttgtactgaatattttgcaggtgtccagggttgagacgggtcgtcctaccggcttggaacagaataaagaagactggtatatgcaaagcgataagaatctggaaagatctagagtcactaacaatgccaagcatcgcaaacccgccttatctcttaacagaaattgccaagaactgcaagaattttaaagagctgaagatcatgggtccattcgaggtcttctttgcaaacacgctcatcacttgcctcccaaacatcaaaacactcagcatcagatgctcggcgataaagcgggaagcactgatgaaaatccttgacggattaccaagccttgaagtgctcaacatatcacactctcacctagtggagtacagcggttggcagcctcagcagaaggtgattgttagagagctcgataagacgataatggagaaaacagcaaggctaaagaaattcttgacttgcatggatcacaagacgtgtgtgatgtgtcagaggactgaaaacgatgaagggattgtgagatggtacaagtatgaggaaggagactggaaggttgatgaagtgagttctcttcatctttgatgtttctgctgtgatcattctctgtgaaggacttaacttgttattgttctcatctttgactgttgaattgtttatttctttgtgttgtttgttttgatttgaatcgtattatgtgtatatatctgtaggctatgccaatgaatgtctgtagtgatcaacttttgatcaccaccaaccttgcacaccaaataggaaaataaaacaatattgttacaattatttgtcttgatattagcattattagtcacatttgttttgcaaatcatctaccttttttttttggtctatatcttattcttcttagttcttacctaccagtcttctccggcggcattaacgacaccgttttatcgagctcagccaccactagttaggtaacgatatatattcttaaaaacgtttagaaaatttctatgtatgtttcacacgaacaaaaagaaaatatttttcagacatcaacggtcattatggacgacgactgttaaacaaaatcgtttaaaattcttgttgcgtaatttgaccattttattttattttataccaaaaattgaagatattatatatatgttttaattcgatcgcaaataaatctgaaaattaaaacacaaaacgttactcttctctctcattctctttcgcttctcgatagcttctcaaatc

SEQ ID NO: 9713 - DNA, 3000 bp, Unknown
  misc_feature (1)..( 3000): cDNA_ID_2185251_gDNA_ID_1972174_Annot_ID_179957 3000 nt of promoter + ATG
aagatgaagagaactcacttcatcaaccttccagtctccttcctcatacttgtaccatctcacaatcccttcatcgttttcagtcctctgacacatcacacacgtcttgtgatccatgcaagtcaagaatttctttagccttgctgttttctccattatcgtcttatcgagctctctaacaatcaccttctgctgaggctgccaaccgctgtactccactaggtgagagtgtgatatgttgagcacttcaaggcttggtaatccgtcaaggattttcatcagtgcttcccgctttatcgccgagcatctgatgctgagtgttttgatgtttgggaggcaagtgatgagcgtgtttgcaaagaagacctcgaatggacccatgatcttcagctctttaaaattcttgcagttcttggcaatttctgttaagagataaggcgggtttgcgatgcttggcattgttagtgactctagatctttccagattcttatcgctttgcatataccagtcttctttattctgttccaagccggtaggacgacccgtctcaaccctggacacctgcaaaatattcagtacaacaaatttttcaacttttagcatttgcgagattcagcttaattgtaattcagcaattttgactgaaagtgggtacatgaacttaaccaaaccaaaaactgaaccaacttttgactaaaaaaccatagtttacggccatgatgaaacaatttggaagacaaataagtggaagaacgaaaaggacatacctttctgcggtgtaagtaagctgatcatcactcaagaacaagttgaaatgaaaaatcaaggtcctcgtgcttcctccgctaaggttcatggagagtttcaggatgcgggttagggcctcatcagatcggcgttccacatagacataaggctctaatgggatcttgatgaaactagatctcatgtttgacaaatccaccgtcttccaaagaatcggatcgcaacaagcagctctccatcctctacaaacatgagctaatcccgaagtcaactcaaagacgctaaacttctggaaaattcttactaagatgtcagtgtccaactcttcccatctcctcaatcgacgactctcatactcttcttccattcttgttgtaccctaaacaagcataagaacgttaatcaactgttgttatccacaagagcttatagaaataggaaagagcacaactttaagaagtaggaaaagaaacacacatcagttctcttattctctcataaatatgaaattctaatcaatcaatcctccctgaatccctcaatttccatgattccatttccatcacaggattgattgattgcatcaatcaatgagttattactgctataagtgaaatgaactacagaacccaactatgataatgttggagttaagtaatcaaagtttaaagtcccaaagagaaagacttttcttccctcaggtaaaccaatacaaacaccaaagctagattatattcttacatgatcatcataatcgatcttcatcactatttatcagaaaaaggaaacaccaaaccttagaaaggaaaacttccgtatcagaatagttcaacaaggaattgaaaccaaacataaaaccaatctacagaggaatatatgcaagacaagtcaagagtctcaaactctagagattgtggccaagtaattgaagatcaaccattaaaactcagaagaacatgaaaagacatagaatttgacaaaccagaagactaaagatcgtaaaactcactaggacagagaattaagcgaaatctgatgtaaaggaatcgaatttcgaaaatctagaggaataagattgaaaacccccaagactctgtcaacaaatcaatctgatctcttcacattcccaaatcagtcgaactaaaaaaccgaagagacagatctcgaatcgccattttctcaattcagaattgaacaaagaatcaaacgaaacatagacatgaattagatcataaagaagaagctgaaacacgcaaaggggcactgagagaaatgaagaacctacctttaggaagaggcaaatcgtttggcgacgacgacaccgttacaatctgtctctagccaatggaagtagatgatatgaatttttttatgataaatcggtttggttttggtttgacggagttttcagattaaaccggtcttaaactcaacacaaacccttatctttgggaacaagattcttattgaggttgactctttaaaaagtagttaaatccgacggtggaatacacttatgagtaatctaacggctggtatgcaactttggtaggtgagtgtgtttaatctatgaagggcggcgatgcgagagaagataaagagagagagaatagagaaatctcttgtctcttgggtatcttcttcttcactttcctatctctttcccaataaaaggagtctctcgctttctccaacttcgctatccaaaggcgtcgacggtataaaacccttttctttgctacacataaaacccttttctttgctacactcactctctttctcagtctgtttttatttttcatttgttgttgttgtgtttcattgaagaagcttttaggtttctgcttctctgttgtgtgagctgttttaaaggttgagtttttcttttcttctatttctcatggcgtttggtttcgtttcttttggtggtttcattttgagttttctgaatctgggtactctttatttggttttattgatatgcaaaaatgcttactttgagattagggttgtgtattcgcgtttcgatttgttcaaagatgattgcttgttttgctttggagagtttggagataagaaacatagctcaagcttttgtgacattgttctgctcttagttggtgaattgaaattgtgtatttttgtgcctgagctctttctgtatacgtgtttaagagaattagcaatactgatgttctaccattacccaatgcagcctccaacattgcatcatg

SEQ ID NO: 9714 - DNA, 3000 bp, Unknown
  misc_feature (1)..( 3000): cDNA_ID_2113881_gDNA_ID_1972174_Annot_ID_179951 3000 nt of promoter + ATG
attgcagcagcaacagtgttgagctgaacctgtaagctaaacaacaaatttaagaaaaaagaagaagaattttaagtatatgagaacgaattacatagaattatactgtcgtagttgttaccttcgagaaacagtaaaacaggggaagaacaggaaaatgggatctgcaagcgaagaaacccacacttaaaaccgccattgaaatcaaaaagtttcaccatttcatcatgggcttttaagctttatcaagctgcttttgatggaatttgaagaagcagagattttttcagaaatgttagggtttttgaagatgaacaatgaaggggtttatagccacgtggccagttctcatttgaaataccgttccgtcaaatcgatgccgtttcatgttactcactagaacatttcggcgttcgctggcttgtcttaagttatctacgcagcgttttataaagtgaaagaactgtaagccgtcttaagcttcagaatgagaactacatgctgttttcatactcactcgcttagatcggaacttggatacttttgaattgaaagatcgagaatttcacatcgtcttctcctggaaatcacgaagctgaagcttctactggggaatcgatgaagctcttgcatctgatattcttattagctttgactactggaatctctgctgttctaatctacattatcggcgtctctaatctctgtaagtaatctccatcattgtcccatgcttgtagtgttgtatttcgtgattttttctgaagtatgaagatgattaatgataaagaagatgattccgtggatttagacgagtctaatcgttttaccaatgaagatttagaggcgttgcagtctttgcagaacggattccagaagtgcgtagtaagtaaatctgtgttagcttccttatcttgtgttataccctcttgatccgtttggagttatagatcgtacctctgaatctggagcttagctgattagaactgatctaatgatgcagagtgcaaatggtttgggactacaagctgctatgggtagagattattgcaaagtttctataaacttccctaaggatactgtccccaaatgggtaaattctctcttctgactatttgtttatcatagttaagcttgtcataatccttgtcttagtgtctagcaaatatggtctaccttattattatgtcttggattatgtacaacaacagaaagatcccaagtctggagagcttgaaggattgtcatatgagtttgacctgtgtgaagcagtagctacatgggaacaagtgggtatttgcagttcttaaagtgtgtaaagtttgatttcatataatttgttttagtctttatagtgatgggttaattggcgagttggttgactaggtcaggaatagctctacaatactcaccaaggaatacattgatgccttaccaaatggatgggaggattatgcatggcgcagaatcaataaaggaattcaactgtaagtattgactcacattagaccaaggatgaagtgcatgatcattggttgttattattattgttttttacagacaacagctcaacacttgcttagttgattgttctcagtcgcaatataccaagtagtgtaaaatgctgtgttgtcttcttccttttctggccttaatgagactcgcattctggtgcagtaatcgttgccagaataaatctttatgcattgagaagctttcattggtgcttcctgaaacaccaccatatttcccccggcagtttgggcgatgtgctgttattggtaactctggtgatctcttaaaaacaaagttcggaaaggagatagatacttatgatacggttctaagagaaaatggtgctcctattcaggttaataatgacttcttttatataacttccagttcttttgttcccgctgtagactcacgtatcttcacttttgtttttgttttttggaatttcttcttgcagaactacaaggaatatgtgggagagaaaagtacattccgtcttcttaatagagggtcagcaaaagcccttgacaaagtcgtggagttggatggtactatataactgttctcttgttttcactccttcatggttatcatcaccactgtttctctctctctctctctctctctctctctctctctctctctctctctctctctctctctctctctctctctctctctctctatatatatatatatatatatatattcatttgtgtgtgtcacattttttatgcttgcaaatagataatccaatctctctgatcctttgaaattatgcagaaaaaaagcaagaggtcctgctcgtcaaaacaacaatacatgatattatgaacaagatgattcgggtttgtttattgcacttaattctctcttagctgttttggttttgaatatctgtacactccccctggtctttgaaacttatttgaggatttttctttctatgcaggaagtcccaataaaaaatcctgtgtacttaatgctcggtgcttcatttggctcagcagccaaaggaactgggctcaaggctcttgagtttgctctctcgacgtgtgattcagtggatatgtatggattcacagtggatccaggctataaagagtggtataaagtctacctatatttattttgtcttgctgtctacttactaaccatgtttatttctgtttatcaaccatggtttacgtttaatctcttgtaatattctttcaggacaagatatttttcagaatcccgacaaggacatactcctttgcatggaagagcttactaccagatgatggaatgcttgggtgtaagtctctggtttcccatcattctttattatccagttatccaatactagttgttagatggcaataaccacttgatgtgtttaatagatttgcattggcttattatagagattcagagatctcttcaaggtttttggttttaacttggttctctcttttttagctcattaaaatacactctcccatg

SEQ ID NO: 9715 - DNA, 3000 bp, Unknown
  misc_feature (1)..( 3000): cDNA_ID_3043177_gDNA_ID_1972174_Annot_ID_179955 3000 nt of promoter + ATG
gagggtattaacctctctttgacgcaatgctgcttctttcctatacaaagacatattcaacatgagcgattaaaaactaccaccttggtttctgaaaaagagagcaagaaaagagaagctaaagaaggcacaggctcccacctgcttaacaatttcgcctccaaggaaactccttctccaagagaggcaaccttttggaaccaaaaataaaaacaaatgaaaccttgaacagatgccaatacattagaaatatatgatttaaagtaaatttaaacaacgaggtgggatgctgtttcaaaaagataacaacaagatatacaaagagatttaaacaagtggagtatttttttcagtcagaatttcaagacgcaacataagtgaaaaatggactactcaagacaaccagttcaaaaacctgtttctcgagctccttagccctagcttctgcttccacccttttttcttccgcacgacgaagctgtaatcaagaataaattttatgaacaacagaagtaaacagctttattacataatataaaattcaatcgcagagatcaaaccttctccagtacattctcattctcctcttgtagcatatccagctgcatataaaaatgaatcagccccaagtcaactcttatgactcatacacaaattctaatttgactaaaatttacaataactaaattgacgagataccgcaaaaggttcaaaagaaacaatcacatacttcatcacgaagagctgaagcttcccgctgatcacccttttcttttgaatttactgatggtacatcagcaaagaacctaaaaacatcaaatatccgaaatcaaacgcaagacgcacaaccaaaaaccagcagggatctctaattcttggagcaaggatcccatttctcatgaacctttatagcaacctctattattaggctttgaggataaatatttagtcaacgaaaaatcatattatacaccaactccaaagagcaaccaaactggttttgacatattccactaagtcacacgttcccttgactaccaagatttgagaactataataagaagcacaatttttaagaacttcaaaatgttatcaccttttatctctgctccgagttggaggatcaagtggaggaatagaaaccggagttttcaccgacaccctactaggcggcattagattaggaatcggagtcggagtcgtagatctagcagacattgacggccttccggctgaagcagaccgcactgaagaaggtacttgctcggcgaagttcctgcctaactaatcaaagcacaaaaaaagagagagactaattagccctaaagaatcaaattcaccacaactacaatcaaatcaagctaatctgagctaattcaatcagctagaaaaacggaattcaccgcaggagacggcgatctagttcggggagcaaatgaaacagccggcaaattattatttccgttgctgctattgcttccggtggaggagatagaagaaggtgcatgacgagcaggttttaaagaagcagatgcgaatctgagacttagatcttcatcttcatcttcatcatcttcgtctccgttgtctttgttctgtaaggccatgaccttagctaatcgctgtgccgcggctttggcagctacgttctgagtccgtttaacggtggagaaacctccgataccaccgagctgtttccggtgagcaggagacatcgccggtgatgttgcctccgtactgttcgatgattcgctccactggcgaccatacactgggctacccgccctcctccgatccatcagtgtgttggtgaaggtacttgttggttggatgaaatcgctgtatttaagcgagcaacaagcaggtgaaccagagaaaatgaaatttctcggggaaaaaggtagattttctcgagaaaacggaagggaaaataaacgttcggtgagattggagaaaagtgttgaaataacagtgacgccaaaaacgacagcgtttaacacggagaagagaaacacatgcgagctttcaaaggtaagtgattaatgataagattatagttaacaaaatctttaatcattttcacttaatctgcgtaccatttaaaaacaaaaatatacaactgtttatgttgtatctgttctgaatcatattatctgtgatattttaatacagtttataaagagatttgtttctcttctaagagaaaatttatatacacatattaatcaaatcacatgagtaaattaaaatcccccctgattcgtggtttgtccaggttattttttcgaccaagtttagttttattttggaagaaaattttacaaattcaattattcaaaagcacatggtttggtatcaaagactataatatatataactagcccaacaatgttggagaactaattatgggattcaaaatcctcaaacctcttgacaagaatccacaaaggaaactgttactccaagtctaatcttcttggagctggcagtggcaacaaatgaagttctagccatgcttggctaagttttctcaaaggtaattaacaaagtgctcactcaaggttcgaaatttgggtaatggtaaacaagttcacgtatggagagataacttgttacatacaaataccatttacgcatggtagaaacggtttactaattttgattattctaaccaacaatcaaagatcagtatatctttactatatacagtgttagtattattagaaatatatgtttcttttcagtgatttattcggtctgttgacaagtaaagagtcgtgacaaatcagtatttgactgtttctatcgccgtcgtcagtcaatggtaaaatatgcaaatagtgagggggtaaaaatgacatttcataaccaaaaactcagcacctataaaaacgtcaaattagattccagcaaaactcaacctgacatttttttctctcgaagagaaaagtcgaaaaaccaacagaagaatttgaatttctcatctcctctctcgaaatg

SEQ ID NO: 9716 - DNA, 3000 bp, Unknown
  misc_feature (1)..( 3000): cDNA_ID_3043173_gDNA_ID_1972174_Annot_ID_179956 3000 nt of promoter + ATG
ttagctagatgtatgtagtgaacaccatttttgttctatactagacaacagaaacaaaataattaagaaaaataactggtagttctgtttcccttttattgctctaacgtgacggctacgcgaggaatattcttgtaattttatgcacttacagatggagcaagcgcagtagctggagaagcaccaccagtggttggcctaataaaatgataaaattatagttaactgatggagtgtctttcataattagttcttaaatgaattgagtattgatgatgaaaacttacaatccagctaaaactttgacagcatcatagataacccactgcgctccagtgagtgttcctatcatgaaaatgcgaagaggaaggccacgggttaacataccccataaccctagcctctttactgcctgtagcacatgaaagaatcaaaccaagtcagtagatcatataaaaagctctgtgttgtgtatccacaagtttgatgttgtggtgaagagtatggagcttttttacttacatcagcaacggttgctcctttagagttattgaggaaagacaccaaattatctgcaggatgtgagatgatggcgcagaatattccagcaatgtatccacctgcaaagctaactccgagctgaactggctttgagcactcttcttttggggtaggcatcactttcttgtatatgagctccacagtgttttcaaaagtagcaaatttcatcatcgtatctgcaaagaagtcgaattttcttttagtaactgaaatcatcatctcaatgactctactacattttcttgtgtatagagacttacatggaatctggcgtccccagagaggaacaagtcctttgtgtaacccgcggaagccttcggatttgatgatctttggtaaaccatcagataaaccgcgggcgaaaccaggctgagtctggaccctgactttgacagcttccattggacaaagagccacatcagcgacgatttctgcagaggctgagccagcgaggtaaatcaaggtcttgtatttagctgcgtattctggtccaacaatgtctgagtagtatttcttggcgtactcatagagaccgtatttaaaagctccttgggcactgtaaccaagaagcgttggtgaccagcctctggtgaaacccttaagcccttgctctttgattgttgtcttgaaagctgaagttatgttcttgtacttcagtggatcaatctgaaataacaacagaattaagggtcttttttggaaattcgtggaatattctctctgagtgaacatcaaaatcatgcatgagattgaaaagtcttcgacggcgttgaagagtcgatgccgtgtaaaacaagaaaacgtaaaagttgacaaaaacaaaaattgttattcgctgtttttttttccgctaataatttctatattcaagtttttctcactaaatattttacttatcacacacgtattaaaaatgttaactacaaatagagaagttggcttggaactttcacctgcatgttgcatttgatgacatcaagtggcgtaatcgccgtgtgggtgataccgcagctcagcatcccggcgaccgtacacgccgcgaaatacgccggcgagtacatttccactttttcattcggcgtcgcgatggcgaaactggtaccgttggatgagactgaagaattagtcggagaaatcaacggctgtgatttaaggtgagtactcatggtcgtcgcctgaaaaagacgatgatcggacgagtagagaaagctcgggatcagcgatctgcttgagtcagacatttcgagagaggagatgagaaattcaaattcttctgttggtttttcgacttttctcttcgagagaaaaaaatgtcaggttgagttttgctggaatctaatttgacgtttttataggtgctgagtttttggttatgaaatgtcatttttaccccctcactatttgcatattttaccattgactgacgacggcgatagaaacagtcaaatactgatttgtcacgactctttacttgtcaacagaccgaataaatcactgaaaagaaacatatatttctaataatactaacactgtatatagtaaagatatactgatctttgattgttggttagaataatcaaaattagtaaaccgtttctaccatgcgtaaatggtatttgtatgtaacaagttatctctccatacgtgaacttgtttaccattacccaaatttcgaaccttgagtgagcactttgttaattacctttgagaaaacttagccaagcatggctagaacttcatttgttgccactgccagctccaagaagattagacttggagtaacagtttcctttgtggattcttgtcaagaggtttgaggattttgaatcccataattagttctccaacattgttgggctagttatatatattatagtctttgataccaaaccatgtgcttttgaataattgaatttgtaaaattttcttccaaaataaaactaaacttggtcgaaaaaataacctggacaaaccacgaatcaggggggattttaatttactcatgtgatttgattaatatgtgtatataaattttctcttagaagagaaacaaatctctttataaactgtattaaaatatcacagataatatgattcagaacagatacaacataaacagttgtatatttttgtttttaaatggtacgcagattaagtgaaaatgattaaagattttgttaactataatcttatcattaatcacttacctttgaaagctcgcatgtgtttctcttctccgtgttaaacgctgtcgtttttggcgtcactgttatttcaacacttttctccaatctcaccgaacgtttattttcccttccgttttctcgagaaaatctacctttttccccgagaaatttcattttctctggttcacctgcttgttgctcgcttaaatacagcgatttcatccaaccaacaagtaccttcaccaacacactg

SEQ ID NO: 9717 - DNA, 3000 bp, Unknown
  misc_feature (1)..( 3000): cDNA_ID_3043193_gDNA_ID_1972174_Annot_ID_179948 3000 nt of promoter + ATG
ttgataattgctatacataattgatcatgtaatgcatattgtgtttaatctttctaaagtacaaatgtaagtcgatactaacctttctttttcgacttgaagaactgcaagattgatgagaactttgaccaacatttacttcatcgtcttgcatatcaagatccacaacgattattttcttcggtttctctttgttttcttccaatgattttctcatcgaatgttgaacctcggaagaaaccttttggcatgcacttctattattcaatccagccaagtgatgtttcattctatttatttcacttccaacgtattgtttaccacaaaagccacaagttataacttttctccgtcttgaatcaatagcttctctaacatagttccaagccaaatcttgtttgtgatgactggaacggttcgacgatttctcttgctttatattgcttgtatttggtgaaaaagccttctccattgatgagtaaactacaaaaaaagaagaagtaaaaacctctacacaattaacatatgtatactctttaccaataaaaaatgtatataactcttacaaggattaaattaaacgaacaaaacaaaagtattcgaatcactcaaagttatattttcatttgtatatattagctagcgataagaagactaggccaaacgaataaacacataaggattggaagaaactcgacataatctaattatactaaatcaacagtcaattttataaaaactgcaagcttctctttctgccacgtatgcttaagtctaaaattttgctctttcaaaatcgtaaaccaattcacttctttttactattcaataaaattcttgtttgacaaaaaatgaaaataatttttttttaccactttttcagcaactgcttcttccacgttcttaagattcttcagtttctctcccatctttcaaaaaccctctgccagttaatttacgatctcaatggcaaccgtataagccattctcagaaagataaaaacaggttcaaattcttcttcttctctcctttctcataaccttaaatcctccattctttcatctaaatacgtctaacagagaaacgaaagtatgacgtaaataatgaaagttgagacttttgtgatgcctaatgtgatggacgctgttaactcctcacgacacactgagtttggtccacctaatcgctggtatgaatatcactaaacctttggccattttgttgcgttttacttggtcttatcttcttacattttccatgcacaccagctgctcgacaaaatgaccacataagtttacgagaatcgtatagaaacaaaatggatgcaaatgttttggggctttcaattcaaaagaagaagaagataaccaatttgagagatgggtggcatgacatggcatcttcttctacggtttagtgtgtaaaataatttaaatgtgaaagcatcttatatatttcgagttaaaaaaagcgttttgattagaaggtaattcatttctccattattattattgttaagcttttggagaagaaaaaacggttctatatattttttcttttcttcatctattccttctctttttctctatgtctatgagagaagtttatgtatttatgtaagatcatttgatgtttccaataaaagttttctccaattttgacacatatagatattacaatttgagtaaagttgaagaggatttctattgagagttatagagcaatgatacacattgtattttgtgaggttgtgatattcatcatttgtgtatagttgcagatttcaaagaaacaaaatgtattattggtattgttgttttcccgtgcaaggcacggcacgggctgcctactagttaagatatgaatttggaagatgtcaatgagagttattttccatttccaaaaagaaaagaaagaaaagcatatgaaactgacggataacgaatggtgataactatttaaaattatggcatacccataaactcgtgacgaagaagatgacaacatagaattggtgaagacaaagacatgcttaataatattataaaacgaaaagtgagtttggtcgttgtcttacgggttttgaaatcgaagaacacaagttgactgattgactctacgttgaagtgaaaattatattgctatatcacatctcctatactcgctacattttatttttctctccctacttctctcaattgcaaaggatacaaggaaacagtgtgtaactaaattgaaatacaaagagcccatacctctagttattgttacgaatccctatttcactggttaacagtttgaatctgctttgaatctaaagctgtgaatggtaaacaaaaccgcactcaaaaccgcaccgcaacagtgctgtaacagtatcaaaatctctacatatacatatgtatctatgtattttcgttactatttgaatcgcaccgcacttctcgcgtaccgcaaaacgcagttattattcggagctaagagtcactcaaacccaaaaattgtggagaaacaatgtcatgaaaaaaaaaccaaatgcgttaaagaaccctaatcaattgtttttctattcatttttaaataaggaaaagatgacagcacagtaattaataaaatcttccatatctctattttaagctatatataaatattcatttttgatattgtatagtatatagtattaattagatctttactcttcatagtcatcgatcaatacacataacattccctaataagttaaattagtggctacgtttgacgaaaagccctcgtttaaaaaaaaaaaaagagaagaaggaaatcaggaatgatctgattcttcgacgaaaggggaagaggttgttgaattcaaaatctctctctcttctctgtctctctcgcgtgagctagttgcagatttttccagatctcaacattgaaattcaaactcaaagctagagagggagagagatagatagatagagggagaagaagaagacgaacacggagctgaaaca

SEQ ID NO: 9718 - DNA, 3000 bp, Unknown
  misc_feature (1)..( 3000): cDNA_ID_2032744_gDNA_ID_1972175_Annot_ID_179967 3000 nt of promoter + ATG
attcaatataacaagtctctggagtatattgaagttcaaaggaagttctttaattgaagtgccatccaagtatagagtttctagattttgtgagatcacccggaattccttaaggtttgagcagttgctgaggatgagaatttctaaagagactaaatttatctccggaagagacttgagacttgtacacccttttagatttaggaaaacaagacgttgagcctttgataaccccgaaatgtcccacaagttacttgaatgactgagattgacccactttaattttggtgtatcctgtgacaacacaagttttagccaccagtagaaaaaactattcattatagttttactcatacagtcaaatgataggaggaggcacaccttatgcttatcatcactccagattcgttcaatcttgctgtggggaagcttaaggtcgacaagattttgcgggttgaaatctggtggaatttccttcaatgggaactctagccagtggagatagcgaacctctttcagtgggaagtttagcccatcagggaggtttatcttattgttaggcttacattgctgaggacaatgtgagctatagatcttgaggtatcggagaccacacatcgatttgaaagtgcaactgtctaagctcatctccctcttcatttcattcatgtttaggaaaatccctctgacttctgcgccttcctgggagacaagtcacggtcgtcaaatctattattcattatatacagtaagtcttgaagaactttgtaaaatatatgaaaagttttcttggtttaggctcacctctatgttctttagcacatcagttatgtcttggtggtgccacaacctatgtggctcccttccatcttgagcatatgctcttcggcaaagttccctagcgaaagtatatagcaaatcatgcatctctactcggtcctcggaaacattaatcatgaatttattcatgagagcttttatttcacttgcagcttcagatgaatccagtagactagcaatgtaactctcatcttccgatctaaaacaagctatgtcgagaaatatatctttatgcacttgactcagttcatcataacttacttgtaacacatctcgaatactatggctggaattttctgctagtgtagccaattttgttttccaatggtcctcgtctttcccattaagatctgcccccaacaactttagaacgagtggatgacctctaccataatgcacaaactctttcgatagcttcatgatgacttcattgttgtgtatgttggaatgacgatcaaaggcataacgcccaaagtgacctaagccgtctttgtggttcaactgtgggacaacataagtatagtcagccacatcttgtattagtgatttgtcgcttgttgcaatgacaatcctgcttccctgcctaatccagttgcatctccccagaagaacatctatctgttccttgtcactcacatcgtcgagaacaacaagaactttatgtgtatgtagttccatcttgtaagattcatatgcacatcgagtagattctatgtctggaattgtcacaccgagtaactcttccaagagtaatgcaggcaagcaatccaacccgtgctccttcgatgttctacgaatatcttggattaatccatgccttaagaacttgcaccgcaaagtttcataaatctcccttgcaagagtggttttaccaataccgggcatcccaacaactcccaaaatccgagtctcctcacaatcaagatctagcttctcctttaattcttctaaccgttgtttgagtccataaatctcgtgcttttctcttcctacggacattgaattgtttttcgaatgatagacgaaagcatctttggttttgtccaacaaaatcttgctcagcgcttctttaacctcttcaacaataccattgatgaagttgtgctcgtcgctacaaaaatcagtaagaaaaaaagccaggcagatccttattgagaaggtcaaactctaacaaagtctcaaacttgtgctctagataaactctattaggaaactaaaaaaaagatacctctttccatcaaaggagaagccgatccggtctgcaacagagctcaaagcttcagaccactggtttttcttgtgaacatcaacattgcgcaaattcttgaaaacacaaccaaaccgtcccttctgataccgaacttcgtatgctttaaccttgtagaaaatgggaatgatgaggagctttcccttgtccatgcattccttcatcttcactagctcgttcaagcaccatttcgattcggtgtacctaacggaaaaaatggccaaagcgatcctcgactcttcaatcctctggaaaaacacatgtaaaggtttacctttttcctcattcgtgtctatgaagatgttgaccccatgcctaaccaatgcacttctgagatggctaacaaagctgttccgcaactcttctcctctgaaatttacaaacacttgatgctgcggcggcaaaggaagtgcttttacctcggaagaggaagaggcctcctccatcggagtttgtttggaaacaaatcgttcttgagtttccttttgagatacaagacgacatgcttgcacaaacaaccttagagataccatttttcaaaatcttgacctgttctactcatctacaaaacaaaaagaattgctacgaattaaacaaactataaaacttaactatcattctggttttatttaagttcaagttgaggtgttgtgacaaagagaataagcgaaacttccgagaagaacttggccggcctcgatcaaaaaacacaattccaagaaatttgtaagaaaaactaggtcaacactctactcggaacgacttcttcatcgtgaggcacgtctctttacgaattcactaattccgacttgatccagtctaaatgaaaaaaaaaaaaaaaactgaaaatcccctaaatctaggtgcaagaaaaacgcgcctaaacaatcatg

SEQ ID NO: 9719 - DNA, 3000 bp, Unknown
  misc_feature (1)..( 3000): cDNA_ID_3032705_gDNA_ID_1972175_Annot_ID_179979 3000 nt of promoter + ATG
agaaagttacatcggtaagctaatggcctgaggctcatatcaatcatcattttcttctcagaaaatattttgatatattaacttctttgatgcggatttgattcaggggaagttgcctgactcattccatctaatccaacacacggaggcccaacgttttgttggtaaatgcttggaaactgtgtcaagaagattgcctgcaaaggagctcttagcggacccattccttgccgcaactgatgagagagatttggcgcctctttttagattgccgcaacaattggcaatccagaatttggctgcaaatggaacggtggtagagcatctgccgtcaacgactgatccaactagaacaacagatatgtcaataacaggaaagatgaactcagaagaccacaccatcttccttcaagtacagattctagatggcgatggtaagttaaagttctacttactacaaatgtcttgcctggtttgattggaacatgaaatttgttgcgttgctagaaacttgctcagctgaaccgggctacaggatttgtagcacctttagtattagctattcatcataagatagaaatggacgattgtaaccttagcttctgatttttgtaaaactttgttagaagaatcaccaatggaaaatgtttttatgaatctgtttggctgtggcacaggtcacatgaggaacattcagttcccgttcaacattttaagtgacacacctctagaagtagctttggagatggtgaaggagcttgagatcactgattgggatcctttggagatcgctgcaatgatagaaaatgagatatctttgctcgtccccaactggagggccaatgactcttctatccggcacgaaagctttggtcatgaagatgatgaggacaatggcgacacagagggaagaacgcgccttttctcctctgcttcttcctctcacgactctcctgtagcagttagagagaacaatgacgattctagtaacgatgtgatcccagatatggatgatggcaatagaagctctaacaggttgctgaattcttcaacataccactactcacctgccattgatgatgatcaaaatcagcaacaacggagacgagtaaggctacaacagaaaatgagatcgctggtggacacgagaacacaggtgctacaccgatcgctcatggagttgatcaacaagcgtcgtgggcgtggctttgacccgaacacaaacgagctacaacctcaaccgtcgtccactgatttcattcgacgatgttgaaaatagtatgatgagagagcctatttgtgactctttcatgataaagacagatcttcatattggtactagcattttgatttgatgatactatatgaaataattgtttagagtgctttgtatatatgatattcttagggaagtgttacctttttagctctatctcgatttgaaagcgatgcaaaaccgctcgaattcgatttcaagtacgaaggtagcttcttccctgtgttaaagagacaatttagattacattttatgcattttccattacagtggtaacttaatattcaaataatcataggaattaaggatttttctaatcttgatacgaaagttgtttatcttctcgtatcaaacgtagaggcagttgaacaaatttacaaacgaaaatgttcttagattggtataaccattcgtcgaaaactataaagatttacttttatttaaccataagatgatatcatctatcaaaaagtgttaattatagttgatcatatataataagaacaaattataaaggctatatacaaaggaaatttgcgttaattaggttatctaaccgcatgcatccaaaacaaatcatgtatttaaaaacttgatcacaacttgagcaaaatatatggagagcaaagggccatcgccaatagttccacttgtgcttgtggtactcttcggatggttcctatgcggctcgtaccttgtctcactattagaagatgttgtattaccaatcttacaaaccggaacgttcattgtaggaatctttctcttgcttctccttttgcttctccatgtcttatcttcttcttggatctatccatggatcccttctcttcttcttttaccatctccggcttccacgacttctactgactcagacagctttggtcttggatcgtttcttttgttcacactttttctcatctctttctggttttttgggtcactctaatgtttattctacttgtgaattgtatattcctgattgatcatgcaaaatattgctatacactttatacatgcaaaatattgctatacatgttgtacatcatgcaagattccaacacaaaatgtttagcaagaatttgtttaaaattaatttattattaattactgcatcgctcttattccattttcaatgtaatacaacatatatcatccgtgaaaacaacataagagagacaacctagctactaggctactagctaggagcctaggagttgcataataatgagtcgaaagaagatgttatataataagtctccgtgcaaccacctttgacgaccaaccagcacgaagtacatgccacagacgaaagatcacatgcattgttttgggtttttacattataaatagggtcagattttgagtaatatgtgtgtttaaatgaggtaaaaatatataagaaaataaaattgcaagaaacttcttacttcattttattattttttccaaaacttttgtgaagatgtacaaaacatatccaagaaaataatttcaccaatttggtaaatattgcatgattggatatatgtgcaatgtgctatacaaatctttatcaatgcttaaacttcaaatagcttttaccaaactatgttataaaataactttaaaaaaaaaaaaaattaaaatgttttatatgtcatttgaacatttctttgatataaatgtccattattagtccattatatacttatgcaattttcacccaacaaaccgttggatat

SEQ ID NO: 9720 - DNA, 3000 bp, Unknown
  misc_feature (1)..( 3000): cDNA_ID_2032685_gDNA_ID_1972175_Annot_ID_179982 3000 nt of promoter + ATG
gagtcatacccggacaagttcggtatgttgaaccgtaaacatatcacctatgatccactgactaacacggtttgagtcgacttgtcataaaattcacctagtaaaaccgacaacctgccttaataattaaaccgtcgaattccggtttgtgtctcacaagtcacaaccgtccggatcccttgcccatttactttatcacgtgtttttccccataagtttatattttttattaattgatggacagaaagtttttggttttgggatgaagtcacgaggacaagaagaaatggaaaaggcatcatgacttgtaagggttaacaacaagagatagaggttatatgcttacgcggtcctaagcacgaatactagaagcttagggttaggaccactagagatataatgcaatttggaagtcaccacaatgtttaagaattttatcagcaactttggttgaaaataataaagaagaatctagttcgaagttttctctccatgattttttgaaactgatggaccatcaaaacatctttggcgtatggtggggcctcagaacacatgggccgggcttggttacacatgagaaaattgttgtttttagttagattttggtggactagtataaatggataaaagaagtcgttggaagaaaaccaaattgatagaagaaagaagaagaaaaatagcaaattgttgaaacagggacagaggctgtctttaaggaaaatcccgtatgattaaagtgtacgtaatcgattagtgttcctctgtaagcactaagtcaaaagtaaactctaaagccaaaggtttcaattttcaaacattgttaaagcgaagtctgtccacgagaattagcacatactggtccaccatgttatcaagaaacgccaaaccttttttttgacaatttatagtttttgaaatatttagtagaaatcttttatcttaaggaagagattgacaaaaatagataaataaacaaataagaataaaagattgaaatttttgaaattaacatatatttagccatagtggaaagaaaaatttataataaggttggtatatcaaaaatcaaagaacatgtgaaaaggtttaataaaataaaagctatagaaaattgataagttttgtccttatgaaattaatgtcatgatatatatatatatatatatatatattattgtactttttaattaataatccctttttgaaaagaaaagaaaaatatgtataagaattttttgtagtgttcatattcagttttctagaaaagctaggaaagcgaaagtggcctggcatggttttgtaatttccttttttaatatgatcataaaataaaatatgtaaaatgaaaaaaaaaactcattaacaaggtaaggaataatgagttgacaacaaaacaaaggtaagggataaatgatgaactattcggatgaacatattattgcaaaattcagttatatactatatggtccaacgctactagcaaagtagcaatacacatgttggtcataattattgaaattagttacaatttgcgtgaactttcttaattaataaatatttaatttgtaggttatgggaatgaactggaaagtaataaagttgaaccgcatgggtgaaaagatgattgtttttggctaaactaatgtgtttttatattgctaatttgatcggatccccatatattctcataatcactccctcttattacgttgaaacttgaaacaaaatgctaagctgcctaaaactcctttcgctttttagaatctagaggagagaactaacaaaataataacgaacttattttaagatcttaatatgcgaatatgcgattaccaaaactatgcctatatatcaccgtgagtctttctttttttgggattactttgccagtttgcctataaccatgtcattgagtctatgactacaacatggcattgggtttagatgtagtggtcaacatcttatagttattgagatattgagtccattggtaataaaaaaaactcggttaaagaaaagaaaaaccggtttaaaaacggtataaaacatgtggttgaatgattatgattagtgaaaacaaaaatttgactaaaaaaacttactaaaaaaactttaattagtatacacacaccttgcttccacttaactatcatgaagccatcatcactgggtttacatcggctaagtttatgaaagtgaatgtctctataaatgcttactctctttttaccatacatattagcctagagaagtatgtagagttcaagtttccaacatacattaatttgaactcaatacgtacgtgaaagcaagccttcctacatcaataaagaccgacctactagtttcttcataaatcagatagaggccgtgtttgaacgtagatgcgacttggtgtctcaatgagtgtaaaataaaaacctaaaaaaggaaaaaggtaggaccaaacacgccccatcccttaatctcattattatcacctcttccacacgttacctccctgcaaacctcacgctccttccctcataacacgtgactctcacgctcctccacctctcaaaaaaaccaaattttccttgtaatttacttgaaccaaattcatatattcacctaaacataactaattcttgatctaactttcgaaaattttcaaattaaaacatctcattgattccaaaaacatactttattgttttatatggttagtattttaatctttacgtaaataaaagacgttggaattggaaattactactagtagattgctttatcagaattttataatctatacaatgtaaaaagccgcgtcatctgttcaaaaattcagaagatcagagtcacgcctatatttctctctctcccgtcactctcactcttcctcttctgcttcttattattacatcgatcctcgttgtccctcctctgtttcttcaatatctctttctctccaacaaaatcaaaatcaagaaaacaaaaaagaaaaactctcaagaaaca

SEQ ID NO: 9721 - DNA, 3000 bp, Unknown
  misc_feature (1)..( 3000): cDNA_ID_1533420_gDNA_ID_1972175_Annot_ID_179987 3000 nt of promoter + ATG
cagcagccggctaataccgattcttgatagttctgtttttggatatttcagattaacttgtgtcttacaagaatacatgtaaacattgataccgtttatagcgaaaaccgttgctttacatcgaacattgtaaaagcctaaagaaaatttattgattaatgtttctgaggattttgaaggtaatgcatggtatatcactcttacaattattttttcttataattattccatttataaccaagtttttttatgatatcaatatagttgattcgttggggataagaaaccaatttcttagagttttatgatttttctactaacctttgtttagctaaaatatttttgctattcaatcatatttcactattcatctaacatatatgtcaaaactcaattatttcatgtaaaacagaagaagaaaaaaaaacactgtttttccacatttctactgttaggttaggtatgggatatatagaatttagggctcatggatttatggtatgaataccagtgtagaattgtacgcactagtcgcaattcgcaaagcagaccaaggcacgtccaacggttagttgaaatagtgtcattttaaaaactgagactttcactatgtggcccttctttatgaccgttagtgatccccaccacaaactccatcattgacgcagctaactccggcacaactccctctataatccaacggtccaaatactctttcacttttctccaaataaagttatatttctaatcacatttctatttctagattagaagacaattgagaaaacgactacaagttcacacttttttattgaatccaacggtccaaagattctttcacaaatactttgaatttacttgaatcaattaatctcacttgctataatgataagatattcacctccctcttataagataacaaaattagattttataaaaagtgcttaaactataaataaagacaaaactagtaactgagaaggcaacggacacttgtagctttatgcaactttaattattccctacatgagaaaaagaccgttgcgataatataaagtcttcgttcacacacaatctcgaagaaaacaacaacagttttgatcactctgtctctcttactctatcttcttcccaagttcttgtcttttgatggccgaaaccctagaaccctccctcgtcggggaaatcgacacttctgcgcctttcgagtccgtgagagaagccgccactcgctttggtggatttggtttctggaaaccttcttcccttaacatctccgaagcttctcaggtcttatttctctccttctccctcaaagtctctgtctttctcactgatttttgtccatttctttgcttttggggttttagttgaaatgggtttttagattcatcaatttctagatagatcttgtctttagttgtttcttgtgattatgatgcgaaatttcgaatctttggttgcagaacgaagttggtatggttttgaaagcgagtgagttagagaaggaactgattgagaaagaaggagaaactttgaaggtgttgaagtcacttgagtcgaccaaagccattgttgaagagctcaaatcaaagatacagaacaaggaggataaagaaaattgtgacatgaatgttttcaaggaattgaaccaagcaaagatgaatctgtgcaagacgacaaaagatttggctgctattcgcgtgtctgttgggttactaaacaagagattggaagaggaaagagctgcacttgagaagacacgagagagactaaactctgagaatgcagctgaaatgtccatggagattcagagactaagttatgaagctaaggaatttagtagaacaggagagaatgttcggtatgcggttaataaagctgtggctgagattgaacaaacgagaaacaagattgaagctgctgagatgcgtttgatcgctgctagaaagatgaaggaagctgctagagcggctgaagcagttgcaatcgctgaaatcaaggcggttacaagaagaggaagaaggagaagaagaggaggaaatggtgaggagactatgcaggaggagattcttgagacgattgatgaaacagcaagagaaatcagaagcagtaggaggacacttgaagaaggtttggccaaaatggaagcagaagaaggaaattggtggtggacagaacagaggaggagatcatcatgttcggctaagttcaagaaccctccttatatgatggatgtaaaaggtctgaatatgatgatgaatggtgatgggacatcatcctcagttgctgtcttgaaaccaacaatgtctattgggcagatacttagtaggaaactacttcttgctgatgagtcagcgatgatgatgaatgggagagtttcgttgggtcagattcttggaaagactaactttggagatagagagaaggaaaaaaggttcaatgggaagaggaagcggttcggattcgcaaacttgtctgtgatgttaaataaagagagtaagaagaagaataagaagaagaagatagctttgaacttaagttgttaaaagagtgattgaaatggtctaatctttacattaggacttgttgtttgtgtgttatctatttgttttcgatgtgtttattggtgtatgctaaatattgaaatgagatgtgatttgttatatctttatgcttattccaaagtccaaactaattgcatattcgaagataatagccacatgtatgagatgacgtggttggataatagcttgtagtgttaaaatacctcatttgacctttcgacattcatacgcaatcgactcattccacggatctgcttactcattgattctcgataaattgttcttctcccacagacaccagattctaccaatcatttgctcgaaaaggtaaaatctttctctacaatttcggttgaatcttttgataactcgatatatctcttgtaaagactcttgcttgaatcttctgatctttttttctttatcaggaatc

SEQ ID NO: 9722 - DNA, 3000 bp, Unknown
  misc_feature (1)..( 3000): cDNA_ID_3032701_gDNA_ID_1972175_Annot_ID_179984 3000 nt of promoter + ATG
aatcctcagaaacattaatcaataaattttctttaggcttttacaatgttcgatgtaaagcaacggttttcgctataaacggtatcaatgtttacatgtattcttgtaagacacaagttaatctgaaatatccaaaaacagaactatcaagaatcggtattagccggctgctgcgatagcggtggaggtggcggtggcggtggcggcagtaacaagcttttccgtcgcttccgaatgaaataaaaagcaaatccagaaataagcaacaaaatcacaaaaccatcaatacctccaactaatcccaccacccattttctcacattagatttctcatcactcaatctcactcctttaggaatcttcaccatataactcaatccactaactctctcaatctgtttaacacccatcactatcccatacatgacacaactctcttcagaaacagagtaactcgcagctccacactcacaatctttcttacacaactcttcacatctttctttgcttatgtttctcacttgtgtcccgtttcttagcactgtagtgactccatttagctcaaccatctcatgatcacatagcctcttcactgaaacagcttcttccccgttgatgctgctgcaatatccattgcttacaaccttaatgcaagaacaagactttgagaatgtacagattccatatggtttacacgctacaggaagatcacaagtgtcgctcacagcttgaaacgttgcctcgaactttcccttttccggtttatacgaatagagtcctaaattaccggttctgtttccaagcgccaagaatctgatcaacggttgctctattcttccgattatgcgactgttatcgtcgaataggtcaagaccctttaaccctagtctcacgaagttgaccgttgtgttcttctctctaggcttgtattcccagtaagagtacttgagcttgttcaaatttaggaacagagcaatcttgtcgcgtaagacttcaaaggaatagaacagagtcgagtcatttgggaatgaagttagttgcgtagccacgtctagtctctgaccactcaacatcacatctgttgggaaattgaaactttgccatttgatcagattcttagcatcaaccaacactagattccctgtgctttgtatctccaacctctacaaaattttgtttccaaacacagtttagcatgttacatgtttctgtcattaaaaatgatcaaccaatcaaatcttatacctcaacgccttgtcctgaggttccacttctccatccaacgtgtttatagctactcttgagtctcaagtctccatctttcgtgagctcaatgatgcatttgctagaaacgtacatctttgagtaatgccctgagctccaaactcttacatctccaaggaaaatttgaagggaacataaatatcttccatcatctttgtcgcttgattccattgttaacgcggctttaaaaccaggttctcttgttgacgatgattctgtctctatgatataagctttccccataaaccctggagtgtattctagaggagaagtgagcgtcagagaattgccaaggctgatatctgatttgcagtgaccttggagcttcgagaacaagcagattaagaaagtgaacgtatagaacttcatcatcatgatttatgagatgtttctgcggctgttgatctttggaattttccgggaaaagagcaaagatgataagaaaaagaaaagaagggaaagtttggtatgagtgtgttttactatacacttttgcagggaaaaggtttctgctttcatgttgcctttgtggataatcgttcttgttatcctaaaaccttttttcacctatatttggtatttattttatttttacttgaaaatattttccaaaagagacacatattagtattatcagtctttccacttatttgtatagtttacttcaaaaagtttctaataacaaagcaagagaacagacgttggtgcacgcttggtcttccacaggctcaggctgtccatgtggggtttctgctctgcattcgaatttggatgacacacaatataggatatgagttatttcttttttgtttgtaaaaaaaagtagatgtgtaaattaaacatcgtatataaaaggatatgagttaaattatgttttaagaataggaaaaaaacgatgatgtattgactagcaagcttatatgtaggacttgagagtggggaagtaaagcaggtattgtgttgggaattaggtgagatttctttagtactaataattttagttggactataataattgatattggctggctaaaagatggaccacgaaaagtggcgatccctgtcattgttgttcatgccctttagtgcctgatgtcagcgatgcgtatataaacaccctgggctccaaaaataactccaaaacctgacacttccggcttccaaggcttttctatattttcggcccacgaattgtctaatgcgacccattttcgaagaggagtgtatgctcctactatctattgaaaactgaacttctaaagcaactataaaaggtttggttctgaagaaaaaatccgactcaaatcaatgaatcattaatccagtatacagtatcagttaaagaaatactatgttaaaaaaacaaatcaaatatgggaagatatatagtatatatcaatcctctatcttataatcttttaaaattaaatggaaaaacagaatttactacataaaaaatctttcagatataggggaatgagagaaaaagatctccgttacttaaagtttaaacaattaattagaatttcctttcgaaattaaggaaagaataagaaaaggaaatcctaattatactgatacttaaaacttccgtaagagtaagaacactatctataattttagattttatacgcttacaaaagctacacatactttcgtatttagccaaattcataacaaaaaaacaaaaaagattcacaaaccgctacaataatg

SEQ ID NO: 9723 - DNA, 3000 bp, Unknown
  misc_feature (1)..( 3000): cDNA_ID_3032695_gDNA_ID_1972175_Annot_ID_179989 3000 nt of promoter + ATG
tagtgttaagatgtggtggacttgtattaaatctaatggcttaattatattatacactactacattgacttatgttccctaaacgcagaagacgtagctccaacaacagacgaggcagccattttgatccactcggcgattgactgaaggagacttaaacgacaaccatctctttgattgttatctccacgggactttttttatgtgttttgtgttatttttttttttttttttgtgaatttaaagtcttgttttgtctatttgctcagctctttgttttaaatatgatatgttatttatagtcagatttatttttgttcaatattttcccatcccttttatgtataaccaaaacaaaaaaaaaactaatgatgaaagggtaatagagaataactataacaatgctttcatgttgtgactgaaggcaaacatggaacaagtaacgtgagagtaattgttaacagaggaatgaataaaatgttttgttttcttgaagctatgtctcacaaacacatctcatattgtacatcattttgtaaagcataacaatcacgtaaccagagatatatactaaagtaaatagtaaaaattatgcagttgtttctagagtctataaaaattaaagatgattttggcttatttggacattggacaaagatctatatggttcctctcaccaagttgtatgaaattgacaggtttatagaaatatgtggtggttccgaaatccgaagtctgattatttctcctagtgaaaataagtcgttataggtcaagagttggacatttttgttcccgcatattcggatgttgaagtaatgtagtttacttcgaaaagtatcaataactaacaagtatatatgtaagtagtgtattttaaatttgtataagattttgttttgaggattatgggtccgctaaaatctagattaatatattatactatttttgaaatattaaagcattaatatatatatatatatatatatatattacatatgaaaataaatttaggaaaagatagtctaatataaagaaaacaatctaaataataaattttatgattacaaatttagaaatatttattatgaaagaaaaaatggaagatttaagaatttctttagtagttttaagaagttagataggataagcatctatatatggtttatatgcaatattatagaatgctcttagaaaaatgaaaagtaattataaatggaaatgacagtgtaacaacccctgtcactacagtctacaaatagaacaaatcttcctcacttttatatccatattcacatttagacaatgcttacgtatgtccttacatctctttaataaacaatcctttaaaggaatataatccggtgccttaaatatatacataatcaaatattaaatttaagaaaaaattgaatggaaaaaataaattgaatggaatatatgtacattaccaatttttgttaaagaaaaatatgcacattaaaataggtggttgtctccatacatttaaacagataagagttgtgtttagttgcagatttttttttcaagttcaatactaagatttgatttcaaagaacaattcacatgatacttttttcttttgtcaacgagaaagataagatgggaagtgcaaaagaaaacaattgggggatccgtagaatctttagatcattggtgagaaagatacatcctaaggagccaaaagatcatgaaagcacaaccgaaaatagaggtaattttttttccccggtatttgcagtttgataaaacaaaaatatcctgataaaagctatgtattcaatttattataaaatatcaaaaactgaaatattgggatagtttttccctgatattgaattacctgtttcttatgtaactgtagatgtgatgaacaaaaaaaaaatcttacaagattataaaatttgactttaaaagatatgaaagtataaaatggttacttaagaagaattttagataaaaatataagaaacaagaaaaatatatatatagaaaaacacttagccaaacttttgtttttacatacattaatcttacgacatgctcgacccaagtgggatgagcaaaagtgcactggtccaaagatttatgtttactgacaataaattaaacaagaaaaaagatcataactttcagggtcaaaactgaaatgatctaaaaaatgaccaaaagaacgagtgggtctagtaattaagtttatgtattatagaaagatttatatattccagttttttttacccatgggaccaaaacgatgctgctcatatgcctaatatatatggatcatggatgacttatgatatattgttttattcttaacagaattggcgatgattgacggttcaacctgtattttttcaaaacattacggtaatttcgccgcccttaatctttaataagagttaaacatatttaaaatataatttattgagataaaaatttaatcaatagatttatcgaattaatgatttatattttagggcttaagatgtcatagttagggtttcgtttttatgtgaattttagttcgtaagtacaaaattagaccaagacaagtgacttctcgatttgtgctactatcgttgatgtgtcatgaattcaagtctgcatactgaatgtcgttgaaaaaagaaagtttcagaaatcaagacgagactgcattggttagagggtgtaaaaatatatgtaacatacaagtattatagaagatttcccaagaatgaaattatctttgtagatgataacgatcatctttctactcataaatttttgatctgaaaccttgtttctccagtttcagtctacttattttaagataaagtaaggaggaaaagtatatccatcactaaatctttgtttttttccttacatattacataaatagaggttcttaggttcttttatcctataaggatagtccgctttgtgatcaaatagaagattaagacaacttatataagatatagttataagataatg

SEQ ID NO: 9724 - DNA, 3000 bp, Unknown
  misc_feature (1)..( 3000): cDNA_ID_2032694_gDNA_ID_1972175_Annot_ID_179980 3000 nt of promoter + ATG
cgaatccccagccaaatgttcagagctcacaggttcccagtcaagtttcctcaatacgaacctttgacaatcccatcagttttgggctcccatcgccattcaccataccggtgtactctagtggatccactaccagtagtttaggtttctcacctccaacagaacttgtttttcctcaacccggtgaagatgagcgttttgaagatccatgttatgttccggatccgatatctctactgggacctgtttcagaatcacttgatttaagagctgctgggtatgaaactggcataggacaggtaaaataccaggcgatgaagaatacaccttcttgtgaagccaacaagccatctccaattgagtctcccttgtctagatcacgggctgcggatgaaaaacaagctaatgatggaagctggcaaatgtggaagagtcctctaggccaaaacggtcttggtttagttggtgggtcagcaaactgggttataccttccgaaataagtagatctatcgaggaaagtgatatgcatcacgcgcctcagcatagaacagaatcattattttcaaaagaggattgccagcttcatcaaggtgcttattcacaaaggaaggactatcttgaacatgatcagagaagtggcgttttcagccccattactggtccaaccactactgatccttggtctcagaaaatgttcttccctgcattatctggtattgagagtcctttttctactaccacacaaacaaaaagcgtcttgaacaatgcggcagggtacagaagtccaacgggatctggttcagacaatccatttgaacatccttctcctaatcactggctcaagtaagtcctgaaaacttgttgtttctgtagttttctgagatggcaagacaaagtgtaaatcttgaaaagaagcagtaatgatttggtagaatttgtgaatgtacaggaaggtgaagagctcagggaatgggagtgggaagcaagttttagcggccggtgaagttgagaaccaccaaaaagatgtagaatcattctggtagtcacaaaattaaacaaaatgaggtcaaattttttgcagatacacacacgttgactgtgtctgtctgtctctgtcttttgtcctctcgggtcttcaatggagatatagagataatttagattacattttatgcatttaccattacagtgataacttaatattcaaataaataataagaattaaagtatatttctaatcttgatacgacgaaagttgtttatcatctcgtatcaaacgtagaggcagttgaacaatttaacaaacgaaaatgttcttagattggtataaccattcgtcgaaaactataaagatttacttttatttaaccataagatgatatcatctatcaaaaagtgttaattatagttgatcatatataataagaacaaattataaaggctatatacaaaggaaatttgcgttaattaggttatctaaccgcatgcatccaaaacaaatcatgtatttaaaaacttgatcacaacttgagcaaaatatatggagagcaaagggccatcgccaatagttccacttgtgcttgtggtactcttcggatggttcctatgcggctcgtaccttgtctcactattagaagatgttgtattaccaatcttacaaaccggaacgttcattgtaggaatctttctcttgcttctccttttgcttctccatgtcttatcttcttcttggatctatccatggatcccttctctttttcttttaccatctccggcttccaccacttctactgactccgacagctttggccttggatcctttcttttgctcacactttttttcatctccttctggttgtttcagtcagtgtaattaatgtatattcttcttgtacacaaatagtttctctcattggaatttgtattttcctgattgttcatgcaagatattattatacacttttttacatcttataggaaagaccacttgataaatcatgcaagattccaacatataatgtttttctttttgtaatgtttaaataattaattactgcatcactcatatttcattttgcttgtaaagaaactgaatacaacatatatatatcatctgtgaaaacaagatataagaaaaagaagtaggggtgaaacaaatcaaacacaataaaaaaacctagctagctagctaggatcggagttgcataataatgagtcgatagaagatgttatataagtctccgtgcaaccacctttcacgaccaaccagcacgaaggacatgaaatgaaagcaacaacatgacacagagggaagatcacatgcattgccttgggttttagattcaaattttagggtcagattttgagtactgtaatatgtgtgtttaaataaggtaaaaactataagaaatttttttaagaaacttcttacttgatttatcattttttccaatatttttgtgaagatgtaccaaacatatccaagaaaataatttcaccaatctggtagataatgaatgattcgatatagtatgtatgtgctataaaaacttttatcaatgcttaaacttaaaatagctttgaccatatctaaactatgttataaaataacttttaaaatattctttttttaaaaaaattcttaaaatgttttatatgttatttgaacatttctttgaaatgcccattattagtccattagcccaacaaaccgttggatatatgggtggggcggcgtttaagaggcactgacttgacccgactacccacccggttcgttccttggttccggttttgccttgtaaacattttctttcgtttttcttcatcatcttcttctcaaatctttcgcgtttacggtttcttcgttagcaggattcgaacgaaagccacgagactacgtgattcaacccgaatacgatccgaatcaggattctccttccatcatcttccatccccaatttcaaagctcttctctttttggctgatgctttgcttca

SEQ ID NO: 9725 - DNA, 3000 bp, Unknown
  misc_feature (1)..( 3000): cDNA_ID_2032704_gDNA_ID_1972175_Annot_ID_179977 3000 nt of promoter + ATG
aatgaatcagaatcctccagttcgtctggtgctactggaaatggtagacatgaccaagaagactcgttggatgcaggagtaagtataccgagtacaactgggcctgatttaagtggatcacctggtgaaacagtgccttcggtttcagaggaacgattttcgggagacgcaaaagacttggctactttgaggatccaaaagttagagatttccgatgatgcaatgaaatctccgtgccttagtgataaggaaagtgactctcctttgaatggtaagcatcattcttttaatcagatgagaaatggagaagttttaaatggaaacggggtggggaaacagcaagagaattcctggcatactggttccagaagagttaaagatatacatattaatgagaatgagaatgagcatgttggttatgaagacctgccattcgcaagtgcagtaccttggccacaggaggacatgcatctccactactcaggtcattgtgtttctggcactccgaatatgctgtctgacctctcaggcgattacgagagtcagcttaacagtttgcgatttggtcgctggtggtttgattatgtccaaaatggtcctatgtctccactatcacctcctgggctgcctcagctgccgaacaacaattcatgggaagtaatgcggcatgctctgccattcagacgaaatgcgcccactccagtaaatgcaaatggagttgttccgagacaggttttctttcatgtgaaccctcagatgattccaggtcctggttttggtatcgaggaattacctaagccacgaggaactggaacatacttccccaatgcggtaattacttatttgcctctctaacatctcttacagacactccgtaaatggccaagcttctaacgtctcctttatgcagaaccattacagggatagaccgttctccccaagaggaaggaactcacaccaagctaggtcgccgcgtaacaatggccgaagcatgtcacaagcgcactcagaaatgaattttcctgacagaaacacccgtgagagacagcttcattatcccaaccaaacaaatggttcatgcgatatgagtcacactgattcacttgatagctttcctgataccaatggctctacaaatcatccatatgaaaaggctccagactttaggcctacagagcctctaccagtggaagtactctcccctcctgaggacagcaagccaagagatagcattgaaggtcatcataatcggccacatcgtccaaaacctagaccctcctcaacacaggaagaacggtacagcatatatctcttacccttaaaaacatattgtcttcactgaattattaccatggatcaccaaagccactatctaattcactgtagtgatgtacatgtagggtaacacctacacagtcataccatttgacggatgatgatgagttccctcctttgtagctctggcctgaattacaaatgcatgctctctagaccgttataggaacaggtatagttttctaacttggtttgtctcctaagttatttgtttttacctcctgcaagcgcaaaaaaaaaaaaaagaagaagaatggagctgatatgttttgggctgtggttctttcttgtatgttatctctggtgctatagaataatttatatgtatctttatcaaactctctggacaaaacctttgcagagctttgtattttctacttagacaggtttgctgagtgtattataggatgtttttttttttctctcagtctctattctatcttggtaattctccttcttgtttcttgattcttcttcctaatggatgataaaaaaaaaagtaacaaggttttggtcattataagttgattccatatcatgtcttcttttagtaaaatatgtcattagttgaaaagtgcatgaaatagtaaagagttttaaaaaaaaataaataacagcttttaatatggctaatgcgttcagtttttgtgattggtaactatcaaaatggtaaggtccaattgttgacatcaaatcgtaagatttttttagggtgagcagaagtataatatcgctattttttccgcttttgtgattggtaacaatcaaaatgataaatcattcattgtgaaaatcatcactgaattccttatgttttgttttggtctatgtatagatttagttgaacccaatgtgacaagtttattattctctcaatcagtgctggattctgcaaatcactttcaaaaacattgaattcgaatattgtaataagaaaaacaaaaattgtggggaggggaaatagtcaaataaaagggtaatggtgtcaaagtcacgcaatcatcggttacatacattactcttacatatcgacatacttaacgttaatcaaatctcgtttgacaaaccatcatcaataaagagcacaagaacaaagaagaaggaaaaagtagagcttttttgggaatcagaatcatcatcgatggtgaatccaaagcgtggcaataggtttttcaaatacagaattgtgtaaattgctctctatcttcttctctttcaaattctcttccttttgttgtattcaataactttttccccactttgatgggctgcaaccacatattcttcttctatctttaacttttcccaccaaacttctccttttttttctttttttttgggttctgggtctgcttttttgttgttgttgttgttgaatgaaggtccgtaagggaagaagacagatgattgcgaaagagcaagacgaatacaaattacgccaacaaggtcttgtttttcaaatggcttctcttttcctctctttcgattactccttactcttcttttggttgctcttccgcgttttcttatacgagaatcacgaacgaaaactccagattttctagcacacctcttctctctgcatcgccatcttgttttttcccccaaattttcgattttttttttgtataacttttgagattctgatagatccggtacggagtc

SEQ ID NO: 9726 - DNA, 3000 bp, Unknown
  misc_feature (1)..( 3000): cDNA_ID_2114138_gDNA_ID_1972175_Annot_ID_179973 3000 nt of promoter + ATG
cacatttgacatcctccgcttcaattctaaatctcccggcgaagaaaattaccggcaaatttcacggagaaacctcgccaacgaagcggagttatggcgggcatggctgcggtggcaggattacgaccgtggaacgcttttattcaagctctagttctgatatctctatcatttccctttctctccagcgcttaccgacctggagatatcgtccggatgagcaagatggggcagtatcactctgttcgtacttctctttaacatattagctgagattattttctaatttgatcggagactaaggatctattgattctctggcagtcgagaacgacttggcatgatgtgatcggaaagcattgcccgatcttcgccgtcaatcgcgaggtactgtgtgcaaataggcttaagacatttgatggataatttggaaatttagattgaagcttgcctttctttgccaatttttaggtgttgatcccaatagcgaaaccaattggctacacaggaactgatccttataagatgtgagaattttctggtatttattttgattgcatttcaaatgaaaattttgtatagctctatttggtgcttttgaattgagtttacttgcttagttcattactggtttaaccagcttttagattgtatttagcaatttcgattgttgctactctgaaaggaaatgatgaagatactgtgatgttttcgccatttctctcatctcttttgattagcttaagccatttcgtatgttttttttagctctgtcttactgcagtttgtgtttttctgatgtcttatctgtgctgaacatggagtactgacatggctacatctttatcgtgtttgtacattattcatatgcaaattaagagtaattttgtgcctgatgtgtgtttatggatgatttttacatgcagaaaattccaagttggaagtgagaaatttctgattcactggcttttggtaattaatcgtaagagctcagaagttccgatgatcgatgtaaatttggtatgtttagcattgattttgagtttttatctaagctttgattgattagattatttgctaccaggaaaaaaggcagatttatgtaataccagtttttggatttttcggtgtgggttgattttttcatttgcgcagagatattctggaggagatctgcttggagtcacagctcaagttatcgacatgcctcatagctgtacgtaatactacctatctagctatattgtgtcctgattaggtgctcctgtttattaacaactgttttctgagcgaataagagaattgtctggtctggccaaaccaaatatgccaagtcctacgttcatatttgaaaactctagattatatgatatattaggtgatagcttctcggtgttgtgatgtttggttgcaaagcctatggccctagttaagctggcttcaatttgacactattcttattatatccagagtcttacagtatctggtgtaagttaatatcatcttcaccttcttagagacactgggtgctaatatattggcagtttgcattatagtccatttttctgttgttattttttgtgtcgattacatagactgattcaatctgtctgtctggtggcattactaaataaatttacagtttcatggttatgttaatagtggctttgaaaatttcttgtaactaatgaatctcatactttctctgctctgattattgaattttcatttctgcttgccttagagtagcactcagttatagtttaattgagttgagatcttacccatgaacagatctgaatacacacccggagatccgcaaacagttttgggatcctcaacactggccaaaacatgttcttgttagatacacatggtacaataacttttctcacctcttttcctatctctcctagctaataagtttgtgcatatggtcgaatcacaaagcttaaggataccacgttactgatacgtggctgagatactttattgtgatgcaggaaggagcagtcagagattgatgtatcctcaggattctatgtcctgtttggctcaggtaaaccatttttcgtcttgctaaacaattaattaaataagggacaataagctcatacacttatgtattctcatttttttgtttacttgtgatcagctctcacattttcttttgtactctccatttacgtcttacaatcgtcacgagagaagctggcaaggtaaatggtattcatgtcccctccaattcatacttgtatctttctttcttgaaccttattcttgaaaatgttgttgtaggtttgtaagagagacggtggtggagagcagcagcatgaatgttggagaatttggcaagggggattgagtcacatagtcaagtatatgtatgtttctacaattttagatacttggaatatggaattggccgttcaactctcagaaaagatttttcatcaaacatgaatagtcgaaagcaaaaactttgtccttgtaacattatggtttaatagatttacgtttcttaaaagttactgaaccatcaaccatggttttggttcaatatcaattacctagtctagtcttaaattgtctatagtttgagggatccaagacaaatcgtttcttattttgtaccagcgaggccagacacagtttcagaaaaaaaaaaaaaaaaaggatgtgtatacaagagtgaattacatttttatatagtatatagtatagatctgacaaaacggagagtacgtagtaattaaaactacaaaagcgaaagataagagaagagaaagcaatgcaataaatgaaaccaaccaccaactaacctcacaccttctactttcatgcatttgcactcataagctctctctatataaacccaaccttcattaccattcttcattatccaatccaatccattacttactaagtaaaaagagaaaaaaaaaaaattaagatatggagggactcttgaagttgtcaactttggtgattgtgtgcatg

SEQ ID NO: 9727 - DNA, 3000 bp, Unknown
  misc_feature (1)..( 3000): cDNA_ID_2995065_gDNA_ID_1972175_Annot_ID_179974 3000 nt of promoter + ATG
tcatatactattaaacagataaactaagcctaaactgtatttaccttttaaaaaaattagtcaaatttgtttgacacagcatggtcaattggtcatactgaagaggacagattaccttctcgagaaagcagagggtgcaaatcccaccaatctgattgaaagagatatcaaccacgatgttttgcaccagacatttaacaagcttgacctgcaaaagaaaagaaatttaggtacttgaggagataacaatcaaaatgataagcatgcataaacaccatatacaaacttggaatactcattggtcactgcagactctagtttctggaatttgaataacacagagattatgtaaacaaacctcagcccgtattaactgcacatccttaaccacaaattgggaggacaagttatgctcttccctctcaagtacagcaaaaactttggcagccagttcttcctcatgatacagcccaccaaaagcagtgagatcaatgtctccatcaggaagatacgttttcaatggaaccgatccaaaagaatgtacctgaaagacacataccagtagaaaaaatcacaactttgcaaaccacactcatagtcaatcaaagttataagccgcaacattgcagaatctctggtcagtaatagaaaaaaggtctgctttttgcacaccactttcgaaatataaaacaacaagtagatgacttgagataatctaacaagaaaagccatcaacttaagaataaaaagacacaagacaacattaaaaagccatcaacttgcatcaagagaactcaataaaatgcagaacaacatcgccgactcaagtaaagttccaacatttaaagtttttatccaaatgttaatgcaaacagagaatgttttattcaaatttacctcgcatccaagtgtcattctgataagtttttgaacatatagaatcacatctcttcgtcgatcctcggagacaagagttggatgaacctgctctataatttcacgggttgcttcctcaactctcatccacaactccggctgattcaacggagaccgaggcggcggaagaagcggtggtgataatgaggaagaactctcttcttccaaatcatcgagatccgcagccatgaaaaacaacaaaaacctaaaaactaaccaaaaaaatcgattgatacaagaacacaccgattgatcaaaccaaggaatcagttcgttgtaaactacgcccaggaaattgaaaatccgattgagttcgaacaaaacaagcgagtacaaagaatcgagagatgtctcaggggaagaagaagaagaaagatgagttttttcttctaggttttgaaagatcccaagtgattactgttgaggaccgattttgtgttatttgattgttctttcttctctctcttttttgttttcactgcatcggaaaaaaaaaaaaaacaaatttgtcttaactttgtgtatgcaacttgaaacccttttagatgtcgctctttttgtgtacctttttatttaccttaacgatgcagtatttagaaacaacgaccagcattaaattcttaagacatcatttgaagtttgattagagtgacttgggaagttatttgttcagaattttgatttcactatagttggttaaattgtaaagttcagatattcttccattaagtttttatagagttgtgattcttatgaatgttttaagagaaatgtcaaagattttaatacatgttttcatggtttagctttatcttttttatcattcaaaaagttagaaacttttaactttttttttctatgacatactaaattctcatgtaccttaacaaatataaatttttttttatgatttaactaacgcagtcgcgcttttttctattgaataagctcgattatcataactgattatgcttttaaaaacgaaaaaggtaacatttgagaatcattgtcttcaaaatcctttattcgagttaagttataaggggatccaactgtgtttcacgtgttccagaaatttgatcacctgttattctcgaatatgattttgttttgacgtggtatccacatataatgatatggttagtaaaacaaaataaataactccaataattagataaattaataattaattttgttctataaaagaattttaaattgaaaactccaattacaaaaatctagtaaacgttttgttttggaaaaaaaaatatataaaaatctctaattttagtcccgttttgaaaacaaaaatcaaaatcttgttatacacagaacaaaacaatatagaaaatctgcaaaacaaaatcaaaatttaagaattttacatggaatattaaaaacttatgtataatatttaaagcaacagattttactgatgtgaatataacagtccaaaaatgaacatcgttatatcttaaatatatataacaaaacatatttgttttaacatttagtcgttataacaacgacatttcaccccgaaactatattttcataattttttgtgaatacttttctatttcgaaatatataacacggtcttttaaatcaaaattaggaagcaatgtactaatgtattctaatactttgtgtaaaattttcttatctaaaatctcataacacaatccgtttagctacagatcagatggtcgtgttttttttttttttttttggtaatgatttaaaacgaaattatatacatcactaaaatatgttaaaccatgtctctttttttttgttctgatataagttgattttttggtttcgtcaataatcagttaccaggccctccgaccaaaacaaatatcagttactaggccctatacctggtcaaaactgagttggaaacaataaagttgggcctgatattttggcccaataataacacggatgagagttctcagttctcacatttgacatcctccgcttcaattctaaatctcccggcgaagaaaattaccggcaaatttcacggagaaacctcgccaacgaagcggagttatg

SEQ ID NO: 9728 - DNA, 3000 bp, Unknown
  misc_feature (1)..( 3000): cDNA_ID_2032711_gDNA_ID_1972175_Annot_ID_179975 3000 nt of promoter + ATG
cgtacagctatgaggcatgtcgataacttgagctgtgactccaagcagatctcctccagaatatctctgcgcaaatgaaaaaatcaacccacaccgaaaaatccaaaaactggtattacataaatctgccttttttcctggtagcaaataatctaatcaatcaaagcttagataaaaactcaaaatcaatgctaaacataccaaatttacatcgatcatcggaacttctgagctcttacgattaattaccaaaagccagtgaatcagaaatttctcacttccaacttggaattttctgcatgtaaaaatcatccataaacacacatcaggcacaaaattactcttaatttgcatatgaataatgtacaaacacgataaagatgtagccatgtcagtactccatgttcagcacagataagacatcagaaaaacacaaactgcagtaagacagagctaaaaaaaacatacgaaatggcttaagctaatcaaaagagatgagagaaatggcgaaaacatcacagtatcttcatcatttcctttcagagtagcaacaatcgaaattgctaaatacaatctaaaagctggttaaaccagtaatgaactaagcaagtaaactcaattcaaaagcaccaaatagagctatacaaaattttcatttgaaatgcaatcaaaataaataccagaaaattctcacatcttataaggatcagttcctgtgtagccaattggtttcgctattgggatcaacacctaaaaattggcaaagaaaggcaagcttcaatctaaatttccaaattatccatcaaatgtcttaagcctatttgcacacagtacctcgcgattgacggcgaagatcgggcaatgctttccgatcacatcatgccaagtcgttctcgactgccagagaatcaatagatccttagtctccgatcaaattagaaaataatctcagctaatatgttaaagagaagtacgaacagagtgatactgccccatcttgctcatccggacgatatctccaggtcggtaagcgctggagagaaagggaaatgatagagatatcagaactagagcttgaataaaagcgttccacggtcgtaatcctgccaccgcagccatgcccgccataactccgcttcgttggcgaggtttctccgtgaaatttgccggtaattttcttcgccgggagatttagaattgaagcggaggatgtcaaatgtgagaactgagaactctcatccgtgttattattgggccaaaatatcaggcccaactttattgtttccaactcagttttgaccaggtatagggcctagtaactgatatttgttttggtcggagggcctggtaactgattattgacgaaaccaaaaaatcaacttatatcagaacaaaaaaaaagagacatggtttaacatattttagtgatgtatataatttcgttttaaatcattaccaaaaaaaaaaaaaaaaaacacgaccatctgatctgtagctaaacggattgtgttatgagattttagataagaaaattttacacaaagtattagaatacattagtacattgcttcctaattttgatttaaaagaccgtgttatatatttcgaaatagaaaagtattcacaaaaaattatgaaaatatagtttcggggtgaaatgtcgttgttataacgactaaatgttaaaacaaatatgttttgttatatatatttaagatataacgatgttcatttttggactgttatattcacatcagtaaaatctgttgctttaaatattatacataagtttttaatattccatgtaaaattcttaaattttgattttgttttgcagattttctatattgttttgttctgtgtataacaagattttgatttttgttttcaaaacgggactaaaattagagatttttatatatttttttttccaaaacaaaacgtttactagatttttgtaattggagttttcaatttaaaattcttttatagaacaaaattaattattaatttatctaattattggagttatttattttgttttactaaccatatcattatatgtggataccacgtcaaaacaaaatcatattcgagaataacaggtgatcaaatttctggaacacgtgaaacacagttggatccccttataacttaactcgaataaaggattttgaagacaatgattctcaaatgttacctttttcgtttttaaaagcataatcagttatgataatcgagcttattcaatagaaaaaagcgcgactgcgttagttaaatcataaaaaaaaatttatatttgttaaggtacatgagaatttagtatgtcatagaaaaaaaaagttaaaagtttctaactttttgaatgataaaaaagataaagctaaaccatgaaaacatgtattaaaatctttgacatttctcttaaaacattcataagaatcacaactctataaaaacttaatggaagaatatctgaactttacaatttaaccaactatagtgaaatcaaaattctgaacaaataacttcccaagtcactctaatcaaacttcaaatgatgtcttaagaatttaatgctggtcgttgtttctaaatactgcatcgttaaggtaaataaaaaggtacacaaaaagagcgacatctaaaagggtttcaagttgcatacacaaagttaagacaaatttgttttttttttttttccgatgcagtgaaaacaaaaaagagagagaagaaagaacaatcaaataacacaaaatcggtcctcaacagtaatcacttgggatctttcaaaacctagaagaaaaaactcatctttcttcttcttcttcccctgagacatctctcgattctttgtactcgcttgttttgttcgaactcaatcggattttcaatttcctgggcgtagtttacaacgaactgattccttggtttgatcaatcggtgtgttcttgtatcaatcgatttttttggttagtttttaggtttttgttgtttttc

SEQ ID NO: 9729 - DNA, 3000 bp, Unknown
  misc_feature (1)..( 3000): cDNA_ID_3032713_gDNA_ID_1972175_Annot_ID_179972 3000 nt of promoter + ATG
ttcaactctcagaaaagatttttcatcaaacatgaatagtcgaaagcaaaaactttgtccttgtaacattatggtttaatagatttacgtttcttaaaagttactgaaccatcaaccatggttttggttcaatatcaattacctagtctagtcttaaattgtctatagtttgagggatccaagacaaatcgtttcttattttgtaccagcgaggccagacacagtttcagaaaaaaaaaaaaaaaaaggatgtgtatacaagagtgaattacatttttatatagtatatagtatagatctgacaaaacggagagtacgtagtaattaaaactacaaaagcgaaagataagagaagagaaagcaatgcaataaatgaaaccaaccaccaactaacctcacaccttctactttcatgcatttgcactcataagctctctctatataaacccaaccttcattaccattcttcattatccaatccaatccattacttactaagtaaaaagagaaaaaaaaaaaattaagatatggagggactcttgaagttgtcaactttggtgattgtgtgcatgttagtgaccgctccaatggcgtccgaggcagcaatctcgtgcggcgcagtcaccggcagcttaggtcaatgctataactacttgacccgaggcggtttcattcctagagggtgttgctctggcgttcagaggctcaacagcttggctcgtaccacccgtgaccgccaacaagcttgtcgttgtatccagggagcagcgagagccttgggttctcgacttaacgctggtcgtgctgctcgtctccctggtgcttgccgtgttaggatctcttaccccatcagtgccagaaccaactgtaacacgtacgttatcttctatctcactctatatttattacatttttacttgaggtcctaatatttaatggagtggtagtaaccatatgattgatgtatttggttggttgcagcgtcaggtgatcaaaagaagatagacgttgaagggttttcatataatcgatgagagagtattaaaaataattaagatgtcacactatatacacactagtgtatccttttactgttattattgttgtgtttctagattttgtgttttcatgtctttctttgtatatgacggtccatttaattggtcgtctgtgttatgtactcctctaatgatatattgaatttacgattatgtattatcttcaaactcttgccattaactttggtcacgttctgcttttggatgcatcctattccttcttcttctccacagtccgtacacaattctcttaacacgattattatcagttgacttgtgtagatgtaaatagaataagttataatcaaatattaattaagatagtccaataatggactcatttgtaaaaagaaagaaagtaaaactatgtttcgattccctaatacatgtggaaccaacaaactatagaatatcactgaaataaggtttgatttcattaattcatcctcaaatatcctcaaaattcactctaaaatatcctcaagagtgtactcatcactctttgttaaccaatccttatctacttcttcaaactctcacaacttgctcatttacacttctcactctatcattcgtaatattttcgtcggtgagtgtgtaatatgtcgatcgaccctacatgcagttgctaaagacaccttaccttttttctttctcttgtaagcgttacctttttaaaagtgaaaaaccagaaacataccaaaacaattaaaatgtcgatcgaccctagaacttttactgaattcttttattgaagtttgtagtgtgttttccaagcataaattaattacaacgattacattaccatgcatgtataaaacgaaaaacaaaaaaatggttttatcatgcactagatcgatttacgattatacagattatatctattttctaatatgagttgcctacgacattttttttttctttttctgattttttttttttgtaaataacttgcctaggacttgtggagatccttttggatttctccaagtacgtgtgaccgtataacctccaagagtccttgttcgataaatatataaatctcttaggccgtctatttgttttccatgctttcctctcttgtcattttcctttgatgtctccaactctttaccatttgatgatgctttggaccattaccatttttttcttctctattccattacttccttgaactgccacttgatcaccatttttggtccacatgtccaatagactattggcaatagtattactcttttgaaatcgtgtggcctcataaatatgtgcttagccttatgaccaccttgtttgacatgtacccaagaataacataagtacactcatttcttttctattcaaaatcgatgcaatgcaattccgttgtatttgcatatgtttctacttggtgtgtaaaaagaaggattaatcatatgtttccactttattttctgttgatcataaaacaaattcactataataatttcatgattttcttatctagttatttcagaaaatattgttatatgattcgaaataacaaggacagtccaatttactattaatcaagaagaaaattacttaacacaaaaccattacaattttttccatcagtcataagtttaagacttaaacccataatatctattcggattataaaaaaaagttaattagtttcttttcaatcgccgaaatttgtaatttataattccgtccagagttgaatctagttttctgatgtaacaacttcttgaaactcaattaagcgatagggaatgcaacgtatttactttggaatatgtgtattttaatcttaattcaacaaaaaaaataaaattttcattaaatttgcatgcatatggaactaagcataattaacgggtacgcatgaccttcatgagtgtttccaattataaaatccctaccgacctcaacaaagtaaaagcaataaaaaacaaaaatg

SEQ ID NO: 9730 - DNA, 3000 bp, Unknown
  misc_feature (1)..( 3000): cDNA_ID_1379940_gDNA_ID_1972176_Annot_ID_180001 3000 nt of promoter + ATG
taaataaagaaaagaaagatgacgattttgccccaaaagttgaaataattacccaaattcccgcttgcgcctcccaacactgagacagtgttgtgtctgtgtactgcgtagggtttagtgagtccatttgcaaagatgactcgtgagttctaatctatcgacctctctcgttttctcgcagttgcagagtctcaggtaaaccctacaaactataagcatctctcttctcattatcgaagaagtttttgcttttcaataattcaattgtcctcagatgataagaatcactcttcgtgtgtgttgtctgggattgagagtcttcgttttgttgtttgttatttagacagttactgtttcgaaataatgaactaaacggatctgtcttaagaattgtgtttctttggtagacttgttatgttgtctgattctgatttcactttagctcttctgctacaggattatataataggacaaagagagagagacaacatgcactctcttaagactacttgcgttgggcaaatatttgctctagctaagcctcacgattctgtaggcaagaggactcgtaatcggattcctaaagaagagagaaagacactggttgaatcttttataaagaagtatgcacctaattctcttccttagccggaattttgaattttcccttttcaatcccagcttttgtaattagtgtttgttttcaggcatcagaaactaaacaatgggagttttccttcacttagcctcacacacaaggaggttggtggatctttctacactataagggagattgttagagagattatccaagaaaatagagtccttggtcctggtgacttgctacttgagggaaatggctctgtgcaagatcaaagtctgtcaagttcaatcctgatggatcctgtgccccctttatctttgtccccaaacggatttcattctgggtcatatcaaagtcttgatttttcttctgagtcacctgagggaaacgttaacggtagccaggtttgcttggataattgcagggaagtgagtggaagtcaacttttgaaagaagacattgggctcgtacaccagtcaatggactccactgacatatctatgactcagcttgcaacatcttgcagtgaagacaatgatatcaagagtaatgcagggctacaaaatagaatggagacagtgtgcgatagcgttgacaccaaaccacaggataaaagactcgatgtggataacaaagacgaaggatttgaggaacttcgtttcatggaatcagacggcacaaagcctgttaacaatgacgatagagtgaatgatgcaggagcagcaatgaccgaaattaagaacggattaggcacaattgatatgtcagcagaaacagttgttgagacgtttccattaaaatctgtgacttcaacgatggactcaccggatgcacaacctactgagttgaacaaagtttgtgagggtgggaaaggaactgaaacggaggtggaagctgatcgcagcacagtaaatcatgttgatcttggggagatttcatcatccacttcatctgctgtacttgaagacatagggacggaagtcattgttggtcaaataccaaatcatatttctgtccctatggaaaagaaagttggagaggaaattgtaaattctgcttcagtagatgttgaatgtgctgatgctaaagagacagttgttgtgaatggtgtgattggcaacgtccatgagacaaaggaatttagtaatggaactttgacagctgaacagaaaatgccaacatctagcactgaggtaagcttcgtctggtatatgtgtgccttttaaattctatttggatactggaactagataatcttcatgggttcgatgcaagaattatgtttgtgttccacaggttgtcctaaatattctcttagttttcctatctgagtttaggataaggtttttcatcatagtggctgaaggacgttaatgatggaatagtcaacctcttgaatgttttaagatgttttggtagtcaattttgatgttccaactttgagaactaaggtgaaactgaatatacgcggagctgttagttgattgttcttaaaaactgagttaaactacttggcacatgaaaaatctagaaaaggatgataactttgtaaccttttaactgtgtaacagtcgggaagtcgtaagaacgacagagcaaaagtggacactgtgagtagctatgccgggaatgaagtcgcaagtgtagagaagaaggcaaccatggaaaaagggaaaattgatgctccagatagttccagctctcaaaaagaaaacaatgcaacattaaacagaattaaaccgtgagtgaacacactccgaagtctcagttgtgctttagcgttgttggtattgtgtttgggtctcctttttcacatagctttcgttcttcttgttttcagtgaatcgtggaaaggggaatctaatatgggaagacaagaaacaaatcctctcttggcagttctgaaatctttcgtgacagcctttgtgaagttttggtcagagtaataattcattgtagagatccgttggttaaacttttgtagttttcattagtgagagttggtaagcttaatatggtttgaaatgtgctgtacaatttttgtgttgaatgtttaggttacatataatggtttgagtcaaatatagtccaatcagggatgaaacatcagaattctgattatcttcttgaacatttcaacggagatgatggatttcagttgtatgaatttatcgattattgcttggagaatgagagattacttctcattggtcaaaaaaatggtaattacctgaaccgagcattggtttagttacaccacaccaactgaatgatgcagcaaaacccgccacttcaacggtaacatgcagcaaagaagccatctttctgttacactgactcatatttatttgattatttattgagagaccacaaggttttgatgcttagtgaaaatg

SEQ ID NO: 9731 - DNA, 3000 bp, Unknown
  misc_feature (1)..( 3000): cDNA_ID_1030715_gDNA_ID_1972176_Annot_ID_180025 3000 nt of promoter + ATG
agatggttcggttaagttcggtcatggtgatggttcggcttatttgttcgatcctgatatttataccgatggacggatttcggttcaagggattgacggtgttttgttcccggaggaaaaaactccggtcgagaagaaaaccggcgttccagttgtcaagaaagcacctaaaccaagaagaggtaatcaaattttgatcaatctttagtctattaatttttgtccttacctatttgatcgtgacattttaaccccaaattatagaaattaaaaaaatacataccactactacaaaaatacaaaagttttggtatagacaccattacaaagttataaagtcactcgcttagggaattttttatgttctatgattttgtcatattaaatggataactaaatcattgttatagaaagataatggtgattagtccatatacaattagtctttcaacgagagagtactaagtaaacaagtgagatttggaaaaagtacaaacgtgtgagaatggagacaaagtctctctaacaaactttgatataatatataaaatttcaacaatattatacaaaattttggagataattaggatttataactacttaatgatccaccgacgaaagtatcccatgttaaagtgaatgaaaatcacaaagtgttcctttttctttgttttttgttctaaagccaagtatgagtcatataatcatattgtaataaagagagaaaattttctttatttatttctaaatatattatttttgcattagttagaaacaatcattttaatagtccttcgttgttattgttaataaaacaaaaaccaaaccgtttgaaaaaattaataatttgtatgatttatattatattgcaggtaaattgatggaagtagcatgtacaatgctgggatcacaatttccaacatgtcaatgagatcaaattaaatccgggacatgagaattttataattctgtaaacatgtgataaaaatgtgaacagaaaaaagaaataatgtaaatgattatttttttgggctcgttgcaatatgattgttaaattgtaattttcagttgttttgagctgacgtaaccaaaccagattgggtgggtcttttcttttctgttggatgctactgtattggatcgaatctgtccatttagagatcttctaatggactactagattaagcagccctaggtggtaggttatgcattggaaatactgtaaactgtaaaggcaacaatgtccataactctaagaaaataatccatctaattcagaacatcaatatacccaaatccagttttagaaacaaagtaaaaacagtataaaaaaaaagccaaaatgtgatgagaagtcacatgtcatctcgagttgatattccaacaagttgctaacattaaacaacatgggatagcatatttgatattccaattcacaacatgagcatgcccggtccacaactcaagctacccaaacaatggctaagatcatcaaaagagatgagtaaaaatacaaaatattataggtatttgttattaattcattttttgttggtcttttttttaccatatcacatgagttttaagctttaaagttaataaatactaattaagcggattggtaatgaatttttagtaaaattttggttagaaaaaaaaaaacgaaaacaaattttttcttcttctttttgtatgaatataaaactatattcaaaaagacgtttgcacaaaattttaatttcgattgattccattgttatttatttttatgttggcttggattccattggtattaaggtaagtgattttagtgacaaaatggaagaagttgctttgaagaaaaataattgaaaacaaaaaaaaaaaattgactattgtttttattttcttacaaactatttatggatttaaaagttgttttatcaagttttagtatgattttttttatattatattattagtaaatttgcgagaaaaatataaagagcatggtttttttctttacgtaaacgttcaaaattatcagtccggctctaaacatgagatagtagattctaattctcgtcatgagatcgtagattctgattgacaacaagagataggagattcctgtttacagtatgagattgtagatttcattcacaacatgacatcatagatttcaattcacaacatgaagcaaatcattaattattttcaaatgtcataccaatctcgtcttctcgaatgtttggagcttcatgaccaacctttgagtaaagagcattacaaagtcgtaatcgttttaaaaacaagttaaagatttcgtttctttggatgattttatgaatagtataatacaaatttacacaactcaccacataatatcctttgtatgatccaaccaatttcagatggagaaaatatagttgcatgagtatctacaatctaagacacaaagacatagatggatctaagggagactgaactcttgtataatggattcacaatcacaagaaacaaggagagaaacacaaattgaacgttattatttccagcttaatggacttgaagaatgaccatcatgtttgtgcctaatctgattttctccaaattctttagaattctctctttgctaatcctgaccaatatgagaaattcaccatttttttgctcataggtgctatcaataacagtttcaagtttcaacaattcaccatttatataacattaccaacagtccaacactagtaacataatcaccaaaatatattagtaataaattttcatcacagctttatatttttgtgattagaaattaggatcttacagaaatctttcaaaaaaaaattcataacagttccattttttttggtaagattcataaaaaaattcaagttaaatgcattttataaaaatgtaggaaaaactttcatcaaaaatcgttgagaagaacatacagtatatcttatccactctcttcctcatccacgcggcaaaggcacaaacctctttagaaaa

SEQ ID NO: 9732 - DNA, 3000 bp, Unknown
  misc_feature (1)..( 3000): cDNA_ID_2994876_gDNA_ID_1972176_Annot_ID_180023 3000 nt of promoter + ATG
tgtagcatatcatcgttttaccaaaaaccgttttttcatccatgactaaaattagttttgtctatatttttgttaaaagaaaacatgtatgtttctacatatatattagttatatatttttctattacattataaacaatatgtagtcaaagttcgttaatttatttaatactctctagtctctattatcaatgcgcatgcatgccagcatagagtagatattttaacaacataacttcgatattagatatatataagtctaacgatacatatcgttacatatgccatatagtttttaattttttttatatagtttttaatttatgtctagttttttttccaccatttatgtctaggttaaatagaggaaatgtatagtgtattccgatccagtgaataacattagttttcagattgtcttgtgtcttattacgtgcatgtgcccagatcatagaccagttagctgtctgaaatataaatgtctgttgttccattaaatgccatgatccataaaatatcacgcatcaaattcatacaaaccgtgtattctatattttcgaataattttaaaggtatgaagcaatcatatggttgtcccaataaagacaaataaaagtgatttattgagaactcgcatcgcatctaatactgaattgtaagatcttccgtatcaaaaattgacccaaatagttcgcatctaacagagaagtttccgaagcagtttcttctttaactattgcttttagtccatttttctttttcctataaagaaaagcctcgacaaagggctgcttttttcactccattattttaataaacaagtaaacagacttttttttttcatctatcacattccttttactgctttacataattagatgccaaattttactggacgaacttaactatcacaaatgttgaatcagtgatccaattgttgtgtatctgtatatccaagactgtaggctaggccatataatctggcaatctattatatatacgatttaaatcaaagcttttatattataaacataaaacttctcactcactaggccagccattagatcaaaattatataatttacagatgtacatgttagaacaaaatgaattttcaggaaacctactattgtgtataaattcgaagttaatgagttcgaagtagattttgtcacgggtttcttggcaaagtttttaatcaagaaacaattatttaaaactttgaaaagtatctggtcgtcaagagtaaattcgtgatcagtgtataaactgctgtttggaggcacgtttattttcttctaaaattatattttgccggcttactttatttttgacttgtatagatgcttgaaaacaaaggtatatgtgtttgaaggcgatgaagaacctaacggtaagcgaaacgtcgtcgtttcttgttctacagcatgtaagggaagcgatgtgtactctaattaaggcttagcgtaaacggtaaacactaattgacatattcccatgagaaccttagccacttttttattttcacgttgttgtaagaatataacaaattgaaaactatatgctgtaatttgtatgttgcatatttcgtattatactaatccctataacaaacatctttgcatacaatcctagttttttcttcagctatgacaatttatattagtccctagaaatcgatatataatcttgcaaaggtataacttcgattcttttcgtataaaaatttgaacaatttgcgtttacgctatatattaattaataaaaaattgttttacaaattctaaacgcaatgttttttgttgttgttgtttgcgtatgaaatagaaacaacttttgactaaaacagtaaagttacacgattagatctagattgtatgatttgccaaactgaacatctggctatctgagttattacatattagaaggatcaccggcgaggattctatgattcaacaaacacaacgttaaaccaatgatttcttataaagaaaataattctctctttagaatatttctgagaaggggttgttgttttttaagtgtcgcttactcgcttcaaactaaagggaataaggatagtaaatagctcatccaggcggctatcacaatcatattaaactataggttacttaaataaatatatcattgaaatttttaattagattttcatgctaattccttagaagttttctttttctttttttttgttaaaactaatttcttcgaagttttgacggtcacgccgacactttgttttgacatgcccgtctaactctttttttgtttgtctttctttaatactactaatatacaatttgtatgacacttaataatgttagtgtttaaaaataattatagttctacataccccaatacaggacaataataagtacatctcttttatttcttatgcgatttcatttatgtctactacgaaccaactagaatttgcatccatcacgatgaccaattgacaaaaacaattgcttaacatttaggttttacggaaattatcattccttaagaattttgtttattttattacagatagaaaaagacgaaaacggaaagattttgacttgaaggcaacgtgaaatttgtgcatttgagtaaccgacacacatgaagctcaaacacaaagacagagctgagctgttgttaattccctgaaaagctcaactcttggcttcatgttttatcgacgtcaccatacatttatttcccttatagacccacttctcctccccaaaataaatactataattagagaaagcattaaacccacccacccaaaaccattaaatcattaagaagaaaatgtttattaataataagaaaaatgaaattatacacaactaaaaaaaaacaaaaggaagaagaaacatcacaatcaccaatcacctcactatatcaaattctttccttattcactaaccaaaaaataaataaactcaaaaccattcttcatttcgccgacactttcttctccaccaccacc

SEQ ID NO: 9733 - DNA, 3000 bp, Unknown
  misc_feature (1)..( 3000): cDNA_ID_3032745_gDNA_ID_1972176_Annot_ID_180013 3000 nt of promoter + ATG
aaacgacatatacttccaaacgctatatacaagtcgaagagaaaattaaatgacaataacaaaagatatattttttgacaaataatcaccctgaattcaaataaatagtttgtatttttaatcaaaaaataaataaataatgttaccacaccataaacttcttaaaaccacatcatatatgcagcaagccagcaaatatagatatatcttttgacaaatattcaccttgaattcaaataaataatctgtatttttaattataaataacataaaaatgtaacaacaccgtaaacttcttaacaccacattatatatgcaacaacttttgataacatgcgtttttaccaaattttgtttattcgtgaatagcatattgttatttattttattattattaattattagttatagtaggcatgttaaaaagtcttgaatggtgacataattattagaccactgttaaattgtttagtccgcacgattcatacacggtcttaacttaatttcgatttcaaaatttgaatttcacagtgaactaatataatctcagtcccttgacgagaattgtacatggatactggaacaccgagttgctaacgatgttgtatctgttagagctttccatcgccatctttgtgattcgctaacatctcgtagagcttatcgtacgagaaacaagatgttcaaacttgttttaaattaatcagcggtttgacacaagcggttcttgtgtaggtggctagaatcatctatgatccaagcatcataagccatatctacatttccgggcctaaagattgaagatgctgtatctgatggatcattggcttgctcggtgatctcctttacttttttgctttattttgttttgaattcgtttactttgttgaatcttccaagagtctgccttaaacttgtgaagtacttcatgaatttaactggtttatatcattggatttgttttgtttgagcttttttttttaaactttgaaattagaaccttgaagtatttgatgaatctagttcatttgatcagtgtcagaatttggttttaaaaaagtcacatcaaaataattggggttgattggctctttcccctcatcaatacttgcttcttttttatacccaaaacaaacaaacaaaaaattgttaaaaggcttctttctgtttttttcttttactatttgacttttactttcgtcaaaaaaattaaaactttggcaaaaaaagaaaggggcattccgagaattgaactcgggacctctcgcaccctaagcgagaatcataccactagaccaaatgcccttttgttcaattgtttggttgacatagtatatttatcttcgacatattttgggacataacctaaactaaagtatgtttaagaatgttcttagaaccaactaagtaacaaaagaaaaatccccacaaatttcccacagaattcttaagaatagaaacataaatggcaatggtggtggacctgatgggtcaagagccatggaggagctggtggaccacatgtctatcttattggatgaaaaacgacaaatctttgtacaaagagcgttttgagaattgaaccccggcctctctcattcagaaaattaatacaaatgcaaaacatataatttgtttatcaactgcttatagatttcccaaaaagaaagtagaaggttcaacaatttcatgttactagctaccataaacattaaaactggaaattaaactagaaaaaaatgttcatttcatggatatgaattgcttctgtagcctaactgggtttagatatgtttctagttagtcctccaattaaacagatcaattcgattaaattttagaaactcaaaacagatgtctgtcacatcatccatcacaagaacttaaaaaaaaaaaacacatttctcatatgtcaatttaattagttttttttttccaaccaaattggttcatgtacttgattatgtatacactatacacactcatataaatggataaggtagttttatagtccaaccaccgacaaaacgtgcattccacttcttcttcttcaattgccatgccgtcgtcaatatctcaaacttgactaatataaaccaaagaagaagaagtatataacagaaccaaaaaatataaaaattcatgttcgttgtattaccaaatttaatttacacttaaataaacctaccaaccaatcactcaaaacaaataccagttcgttacacaatggacacttgaagttgaaagcaaccgaacaacaaaagttttaaaaactaataaaaatttaggtgaatataataataaggccaactatgaagaaaaggtctattttatactttttatataaccttttgtcacgggcactgtttcattcccttggaccccttcttcttcaagatctgtttcttccttctttctctctaaccagattttgttgtaccagagagagagagagagagatcccttaataattcttacacatttatctttcttgtctgaatcctaacaaagactttagttttggtcgatcttataattttctttttttattctatggatttctcttccgggtttcaataattgtcacttccgtagtgtaagtacgcgtgtattgtatactagtcagttacacaagtgtccttatgtgtttccttgtctttaattcatttctgaaactgaatttattcttctctcagattctgcaaaggttttggttttttctccgagtttttttgtccttcaaaaaaaactttggttgctctctctctgttcaagaagatccgagcttgattcctaatctgtgagttttatgcattccatttaaagctctgattttgtattcctgtatcaatgtttccccctaatgttatagattttggataaaagattaagtcttgatggatcttatgattaattgtaacaatttatatcatccttgggtcatgaatttacctctgtggttttgcatttgcagatcatttgagaagaagaaactaagaa

SEQ ID NO: 9734 - DNA, 3000 bp, Unknown
  misc_feature (1)..( 3000): cDNA_ID_2026998_gDNA_ID_1972176_Annot_ID_180005 3000 nt of promoter + ATG
gttcacctgataattcagtaacgtcacctgataagtgctgcaatagttgtggttccagatctgtggaacaagatgcttattcttctcgagacaaaggaaaacatatttctgagagccctacaagtgagtattcccaaccacagagcagtaaaggtatcaatgagcattcttcatcaactattcggtcgcctcctgtaacgcaaccaaactcgagaggtggtttctttggcagtactaccactaccattcatgaagtagatgatccattagtttcagtgaaagatgtgaagcctgatacttgtgaaactgtactgaccgcactaaagcaagcgaagctgtctctgcaagagaaagtcaatagcctacatatcagaaacccggattgtcattctgaaagctcatatccttcaacaccaggttcatatatgaacacatatgcactaccgatggaaccagcatttagtactaaaccatctctccctgcttccagtgtcgggtccatggtagagtttccagttatctgtgctgctggacttttccgtgtccccaccgattttacatctgatgcttcaaataggaacacttttctagcttcgagttctcagaacgccatggttacccatatgcctgagcgagacgtccccctagtacctggagatcagcttttcagcagaacagccacaaacaatctcctaaatactggcttccaaagccaactagaaaccagtcctcctttgtcagtggatgaccgactttcgaccaccccatacatcggtggaccaaaactatggtccagcttcagggcagatggtccaccgatggttgatgttccaggattcagacttaataaaggcataccaagagtttcaggcagtgcaatctctggtggaacatctggttttgaaggtaaccaagtatcgtcaagtacatataatacccctgtgacacctactcgaagcttgtatcctgattcagttctaagcagtagagaattgtattcgactccttattacacacgcccgtttgggctgtctcctactagtggttcagatgatggcttatttaggcgagaatgattctgttgatccttgtgaagccgtgatatgattgttggatctttgtagagtgtggtggttgttatatacactgtagactaatatcagctttgtgtaacgtcaaaatactgtatagaagaggcaaaagttatgtatgtgattcataacttggtcattataggaccgtttgttgaaatcccatttgttgataatgtttgtgtgttcatttgttcggtttatgatatttaacatgacaaatctcttgaaacttaactagcaatgatctaactacaagtcacgaactaaagagacactgcacagcaacaacaagagatttgtccagtaagaaaaaaaaaacttcttgccagcatgagaagagatttcgagtccccttagataaggagatgagactcaagattcaagtacatacaatggaaaataagaaatcttcattttgaagtttatggtgtttttgctatacagaaccaaagtgggtaacattttcatcgtgttcaagtaatatgactagtcttcatgcccatcagatgattgatcatcctcatcatcatctttctgatcatcatcacccgtcgcctcctttttgtcacttctctcgttcctttcattccatcttgcccaggcccacttcaggacaagaaaccctccaagtgcatatacctgaaatagttatagagaatactccactaaattaaccatgaaagaatccaactttttccaggatttgaaacaatcatcagaacaaaactctttcgtatacgtcaggagtccattgatgagaaaataaagcacaccacaaccaaaacatctcgattctcgagtcatgctattcatatatcaagtcagcctttgatagctctgactactacaaaacttgcaattgaaaggagcaaaaatagtatgcttcctactccatgaacgacagaacatcaagctaattgttagaggtcatctaaagcattaccaggaatcgaaggcataacaaaaactgaaaccattttcaacattcattgtagcacactgcaactgactgcaaccaatgaaatacattgaaaacatcgaaaactatttgcctattgatagagaaaaaaagccagaatagtttctagtaaacaggaagtgataatctgagtcatagagtcataattatgaacatctaccataaacaaccatgtccctacaattctcataaataacataacaaagcacctctcaccaaaccccaaattataagccaattcaaatcatttttcatcaaagaaccctctaaaatataaacatcttaacaaaatcacctgccaaaggatgacagagttggaagtcctgccagagctgggctcagcctcaaacttgattggctctgcgcttttgggtggattgtaagggaaagtgacagtctcgtaggtcgatttcagaggttccttctcgccggtaggtttaggagcattggcatcaatagtagcaggaggaggcttaggttgaagaaaggcgaataggttggtgatgaaaggaggtaactttatgggaggagatgatgaatcagagccattagaacgatctacttgagcttcttcagccatttttcctccaccgagacggattttgagtttagggttttgaattgaatcggtgtggattaggtaggctttacaattgtctggtggtcacttctctccacttctctccttctttgcttacgacacgtgtcacacgtgtcttttcaagtttttgtttctattaacctctaatgggcctaaagccttatttggcccataataataatcaccgtcttcagtttgttttttgtatttttgtttttatttaaactccattggaaccaaaaatctgagaaattcgtatccaatcaaagttctggcttttagcctcctgaggaaaaatcaaggttgcaactttcagggtttcgatg

SEQ ID NO: 9735 - DNA, 3000 bp, Unknown
  misc_feature (1)..( 3000): cDNA_ID_2032797_gDNA_ID_1972176_Annot_ID_180007 3000 nt of promoter + ATG
aaagagaaaaacaaaatcagtgtttacaagaacagatacatgatggaagaattcaagtaatatgaaaataatgcagataactccaaatagatcaggaatgagaagagcacgcagagagaagtattaacaaattgtattgtacctggtgatgaactgcaagctacagaggatggtgttgtaggggaaccataatctggaacaatggctgctgtgggacttttatcagcaatatttttgtttaacgaatgtagttcctctaaaccgttttccatcaatgttgttccatcttcatttgggttaacatcaactttctttttctcatatttcgccagtccctcaccccacccgagacgttgtttctttctagaactcatctcctcagaaagatgagtagttgtggcacaggcagtagcgtctcctgaagaagattgagtcacagtaacaattttaggaagaacctcaatcttccgatcgctggaatcaacagcccccaagcttttcaagctacttgaatgactaaaacctgaactctgagatgcaaaactcccagaactattccacagtggaagtttcccagttgctcccagagaactctcctttgcacatttcctatcaccgtctatatcattgataccatgtaaactattgttatcttgcgggtctttcaggcgaagttgttcccaagtcccctccagctctgcattggggattggagcatctaatgaattatcactaactaaccttcgaccatacatcaaatcattgcattgctttgctggtgaacaaaccttattgccataattgttctcagaagaaggccgttcaaacaagctaatacattcagaatgaggatctgaaggaagtgataacctttgatctgaaaatttatgctcatttttaattttaagagaccgtactggggtactgatctcattgtccagataatgagccgagttggctggatccaaagagttcaccacggtagaatgagtatctgaagcatgtagcggcctttcatcaactgacctccgaccatttctaataccaaatggcctctcaaaacttctagaagatccgttgctcatctcccatgtattgcatttccattccttttggcttacagaaactctatcatccctgcaattcctggtatatctccagtctccacgcgatgctgatggcctataattatcaaacattcgggcactggaccgagaagatgtgtatccatgactagtctcctccacaaactggtgccgtccaccctgcttaccatgaccttcagaaaattttgaagacaaaaggaagatgagaatcacaaactaaagcaagacctgtattcaaccaaatatataacttgtgaaactaaaaacgacatctatccaaaaaaattagacttttactgctgtcaaaacatgtagtataagattctccaaaaggaagtcaaacttagaatcattataacacgaagtcaagttaggagaaaaaagtgtcattacgcccacacagggtttcaatactaataggaaaaattatacaagtaagaaacctgcaaaagtaggagctatcttcatctaaatctacaacatgtaaaactaaaactaacaacactccacgatgctaggactttttatccgttttaagattcatgaacacaaaacacaaacacaattgaggtaataaagtcctcttgcaatgaaactaaatctacctgagtattaaaaattgctcctttgaagagtaacctcatcaattcacttcctatcaatcttaagagctgtgttaatgctccaaaaataccctaagctatcatgacacagtgagaactcaatctaagaaacaaggatttgcctctaaatcaattcaaaaaaaattatagaaccaaaaaggaaaagtggatatctaacaaatccacagaaaaatagactctaccaaaaacagagcaggagaattcaaagccctaaattagagagagaaaaggaggtcttacaagaaggtctgcggaagtctccagatcccaaacgagaagaaaactctcgaggaacatggtgagaagaaggcgaatccctccatcgaaaaggcggggattcaaaagattgttcaggcctatcgtgtttcctttgcctcaagagctctttccgatcccacgaagcgtgatcctgcggcatcaagttatccagaagaatcgcataagagtatccttcaaacccaactccagattccctccgtacctacctccgtcaaaaaggtctcggaacaaaaaaagaagaagaagagctggtggggaaaccaaatcaatgaagactcgtcgtttctgaaaccaaaatcaaactagggtttcgtcaatctgaagattaaaatccgaagtaaacccaaaaagagcggaaacagaatcaaaagaggaagaaacctgagagcggagctgtatgtaaaaatcactactgagagacaaggaagggagatttcaccgctgaagaaaaaagctcaatagagaaaaagagatttcctttaatttcggtgttgaaagacaaagtaggtttttttatggcgattcctctctgtttattagctcacaaaatccaaagaagaagaagaagaagaagaagaagaagagatagagagagagagaacaatgaagaagaagaaggaaagagaaaataatccctgtaacctaaagattccaattaaactctatttcattttatttttcgcgtccgctctatttatattattttactcctattctgaaaaagacattttttttttttacttttttttttctgtaaatctcaatccaaatccatgactttgtctactacacaaaaaagtataaaatcgaaattagtaaatacttacaaccaatgagaagagagtaaaatacattagtgaaagattaaaaaaaaaactatcttcattgacttgtgtaagcaaagagagagacgtcttcttcttcacaccgatcttcgaagttcgtagatcttttggttcgtctacacgatg

SEQ ID NO: 9736 - DNA, 3000 bp, Unknown
  misc_feature (1)..( 3000): cDNA_ID_2032791_gDNA_ID_1972176_Annot_ID_180008 3000 nt of promoter + ATG
tcttgcagagacagcttcgcttgctttagtgcggtcagtacagtttcacaagtatcaggcttcacatctttcactgaaactaatggatcatctacttcatgaatggtagtggtagtactgccaaagaaaccacctctcgagtttggttgcgttacaggaggcgaccgaatagttgatgaagaatgctcattgatacctttactgctctgtggttgggaatactcacttgtagggctctcagaaatatgttttcctttgtctcgagaagaataagcatcttgttccacagatctggaaccacaactattgcagcacttatcaggtgacgttactgaattatcaggtgaaccatgcgacaaagtttcaaacgattctctaaagtcaacttcattagctatagaccttgtatcacggagtgaagggactactgtagaaccttgaagtggagattgagctttttctccgttactttcatccgtcacatctgaatggtttccaacgtcacataaatcctgaaagattggacaagaagtattgttcaggaattccagtgaattaagcggagactaagttcaacctttgtgaactaagatatcttcatagataatgtcttcagaaacaatatggttatataacagttaatacaaagaagaaaaaaagcatacatttttcataactttttagcacaatggagagaagacagaataaaagaatcaatgtatacgcatgcaaaccaaatatagaaaactgcagcatatgcacaattatcaacgccacataaaagaaactttgttggttgattcatataaacacgaaatataccataatcacaattgatgaaaacaatttctaaaggtcaaagcctgagatatagggcataccagggcagatgatttattctctctgaaatttttctcccattccctttgagtctcttccatttcttcaaaagatccgataacttgagcacggttttctaacgctctctccaagttgatgtccgtactgtttcccttctctaaaccatttgaatttgacaacttgttcaaactatcgtctcccttcacaacagcaacatccaccacggttctagatacttgatcattcttttgaggaagcatttcagtgcgaactccattttcttgaaattcaaccggatttccatctctcttgtaatcctcagatacatttctggaaagttgaaaaatgttggttattctattacacaacatacataagcaagctttacaattgctttactaataaagcgatttatgatgtatataattagagagacgatttctaagcatataaccttcaatctcaaatttctaagcactgtgtttctaggcaatgcttgcacaatttgtaatagtaaaccactcataaatcactgagcagctaaagataacaaaacagaccttgcttcaccacgtctaatttgccgacaagatcttccttgacgatgtctcggtgaggaaaaataagcacactcgaaacctctgtgatgtctcctattccggttttccttgatcttgtcagaagaacctggttccctcctgcgacctttccaggacaaacttttgcctaacactaaaaaacaaacaaatctccgacactgagagttgctcaaatctcattaaacccatgaatcagaaactttcctcctatcacataaaaactctaacctgagttactctgagagtagcattcatgatcagagtttgaatcataatcatcagacacatcattatacccattttcctctaagatcgcaagaacatcagcagttgcctgttcagccttcttcctctgtaaagatacaatcttgagctgttcctctaactcagctacctaaagatattaagacaggacataagactaaagaacatttcactggatcatccctacaaattataaaagaacatactttatcagcgagaccatcaagctttgctctagcactcttggaaacagctctttcagctaataaacgtgcacgaagaaactcaatagtcactgaagtaggatcttgtgcctctgaatcaatacacctataaaaatgtaccaaaacccaaatctaaatttcgattcgcaaaacgatcttattcatctggaaaaaaaaagacagaactataccgatgatgatctaacttgtcttgattcgccatcgtgtagacgaaccaaaagatctacgaacttcgaagatcggtgtgaagaagaagacgtctctctctttgcttacacaagtcaatgaagatagttttttttttaatctttcactaatgtattttactctcttctcattggttgtaagtatttactaatttcgattttatacttttttgtgtagtagacaaagtcatggatttggattgagatttacagaaaaaaaaaagtaaaaaaaaaaaatgtctttttcagaataggagtaaaataatataaatagagcggacgcgaaaaataaaatgaaatagagtttaattggaatctttaggttacagggattattttctctttccttcttcttcttcattgttctctctctctctatctcttcttcttcttcttcttcttcttcttctttggattttgtgagctaataaacagagaggaatcgccataaaaaaacctactttgtctttcaacaccgaaattaaaggaaatctctttttctctattgagcttttttcttcagcggtgaaatctcccttccttgtctctcagtagtgatttttacatacagctccgctctcaggtttcttcctcttttgattctgtttccgctctttttgggtttacttcggattttaatcttcagattgacgaaaccctagtttgattttggtttcagaaacgacgagtcttcattgatttggtttccccaccagctcttcttcttctttttttgttccgagacctttttgacggaggtaggtacggagggaatctggagttgggtttgaaggatactcttatgcgattcttctggataacttg

SEQ ID NO: 9737 - DNA, 3000 bp, Unknown
  misc_feature (1)..( 3000): cDNA_ID_2032781_gDNA_ID_1972176_Annot_ID_180011 3000 nt of promoter + ATG
acaggaatacaaaatcagagctttaaatggaatgcataaaactcacagattaggaatcaagctcggatcttcttgaacagagagagagcaaccaaagttttttttgaaggacaaaaaaactcggagaaaaaaccaaaacctttgcagaatctgagagaagaataaattcagtttcagaaatgaattaaagacaaggaaacacataaggacacttgtgtaactgactagtatacaatacacgcgtacttacactacggaagtgacaattattgaaacccggaagagaaatccatagaataaaaaaagaaaattataagatcgaccaaaactaaagtctttgttaggattcagacaagaaagataaatgtgtaagaattattaagggatctctctctctctctctctggtacaacaaaatctggttagagagaaagaaggaagaaacagatcttgaagaagaaggggtccaagggaatgaaacagtgcccgtgacaaaaggttatataaaaagtataaaatagaccttttcttcatagttggccttattattatattcacctaaatttttattagtttttaaaacttttgttgttcggttgctttcaacttcaagtgtccattgtgtaacgaactggtatttgttttgagtgattggttggtaggtttatttaagtgtaaattaaatttggtaatacaacgaacatgaatttttatattttttggttctgttatatacttcttcttctttggtttatattagtcaagtttgagatattgacgacggcatggcaattgaagaagaagaagtggaatgcacgttttgtcggtggttggactataaaactaccttatccatttatatgagtgtgtatagtgtatacataatcaagtacatgaaccaatttggttggaaaaaaaaaactaattaaattgacatatgagaaatgtgttttttttttttaagttcttgtgatggatgatgtgacagacatctgttttgagtttctaaaatttaatcgaattgatctgtttaattggaggactaactagaaacatatctaaacccagttaggctacagaagcaattcatatccatgaaatgaacatttttttctagtttaatttccagttttaatgtttatggtagctagtaacatgaaattgttgaaccttctactttctttttgggaaatctataagcagttgataaacaaattatatgttttgcatttgtattaattttctgaatgagagaggccggggttcaattctcaaaacgctctttgtacaaagatttgtcgtttttcatccaataagatagacatgtggtccaccagctcctccatggctcttgacccatcaggtccaccaccattgccatttatgtttctattcttaagaattctgtgggaaatttgtggggatttttcttttgttacttagttggttctaagaacattcttaaacatactttagtttaggttatgtcccaaaatatgtcgaagataaatatactatgtcaaccaaacaattgaacaaaagggcatttggtctagtggtatgattctcgcttagggtgcgagaggtcccgagttcaattctcggaatgcccctttctttttttgccaaagttttaatttttttgacgaaagtaaaagtcaaatagtaaaagaaaaaaacagaaagaagccttttaacaattttttgtttgtttgttttgggtataaaaaagaagcaagtattgatgaggggaaagagccaatcaaccccaattattttgatgtgacttttttaaaaccaaattctgacactgatcaaatgaactagattcatcaaatacttcaaggttctaatttcaaagtttaaaaaaaaaagctcaaacaaaacaaatccaatgatataaaccagttaaattcatgaagtacttcacaagtttaaggcagactcttggaagattcaacaaagtaaacgaattcaaaacaaaataaagcaaaaaagtaaaggagatcaccgagcaagccaatgatccatcagatacagcatcttcaatctttaggcccggaaatgtagatatggcttatgatgcttggatcatagatgattctagccacctacacaagaaccgcttgtgtcaaaccgctgattaatttaaaacaagtttgaacatcttgtttctcgtacgataagctctacgagatgttagcgaatcacaaagatggcgatggaaagctctaacagatacaacatcgttagcaactcggtgttccagtatccatgtacaattctcgtcaagggactgagattatattagttcactgtgaaattcaaattttgaaatcgaaattaagttaagaccgtgtatgaatcgtgcggactaaacaatttaacagtggtctaataattatgtcaccattcaagactttttaacatgcctactataactaataattaataataataaaataaataacaatatgctattcacgaataaacaaaatttggtaaaaacgcatgttatcaaaagttgttgcatatataatgtggtgttaagaagtttacggtgttgttacatttttatgttatttataattaaaaatacagattatttatttgaattcaaggtgaatatttgtcaaaagatatatctatatttgctggcttgctgcatatatgatgtggttttaagaagtttatggtgtggtaacattatttatttattttttgattaaaaatacaaactatttatttgaattcagggtgattatttgtcaaaaaatatatcttttgttattgtcatttaattttctcttcgacttgtatatagcgtttggaagtatatgtcgttttgcatcttaaaaacgacaggtagtccaccatctccaccacacggctctttcagtcttcttcctttgtccatcatcaccaaacaaactcattccagtctttcgcagatttttttccttttcttgagggatttttttttctgagaagctgtgaatg

SEQ ID NO: 9738 - DNA, 3000 bp, Unknown
  misc_feature (1)..( 3000): cDNA_ID_2032789_gDNA_ID_1972176_Annot_ID_180009 3000 nt of promoter + ATG
acccgagctttcaacctagagcagaggaagttagtattgagatggacatactggtaaatctcttacttactatacgccaccttcattgatggctttctggtccaaagacatgtcttttcttcttcttagctagttttgcttgtatgcaggacgaaccaacactatggaggctaaagttctttgtgaaggatgcgttggataatgcaatgaagaagaagaaagaagaggagacaaagactagagaattgagtggagcacaaaagaaagaggtttcgaagaaacgaaatgcgactacaaagttagctgagaggaaaacgaagcggtcacgcatatgagtacccatgaacatgagagactgatctcttttgtatattaaacgtttttgtagtagtacgtggatttaactaacattgacaaattgcaaaatctagaaataaagctttcgtctttatgattctatttggtctattaattaagcgatccatagttggaaggttaagtatataaaggcgctttgaattcctctgttacaatcatgagtctgagagaaatggaagatgtaaaggtggaaatgaaggtaaggaagaatgagaatgaagcgttggaaacgggtttggcagagagatcgatgttgctgatgaaagctccatctctcgtcgcgagttctctccaatctcattcttttcctgacgatccgtaccgtcctgacgatccgtaccgtcctgacgccaaagtcatcctcggcgtcgatcctctggctcacgaggacgaagggacccaagtatgctttcgtcctgcgcattttctctcctctctgcatgcgtatctctcgttacattgaatcttcctcaggaattgcgtggtttagctatttagggtttctagtaaccattcgggaaaatttcatcctttgagaaacttgcttttacattctctgaaattccatggatttggggaaatgggttttctgagtttggagatatcaagtggtcctcactttgatcatgaaattccttgtaatttgaggattgggtagtgtatgaaacatttctgcaaattagagatcttttctcttttctttctacatttgagcttgctttctatgaactttcttgctcgtcacttaaactacgagtttcttggtgtaaaacatggtaactcttttgccttgcagttcgtaatggaattagctcgagctgactctggaaacatgccgaggcgttacactttggatatgtctaaagattttattcctatgaatgttttctgtgagtcttcagatggtaagttgtacacttctccacacattgtactccgaagttattttacaactgttggttcatctatggcgttacgttggttataattgttgaataatggcatttacgtttataagattttggatcattgggtgaagaatttagcattggtatgttcatttacagtccaggtgtaccttattttgtttgacagttgtgcagattttcttcaacaatgttctttgtaggaaagatgtcagtagaagggaagataaagaacaaatttgatatgaggcctcataacgaaaatattgaaagctatgggagattgtgccgtgaaagaacaaacaagtatatgggcaaaaatagacagatccaggttgttgtaaagtggtgtgtggtgacttggagtttcaaacaaacctcctctgcatttttccatgatcatgtttctggtttcttgaccaggtcattgataatgccagaggaatgcatatgaggccaatgccaggaatgataatcccaaccgcggctccggtattttatctttcccaattgtaacacacacattactgtagcttaaggatcttgaattcttacaagtcattggtttttatcaggaaaagaaaaaattgacgaacaggacatcagaaatgaagagaacaagaagggaccgtagagagatggaggaggtgatgtttaatctctttgaaagacaatcaaattggactctgaggctgctcattcaggaaactgaccagccagaggtgagcacaaggaaattacagactttttgtttagtgtttgactgagagattcaatggagaaataagaaaacaaataccaaaaatgaaggtttgtgttgcttatggaaaagtgtatttggtgcagcaattcctgaaagacttgttgaaagatctatgcatatacaacaacaaagggagcaaccaaggaacttatgagctgaagcctgaatataagaaagccactcaggaataggtttggtcaaaaggttttttcagggtttgttttggatactatcttttgattatctatagtgaggttaagcttgatcagttacttaaattgtaactgatcttcatggctataataagaaaggaaggttcgttcaattgtatgccttaagtattcacaatattaacgtaactaatcatttttagtgatgctttagaaagtaatcagttgttttaacttttggaaattcatgtcccaaagctcataaaagttgtggctttacttgtgctttaagaaacttttcaccaacaaagtaaaaaggctatgtgaagaattggattcgagtgatatccaaccaggacatttaacaattataactctctctttttttgttgacaaaagaaaaacacattattccattaaaaaaatataaccaatagtttttccaaatgggtaactcttgattattctatcaaaacaatcaatagtgatattatcagcagtaacaaaataacaaatatatcttgtaattattagtttttactcaaaaactaaaagagttaaagttaataactcttgaaattaggaaaagaaaaaaaaactcttgaaagttggtataaataagatttgaataactgagtttgactcggatgtgattggtctatcccggtttggtttattaaagtctccttcacttcaatttctgtttggttttatttaccggatttgagaaaccagaactgaggccgaccaaccggtaacgatg

SEQ ID NO: 9739 - DNA, 3000 bp, Unknown
  misc_feature (1)..( 3000): cDNA_ID_2032805_gDNA_ID_1972176_Annot_ID_180004 3000 nt of promoter + ATG
tataaaaggggggatggtggttgagaagattccagtatttacctaaaatccatgtcccggatggatttgtgtgcctttggctcatccaaaattacacttaggtttggccactccataattctaagacatccatcctgaaaataacttgtagtaagctacaactaaattgtcgcaacagtgaaagaaaaaaatcccttatattgcagttccttaccactcccccaacagctaatttagacccatcaaagctgaaggccatacacttttgtagtccagcattttggagaggaaggagttctttggctaagatcgtaatacctgttgctcctccgacaagctcaaataacctgaaaaccaaataaagttttaattaccatctagaccgtaaaacaaaatttgtatagacaatggggtagacagtgtccaaaaatggttgaagacaactcctcgtatccatgaaataagtggaatagtagagttgctaaagatgaatgcaagaaagggaagtcaaaatattatgaaagagaccaattataaaaggcatcggcaatctccaacaaaagtataggcatatataaaataaaccaaaccttaaacacaagaaattcaagcctcactacaattaattctacatcagcaaacatgggaggtgggagatcgtctgatgtaatgagagaagtaatgtaaagttctagtaatctgatatctagttctcatcataggtttaacaataccaactcaacaaatttagaaacatagtatcagaggaaggaactgtaggatgtctagtaatcataagttttgggtggtaaaagcagagatagaaacgtacttgcaaccacctttggaggttgagcaaacaaagtaatccccaccagggtgcactgaaacagccacaggatcaccatcactatccttaagcgtgtgtgttgcctttggtcaaagaaaaaagagaaaaaaggttggtttttttatttcattagtccacagaagtaaacaccaaaagaaaggggctttgctctgctttctcagaatcagaagaaaacaacttgaagaaccctagatttattgcatgattcagaagaacccaagtttcgcaatccaaagaactatagtagatttcaccctaaacccaataagatttcgaagctctcgattgaaaaattcaaaaggtgtaagaaaaatttaccaaaggagaggaggaaagagaagcagtaatggggtcaaaagagaagatgttgaggagagcaggagaagaaacagatgagccacggcgtttggaagctttagcgataagaacccagtttactttcttcgggcgacgaatccatgatccgcacacaacatgtccactttcacgactcgcttcttcaatctccattcgttgttggattgattgttattaatttcctctttggtctctccctaatttggatccttaatatatatatagacagaaaattgtttttttttgtgtgtgtgtgtagttgttgttccagagtagagaagaggaaaacagaaagtaaaacaaaaaccaaaaaggagttgactttggaaattggacagagagattttgttgagttattatataatgggattgaaaaatctcagatttaacaaacggacatttgcggtggtgggaaaggatattccttaagatccatgttccgatgccgaatttaatacaaacaagttaggtcacatcgtgcttccgtaatctatagcagactttcccattggtgtcaatctcgttgtttaaaaaaaaaagtaatattagaaaagattgaacgtaatctgaatattaagaaaaaggataaatatgaaaagatatgatgtaaatatgtaatcgatgcatactcttaattatgcaatgtaattctttttttgtgacattaatacattatatatcctttatcttataaaacacaagtcacttggcaaatcatgttttgacatgtggcaaatttatcaaaaacaaaatccacaatgtaaaacaaaaatgaatttttcgacaaaactcaaaataaaattaaatgtgaaaacagtgtacaaaattaaaacattatcgtcaattttcccacgatcactctcaaaagaaaataaaaatcaacccacatattctccatactcccacaatttctttttcttctattcaaactatgtaactcttttttttcaattaaaacattcaaactaactattgggaaacaaagacagatacgatctcaaacctatatatacaaatctcggtatcatctttctattgttgatattggtttttaaaagaaggttgagagtaaaatcatttaggagcgagaccttctttgtaacaagagtcttcaatctctaatcagttcatataaggcaatatggccagcgtatgttatatttcttttattttattgattgcgtttagatgagtatattaatgctttctgtttttgaattatcttttattatgtatgtttaatatctttttgcttcatagatcaaccactaaaaataaacaagcaaacttgatcgatagaggataaaacacaaacaaagtagaagacttgagcaagaaaaacaccaatggcaaagtagtaggaggttgaagacgaagtagaagtgtacaacattaagacataaatgatatcatctatgtattgagtcaacttcactctggtaacttttttttgtctatgactataatctatgtttgtattgagtctttgaataccatatgtaattttttattttatagcttttgtatgtattctagaaagcattgaagttggaagctaattctctatatttggaagactaataattttgtgatatcaacttcaattctccattatatatcaaattatcatctgaaaaaataaaatccacaaatacatgaaacgatatatttttccctacacgattatatactaatctatttataaaattaatttttcatgtataaatatcgataatatgtaacatatcataacatttaaattcaaaaaaaga

SEQ ID NO: 9740 - DNA, 3000 bp, Unknown
  misc_feature (1)..( 3000): cDNA_ID_3032757_gDNA_ID_1972176_Annot_ID_180002 3000 nt of promoter + ATG
cacacgcttaaggatagtgatggtgatcctgtggctgtttcagtgcaccctggtggggattactttgtttgctcaacctccaaaggtggttgcaagtacgtttctatctctgcttttaccacccaaaacttatgattactagacatcctacagttccttcctctgatactatgtttctaaatttgttgagttggtattgttaaacctatgatgagaactagatatcagattactagaactttacattacttctctcattacatcagacgatctcccacctcccatgtttgctgatgtagaattaattgtagtgaggcttgaatttcttgtgtttaaggtttggtttattttatatatgcctatacttttgttggagattgccgatgccttttataattggtctctttcataatattttgacttccctttcttgcattcatctttagcaactctactattccacttatttcatggatacgaggagttgtcttcaaccatttttggacactgtctaccccattgtctatacaaattttgttttacggtctagatggtaattaaaactttatttggttttcaggttatttgagcttgtcggaggagcaacaggtattacgatcttagccaaagaactccttcctctccaaaatgctggactacaaaagtgtatggccttcagctttgatgggtctaaattagctgttgggggagtggtaaggaactgcaatataagggatttttttctttcactgttgcgacaatttagttgtagcttactacaagttattttcaggatggatgtcttagaattatggagtggccaaacctaagtgtaattttggatgagccaaaggcacacaaatccatccgggacatggattttaggtaaatactggaatcttctcaaccaccatccccccttttatattatttgtaatgcaaaactgtaattgaggtagtaaaaaatggtcttctgtatagagctgagaattgggttatacaacacaaatagtaattaatggagattgtgaaacgaaacccattgtgtgcatctttctcatatttgtatatttttttgtagtcttgactcagagttcttagctacaacatcaactgatggatcagctagaatatggaaagcagaagatggttttcctttgtctactttggaacgtagtggggtatgtgattgtgagagttaaagtttgcattagcattcctatatttctaaactaataagatccagtgaaatttgtatgaaggatgagtttccatgtctatgatcttttccaataaatatagttctgagatttctcggtctcgattttgtctctgtcgtgtttcctatattggcttctgatatatcctgactgattctgatattgtcatgtctgcaggatgaaaatattgaactgtgccgtttctctaaagacggaacaaaaccttttttgttttgtgctgctcaaagaggtatataatatatccgactctcgagtaacatcactagtatttcaaattaaaaacatcatatgaaagcttaaactattggaatcaggtgatacgcctatggtcaatgtttatgacattagtacatggaagaagcttgggttcaagaagctgtcaaggaagactgcatcgacaatggcagtgagcttggacgggaaatatattgctttgtgagtctttcttcatcccgggctgcttatcactatcaggcttgtgtgattgtacataaaacctcatactttgcacctatttttgtaggggtgggaaagatggagatgtatctgttgctgaagttaagacaatggaaatctaccactacagtaagaggctgcatcttggtcaatccattgcttcacttgagttctgccccagtgaaaggtatggggaagcaattgaaaggataatgataaatcaaaacccttatgtctccgcattgtttctaatgttgatctttatctaattggttctttctagggttatgctgacaacttctagcgaatggggagagatggtgaccaaactcactgtaccaaaggagtggaaaggtttgttgctaatctctttctctgaaaatatgaatggcacatatttggggtttatacatttgtttctcactattatctatttgtttgatgtgcagagtggcagatatatgcactgctgttttgcttgttcatggcatcagtgatagctgcatacgtattcttcgagaactcagattcgttttggaagttaccaatgggaaaagatcaaaaaagaccaaagattagtctatttggaggttcctcctccacgccttctgaggatcatagtaggtggaacttggacctatagaaagattatgtaactttcctctgctttttcttctttcttccttatcttgttgcagcgtttttttttgtttttttcctttcttctgattttgctctgacaaatacctgttgattaattgatttatttacagacaattactgttgctaattacttgtgctgaaaatattattaaaattgcagagaagatcttttgtaacaataagagacgtgatggcgtcatatgagtggtcccattagctcttgagaaatataaaaatagaacctctcactttttatcttcatgaagtaacctctaacaaaaataattagacagaataacccaattcaatattgacggtgctgatgtggcagcagatattagttttgtgaagagggtgtttttgttattgtggaaagttggagactttttctagtaatgtgttccactttacgtaacaaacaaaagtgattgcattcccggtgcagaccgtggggtcccaattgtatcgtcgtgagtcgcgtgaccgtcagagtcacactcacaaacatttttggacatgaattgaaaattattataattaccagattttttatctatcgtcgaacttgggactgagaaagtagcagcttcgtttgcttcctctgatatttttctacactctctgtctctctctaaagatg

SEQ ID NO: 9741 - DNA, 3000 bp, Unknown
  misc_feature (1)..( 3000): cDNA_ID_2185478_gDNA_ID_1972177_Annot_ID_180042 3000 nt of promoter + ATG
gtacaagtgtcaacaccagatctagcgtaaaacacttaagctagtacttaaatagattatgcctattttttcgaccattatatattaaactttccagcctttcgtgaaaaaatgcgcatgttcttgttggaatctaggaatcttcttctactaaagattggcatgcacgtggtaacgatttccattgtatactatctcgatattttcccaccttaaatatcttgaaaattaagatcaaattatatgagaacatatattgtatcattgtttgtaatagccttatatagtgtgtagatgtgaactatggatacaaaaaacaataggaaagaaaaagctgcagagaaggtgttgctttacaactatgaatatgggctcatgagatgtacactacagataagcgaagattcctgttgcatgaaaatgtgttactaataaaaaaaacacatgcacatttctataaagacgaatttcttttaaataataaatttctataacaaataaagataagtgctcctttaaaaacatgcaaaagaatatatagatttaccgtatcagattttcatacaatttttatattttttgagcttgaaagattaacatgacaaactgtatcgtgtgtcctcgtctattcacccctagaagaagtgaaacatggaactttatgtatttgcatacggcgagctagcttcttccctacttgtccaatagatgaagacattatcactcaggttcagctacttcgaagcgcaacatatcgacaaaaaatcgttttagctctatcatctgtcttttgaagaaaaatatcaacatatcaaatacatatacacactccccacaaatatataaccacaatatatattggttactacgaaattccaatgatattgctctttgaaacaactaaactgtgaattacaagctaaggcaatatatctattatattctttctttgtgtctcaacttcatccctttctaagtaattcaaattaattggaagttttgtcatctaaattgaagttcttcttaccggatcattttgtctcaggttgatatatactttcttagtctgatacgaaaaacttataaatataatgattagagagagacatgtttgatgttatatttttctggtaaaaaacatcttgattatgaactatatagttagggatatgtttgatgttgtgtgtcgacatagtgaggtccattaaaaagaaggtctgattaaattttacgtttggaccacaaatctttcttttagaaatcgcggactgggacaccttcctacaacatgtccgtctttactaatcttacgtacccctcacattcgtaaccataaaatcatcaaatataatatagagactggtgatcataattcgaaatatttttcactaattcaatgttatcggtaagttatattaggggtataacatcaagaatcacgaaagaattaaaaacaaccttgtcgaatcatgatttgattttttggcttatactttctaatttttatatcttgtgctgcaaattagcaccaaaatatatatattcttcttcttcaacatcgaattctttattttgttaaaggcatttttttcttaacagaggaattttacatcattcttagactgaactttcgggataaaaaatctcgccatgcaaaggtaatttattttttcatgacaaaagccacaatggcgataattataactataatactatgcaaaacgaaactttacttgggtcataccgaggaaaacaaaggtacactcgattgtgacaactccaccaaagaccaccccactaccaattcacctttatttgtttctttattcactcaaaatctttttaatttttttaattaattcaattattcgcttctctcgttgttttttaaccttttaattaaaaattgaaaggaggtgcctagggtttctctctctgcatggccactctcgctcttcacatctttttttgggcaccattgttaacgtatgcaaaaaaaaaaaaaaaaaaaaaaaaaacttacatgctaagaaaactctctttccttgtcgtttctctcataaaagaaatttatttaaacttattttagtccaaaatttatcgttgctgatgaaaaatacaatataggaagtgggatcggatcggacaaggagtgaattatctaccaacttagatttcactcgtcttttgattgacaagtaacatacacaataaacacatatgcataattatttccatcttcaaccaaatgttgtagtgaagtaatttgatctatgttatacggacatctatctactaaatttttgaaaaaaaaaaaaaaaactatctattacatgctccaaattattacttgcttatgtaatttatgcgtatattagagatgttggtgtttttctgaaatttgatatatgttcttttatctctgaaatatgatatgtgaatcatcatagcattttcagtggttacaaccttatcgaatcgacaaaagattgaaacaaattggaaaaaaataaaatagttttactattttctaagcagcgtgaaatgaatatcagtataatatatgaaacaaattcgtacgtgataaatatgtatacagtgatacaaccaagaacgatgacgtatatgattgacttgcaaaaataagcaaacaaaatacctgttcaaatcgacacttaattccaaaaaggttagtaataagtaagaaggcttttatttatgaaaacaaaaagaaataaagagcctaagagaatgatgaaaattgaaagagaaaaaagagcattgttatagaaaagaaaaaaaagagagagtaaagagaattaagaaacacaataaattaaacaaaggaaacttcatttcttctctttatcccattcagctcctcccttctctctctctctctctctctctctctctagatcaattctttcttctatgatgtgattatccaccatatctgcgacctcttacctaaaaaggatacaagtaagagattcaaag

SEQ ID NO: 9742 - DNA, 3000 bp, Unknown
  misc_feature (1)..( 3000): cDNA_ID_2185490_gDNA_ID_1972177_Annot_ID_180047 3000 nt of promoter + ATG
agctgtttcttctaaaagagaatggtttggtattgaggggagtgttaaaaggctttaaaaaagagagggcgttatgaagcgaagtgtttatcctcgccgccattgatgaaagaggacatccaccggagaagaagcagaggaaggaaatgaagaaagggactgctaaaatttggagcgcaatttaggtcatggttcggttttatcggtcagcgaagcgagttatccggtataccaaggaaaatataactaataaagtcaaatttttaaatttttttatctatttcttgcagagcattgagaatatgttaatccaattgacgcccactcttccggttaagagagccgtggttgatttttactctccaacattgcaaaataattacatgttggtcatctaagatcacctatcaactaagtaccaacagcccatacgtcaagtgcttcgttcgtgataccatgagaaatggactctagtgacatgatcaagttttatcataagtggcgatttacagggctccaccagctagttttattaatccgtttggattttctaaagtcgctgagttttgcctctaatccttcatagctatgaaagagtaaaatattaccgctgtgaaggtccactgaacaaagttacctcgatgtacatattgaagcccttgaaggatcatcagtgtgaaacggcgaataaagtgtatgggaagagttcctgcagtagcatactccataaagtgtatggaaatgcttttttatctcatggaaaagggttcctgcagtagcatactccataaggaaaccataggttgtcggagtaagcttatgtatgcactttcccgtgcattgaacaattacagttgaaccttggaacactgagattagataaaattcttgtctcgcctcagactcggatttacaactcttatagacataatacaccacattgccatccggtgtataaattgcagtagctccaccttagcagaatccgcctcagacgttaatatcttcttcattgtcctagggagtaactctagatctatttgatcacacaaaatctcttctgctcctacttttggtcttgctaaagccatctgtttcatctctttcacaaagtctgcataactatgagtagggctggacacaagacaagtacttgcaaaattgaagatatttgtgacccgacttgccttatacaagtaattggatttttggcttgttttgtcaaaacgagtacttggtcaagaaaattgatttcaccgctgattaagtcttacggaatcaagaaaattttgttgaatcattaaatttattttgcttccaagccattgtttcatttcttttattaatttgtgtgaaattttattaatttgtcttctgctctagccctctctttcacgtatataacatacatagattaaactcatccattttaacatgtatccaagtccaattttctcggtggtcaaagtggcgttcttcgtacaaattatcgataaattttatagagaaattttacaaattatgtaatttcttacaaaaatttgatctaaaaagtagttttttctttataatcaataatgtttatgaaaccaattatacgtagaaacaaatattttgttttaaaaaaaaaaagaaaatcgacatagtaaaagtattagaattgaactttataaagaattaatacaaattgaaaaaaaatagtagaattatatttcactaaatatttcaaatttcatatttatatattaatttataaagattttactgtatttttttgataacatttacagcaaatccaataagtccattgaaaaatattcagaaaatcactaaaacattctatttctcgtcttaaagttgtcaaagattaatttttgtttgtataaaaaaaagctcacttctgttactaacttgttggaccttttattaatttgtcttgtgatttagtttagacccctctttcacgtatataattttgttacatatgaaaaacgagacaaaaaatcatccaatgaaattataacacgtgtagatatttatttcaatctgcttacgaaaaacgccactttgaccaccgagaaaactggacttggacaaaaagacagtctttgttctggaacggcgtttcacacaggtggaggccaccatcaaatatttaattacaaaactataacattatatattccaatttataattttgttactttcttatttgtttcttttttgtttagagaagaaatagtaaacgattgattattcacatcgttgacttgttaatctattttaggactatataaaatcaagagaaaaatattcagcaaatcactaacacattctatttctcgtcttcaagttgtcaaattatggtatttgtttgacatttccaaagaaaaatctacatttcataatttcatatatattaatttccttacacataaacctctaaatattttcatatttacataaatagaacaatattccataataattaatagcgttatcattctagaaaaagggcaaaactttaaaaaccaaccctttcttcctcctcctccgagttcttctttctcttcttcgcctcctcctcctccaaggtaaagtattcagctttttcaaattcagtttcttcacaatcggaaataatgaagctttcttaatccaacattttctctttatccaacaacagatctattttttcctcatcagattcatagatttcgtactgttttttaaatccagattgtgtttaggtcaccgagttgaatcttaggtcgtattgatttgtagattttcctctttcgtactcttgttcttcgttttatccctcagaatatgatttgagaaaaaaaaagatctctttgatacttcatttcagttaggacgacattaacgtgtgtgtgtctgtttgtttgttgtgtgcagtgtagaacgacgattgttgaatgcgttattgtaattgttaagaattgaagttaaagtgttgtttttgaatctggtgaa

SEQ ID NO: 9743 - DNA, 3000 bp, Unknown
  misc_feature (1)..( 3000): cDNA_ID_2991829_gDNA_ID_1972177_Annot_ID_180050 3000 nt of promoter + ATG
aaattggtacattatctcatttacctaggatcacatatatcatgatgtaataaaggaaacataaggcatggcagacagatgaacgaatctaaggacaataggataaccttggacggtgatgagataagcacgtgggatagtctaaatggtcagatcttaatccaatcgctaacattttcaagtttcaaatctttgaattttgctttgggaatttatttttttcctctttttaagaaactaacaatatacaagttggatgaaaaaaagaaagaagcaaacgcaacattctacgtttgcgtgaaattttggatttcaagttagataacagacgaaaaaatagagattgaatctaatttttcaaaataatcaatttttgttttgcatatttttttcaacgttgtttttcaactttatacatatgcgcaatcaatgcattatctctgatataaaaaagggaaagaaaaaaaaacagtgcatttttcacgccaatcatcaattcactattaataattacaatttcttttagttaaagaaaattaaaactaggtaaaaaagttaagtaaacaaaaaaaaaaaaaactttcccactagcaaatatcaaattcaaagttgagatttcaaaattttttatctgaaatttatacaataatgaacatcaaacttaactttaattttatttaccaaaaccaaacaaatattctacttattccttaaaatagaaaaatctgaaaaatagagagaaagctgaccttaacatctctgacaccagcacgaaccaaagcgttgttaagattcctcatcgccggtaagagattattgatcatgttattatctccggtgagcagaatctcatttccgactgagatatacttaatcttcgtctgaggatgaaacggcaaaatgttaaccgaaacccaccgacgagcttgtcttccgttagccaacgccggaatatcaccgttaggaacggtgacaacgacggagataccagttccagcgaaggcacgtaggatatcgggattcacatcgaagatcttgacgctatcaatcgaagtttgtgtcttgataaagttagccacctgagtcggtggtgggaggtttccgagagttccgtagttaacaccgatggcggagatcacggcggggatggtgaggaatacggcggcgcagaggaggaggagaagagagattgacggtggcgctttggccatctttttatatttcggaaatgagaaaaccaaacgattccaagtgaaacccgtgaatcgtttgagttgtgtttttattattacgacgaatagatttttttattcttatcgagaaagtatttataataaaaattaatagatatgaccgttttgtatagcgtatacgtgtgtatatttttagtgaggaacagctggattttgtggaaagcaaaataaaagaagaagtttgtgttgtctttgtttttcatgtgcgtcggcttaaatttaggccgttgtaaattattgaaaaagtggattttgttgtgaccgtggaaactttagttaattaatttggctaattatagagtctgcttttgtttggataatcaatttgtcatctttttctttaatggtttttggctggtaaatactcatactatccaagtttaatctaaaaatatacctctttcttgttaatcgtaattttacaatcctaattttatccagatacggatgaactatatttgaaaaaaaggaactaaagtgaagttaagaaaacaaaagagagatcgagtgttgttttttcttggatacgtttattaaaagatgttcttaatgaggtcaaaggagactatctgagtttttactgctaaacttaaaactaaaaaaaaaatcgattagtaatattgatgtatcaacgaaatgtatatggttaaatattaagtgaaaagaaaaagaagagagatcgacgcggtttgggataatgccattggcccattggacacgtgtttgtaggaggaatagtttggagtttgaacactacggaccaaagtcaaagagattcgaagtatgaagatgttgttgaggaagctgattcgaagtaacttttaccgacacgctttagccatttgttatgctttctttgggaaaagaagatccgcgtccatgtctcattgttaacagtttattgtcattttcaatgacatggttacactcattgcacacacacacaaaccacgtaattttgtatttttttaattaaatcccatccttattttttgcaataacaaattaccattgttactttttaatgatatcacataaaataatcgatgccactcgatagccctttagactaacaatatgtttgttgaagtatgccacaatgtttgaagtgagccggctcaatgctctcatggtggtttagtagtttaacttgagaacttacaacagttttctccttctccacactatttgtatccaagaaggggcattacaatatagaattgcataatacgatttaaacttttaccaaaaaaaaaaaagaaaaaaaaagaaagaattgcgtaatacagaatttatctttaagggaatacaaatataatttggtttcagaatcatctcaataggctttcctttaaccaaacttgggttttattgatgtgcttgctttaatgggcctaaagcccatacaacagcatcactatccacgccgttgtctattcttattattcaccccacccggtacaccgaccaaaccttggccaacacgtccataatatttcatcctccctcctaatttactttaatatcctcaactttcctaatcgttcagggaatattctcatataccctagacatatgcgtcttttccaatctaaaatgttgagagtatatttttatttatatatatatgagtgacccctgcgagagacaacggccactgaacactatcgatctaatcttttcagctctctccatcgtcgtcgtatctgtgactctcgtgatcatcgcctgaaaaaaatttgagata

SEQ ID NO: 9744 - DNA, 3000 bp, Unknown
  misc_feature (1)..( 3000): cDNA_ID_3032814_gDNA_ID_1972177_Annot_ID_180053 3000 nt of promoter + ATG
aatctcacattgtattattaatagatcccagagttaatcggattaaagatctcatctcattgcaataataataaaaagatcacaaacggttatgaacctatattttcaccatctactttctaaatatttgtctagaaaaatactaatttcggccagtaccatctatttctctaactttggagttctctccaccaatataaatagcgatcttcacaagtgtattttccaccatcctcaagttcctctctaagccttctagtctaacaattttctcaagctttctccaattcaattaaaaatacttaccaaaatggcaatcaatccattgattctcttaaccatattcccactcttccttctcttgagcttcaccgacgccggaatccctagagtcttctcaggtggttcttggcaaaccgctcacgccactttctacggtggaaacgatgcttcgggaacaatgggtcagtctactctccttaaacacatatttcaagaaccatacttcatttatcattataccaactctctaaaacagagtgctctgtttcttgttcctttaatttacttttgtttttgttgttgttattttaggtggcgcgtgtggatacgggaatctgtatagccaaggatacggaacaaacacggcggcgctgagcacatcgttgtttaacagtggtcaaagctgcggcgcatgcttcgaaatcaaatgtgtcaatgatcccaaatggtgtcacccgggtaatccttctgtcttcgtaaccgcaaccaacttttgccctccaaacttagcccagcctagcgacaatggtggctggtgcaacccgccacgctctcatttcgacctcgccatgcccgttttcctcaagatcgctgagtatcgtgccggcattgtccccatctcttaccgcaggtatacttaaacatccctatatgtagcctacgatttgagaaatgattcgtatataaaagaagttgcaaatgcaatgaatcaaaatgctaagattacgaaatgtgggtatttgtatagggtggcatgtaggaagagtggagggataaggttcacgatcaacggtcaccgttacttcaacttggtgctgattacgaacgtggccggagcaggagacatcgcgaggacgagtgtgaaaggttcaaagactggttggatgagtttaactaggaactggggacagaactggcagtctaatgctgttctcgttggtcagtcactttccttccgtgttacatccagcgatcgtagaacctctacttcatggaacatcgctccttcgaactggcagtttggacaaacctttgtcggaaagaatttcagggtctaaagtgaattgatgataccgaaacattcgaaatggtagagacaaaaagaagctccactttcgatttgcacatctttgactatgtatttttctattaagctttttactgtgctggggagttatgtggtaattattgggaagtgtaagaaagacaagttgaagtggctgttgataaaagttgtaaacagcccgcagctcttaaaattatatgcatggtttgcttgtaatgtcaaatttcattatataatctaccacttgcttatactaaagttcgatcttctcttcttttctctgttagcatgaaaaatgtggctacaatattaattttaattcatatattcaatagtagtagcacaatgatcttacttctatgcaaatttttctcagagttgtaacactgagtgtcttatgaaattcactacagtaactcttgagtagtaccatgaatcctaagacattgttgacatgagttatataattcaactaaaattagtttagaattgatcttctctatcgagttgaatcgatttatttagttatgcaatcaattaatttatatcaagtttgaattttctttgatataagaaatgtgaaactttttttaaaaatcactaagttttttttttgtgcgaaaaaatcactaagttaaatttgattattttcacaatacaaatatattttagaattattatttcttttcaccatttttttccacttagtaatagtttttttttttttgattgtcgagccactgatcttatacagttcgatccggtaagcgagtgacccgagttctctctcgcaagttgcaattgattcctccaacgcaagcatctccgatttctctcttcaacaaattgtgttttgcattcctcttatgtaagttttcccccatttctctaaggtttttgcgtcaatttcaatccgtagacctaaatcgttttttgttctattgtagaaactttacctagcttagtcggaatcaaatcggccgttgtgaatgtggaaacccttatttctctcagaactggcattgaatttgaatagatttggactttatattgtacaaatttacttactgaattgagtagatttaacagccatttgtgttaactagaggagagaggttttatgaatttggacttgttactactgttctaaactctcttaattagagatgttaaaacgggcttaacatttagggccggcactagtccgctaaagaaattaaaagccctagccctaataaaatcaaaaaagagaatttcgggcttatatagggttttggtgaaaaggtttcgggcttcaatagagctgggcctaaaacttttttcttttcttaattgttttttttttcttcgatataaaattctcttcttcagttcttcttcttcaaacactctcttcttcttcttcaatcttttcttcgatctattcttcgtttgtgagtaaaggtttgatttgtgctctatatctttcatctttcttattttgaattgattttgaattgctttggtaaatctgaaatctcagatttgagtctgacaatctattaagaggttgatttttgacttttgagtgtcttatggtttgcttttaactccccgcagaccgcgaatttaatctgaaggttaaggtggtgtgaaatcagcgttaggggatg

SEQ ID NO: 9745 - DNA, 3000 bp, Unknown
  misc_feature (1)..( 3000): cDNA_ID_2185522_gDNA_ID_1972177_Annot_ID_180058 3000 nt of promoter + ATG
attataggtatgatatgatatgacacaaattaaagttggtgactattgcataatttgtcgtctaacggatagccaagagagtagtcttttctttcttcatcaaatatgggatatatacaaattaaagctctcgaatatataattctgttaagtgttgtttatttggatattggcttaagataagttgtaggtaaaaagcgccattcgatgagaccaaatagcaaagatgatcactttttagaaaaacgaaaaaggaccaataaaacatgaaaatgtgaaaacccccaaaaagtttttcaaacactcaataattaaatatgaagaaaaaaaagaaaagagagagacagagaagcagaaacggtaagaggagggaccaaaagaaaggaaacgtctgaagaaaaccctaaaccctaaatggtgacgagtgatagagagagagatgaaggagctgtcaaatgtgtcaattccatcgatccacaaaacttaatgcttgtgggctacgcaacgcatctctctgctctcttcgttttttaacactcttgcttgctccattaatttactctatcttcaattcctttctctttttatccctcagatttgcctttttaattaattatggccacagtgagtgttaatgagctttggtatatttggtatcttcgattacgatgtgcaactgtttccctaatctctctccctctctctctctctctctaatattcaagaaaatctcaaccgttgatctctttctctttcttctatttaaacactttaccctttcctactttcttcaccctaaatctcttcctctccttcagatctctttagtctttactattagggttagcatgttgatgacttcagattctgaagttagtggcagtcattgtttgctattgcaacatcttcaagattcagaaatcagattctcttatgggttttcttttgagcctttattttttggtttgagaatcttgatgatgctgcagcggcaattaaatggcttacttatctagggtctttttttccattttcatcatgtggttaatcagaaatccagatcctcatatgtagaatcctccgatatgataacttgaggtgaaacttatttcacaggtatgcatatgattatatatatataagcacacatatatatataatagatttgtgtgtgtataaacatatttgtggacaaaacgatgatgaatgatttgaaaaacgaatatgtatatactactctcaattgattaagtgaacccttgcttatagatctttttttttttaaaaaaactttttgctgcacgatggatagatcctgaaaatttccaaaaaggttttagggttttctttctaacgacaaagtatataagacctgtttctgtagactcaaggtgattcataaatgcataaatttgatttatataataatgactgaaagggtttggaggaattggacatatgtatgaaggagcatgtatatgtctgttgttttatgttcggttacatctggttatgtctcttctctttgtccactggttaatcaaatgactcatcttcatgtgaaaccaaaccccttgtttttcgtgtccatgtttctttatgtatgtgattagatctctatatatgtttctctaatgtagtagatgatgatgtgatgtatgtgacaggtttgtataattcttataagagttctcgactttggatctatacatatatttcgaatttgattcctaaatcggatttgagaagaatctcatttctttttcttgttttttatttcttattgttttgtttagggtcttaaatctgaatctaaatgtagtagtgccaactcgaactatgatctacctgaatctgtatatgaaatcgaaattttacatatgagaaaggtttatatatgagaaagagattagtttgtgtacgttgcttgttgtgcagttgttctctgctgcaaagattcgctcatgtatttgtattaacatttaagatctactaagaatttttaataacatggataccattttattgatggaaaagtccacatctacgtaaaaacaaaactgtgtgtgggtaatcttgattttcaaagatttatacagatgagaattctaattaaatcaaacttgcttcctaattataaacgtttgatctcactgatgtgtgaatttctgatatgtggacttggataaaaattacaacaccaaaaggttttagtttgttttgtcgagcatatgcatgatgagttactccaaacatgaagcaagtgatgaaggtttgagtcatggatccttttttcaatattccaaacaaatgagtttatctacaaataatcatcaatggaatggttggctaagatgtaaaataatactagaaggtcaaaaacttggataaaaattaattcagactacccaaattatagttaggtttgaaaacgcgtttttatccgatatgggtctaacgtcaaaattggggcttaattactaaactaagcaattttgcaagattatcattagtacgagtttttgggccggttatgctgttaaagtttgggtggtctgtgaattcgtttattgtaatttaaagtgtgcgttttaagttgcaaacgtcgaccttagtgatatcgtaagatgtaaagactttcgttgtgaatggtggtatcattatttagacgttgttaaacttttctaaaggtaatgttacgcacatttggaatcttagggatttaatctggtgattggtcgtttaattttatgcttatcccaattaatagcattggacaattaaggcctttgtaaatttgggcctttaattttgggcctcaactatcggtgtatgcacatactactatttttcttaaccctcggtcctccactcctcctaagacacttttgctaatcaaaatagtttttgttgagttcactactttaatctacgaaaatctagtgacccaggggctaggttaaattggagactcgtacgatactcgtgagataattagta

SEQ ID NO: 9746 - DNA, 3000 bp, Unknown
  misc_feature (1)..( 3000): cDNA_ID_2185546_gDNA_ID_1972177_Annot_ID_180066 3000 nt of promoter + ATG
ggtgacactgaagacaattagaccaagaacaaatcgtcctagtgaatcattaagagaattagtctgaaagtttgatatattattatagtcgaaaatcctaaaaattctgaaactcctagtttagactcttaagaccagccttgcggttctgttgtcaccctcaagtagtttctgttctggtttgttcaagagcgatattctaatgaagatatataagactttgaaattgttttcacaaggcgataaattaccacttaacttccttgacccttgttattaactgcttccaaacattgctctacgagactcttgatttacatgtttattacatcatattggtaagcataacatagaccaatttggttatcgccaacacctaagcttagtagtagtaaaaaccttatgcatgagctgattttgtatctttcttcagtttggagttgatggacttttcttgataaagctttggattacgagttgaaatccagagaaaagctccaatagcaaagtcacgcttatgagccaagtcaccataagtagacaaaccgtaatctgctaaaaccctgtcgagcttccactctggcatgtcttggtaatcttctttggagtatcttgggtaatgaagaggcatgcgaaacacactcccttcaccgttcttgccattttcaacatccatatatactgtacaatattattatttgaagaatactctttcctgttctgttcttgcttctggtgtgtaaatatgcatgtgtttatatatgttcttgaggcttatttatataaaggtgttgcaagcggtggtttaactacacacttaacgtgtgagtttttgtcacacggatccgtttgtttaccttcttcattgcctttgttaaacgcatgaacatgtgtaaatggaaacattgttgtgatcataactttggataacactaatcattcacacgtacggatggagtttaaaatgtaaacaaaacttcgattcacatacgttctaaatttattaagaatacagattactgtaaacttatatgcctaaatctatggttttaacttttaagtatatcatgattcatgaggtgttgtactgttgtttttcttcattagcatgaattgaaatttaggtagttcttcatacaaaaagttaaagcaaaattatttttaaaaatttttgtgaatgtgtcatcatactaaatactatgaatttttgtgtttccgtttatgggtatgatttttcttagttaatattacgaaaatatacaaaatcttgaaataaaaatgtaaaacctaattggtttaaagtaaaattttgttaggtttgtattaaagtgtgtacactgtgttgtagggttaatttacagttctcatctacaaataacattctaaagaataaaatcacccataaacccaaacacattgttcttggctaattgcatatgttgttcttcacaaaaagaaaaaaacttaagaaaaaaataagacaaagcagtgatggctaggatcaggttcttgagaggtcccacatggtgactcaaagcctgcgacgtgtcatcacaatcattaaacgaaccccactggctaatttagccgacatatgaaggaccaaaaccacacttctacttccagaaacttcgtcacaaactcttggcttagatttcgtcataaacttagtggttcacattttgccacctgtctgtttagtccccacgtgatttatcctacgtggctactctcgttcctaaataatgatacttttttgttggaaccaaccccaaacttattgatactttcgtaactcgcccctattctttgatccaagtataaactcctttgtcattccttatcaatcattcgtcaatagaattaaggtcgtgtcttaacacactttctaaagggaaagcctatttctggaaatatatttttagataacgttttaacaaaaatggatttgatcaagtgaaaactttggtccacatactccactgagatatttacttggcttacaacatatgtcacaagatatatattccaaagagatattttacttggctcacataattcccaagatatttcatatgttttggttttgttttcgatgaagataagatatttcaaatgcttctccacctaaacccaacaacttttgagaattccaaattctgatcaagatagaaattttttatattgtttttcgaattaattgtttttcatatcactacaaaacaaaaatattatattaattaaagtataaaaaatggtactaatttaaattactcaaaataaatgatacacatatacatggtgttatatcaattacaataattgacactattattgaattgtttgacattgatttaataaaatcggtacaaattcacattaatttgcatctttttcaaaatattattacaacaacatttaaatcactatgttcttaatcgtcttttcgtaataataattaaattttgaggtttttcgtttttttagataagaaaaaaataatgtaaaaaaaattgacgagatcatattttggttgatcacaagtgaggaaaatgaagttattatgtaaagaaggattctataatcgattgaccaacattcctccaaagaaatatattttattttataaaaaaatctaataaataattggaaataaaatcatcattcaccaaactttatactgttttacaaatctacgttttagtcaatttcttccccatacttgacctcatgaagcaatgaacacaaatctatgtttcgattttaccatggaagagggtcttagtgatatgaatttaaatgtcgggataaaatataagattataaaactataaaggtttattttgaaatacagcacacacaagaaaaaaggcccatcaacctcgcagtcctaattagataaatacacgtcaacttctctgggaacaaaaaaactgatattttctgattcgtcgtttcctttctactttcttcttcgtcaggttttcaaaactgagaaaa

SEQ ID NO: 9747 - DNA, 3000 bp, Unknown
  misc_feature (1)..( 3000): cDNA_ID_3032802_gDNA_ID_1972177_Annot_ID_180060 3000 nt of promoter + ATG
tttcggtcttgctaagttatatgagcatggatcggatccgggggctacaagagtggttggcacatttgggtacttagcaccagaactcacaaaatccggaaaactgacaacaagcaccgatgtttatgcgtttggagcggttttattggaagtagcttgcggaagaagacctatcgaaacaagtgcgttaccagaggagcttgtaatggttgattgggtttggtcaaggtggcaaagcggagacattagagatgttgtggacaggagattgaacggtgagtttgacgaagaggaagtggttatggtgatcaaattagggcttctatgctcaaataattcacccgaggttcgacctacaatgagacaagtagttatgtatctcgaaaagcagtttccgtcgcctgaagttgttcctgcaccggattttctagatgcaaatgatagtatgtgtcttgatgagcgcagcggtagtgcaggcgagtttgaagattttgtggattcagctaggttttatagcggaccgaatgaaactactacttcgtcgatattttccttctccggtaaaacaagaactgatccaagataattggttcttttaaccatgttttagtaacgtttcaagcataatatttcaccatgaaaacaagtaatctgaatgttaaaatgtaaaatatttttatcatatgctgttgcttaatattttgagttgatcgttggtctcaaatcttgtggttagcgtaacctgattttgaacaattcattgcataagttcaagattacaacacgaaatagagataaatcatttttcagtcatagtctcatagaacaaatatctcggaacagagaacaaggattcttctatgagaaaaaaagaaatttataaagctcaaataaaaagaacatagacgaataaggttttgtatataaaaaaaggacataaaggaacaaaattaaatgcatttaaaaaaagaacaacactagcataaactattagtgggggtaattttgcgtgtctatgttgttaaaataagagagtagcttccccttcttaaccatgaagtaaggaagctcgacatcagtactaggttttgcagcggactggctcgagctttcaagtgtgtctcgaggggtaacatcaacataacggaggatgtcattgtagatgacataagacccattgtgacaacgtgtcacatagaaaaattgcaagaactttctctctgttttgtcgtctagagtcacgaaaccgcaaaccatgataaacattctatctttaaaggatctgctgatctgataatccacactattcaatataaaattagaagccctcttatgctcatttgagaccctcttgttgattgcctgcaccaaaaaactaaccccttagatttattccactaaaatttctctagaaatacattggaattaggaacttttgcaacttacatcgaggccaggcatctcgaccattgttctaccagaagtcgaagtcggtctgctcataatactttcattgacatacatcaaaccaagttcctcacgcataggcaactcgtagtaaaccttgacaaatccagctgcaaaatctgcttatatatatagtcacaccaaaactaagttagtaagttttgtaatctcatgaagctaaacacttactattctaaaattgaatatcaaacacaatttatacagctgtttaccggattcaggaacagaaggtaatgctggtattgaatcgatatagcggaggaaatcattgacaatggcataagacctatcttgacgacgagctaaatacaaagattgaacaaatctcctcctcacttgtttgtctttacaagtcaagaaaccagtaaccatgataaatgctccatcttcagaactggtattgcaactctgagcagcaaaactcatcacatcaaacgaagcaccttcatagtcgcatgaaacgatttgctcctgaattgcctgcaccatcaaaaaattgtttgtccttataaatcgtttacagcttttttcaagtttatacgttttgaaaacgttaaaaatataactaaaagaattattgttataaaatataattactcccaaccagaacatcaaactaaaaacagaaactcatgagaaagatttgatctgattaatgacaatacctcaggcgatgtaaaagacatcattgtaccatcaggaccgggtctagtcataacactgtcgtcggcataccacatcatctgaactacctcgggatagactcctagattcaggaagtaagattggagaaagcaattggctaatgcttcggaagtatttaagttcgtgaagtgggattgaataaagccattggctaacaatacggaaggatcaacatctttgatcatggaatccatatctgcaccagtaattatgccctaggggagacgaagaaatatccaaagtaaaccctagctagatatcaaaatctcttaaaaacaaacttatctctctgttgagatcaaccgctgatctataggctaaaggaatcaccggaagagagagagagagaggaaagaggcggaagttgtgacttgtgagacggtttggattttggaaacctacgttccattgaacttctttatatattggtttttcattatgggatatagtaatatctttataaaaaaaaaaaaaaaaattatatatatatatatatctttaatacattattaaattaaataatatacggataggaattactataaatctttataaaataaaaataaaaggagaagtcccttttatctaatttggatggttaatttgtgaattttccatatttatctaatttcgatttgaaacatatccaacgttaagtcagattcttgtggtgaaattattgcatcataacataaagtcatgagagtaggagagaaagtaataagtggcaacatcaaaacgacgacgtttttaagctagtgcgtcagcaacagttaaaccatatgaagttaatggtctgtgttaatg

SEQ ID NO: 9748 - DNA, 3000 bp, Unknown
  misc_feature (1)..( 3000): cDNA_ID_2185550_gDNA_ID_1972177_Annot_ID_180067 3000 nt of promoter + ATG
tatgaacagaccccaataattctcgaccctttaacctggaaaagattgacaatttgacatatcttatctgaggatttatcacaagaacaatacttgctttgcatataatacgaatgagtttttttgtggacagatactggagcgctccttacatttggttgggggctttatggacaggtgagcacgatcgatccctggctttatttattacagtatatgcttgaaacttgaatgagttaagattcttgcttccagctgaacacacatgttgaggaaagctaatcatcatagtgttgaactaattctcaaaatgtttttttatatataccaaaacatagattcaacacaggattcaggtttgataaaacatagaattagggaaaaatgctagtctgcatttaaaataagactggaaaagataattgaaactttcatttgttatacatccgcagctaatattttcactttctgttgggtatgtggaagtaattgattttttttatttttgttgctctgtgaagtgtggccaaggaagtacagatgatgaactaagtcctacatgtgtgtcgtctttgttgggaatccgaatagaagaagtggctgcaggtctatggcacacgacctgcgcttcatcggatggtgatgtttatgcgtttggtggaaaccaatttggccagttaggtactggttgtgatcaagctgaggtaaaaaatcttgaactatattgtttccctggctattctagtaaatgctaatctgattatttctagaggccctgccactaaacttgaagtcatttgatctttcagactcttccaaaactattggaggctccaaatttggaaaacgtaaacgtcaaaaccatctcctgcggggctcgccacacagctgtaatcacaggtaacccatttaaccaaagactagattcagtttcatgttagctaggaaagtgattcatcttaaaacttaaaaaaactgctctgtgtttttgtttgttgtagatgaagggagagtattctgctggggatggaacaaatacggacaggtaaaaagagaaagaccatatggagtttctgaattgttattgtcgttccattgaatgacgtagtttgtgtcttgtctgaaacagttgggtataggagatgtgattgacaggaatgcacctgcagaggttagaatcaaagattgcttccccaaaaacattgcatgcggttggtggcatactctgcttctaggccaaccaactctatgaacacatccgaatttttgttagggtttaattagagcaaatgccagatttttcattctttttttttgttcttttgtcaagctttgacctttttctacatacacgtagacctttagtatcgcattgtacatacacaagtcagttttcatttgttaattgtatgagaaaatgaatgtttagcttttattcatccaacttagtattatgcatgaagtatgaacatactatcctatctccataaaagaaatatgtaaatatacgataacgagttaacttattaaaaaaacattaaccaaacatactatcctaacttaaaaataagaataaaagatgagacttgtatttgtatataagcataagtagtataaagttaacccaacatttccggctacaaataaaagtataaaacataaccattcaccaaatgaaattccttggagaaaaacaaggctccatgggccatgtatactcttcttcttcttcttagtcgtcctctagatgctcatacgttcttcatcaacttcttcttcttcactttattatcctcttatatgtgtgtcatagctgtttcagtaaaagacagcaactcaagccgattgaatatatctaaaaactagtaatatgtagtataaaaaaaagattagaagaagaagaagaagattaacgacgataggattggttaagaatgattccagtggaagagagtgctcgcagtacgtgctcttgggttttttgtagctcgccacatgcagagatggtgacaggaccagtgtaacctaaattccgcaacttccgttctatacactcacggatctgaccagcaatccagcatcatacccactaggatccggaaagctgtccatgtcccaccataccgacgttttagcctccgcctcctccttgcttagcgccttcttcggcagcattatcaaaattggacatataatctcaataatcttcgatacgtagcagttaaggcatttagggtttctttcaacttttaactatatacacgaaacttataggcatagccgcataggcctatttatttctattatatatgttctttttttttgccttaatacagttgacaatgtttaattttttgtaacattaattacaataattagataatcttgtaaagatgaatagaagataattcatattttcactaatagtagaaaatattttacttttatattttggtttaatgaaattatcaagttttgtaacatctgttttaccaaaatttctaaaaaaataagagttacacagctagtcagtagatcctttaatcctcccaaaatcgcctcttcatctcagggcttagtttatcgacgatcctgtgagatctcgtataggtaaatatgactttctcttctcttcacggtaacgactaacgagcacgaatctaatccgtttccttgacttgtggtgcatatgattttatttctggagtggttttgtgcgatttgtctgtattgatttgttttggcctacgtaatttgggtcttcgtttctagggttgtggattagggttatgcgtttaaaaccttttcagtgatgattgttattttcctaaatgtttattttctttagttgtgagctttgtcttaatctggacttgcctacaagaatttacattactgccgtgacatgttctcacaatagatgcatgttgttgtgattttctctgctttttctcttgactatgttctctacaggaaaagggaagttagtagtgcatcaag

SEQ ID NO: 9749 - DNA, 3000 bp, Unknown
  misc_feature (1)..( 3000): cDNA_ID_2185513_gDNA_ID_1972177_Annot_ID_180054 3000 nt of promoter + ATG
agcataagataagtaaaataagaaaaattcactggtaagaatcgaaagcacagaggaatttgagagactgagaacgcggcggtgaagtaacaagtagagacaagtcaaaaaagggtttagggttttggttggttgggttcacggtgtcaatacgacaatacggatccgaatatccgggtcagcccgaccttgtctatacaaacaaaatctgtaaaccaaaaacaaaaaaaaaggaaaattaacaaaaatctaaacatttttacagcaaaaagattgtttgtttttggagaataaacaattgtagtgaatatggtgcgacataattataggtattttattatttttacttgataaaattataattatcaaatttatgctacaaatcctctcgtgaaatctgtttatgttaaacagtgtgactatgtgtcagatttaattttagttttgtcaaaagtgaattagagatgatatatataacactcaatactatatcttgaacttaaaatctgtcttattttacattttcgattacatctttctctatagaatgatttcttagctatttcttaagaaaattctaattaacaaatatctcatcggttgtccatgatattagtgttcaaatttcgatggagcatatatgtaggatcatgtttaatttaaataaaccaaagattcatttatgcacaaacataaaaagtcatcatgtttaagctaaaatccgaggttcctttataaatcattttgtatgatttcatgtattgcttgatttggagttcataattagcatctatacttacttgtattccaagcctaaggaattgctgcgcatgtacatgtttgtgacattatttcatgatttcagcgctttgtattagtattaattaagcgcacacatcattttcttcccaaaacaaaggttcctagatacgtttctcaaatcaaatcaaagaacaagtgttatgtaaatcaaagattcctttataaatcattttaggattagataacaaactttacttggattaataaccatacactaataccatgtcaaagttcaatagtaacaacttaataagtgaattaactcatatacagtaggagactataggagtactatacttgctcaatatatgtgaaatgaatcgatattttaaagacatatagttggattcatatatatcatatcagattggatcttttgggttgtgctatatatcatgttttcattgacatatatttggattcatatatatatatatatatatatatatatatatcatatcagattggatcttttgggttgtgctatatatcatgttttcattgtcagatgatcaaatacatgatcgtacgccgtacatgccctagaccctagtcctcttggagcagtgggtcagatctatttatgtactttatatttgttcgacatacatttttccacattaatgtgcaacttccgtagactgtgataccattcaatacacacggacatgccttacaatgttttagcatatcgatcgtcaagttgttttgttagttggagatgaaaaattgagaattggcatctatatacacataataaaatacataagaacaatagatagacataactagaagtgaaaactgtttttgtataaagaatgaaataaatgaaaagacgagaaatcgtcgggagagagtagaggtagataataaattcacatgcaagtggttacgtatgcgttcatgtgcatttggaaaaaatataatacacgtcactaattacacgtatatatacactattatgtcaaatgtatctcactttaattttaactaaattagatacgacttatgatttatagttatttcacattatcatatctactaaaaaaagaaagaaaaatctgtaaccacgagaagctataaactttgattaattaaacataacacgtatgtatattttttgctggcgtggatgatgtggcagatatacaagatctggttggtgcatagatctgctttgtcatcaccaaatgtcgttaatgctcttccaccgtcaccgcccctaactgttttcctcttttttaatttccatctcatgcttcactcacttcgatttgccaacatattattgttaattatgaaaactatcccaatggattgattatttacattttcataattttattgcatagttgttgtagataattttttaaatataaaatgtatggttctggtgtatttttttcatatgcttcatgtttgatttgcattttttaatgataaaaatatattgcactggatttaaatagaaatttacgatattacttacaaataactcgatttgtataaatgcatcatgcatgacaaaagttggctacgtagacgtgctgtgtacggcgtatatacctaaagtatcaatgtattaatttgaaaagcgtcgaaaatataaacttttgttcaaccatggcagagtttatacatatgcacattattcatatttttggtagaacttcgaaattattttatgaacactagaaagacaaagtcatgcatatgatgtcaactcaaattctctattacgttgtttaattatttcatcatcgttgcttcaagaacgaaccagttaattgttagtttatattgtatgactgatataatttctacgtggttggacattttccaataagctattttaatttgaagttaatctcacattgtattattaatagatcccagagttaatcggattaaagatctcatctcattgcaataataataaaaagatcacaaacggttatgaacctatattttcaccatctactttctaaatatttgtctagaaaaatactaatttcggccagtaccatctatttctctaactttggagttctctccaccaatataaatagcgatcttcacaagtgtattttccaccatcctcaagttcctctctaagccttctagtctaacaattttctcaagctttctccaattcaattaaaaatacttaccaaaatg

SEQ ID NO: 9750 - DNA, 3000 bp, Unknown
  misc_feature (1)..( 3000): cDNA_ID_3032821_gDNA_ID_1972177_Annot_ID_180051 3000 nt of promoter + ATG
taaattcatgattttggtttttgacctctatcctacatttgtagttcgtcggagacaaggttgcctatgcacttgctcaaggtttgaaagtgattgcttgtgttggtgagactcttgaggagcgggaagctggatcgaccatggatgttgtggctgcccagaccaaggctattgccggtatgtatattgtcaaacatttaatctctttttgctatctcagttcgttctcgtttacagtgagacctgttttgatgatagtgatgcccgtttctacgcactatactcccttagtgtgtgattcaaaccccacagaaatatttgttggctaaaaaactctttttgttggtaatggcagatcgggtgacaaactggtcaaatgttgtcatagcctatgaaccagtgtgggccattggaaccggaaaggtcgctagcccagcccaagctcaagaagtaagtggttctcgatgcgcagttgcactgtaacgtgttgcatatggtcatgatttaataggaaaaccaatgctgttttccttacgagagcttgtttcgtttatgaacaggtacacgatgagctgaggaaatggctggccaagaacgtgagtgctgatgtcgctgctacaacccgcatcatttatggaggtagatagatgataacacgatctttaattaaacacccctatatagttttctatgttacttagcttgattatgcaaattattatcaggatccgtcaatggtggtaactgcaaggagctaggtggacaggccgatgttgatggtttcttggtcggtggtgcttctctaaaggtacatataatatggtttctcttgtaatgatatctttcgtttgtctctttcaaaaccatgactaatgttttcattcttggtctttttgcagcctgagtttatcgacatcattaaggccgcagaggtgaagaaaagtgcctaatgagctcattaagcaatttaaaagtcctttgcttttccagtcgcaactctgaaaaaatgaataagttggtattatgatatgatacattttgcttcagttgtatttggcaaaagtttctctcttactatattgttttgagaacgcaacaatcattttcttcgccatttatttagctgtggacttgcaatttgcaaatcccttccttttacagtcttctcaactcttcagagaatctgtgtttggagttcataacccctcgggccttttgatcaaacccctatttctaatgtcgtccgatcataaacctgtgtgttatataatatgttgtttgttccattttagactttggtattttgtcatgcttgatctctgaatcatgctgtcaaccactttgaaaatggctttacttgttaaataaatgacgagagaatacaggagaagtgggaaatgactttattttttcccttttatcgctttttgcctattggtctgtcatttttgacattttagcttttagaacattattattttcaactttattgtcatcatcttgaaaaatgtccaacattacgaaattattatgtagagagtaaaaaaggaaaagaaatttcatggagaaactcattgtattaggaatgtcaatgtttgtagaaaacaaaatgcttatgtaatttgagtaaaacggctcagtggaactaaagtgataatgtaaaagagacggttaagtccaaaataagagctcccgtatgtcagaattgttcaaaccatttattaaaaaattggactcagtatgatgaaaatgtgtatggattttgatccgaccacgaaaatccaactagtgccaataaaaactccacaatatgtgactcagctacaaatgtgataacgtattatctcccaagtcaacccacatttctggtgacttatattttatttatttctgagtaatatttaagaaagtagggattgaatttttatgagtattatattatatagttgaccttggacttatttgcgtaacgagcaaacaattgtgaccttagaaatggaggtttgactaagtcatcgatcatttcagcaatagagtaattttgggtccgtatgactcaaaacaagttttggtaaaaaatttctctgttttaaaaacttgtatttataaaacttatgtcccatcccatgatactaaatttaattacattatacgtatgtagtcaagcataattttttcctgaaaaatcttatttttcttacctacttgtaaactttaatttaattcctggttaagtagatatttttcttagttcttacaaatcttatattttcttacctacttttataaacatttttgagaccactattactaaacccgaatctgtttcatcattccacacccaaagcatataaatcgaaaatatctatgatcacatgaatatctatcattttcgacaaaatttgtccttttttttctttctttttgtatccaaccccaccacggcgaatttatttcaggcctattaaagattccaaaatctcatgaccatctgactcagatgtcatatctattaaaaacgttattttgaatcttaaacatatatcattagtgatctttttgcacgtttactcagatgcttaagatcatcaaaatcaatctatgaatttcaaaagttttaaaaatcatacaatagaaaagtcccactgatcattaaattgttattactaattttatttagaactcgtttattatcttttggtcaaaaatataacttttgtctgaattcgttttttttttgtttggacaagaaaaagacctttcttcttccttcggttgcctctaccatctcatcaacacacatcttctctttctcttctctcatcctctctcttcttcagtgtttactttttctctttctcttttttttttctctttattatttcgctttaatgagttttatctgatagaatctgctccacccaaaaacagcataagaagaaattcattgtcagagaaaagtgcaaaaaaaaaaaacgatcttcttcatcattctactaa

SEQ ID NO: 9751 - DNA, 3000 bp, Unknown
  misc_feature (1)..( 3000): cDNA_ID_3032798_gDNA_ID_1972177_Annot_ID_180049 3000 nt of promoter + ATG
tctccgcactaaaacacacaaattacacaatgcataagagcaggaaatacaggcaccacagaatatatcttttcttcctatgaaagcattccatagacaggtaaatcatattacacctacttgtctaaccaggcacgaatccaatcatggtcttactaccaactactagttgttttcttaatcacttaggttacacaattcttataggaaagaagataaagaagaagaacagatggaaaaatcgattcgtttataaacacaatcatattcattttcaaaaccataaatatttactgcatgaagcaataatggtaaaacagcttaaagtatacaccaatggttagaatctcacctcacttcaccagtgaaagcacctcctttcttaacccaacagttttgtgccgcaacaaaaaagtcagacctcaatgtgctcttaaccaggggaagaaaaacatatggagggctaaccacaacctctgcatttagtaaaatttcatcaaattattaatacaagaacaaacatacttataactatcaacaaagatagaaccataacaagtatatgataaagaacattttaactaacaacaaacactagatctatccatggttcctaagaagcataaacactatagaacatcgatgtacattgaaacaggtttgtaattgtatgcccaaaatatttgtcactacttaagatttcatagacatggaaattaaaaaaaaagccataatgtcgtcaaagcaattgagatgctacacatacctacaacatcctgtgaaggaacctgagcttcattaagagtgttcacaatcttcttcacctcctcagcagttccgttctatataagattacaaattcaaatattaacatgttaaaatagtttaaccaacaaaattaacacacggatccaccaaagctagaacacgagatatcaattgaagaaaaattcctactcaaaattttgacaaaaaaaaacaactaagatccggcatagaatcgacaaatctgaaccatatgcattacaattcaaattccaccgctacaaataatgaaaaaaaccttagatcttaagatcgggattttccgatctctttgacttgatcggggaaggatcaagtgacaagactaataataaggtgcgcaatagaaggtaaagatcacttacacatttccagttgcctccgacgaagaactttctggccattatctcaaatttttttcaggcgatgatcacgagagtcacagatacgacgacgatggagagagctgaaaagattagatcgatagtgttcagtggccgttgtctctcgcaggggtcactcatatatatataaataaaaatatactctcaacattttagattggaaaagacgcatatgtctagggtatatgagaatattccctgaacgattaggaaagttgaggatattaaagtaaattaggagggaggatgaaatattatggacgtgttggccaaggtttggtcggtgtaccgggtggggtgaataataagaatagacaacggcgtggatagtgatgctgttgtatgggctttaggcccattaaagcaagcacatcaataaaacccaagtttggttaaaggaaagcctattgagatgattctgaaaccaaattatatttgtattcccttaaagataaattctgtattacgcaattctttctttttttttcttttttttttttggtaaaagtttaaatcgtattatgcaattctatattgtaatgccccttcttggatacaaatagtgtggagaaggagaaaactgttgtaagttctcaagttaaactactaaaccaccatgagagcattgagccggctcacttcaaacattgtggcatacttcaacaaacatattgttagtctaaagggctatcgagtggcatcgattattttatgtgatatcattaaaaagtaacaatggtaatttgttattgcaaaaaataaggatgggatttaattaaaaaaatacaaaattacgtggtttgtgtgtgtgtgcaatgagtgtaaccatgtcattgaaaatgacaataaactgttaacaatgagacatggacgcggatcttcttttcccaaagaaagcataacaaatggctaaagcgtgtcggtaaaagttacttcgaatcagcttcctcaacaacatcttcatacttcgaatctctttgactttggtccgtagtgttcaaactccaaactattcctcctacaaacacgtgtccaatgggccaatggcattatcccaaaccgcgtcgatctctcttctttttcttttcacttaatatttaaccatatacatttcgttgatacatcaatattactaatcgattttttttttagttttaagtttagcagtaaaaactcagatagtctcctttgacctcattaagaacatcttttaataaacgtatccaagaaaaaacaacactcgatctctcttttgttttcttaacttcactttagttcctttttttcaaatatagttcatccgtatctggataaaattaggattgtaaaattacgattaacaagaaagaggtatatttttagattaaacttggatagtatgagtatttaccagccaaaaaccattaaagaaaaagatgacaaattgattatccaaacaaaagcagactctataattagccaaattaattaactaaagtttccacggtcacaacaaaatccactttttcaataatttacaacggcctaaatttaagccgacgcacatgaaaaacaaagacaacacaaacttcttcttttattttgctttccacaaaatccagctgttcctcactaaaaatatacacacgtatacgctatacaaaacggtcatatctattaatttttattataaatactttctcgataagaataaaaaaatctattcgtcgtaataataaaaacacaactcaaacgattcacgggtttcacttggaatcgtttggttttctcatttccgaaatataaaaagatg

SEQ ID NO: 9752 - DNA, 3000 bp, Unknown
  misc_feature (1)..( 3000): cDNA_ID_3032825_gDNA_ID_1972177_Annot_ID_180045 3000 nt of promoter + ATG
acggaatagaccgtgtcctcgtcgcatacgaagcaccctgattcaaaatccttctaacagctagctttgtaacactggaaccagcacgaaaccacaccatttcaccagattcaaaaacaacactttaacttcaattcttaacaattacaataacgcattcaacaatcgtcgttctacactgcacacaacaaacaaacagacacacacacgttaatgtcgtcctaactgaaatgaagtatcaaagagatctttttttttctcaaatcatattctgagggataaaacgaagaacaagagtacgaaagaggaaaatctacaaatcaatacgacctaagattcaactcggtgacctaaacacaatctggatttaaaaaacagtacgaaatctatgaatctgatgaggaaaaaatagatctgttgttggataaagagaaaatgttggattaagaaagcttcattatttccgattgtgaagaaactgaatttgaaaaagctgaatactttaccttggaggaggaggaggcgaagaagagaaagaagaactcggaggaggaggaagaaagggttggtttttaaagttttgccctttttctagaatgataacgctattaattattatggaatattgttctatttatgtaaatatgaaaatatttagaggtttatgtgtaaggaaattaatatatatgaaattatgaaatgtagatttttctttggaaatgtcaaacaaataccataatttgacaacttgaagacgagaaatagaatgtgttagtgatttgctgaatatttttctcttgattttatatagtcctaaaatagattaacaagtcaacgatgtgaataatcaatcgtttactatttcttctctaaacaaaaaagaaacaaataagaaagtaacaaaattataaattggaatatataatgttatagttttgtaattaaatatttgatggtggcctccacctgtgtgaaacgccgttccagaacaaagactgtctttttgtccaagtccagttttctcggtggtcaaagtggcgtttttcgtaagcagattgaaataaatatctacacgtgttataatttcattggatgattttttgtctcgtttttcatatgtaacaaaattatatacgtgaaagaggggtctaaactaaatcacaagacaaattaataaaaggtccaacaagttagtaacagaagtgagcttttttttatacaaacaaaaattaatctttgacaactttaagacgagaaatagaatgttttagtgattttctgaatatttttcaatggacttattggatttgctgtaaatgttatcaaaaaaatacagtaaaatctttataaattaatatataaatatgaaatttgaaatatttagtgaaatataattctactattttttttcaatttgtattaattctttataaagttcaattctaatacttttactatgtcgattttctttttttttttaaaacaaaatatttgtttctacgtataattggtttcataaacattattgattataaagaaaaaactactttttagatcaaatttttgtaagaaattacataatttgtaaaatttctctataaaatttatcgataatttgtacgaagaacgccactttgaccaccgagaaaattggacttggatacatgttaaaatggatgagtttaatctatgtatgttatatacgtgaaagagagggctagagcagaagacaaattaataaaatttcacacaaattaataaaagaaatgaaacaatggcttggaagcaaaataaatttaatgattcaacaaaattttcttgattccgtaagacttaatcagcggtgaaatcaattttcttgaccaagtactcgttttgacaaaacaagccaaaaatccaattacttgtataaggcaagtcgggtcacaaatatcttcaattttgcaagtacttgtcttgtgtccagccctactcatagttatgcagactttgtgaaagagatgaaacagatggctttagcaagaccaaaagtaggagcagaagagattttgtgtgatcaaatagatctagagttactccctaggacaatgaagaagatattaacgtctgaggcggattctgctaaggtggagctactgcaatttatacaccggatggcaatgtggtgtattatgtctataagagttgtaaatccgagtctgaggcgagacaagaattttatctaatctcagtgttccaaggttcaactgtaattgttcaatgcacgggaaagtgcatacataagcttactccgacaacctatggtttccttatggagtatgctactgcaggaacccttttccatgagataaaaaagcatttccatacactttatggagtatgctactgcaggaactcttcccatacactttattcgccgtttcacactgatgatccttcaagggcttcaatatgtacatcgaggtaactttgttcagtggaccttcacagcggtaatattttactctttcatagctatgaaggattagaggcaaaactcagcgactttagaaaatccaaacggattaataaaactagctggtggagccctgtaaatcgccacttatgataaaacttgatcatgtcactagagtccatttctcatggtatcacgaacgaagcacttgacgtatgggctgttggtacttagttgataggtgatcttagatgaccaacatgtaattattttgcaatgttggagagtaaaaatcaaccacggctctcttaaccggaagagtgggcgtcaattggattaacatattctcaatgctctgcaagaaatagataaaaaaatttaaaaatttgactttattagttatattttccttggtataccggataactcgcttcgctgaccgataaaaccgaaccatgacctaaattgcgctccaaattttagcagtccctttcttcatttccttcctctgcttcttctccggtggatgtcctctttcatcaatg

SEQ ID NO: 9753 - DNA, 3000 bp, Unknown
  misc_feature (1)..( 3000): cDNA_ID_2993213_gDNA_ID_1972177_Annot_ID_180043 3000 nt of promoter + ATG
actaccggattggtgcaatcttcaaacgcgttatatccattactagaaggtaagggaggtgttaatcaaggtgattctcaacagaagagtagtgattattccaatcagctaatgtttaagcccttgatggatttttcttcaggcggggttagcgccacgcaaacaagaaatgtgaaggcggaagagaatgatcaggatcggggtagggatggggatggagtgaataacttatcaagaaactttttgggtaatatcaacataaactcaggcaggaacgaggaatacacatcatggggaggtaacagttcttggaccggtttcacctccaacaactcaacaggccatctctcattctaagtactcagcactagctattcttgatgattcttttgttggttggggtgtacattggtgcttgtcatgcgagttattgctgaggaagatcaaaccatgcagctatatccaaaggctaattttgaggctcaaaggaaaggtatggttataaaactatctttttgatcttttaaaagatcttcaaagtgtgagtatgtttattggttggcttctggtgatatttatgttttattagaatttggtcttatatattggctatatatagaggtgtgggtgatatgtatgaattcaagagttgatgttggaaacttttttgtgtgttcattgaataatcatcgaattctcaatttcttggagacccattatgagacattgagacatctatagaacatatatgtaatgtatattaaacgtacttaagtcgaattttatgaccaaagtaaataaattatgccgaatgtacatgctaatatcgagtttaaactattttttccaatataacaactattttctctttcgtccaacttatatactcttattctgattcttattttcttctttttaattcctttttcctttcccaagacacaaaaaaaaaaaaatacagaaacgaaaaaaagagattttaaaaattcataacccacgagaattatgcacctaaattcagactaatcccccaaatttcagaaatttatgtatttttgcgatttaatattgtgttcacaatcataatggccaactaactaattgaaaagacaatggaatgactgaaaccatgcataatctctcaagtctcaacctatgaagaatcatgtaaccaatagactatcatcatgattagttaatgcatgatctataatgtattctttgaacatagatatgtcatttatctggatataaagatggcgttttaacctactttgcaatttttgttatatctttcttctaatacatatgatcaatacacttttgtttttaaaagaaattaaaaacttatttcaaacatcgatcacaacatgacatagggtgaatctacacctaaattgactacagtagttagatatatatacttcaaattttaaatatagtgatgtacgtatgtaattggtacttcatattattattatgatgtatgtaattggtacctatattttggaacagaacaaaaaaagaagacactaaacgagctaaagaacaatggaaatttcagttataaggaattgtgggataagggacaaattaaactaacgtaagactagcgcgcaggtctatatatgtgtcaaaagcacggacttatataggtacatacatgagatacaccccccatacacacttatacaacacattcatgaagagagtcatatttcattttcttttaacgtattttttgggccaatccattttgttttcgctattattcggattctatatttctagctccctattaatatgaaattcattaatcaataaaaacgttatttgtaaagatagaaacgttttcgaggaatttctcccgcgacatcaagtttacatattgcggtatcaatacacattttctgaaaatagagaaatgaatttttatcaaaagctgaaagaaacagaagttttttattgctaattacaaactgatttataagcgttaaaagtgaaccgaatttgagtgtgagtggtagcctaatgagtggtgatctccaagggattgtggaatctggacctttaggatctgcttttgcaaaaaccaatgccctcaaaagaaagcgtttatttcccaaaatcatatcactctcttccccattagcattagagttaagagaagcatatgtttaagtctcgtcctcaatacatatcaacgcaactttaggcccaaaggtcatctttcaattagtgcaacttctttttttccttgctctattctgtttttgaatgtacgtttttcatattacggtctatccgaaatagtcgctcacgttcttccacatgccctcaaaccatgacctcactatcttctttttcacatgataattttatgagatattacctttctctaatgaataaactttattctaattcacttttgattcttttccttaaaccaagtgcgatcggtttctgaattattttattggaaatttggcaaagatagagctttgttttgggcttgtttccatatgatctctagtgttcttgggctccttccaagattaggcaagtccagtctcctgctcatgtagtagttggatatatctcttctctgggatacatacctaatcggttttgatcttttgttggagattgttcgggtccggtcttcggcttcttcttttgtatgtaaccaaaccgaaattgaaattgtacatctctctctctctaactggtatattggatattttcctctaattcattatttccattgacaagatttttcccttaatatgaacaaacatattccattttagctttaaatcacaaaaaaaagagataaatttctcaaaagaaattataagtagacaccgccctttttataaacaaccctaaaagtagtaaaaataatatcgagacgagacgggtttgtttcttctctctatctctatatctaccaaaatcctttgccccccgaatctagttctctcgatcgaccctgtgacg

SEQ ID NO: 9754 - DNA, 3000 bp, Unknown
  misc_feature (1)..( 3000): cDNA_ID_1010051_gDNA_ID_1972177_Annot_ID_180044 3000 nt of promoter + ATG
gtagtgcgtttctttttccctattcatgaatttgtcttttgcttatttcaattgtgcattgatttggtttcaatttgttatggcattggctaaagcttgattctttatgattggttctgttgtgctactttgctccactcattggataaaacattaatgacttgttttcctcgtctgctgtttattcatagtgatgaatttgttatggtaccaatatttacattgcattgaaacttttatctctctgattgcagtgaaggtggcttttttaatgcaattatgtcgtttccggagaattatccagtttcaccaccaactgtgacgtttacctcggagatgtggcatcctaatggtgactgatttttctggaaaatatatctctttctcgagcttttaggatttagtcttctgatgatttatactcttttgactgcagtttattctgatggaaaagtttgcatttctattcttcatcctcctggtgatgatcctcatggatacgagcttgcctctgaacgttggacccctgtccatacggtatgttttttcttttaccgtttagcttcagtactctggtaatttgtttgcagggttgagttatctatggcttcgaatatcttggggtctgctttatagcctaacattcttcgaatacagctagctttctcttgtgtagatagcttgtagaaacagacatgttttgttcgatattgagcttatacagtgattgcttttcaaatgttcgtggaatttataagtcaggacttaggaatactctggaggatagtgcaacttagattgaacctctgtcgttagggtgcttgagtggaatatgattcactttctgatttatctgccctgtaccacctcttaatcgatagtgttcttattagatcatgaggaaagaaactagaggtacattgaagctaatgttgggtctgtgtatgatatgcaggtagaaagcattgtgttgagtatcatatcgatgctctcaggtcccaacgatgagtcaccagcgaatgtggaagctgcaaaggaatggagagacaacagagcagagtttaggaagaaagtgagtcgctgtgtgagaagatcgcaagagatgctatgaacatctctccagcgtttttttcgtgttgtagaaatatcgattctaatcttcttatgagaaagcctaagcagaaccaaccatcttcaagcagcagccagatgaatctgactttgcaaaagcttctctttctttttcctttttgggttttgttctctaaggtttggtttggaatattggtgtggaatcaaatccgctccatattttaggattatattattgcactcgttaatggattcgtttgatctggctttttaactttattctggttttgggttacaaaatacttgcctcgttaattatctcaaatttaactgatggtggtttaactgcaaaaggccagaagttcgaaaagagtattgttattcagttggtatgcaacaaaaaattgtggttaatggtttcaactgatgttgccgcggtcataagaaacaaaacaaaaaatattccttgaagattgcggggtctagcacacgagctcacacataaaataagataagagcaacgagaagattatatttttaaatgtcctaaccatatataatttaacaattaagggatcaatcataaatttattcgtatttcagttacatgactggttaattatagcccaaattttttacaattaactattattatattcatatgctaggtttctttcttactcattattggtccactcacatcttccccaaacaattgtatttaagtttttttcttcgaaagttatcacttttagttagatccgcaaaatcgtggatctccaaagctaaaacgaaaaaaaagaaaaatagtctataagtaaaacatgataccgaacaaaacaagagtatataacttatagactataagtaaacaattaaaacaataaagaaccaaaatatgtgaaccaaattaaaattagtgttaaattttgttttggttattctcgtgaaaaggaggaatagctcgaacgtcattttcacactttctttaacgactccactccagcattaattacccaaacagttctgttgcaaaaacatttaaagagagaccagcaaaagttttgagttattgtctcttttgtgtgtacctaatccattttttttttttttaaagaagtaatattacggagtatattgctttcttaatgatatgtcagaaatgtcccgtgtaagtaatatgaaaaccggttttcaaatcaaagtgcactttctctagctcacctgtgtttggtcgaactcgaatccctctgaccactactaacgtaaaaaagctcattgcattaatgtttcgaccgtttcatcgtttattatactgtcttaaattaaaatcattaagcatttaattgatttgtcatttcgaaatttatgttgacaaaaatgactttacgatcaaaccggtttgattaagtaacgtagactaatgctattatggtgatatatatgcaaaagataagaatagtttatcaacgaaaggatctataaattatgcttgttcgacttcttagcatagaaaattggtaatttatttacacctcatgccgttaaaaaatcacaatcacaagtattcataacctaaaattcaacaaagaaatcaattacgtattcttcatttttccacattaaaccagaatcttaaaccaaaccaatccaaaaaagcgacatttaaaccaatccggttatcaaactatctctctctcactcacacacctttctcttttcgcatcactttccctctcattcttctttcttatctctctctctctctttctctgactctctccttgatgcctcgtgactgcaaccaaagcaatttaaaaccgccgcacttctcatgagtcttcttcctcatcatcatcatcatcaccgttaactgtaatttatcttctccgatcttcattctccgcc

SEQ ID NO: 9755 - DNA, 2083 bp, Unknown
  misc_feature (1)..( 2083): cDNA_ID_2185570_gDNA_ID_1972178_Annot_ID_180087 3000 nt of promoter + ATG
aagcttgaagaaatcaagctcattgcgaagagtgtattttgagtgtgaggaaaatatgaatcgtatcaaaatcgttttatttatttattgaaagctcatgtacaaggagaatgagaacatgcttctacagtttttgtcagtataaattggtaattatttgagtactttgtgtatttttatggaatagctaaatactttatatgtttttatatttttttttgacatgacataagtaaatatctaacaaaaataaattctcaaatttgagtctctatataaaaataaaaccaataagcaaaaaatattaaaatctaaaaaccaatggagaattaaactgtcttctactaacaaacccttatttctttttcttcttcacttaattaaaaatagtaaatgtattattagataatcgtggaaaagtcagaaggaatgtctctcccctacacctccgaaaaccaagaaatacgagatttgaaaaatagaaatacaaattgatagaaaatgttagggccacatctactcacgaatacgcatctccaaagtagcatacttaacaatttccttatccttgattatgagaatagaaaaataatgaaaacttcacatacttttcgtcgtcgtaatggcttcgttttgcttcttgttctgattcatttttctgtgtttggtttctcttcaaatatcgatgtttcttatagagcaagaggcatcaaaatcaacggtgaccaaaaacgtgttctctcgaattccaatcaccctcgcagcgattttcggaaatctcttcaacatggaaaggaacattcagcatgtacgaatcataaatctgttcgaggtccaataacgcgtattttttgccaagacggatatgttatcaccaatatcaattttgccgactatggaaatcccactggtacatgtgaacactttagacacggcaaatgcggcgcaccagctactttgaggcttgtcaaaaaggttagcagaattaactagcgttaatatgttatgttggttttcttgtcaatgaatcttatcgtacgttggcattgtttatgcagaattgccttggaaaaccgaagtgtgtatttttagtgacggatgagatgtttggtccgagccattgcaagggacctcctacactcgcggttgacgccacttgtacaaaaacctaggtttcttattcctacttaagatttttgttatagagattgttttttttttctctttctctcgtttcaatcaagttggtgttggtcattgtatttttcaaatttcaaaacataagcaaagttagcaaaccaagcttttgcgttacatgtacaatcctatacaaactcgattgacgcttacgtaacgtttgtgcatgtatacaccataatcgtcaatgggacaaatgttttggaaaatgttagttttaccaacacaagctagaaaagttagcctgacacattccctagctaacattagaacaactagatagactaataataaaactaaggaaataattcaaaataatgaatataattgtgaaatctagttatagaggtaactggatttcaatcccaattttgaaatcatttatttcgtatatatagtacattataattatcattagttgggtgggaatgtaagaacacaaatgagctgtcatgagatacataaattaatggataatattctgacatttatacaacaataaaacacttagcagaggcataattctctaaaatttaactaacagctagagataactgtgaaacaaattaaactcatcacgtctatgaaaatagaaaatgttactaattccttctctttcactggagaattaaaactattaataaataatcgtggaaaagtcaacaggaatgcctttcaccaaactcctccgaaaaccaagagaatggaaaaatatagaactacattgagaggaaatttcgtggccacatttacaaacgaattcgcctctccaaagtttgattaatctaagtttaacgaaagcaaaagtgtaactacatccataagaagtctacttaaacaaatgtcaataccttgattttgataacataaaacaaaaacaaaaatg

SEQ ID NO: 9756 - DNA, 3000 bp, Unknown; identical to SEQ ID NO: 9649
  misc_feature (1)..( 3000): cDNA_ID_3042826_gDNA_ID_1972178_Annot_ID_180114 3000 nt of promoter + ATG

SEQ ID NO: 9757 - DNA, 3000 bp, Unknown
  misc_feature (1)..( 3000): cDNA_ID_3032859_gDNA_ID_1972178_Annot_ID_180112 3000 nt of promoter + ATG
tgcacttcattgggtctataaatgttgaagattgaaatttaagacttttaccaattacaatacatttgaaaaaaaaaaaaaaaacgtttgcgtttctcacaccatcaaccttacatatggctgttatatgagcctcgagagacttggctttcttcaaacacaataaatagatctgaacgaaaaaaaaaaagatgtgaacgagttaactttattgattcaaaataatattcagagtcggctaaaaggctttagataatgacaacttcttcttctaccacattcttctagctaggtattaataatattattccaataataagtgagaagttttgttggtgaaaaaaagagaagagtaaaataaaaagaaactttgaagggaaactttgatttggtcaaaagccaacgacatgcattggctctatatatatgtgtctttaagaactcatttattactcttcacttcaatcaaagacaagaagaaagttagccagaaaaaaaaacagataagaaaatgtctatctttctttgtttcctcttacttcttccactctctttaatcttcttgaaaaagctcttaccgtcgaaagggaagcttcctccgggacctaagggtcttccgatcatcggtaacttgcaccagtttggaagatttcttcacaaatctcttcacaaaatctcccaagaatatggaccggtgatgcttctccatttcggggtggtccctgtgataattgtctcttccaaagaaggagctgaggaagtgctcaagactcacgatcttgagacttgtagccgacctaagacggtggggagcgggttgtttacttacaactttaaagatattggttttgctccgtatggtgagaattggcgagagatgaggaaaattgcggtttccgagctctttagccagaagaagctcaaatctttcaggtatattagagaggacgagagccaattgttggtccggaaggtatcaaaatctgctcttgagacaccaacttcatcagttaatttgaggaaggtcatttttaccttcgcggcaagtatcatttgtagactttcttttggacaaaatttttgcgattttgtcgatatggagacagtggaagagttggtgcttgaatcggagaccaacctcggctccctggcgtttgctgacttcttacctgcagggtggatcatagatcggatctccggtcagcattccacggtgatgaaagccttttccaaactcaccaatttctttgaacttgtgattgatgatcatttgaagagtgggaaaatcgaagatcactcagacatcatcagtgtcatgttggatatgatcaacaaacccaccgaagttggttcttataaagtcaccgatgatcatctcaaaggacttatgtcggtgagtataaataatacctttagtaaaatcttcaaagttctacattagaggtaacttgagggacaatattatagcttggaaagcaagttaacttataagtataggcaaatataccgttttgttcttatttttctgacttggttcataatgctccctagatttatattgatgtcctattttaaaaccaaaatcatgaattattttccatgtcattggatcaggatgtgtttttggctggagtgaacgcgggttccatcacaatgatatggacgatgacagagttaagtagacatccgagagtgatgagaaaacttcaagaagagattcgagcagcgctcggacccaacaaagagaaaatcacagaagaagacctcgagaaagttgagtacttgaagatggtgatcgaggaagcattcagattacacccaccggctcctctcttactcccaagactaacaatgtccgacatcaatattcaaggctacagcattccaaagaacaccatgatccaaatcaacacgtacacaattggacgtgaccccaaaaactggacaaaacccgacgagttcatccccgagaggtttgtcgataaccctatcgaatacaagggtcaacattttgagctattgccgtttggagccggacgtagggtctgtcccgggatggccacggggatcaccatcgtcgagcttgggcttcttagccttctttacttcttcgattggagtttgcccaatggaatgaccactaaagatattgacatggaagaagacggagcttttgtcatcgccaagaaagtctctcttgagctcgtaccaactcttcatcgctggtgaagcatgcaactataactatgttaaataatgacaagaattctatatttatgtccactttactaccggtttggattttgctttgttcatgtaatccgcatgtttcatgttatctttcaagttctgtttttatgttattgtcaaaaaaaaaaaaaaaaaaaactgtttttaagttgacaaaagaaaaaaaaaaaaggttgacattacattacattaaagtatttgactcccgaagatccagggtttgttatgataaataattggttttcaaaagtatgaaggctactttaagttacttgtagaagaccaatactacgtagtcaaaactgctctaatgcttttcattcaatgattgaaccgtgttattaattagttaattagatgtatccaaaacagtttaattgaaaaaacatataatagtaaaactttaaaatttggagttcttttcttctaaaacatatagttattggagtaaacatccaaaatattatgacttttcatattctgttattagtaaattttgttttataattattcttttagaacttggagacataatataaataaacaaacctgacatttcgttgataatttttttttttttttaaaccctagttgaagataaacgacgtcagtaatcctctgcgttttactctgtttttgagcttgtctttgttccagttctctgtttcgatgttcttttatctttatttatcatcatcagctaaagaagttctcaagactcatgacctagagacatgcactcgacctaag

SEQ ID NO: 9758 - DNA, 3000 bp, Unknown
  misc_feature (1)..( 3000): cDNA_ID_2185638_gDNA_ID_1972178_Annot_ID_180111 3000 nt of promoter + ATG
tcacaagcaatacatatttctctgaaactaaacacaaaatcaaagagttttgtggacagaattcatttaggcatatcatcgaacacttggtatgcaatatataataagctttatatcttgagtcaaaagctaatgaatccaccattgactatactacaaaagctaatgaattgataaaaagcagtttctaaattccaacttctacaatttcaacattgtttgtaaacgaaaattacataactttacctattagagaataaaatgcttcgaaattgagaagatgatgatgttggagacgattacggagagagacgacggtagtggcctcaaaacaacgccggtaactatgagatcgatgaagaaacgatgctcgtgagagagagaccacagaggggaataatgttttttgcgtttcataaatgaagaaggaaagaaaaacccatatattatatgcacatatatttaatatgtatgtataagtataacctaacatgtaaagtctaatacttcttgactttttagtcgatcagattttgacacattttttgaagaaaagtctatacaatctctcaagtcccaaaagtcaagaccgaaacttttgagacaactacacgttacgagtttttttttttttttggtaaaatataaagtatttatatcattttcaaagtttcgacaaaaattacaaagagtacaagtagcgaaaaaataccagaaatctacagaaagaacatacaatgacaatcgttggtgtcagttttgtcttccgttgttgcttgtttgtggctcctcatcaggttcccttttctctgttacagtggttcgatgttggtgttttgattttgtctttcagtttttggaggtgcatgtcttgtctgagcggagatttcttgagaagaatagaggcggcgttttggtctatgtggcattgcttatccgtgagagctggtttttatcgtttttataagaatggcgaccggaggtggtttctctagttttccgtagatgctcttataaccatcggatttgtgattaagtccattgttgtcatcgcgtttttgcgttagtttgcggagaagctgtatgctcttgatccggagattttgtggacgggcctctagttgggtttgctcgtgacaactaggatgggactccagctcctttgaattgtggaaatcacgcaaattttcgagtttggcatttcggaatcgctgtttcttcttttgtttccgctctgcacgttacgagttatctctctgaaattttacacattgcaagagaacttgcgactttctaataaaaataaatcgataatcgcttataaagtcaatatataatttttgaactgaagtacgagatcctaaaattttcatagattcgtaaagaaacaattgaattgatattgtttatataacgcagacctcgtcacgtacaattttttcgcgacgttgtttgaccaacgactccgtatatatggggtaaacctcctcatagttccgtacaaatgcatcctttttaaaacgtttaataattgataaaatcaaaaactaattaaattagtatcaatatcgcattgaaaaaaatgaaccgtaggttacaaaaagtgataaattggatcaatttggaatttaagaggactatcaaagtagctgtctggtggttgagcttcgttaatggagtaatagatagcaataatacaacgagtttctatcaaaataacataaaataaaataaaataatggaacgagtcttgtaatgattttttttaaggttaattttctcatccatcaatttcagataacgatcgaatattcatatacagtacatcatagagaactatccaaatatagttgtactccacaaataactgttaaccgtttatatgttgtgcaacaaaaaaacagtaacaaaaaatgtacgcaaccgtctataaatagaatgataaacgataatcattggcaactacttttgtatatatagtttctgcaaaataaaaatactatggtagtatatgttttcatgatgataatctacatttcggctaggttttcttatacataaccaaatcatgtcccttgtcaaaactacatttaggagattagatttaactacaatatggtttggttggattttcatttgattagatatatatatatatatatatatatatatatatatatatgtctatgtaattttatatattagaaaataaatctgctatattgatttaaaaacaattatgccccaagtacaataaagttagatttgtattaaaatcagatatttgttttaaatttttttttctttcaataatatccatttaatcagattggatttccgaaaatagtaacataacaataacgttaactcaaattattaaaatatgattttgtttggctaagaaagtatgctttgtttttagtttggatttgttgagtatctcgattttagtcgtcccgccagaattgttccaacaggataaaatgtgctgcacttcattgggtctataaatgttgaagattgaaatttaagacttttaccaattacaatacatttgaaaaaaaaaaaaaaaacgtttgcgtttctcacaccatcaaccttacatatggctgttatatgagcctcgagagacttggctttcttcaaacacaataaatagatctgaacgaaaaaaaaaaagatgtgaacgagttaactttattgattcaaaataatattcagagtcggctaaaaggctttagataatgacaacttcttcttctaccacattcttctagctaggtattaataatattattccaataataagtgagaagttttgttggtgaaaaaaagagaagagtaaaataaaaagaaactttgaagggaaactttgatttggtcaaaagccaacgacatgcattggctctatatatatgtgtctttaagaactcatttattactcttcacttcaatcaaagacaagaagaaagttagccagaaaaaaaaacagataagaaa

SEQ ID NO: 9759 - DNA, 3000 bp, Unknown
  misc_feature (1)..( 3000): cDNA_ID_3032855_gDNA_ID_1972178_Annot_ID_180108 3000 nt of promoter + ATG
gtttttttatatattaacaaaagaatttattataaagaattaaaaattccttaggcatctattatttttcaaaaaaaaaaaattataaaaagaaatagttggcaagttcggaacatctagttggtaagtttgttgtcaccaagtgtgtaaggggtttgcgttccaaaacataggttcaattttttcttttcgaggggtttttattgcaccggaaagatgtatgagctccgtccacaactcatcaattaaccccaaaaaaattgttgttggattgatttttaaggtttgtatgttgagaaaaataaacaagttattcagccgtatttataattttttttgaaaaaatattgaagaaaatattaaacttaagtgatgatgtaggaagaaaacatcagttgattgatggtttaataatctgcctcgtgatacatggtgttatcttaaaatggtctctcaattagtctttgtatttgtataaaataaggcctaaaaatatcatcaatggggtcctgttaaaaacaaaaacagatacacctttcactaataaaaaaaaactgttaccgacaagtcaaacaatatctgcggacaaaaaaatgaagaatgtttagtaagaaatagaagatgtggtaaagagccatacacacatgcaagtgtttttcaatgaacccatcttaccaacccactacttctttgagccataattgtttggttcggagaccctttacatttccgtctcagctttatttgtttacgcattgatttgtcttaaattatgttagatattgttttttggctatttattagcagcaatcaagttaaaagagtggttcgatatcaccatcgaactctcctttagatattttctatataaaaccaaacaaaaacaaaaaaattggtccgatcatctaatatacaagttagacgatttcacgttatgttattacaacctacaacaaaatagactatgatcgaaatcatattgaatcttttacctttcaacgtaatacaaatctggctttacaaagcaataattcatgtttgtttgtctaatttaaatttccctgttttttttcccctctttctgtttcccatttgaaagtaaaagatcatttaagcacctaactcaattttattttattttaaacacctaatgtcatgctccttggctccttgtaattagttgatcgtttcaatttagaccagcaaaacattttagtatgttcgtaaatattgcgtacatgccatttcgtttgtcatgcaaacggtgtgtgtttctttacttagcttctagttggtgtatattgcgtcgcattaatatcggtttaccttcctcctgtctacgtaatgatatattctccaccacaaatttaaattcttattgaaatttcctaattttttaggtagctcaaggtctcaagtatactacgtaccctatttttttgaatatctatctatattataacaagagtttttctgagctagttaatgagatgacaatattctacataaataaatgaccctcgaaagtttcaagtactttaggatctgaccaaatcggggtaaaacattttgaaactaattacgttcacatctaccatcgatgattgacaagcttattgtcaccttttatgttaaagtgacatggtcttgacgttaatttgcatgttattctacatctatagtccaaagatagcaaaccaaagaaaaaaattgtcacagagggttcaatgttacttagatagaaatggttctttacaataataaatttatgttccattcttcatggaccgatggtatatatatgactatatatatgttacaagaaaaacaaaaacttatattttctaaatatgtcttcatccatgtcactagctcattgtgtatacatttacttgcttctttttgttctatttcatttcctctaacaaattattccttatattttgtgatgtactgaattattatgaaaaaaaacctttacacttgatagagaagcatatttggaaacgtatataatttgtttaattggagtcaccaaaattatacaaatcttgtaatatcattaacataatagcaaactaattaaatatatgttttgaggtcaaatgttcggtttagtgttgaaactgaaaaaaattattggttaataaaatttcaaataaaaggacaggtctttctcaccaaaacaaatttcaagtatagataagaaaaatataataagataaacaattcatgctggtttggttcgacttcaactagttagttgtataagaatatatttttttaatacatttttttagcaacttttgtttttgatacatataaacaaatattcacaataaaaccaaactacaaatagcaactaaaataattttttgaaaacgaaattagtggggacgaccttgaattgactgaactacattcctacgttccacaactactcccatttcattcccaaaccataatcaatcactcgtataaacatttttgtctccaaaaagtctcaccaaccgcaaaacgcttattagttattaccttctcaattcctcagccaccagccacgactaccttttcgatgcttgaggttgatatttgacggaacacacaaatttaaccaaaccaaaccaaaaccaaacgcgttttaaatctaaaaactaattgacaaactctttttgcgactcaaaccaaattcacgttttccattatccaccattagatcaccaatcttcatccaacggtcatcattaaactctcacccacccctcatacttcactttttttctccaaaaaatcaaaacttgtgttctctcttctctcttctcttgtccttacctaacaacaacactaacattgtccttcttatttaaacgtctcttctctcttcttcctcctcagaaaaccaaaaaccaccaacaattcaaactctctctttctcctttcaccaaacaatacaagagatctgatctcattcacctaaacacaacttcttgaaaaccaatg

SEQ ID NO: 9760 - DNA, 3000 bp, Unknown
  misc_feature (1)..( 3000): cDNA_ID_3032866_gDNA_ID_1972178_Annot_ID_180106 3000 nt of promoter + ATG
ccgggaagtaattgtgtgggcatgatcttcttaagtggatacctcaattctgaaaatgatctacagaagtataacaaatggatgaaagatgtcgacgaactaaattgctttgattttggattattttttgttttctgcataaaatattttttttataaattaataatttcgaaaccgtgaaattctattaatttatcgataaataaatatatattatcagtttgttattgtaaaactaaattagtacaaagaaatgattatttttaagaacatctataacaagctaagcattcaaaccttcaaatttgaaggtttttttaactccaacaaactctcaaacccttattttttgaggatgtgaataatgaagtttcaaatttcagggtgcatactattcacacattcaaaatctcttctaaattttattttagtccttatacttaatatatcttacaaataattctattacatttaattatgacaaatatatgcatataaattcaaatatattaaaatattaaaaaaataaattaataaatttatacaacaataatattacattgagcatatatgaaagcattatagacataattacattgaatatttttgtaattttacatgtaattttataaatcattttaatgttttatgttatgtttcttttctaatttatatttaattttatataaaaaattaaaatattatttaacataattattttgataatatatgttttatatttatttatgaaacttttatcattatcagtgattattgttactattaaagactataatgtaaataaagaaataaaaaataaatttgagggagtatcatcggtggagatcaccctcaaaccttaattttaagggtttattaccttcgtagataacgtttttttattttgtttttttcatctattgccttgttggtatgaaaggacctggtttaattgatgtcaagaaaagaacccggtttaatttaatttcggtcagattcaccaatctcgaatccattctctcgccgtctttcaattctccgccatcgaacgaaacacagaatcttcaggatgtgacaacactggattcctccgccgtcttctccttcggtggagaagcgattcgaattggaagaatcggttggcttgacattgattcaacgatgaggctccttcaagctagtcccggtaatgaaaaagtccttattgctgcatttgcataataaattgttgcctgatatttcttggagatttggttacttgctttagctttttgatgcaatgatctatagtagttagtgggaatttggtgaaagaatgtatctttcttttacttgcttggttagttcaggggatacatacaactaatcttgaagtagctattgtagtactttaaggaagaagctttactggtaatccaaagcatggcgaaaactaactgtaaagtactaattttaactacacctaatttccatactttctgtttatgaactcactcttatgagtgttaaataccattcattcatcacatgtgcacacctcaagtcttatcaaaaacatatatatacttaggattacatcacaaaagcagaaaacataggcttaatatccgcttcatcacatcacagtctttacatatactgatatacacacatatacacgtcttaggagctcctttgtcccaagtcatatcttttttctcgtgttgctgattctaacctgttccatcttctccaccaccaccacctcctcctccgtttgcaccccaattgtcaaagttttgtcttggaatgttatggtggttgtctactcctcttgttgatggaatggcggatctgtccttctgaacatggtgaagcctctgatcttttgtgtatatccctctccctcctccctccacagttaaagagctcataaccaccattattaccagcaccactaccaccacgacatgccttgtctgaatttgcatttttgttttgtcttgtttcatgcaatagctttcctttttatagaattgagaagtaaggtttaggtatgggaaatcttgcaactgttttctgtgtgttccactaggaaaagacaaaacaaaagattgattgattagcctttaattgatgtgtttgtttgttattgttgtgacttgtgacgatgatacaaaaatcaaaagaaataataatcactcatccaaataggaaagttccaccgttaaagtggtgaagacgacataagaatcaatgagaagaattggttagttgcccgaataggaaatttccaccatttctagtggatcacctttcttttaatcatagacttttatatttgtttgtgtaattaaaagtcaatgggatggtaacaacttacataaagtaaaatttcaagcaatttacataattttcattcaatgatttcattcttctttctaatagcatgcgttgatagccgaacaagttgatgacaagtgtcttttaatctaacccacaaagctaccatctgaattatctatggttaaatgatcagttacaaataattcacttcgctaattacatcaaaagatttggtagagacaaatcattcagagaaagtaaccatcatgatcatgcattgggtctttgttgggctgcttaaagctcgtaatgaagctctgtcaattgctcttggggcttaattttattttggaaacggcttagtattatagtgaagaaaatttatatggaatgtaatgtatttttcaactccttaatatgaggataaccatgtgagtttcttcgtctatctgaacactttttaagcatagtttgcagagtttttaatgtttatgtttatatttaaattgatacccattgattaattacaggtcatctatttctactgctgtgacactcttttgacttcatcttcgtcttagcacattgcatcacatgccttgatgtctaaactataaaatgactttgaatcatcattacatttgatatttgcacttaatgtcttcctcgaagtta

SEQ ID NO: 9761 - DNA, 3000 bp, Unknown
  misc_feature (1)..( 3000): cDNA_ID_2185586_gDNA_ID_1972178_Annot_ID_180091 3000 nt of promoter + ATG
gatagttaaagagtttaaagaatgccttactcaagtgctcattgctaccgatgtcattgcaagaggttttgaccaacagcgggtaaatattgtcctttgagccttttcctttcttctcgttttacctcaaagatgcttcgtagttaatacctcttgttggttatatacaatacttgcaggtgaatttggttgtcaattataatcttcccactaaatatgaaactggagagccagattatgaggtgtaccttcacagggttgggagagctggccggtttggtcgcaaaggtgagttttgattcttctttttttctttctcaagtgtttccataagttcttatcagtttctgaactatgtatttgtattgtaggagcggttttcaacttgctgcttgatgatggctgggataaagaggtgatggagaagatcgagaagtattttgaagcaaatgttaaggaggtattataagatttctgaaaactgctatatatctttcaagtgtttgttaaaacagtatccaacgattttaaactttgctgcagatcaagtcgtggaactcagaggaagagtataagagtgcattaaaggaagctggcctgctggacgagtgaggaagagagacagcatgtgttcaaaccatcttaaaagactatgtcgtctgttttcttgagattgttttaagaaagaaacttgtatacctctttgaggttttcttgtaatctttttatctgattgctgagagtttcagactttgtagattttttgttaagggaaaaggaaaacattttttatgtcaatgtcaatcactttagtatgaacctaaacagtaaacagcaaagcattttttttacaacaatgggtaagagtcataatacacaaccaaagtctcgaattcaatgtgtaaagctttttaatctcaaatgtttgacgttttagcggcaagatggatcaatgctcgtcgatgataggtagtacgaagcttcttgtatttctgcacaaatgctgctgtatcaatctccttctctaggaacttttcttgcagggcttcggattcttcatccacctgattcatagcctctgcaaaacaagtaaaaggtgtttagaacagtagagaaaatgagacgaggggagaatccattgcaatggtaaattgttaccttgaagtttatgaagaagagaaccaggggagtagaatttgaggatctcttctttttgcctctcaagctcattaagcttttcttgcgcagttgcgagctcagttgtacggataattctgcactgtaaaataagtaaagactggtaaatcagagatatcgaaaaggtataacatggtaaaactgaacaagaaaagttggttcttgatacacacttggtttctgagctccattatctgtggctccttctccaagttgtctcctgttacatttgatcaaatggaaagttctagatttctggattgaactaaagtttcctgtagaattacatgaaccatagagtacttactagctagctgcaatgtttctctacggagctcatctttgatctgacggacagaaacaaatcacgaaaaaattaacgtccagagactataacaaggaaccagaaagctgatgacatgatacaggctttatcaaacaatatcaatgtatagacttgaaagagcactaatgaattatatcaacacagaactaaagaagctacatattcttagagctacagataagaccctcggttatccagaaacaaccgactgttttagagactataacaaagaaccagaaagctctaattactggcaacatgtagaagatgacgccatgataaaggcttcctcaaacaatatcaatgtatatacttgaaagagcaccaatgaataatatcaacacataactaacgaagctccattcttaggactacaattaatagtaatactcttagctatccagaaacaactgactgttttagagacttacattattctggactttgacctggtcaagagagagcagaaattgctgatacgcatctttgtcagagagaagcttcctgagttcatccacgctacagaaaagtatacactattcaaaaagaagacatacaaaaaaaacgcacactcgagagaaggataacaaacaaacaaacaaaaagagcaaaccttttgtctttcaagaagacgataatgccagctgcttcacccggtgatacttgtgctgaaatctgacctgaactttgaggccgggatgagcttggcgagctaactaaagaaggcgagtaccatggcgactgtgaagaagcttcctgaggacgagattgcccttgttgttggtcttttgatccccttcacgtacacaacaaaaaaaagaaacatcatcaactaactatctcagcttccaagttaatataatacatcacctcataaacttgaaaggtgcatttatacagcacatcattgtaaacctaatatcagtaactatgaaccctaaatcagtagctgagcaaaatctacacttgtcaattcacctcaaaaacctcaaatatatcattatagctcaacaaactacacaacaacaagatttccttaatcgctaacagacctaatgtctggatcacgcaatttcatcaataacatatgaatcagatggcaaaaaattcgcaaaatcataccagaaattgaacatcgtttctagaattcgccgactaacgaaaggaattgactttttcttgttctcttgtacttcttcttcctaccagatcgacaaaatttaacaactttacagaaacagagtttacagagtttcaaagaaaattcgatcttctctgtttcgtttcagattttgctacttgcttttaaaaggcccaaatacgaggaggcccatattaagttttgattaacaaaacgtagtcgttttatgcatcgtcgtccttatccacgcgtaacggttcgcgtttctacacagagtcaaatatttctgcacggaagcttcgaaaagaggtcatca

SEQ ID NO: 9762 - DNA, 3000 bp, Unknown
  misc_feature (1)..( 3000): cDNA_ID_2185598_gDNA_ID_1972178_Annot_ID_180095 3000 nt of promoter + ATG
tctggaacaagtctaatctcacccacacctgtcaatttagactcttctgctggtccatcagtaaatgaagtcatccccattgatgcaaaggtcagaccaacgccgttcttcttcacacttctgttaaaacgctgcgcttgaacagcctgaaacaatacaataaacagaattctagttaagtttttgtgcttctaaggaaaaatcgttgaggtgggaaacagaggttttttctttagaagaaaccaaaaaaaaaaaactcacacggcatctttgttgtccagatgtatcaacccaaataatgcgtacaaaagaactactatcttcttgaacatcaggctcctttatcttcaatttgggagatattatattttgtggactagaagaatctgtgtctatattaagcttataaaatccaatagaatttcgtgagaatatgtctttagctgcatcaatagcttccatgagtgagagatcaccactggcacaagcatcactcagaactaagaagataacctcacgtgctttctttgcacctgcaaaaaacagcgagctatgttcaagactgaagcaagacgatttcaagtgccaaagcttagaaacaggattggaacatatataagtatgttacaaactatagaaaagaggtagaaacttgagctaacctaaatagtaggtctcaggagatgcatacccatcagtgctgaacataacctgcaataatatcttatggttactcatgaacaataacaaagataatgcaagtaaaataaattttaccttctttattgatgctaagtcaaggagctctttaactgaagaaaccataccatggacactaagctttggaaccgccaagccgaaatcaaggtaaaccttaaggaacaagaaaataagttaatgactaggcatgattttacagataattgaaatgggatgacgaaaaacctgaggataaactgaagacagaaaggatgcttcctttgagaatggataagctgcatgaagaagaactatacgacactttccaaatcttttgtcttcaagaagggttctaaggtgaagaggattcgacaacctcaaatccaaatccttgtcaccaaaactggctcaaacaacaaaagaaaaggagaattttcattactacaaacctctgagcatgagtttctgtttctgtgtaaggtttgtttgataaaaagatcagactttactaacatcaatcatatagttgatcaaatcttgcatacccggtgtgaatctgcaagggcaagtcgcgacgcacagcgacctccaaactaatggtaaggatgtagtcaatcaagcccttgtttcctatgcggacaggctttccagctgcagcaatattagattttaaggtgatcagacaacaactatgttacttcttgatagaccaagcacaaccatcttacctcgcaagacttcaacaaggccattctcagcaacttctttactcacataagtatcaatatccaaaccgctacgatatgcagcaatagttttcaaagcaacaatctctggaacaagcgtgaccgaagtagtcaaggttaaccaatactagtgagtatagtcacaatcattaagcgtgtattaaaaaagcaaagataaaaggatatgaatttaatctttcaacaaaggttttggtgaaagaatctaaatcccaaacaggcggttcagtactctcagaaccatagaaataaccaccaggacactcctcttcgaggatttgctcggcaagagtttcgatacgcaacactctaccaacgaatggaacaaagtttctatgccattcaatatcatgtttcttgtctagctttaatccatcatcaatgaggagagcagagattcgagcttctttaaaacacttggaagtaaaagaatccaaacccgaggttttacgatgttcctcaaccgcttctaaagatacttcagtgccataaagttgagcaatctccctcaagttcctctgtttcattcatacaaccaaaaacattcataccaacttcacgagattcctaaacaagtcaacatcttttgagtaacactcgaaactttagttaactaatacttttgagactaattaggaaactttaagctaacgttttcattaattagaatctgattcaaacgaaaactaactagagcaaaaacacttggtatcgtcgtgtaccttgaaggagagagaatgaggagcgaaggttaaagcgtcgccggcagcctcggagaaagttccgatgaacggaaaagatgagtcaagagagacaatgttgtgtgcgtgagcatcaacgagctctatcttctctattgcttcctttaactcactaaactccatctccgtctctctctgtctaaagtcaacagttcgatgttcttgattcgtgttaatcttcttacaatcttcacagtttattacaggaacggttttaaagcataagtgaagaagatccaatcaaatcgttgacttttccttgtctgatttggtcggtggccgatgtctctgacctttaaacttcacgacggcgtttagaggagagtgatgagcacgtgtccacgtgaaatacattagcctccacgtgtcctaactagtgtggataactttcaactgtgttcttggtttttcattttccaaattccggttccttgccaaggacaatctcgttttaacaaattcgaattcaaaattaaattggaaaaagctccatttggttcttccttcatcaatccaatcctttaaaccggacaagaaaaaactgattaatgctaaatttttaattttgtaaatccaaattaaaccggcatccaaatcaaaactaaaaccatttcattatattttacaaaccgaagagaagctacaccaaaccggagaagaagaaaaaaacgaaggaaaaacaacggtatcgtcgtcgtcttctagctctgctttctacccagaaaatttgcagtttctttttctccaccttatctttctaccatttttcttcgatg

SEQ ID NO: 9763 - DNA, 3000 bp, Unknown
  misc_feature (1)..( 3000): cDNA_ID_2185602_gDNA_ID_1972178_Annot_ID_180096 3000 nt of promoter + ATG
tatagctacgataaagttttagatcacagtttgttttgacccgtctaaagagcctgcgtaagaaaattatattttactttaccaagaaaactttgaattgagttttggttctagacagctgtcccaacctatacgatgaaaacaaatccaaaatatacagacacaatatgtgataatattttctaatacatgtgaaaaatagaccataacatttagactagtgatggcttttattacttacattgactggaatcattacgttttctccccaatgctgatttggttatttcagaaccgacccaaattctcattagtaatggccatgcctctcttgggatcttgctaaccaacgctccaaacacctgaacaaacacttaaacttacaagcatgtgtctccattttatcttgaagtttagagtaaaaataacagtttataacaaaaaggttacctcaagtgattctcttagttggaacaattcacaacttctaaattccttctgcattagatttgctcattcacaaactaaagcatcactccgtaagcctcttcttgcctatatcttaaaacccagtaaaggaagaatagttcagaaacaaattcaaccaccaaatagagctgcaatactcaagatatatctcttatctcagttattatatttcttagaggatatctaaattctcaccagaggaaatcatttgtttctcgagttcctggactgcatcgaatatcccatgagcagtataggttttgatcatagtagcaaaagtgattttatcaggcttacattttctctcttccatttgtatgtataattctttcattgtagccaaatcaccagcctgaccatatgcattgattatgcaattgaagaacggtgtatccagtaccacatctgaattcacaatttgcctcaaaaccgaatctatcttaacgacaagacctgctttgctatacgcgttaacaagcgaacaataagtgattgagtttggtttcactccttgatacttcattttcctgaatacatcatccattttctcaattcttccagcttttccaaacgtctcaatcactatattgtaagtgacagtcgtcagggagaagaaccttttctccataaaatccataacagagcacatcttcttatacataccagcttttccaaatgacaggatcagtatgttaaatgtagtgatatccggttgcacccccatcagctggaaccgactataccagctctccatcttcctcatgttgcgaccatttccatatgacccaatgatcgagttaagcgtacaaacatccggaagagaatctccgtcctcgatcatatcagccagaacactttccatttcctcaaacattccagcctttccatacccatcaataatagtattgtaagtaaccgtgctgcatccaactccaagatacgacatctcaagaacgatacttttaaccagatcaaaccgacccagtttgcagcaacaactgatgagaacagtaaaggtgaacacatctggcttgcagtcactaacagatttcatatactcaagtgtagaaaacgccttgtctagaagctcgcttttgccataaacagagataagagaggtatacacatcaatggttggtttcaatccttcagataacataacttcgaaaagcaagctggcttgatcaggctgtttacaattcccaagcactttaaacagctttgtataagttttgcatcttggttcataccaatgctgcttcctaagaagattgaaaatctataaagtagagaaacaggaaagtgaattctatcgaatctatgtccaagtatctgtaagaatgaagaaggattaaagagctgtaccttgagagcagactgccatcgattctctttgatagcttcgtcaagagcttctagaacagcttttggccataaagttaagtacttttcggaattggctttcctctcaatgcccttcacagcagcatctgttctcagaatccgagacaattctttcttaggatctacttggtgtcttgttgagatcaaaccagaattcattttctctgtacgttcgttggggacctttgtcgaacacattgtgggcgttattgaaatagttggtatacaccgaaaataaacaggggaagatatatgttgctgaaccacgcttctgcaagaatgagaaacagagaaagatagatttaatataaacacaactgaagaattaaagaaacgtaaaattcaaaacagtatgattgtatgaaatatgagaatgttaccgagaaaaaccaagttgtgcgatctcattggcgtacgcggaagtagttccttgaacaggattttgtatcaatgccatcgaagaaaaatggtagaaagataaggtggagaaaaagaaactgcaaattttctgggtagaaagcagagctagaagacgacgacgataccgttgtttttccttcgtttttttcttcttctccggtttggtgtagcttctcttcggtttgtaaaatataatgaaatggttttagttttgatttggatgccggtttaatttggatttacaaaattaaaaatttagcattaatcagttttttcttgtccggtttaaaggattggattgatgaaggaagaaccaaatggagctttttccaatttaattttgaattcgaatttgttaaaacgagattgtccttggcaaggaaccggaatttggaaaatgaaaaaccaagaacacagttgaaagttatccacactagttaggacacgtggaggctaatgtatttcacgtggacacgtgctcatcactctcctctaaacgccgtcgtgaagtttaaaggtcagagacatcggccaccgaccaaatcagacaaggaaaagtcaacgatttgattggatcttcttcacttatgctttaaaaccgttcctgtaataaactgtgaagattgtaagaagattaacacgaatcaagaacatcgaactgttgactttagacagagagagacggag

SEQ ID NO: 9764 - DNA, 3000 bp, Unknown
  misc_feature (1)..( 3000): cDNA_ID_2185612_gDNA_ID_1972178_Annot_ID_180102 3000 nt of promoter + ATG
ttaattcttgatattatttgtatatttctaacagaaaagaaagaccggcgatgaaaatcagttttctgattcaattcttccttcttggactcgttgggtatgatcttgtctttatatcttggagtcaagatcaatgacaaaaaacttttgattacaatactcatttttggttatagaataacgttaaaccaaggattttacatctttggattggacaatacctcaccaacattcgcatcagcaactgaaaatgttgttcctgctgtttcattcctcatggcagcgttgctcgggtatgttcttgattctttattggagataacttgggaaacaagatgtgtatcttgcggaccaattattgtggaccctcaaagtgggctctgataccactcatatctcatttttattatgacacaccaacaattgtagaatagagaaggtggaatggaagaggaaagatggtatagccaaagtggtggggacaattgtatctgtcgcaggctctttggttataacactctataaaggaccaaccatttaccaaccgagtctgaatatagtgaaccaaactattaaacctgaagaagcagaggaagaaaacaagaactggacgttgggatgtctctgtttgatgggtcactgtttatgttggtcaagttggattgtgttacaatcaccattgcttaaaaagtacccagctcgcttctccttcgtctcctattcttgctttttcgcagtgatacagttctttggaatttcggcttatttcgagagagatctagagaggtggaagataatatcaggaggcgaattatacgcgttactctacactgtaagtgtttgtttattttcttagattaagactcttttgaatggtgtgattgattttggtgtgagtttgaatatatttcagggtttagttggttcagcaatggtgtttgcaatacaaatatatgtagtggaaagaggaggacctctgtttgtatcagcgtatttgcctcttcaaactttgattgctgctgttttagctactttagctcttggtgaacacttttaccttggagggtatgttatctatatgttttgactcattatgcgttttattttcatatcttatagttaagtttcttacacattttttaatgtttgttttggtcagattgataggtgcaatactaatcatgagtggactatacttagttgtgatgggaaagagttgggagaatcaagctctttgccaacaacaacaacacatgatttcttcagcagcatcagattttggtgatgaagaagactaccataataataaaccaagatctcctattagtcaaccattaatttcttcctaaattttgttagatcctatttatgtcttaaattcctagttcctactctcttcctcattaaaatcgaaatggacccggttgacgaaatagagataaaaataaatttggttaaaatcggtttagaattaaatcgattggtttgggtttagtgccacagtggttaggtgagtagagttgtggttcggttcaggttatgatattataacctggagggatcaaaattggcgcttttaaaaaccaaacaaacaaaaacagagaggaaacaaaaaaatgagaaagcaagaatcagagggagcgaatcttgaattcgaatccaaatcaaatgacaatggaaatgtgaaaatcgcaccaaacgaccaaagtttcctcacaattcttgacgacataaagtcttccaaatctccggttcttacacacgacaacttatacatttgtacacgtttttaagaccgaagctggttttttttcgtaatctgactgttcttcttgtttttgctttgttatattcaggctgttattaactatggagcttcttggtacaccttattctctgtttttacgattacgcttttcatgcttataaagtgttcgatgaaatgcctcaatgagaacggttttgttttgaaactttcaggtgtggagtttgtagccagattcttcctgcattccgaaagctcagcaacagtttctcgaagctcaagtttgtttatgcagatatcgacgagtgccctgaaaccactcgtcacatccgttacacacccacgtttcagttttacagagacggcgagaaagtcgatgagatgtttggagctggtgaacagaggctccatgatcgtctttggcttcactcttgaatatgttcatcaaatattaactatgaaaatctgcattccttttgtgatactttaaatgccaacacaaaaaatacttggctcttcgacaataatcccctgaataagtttggactttggtagattaatgttagggataaacttacagaaacatcaaaggttaaacagaggatggagctaacattcatgatacaactcttgacaaataaatatgaacaccgagctcctcacggcggctctttccctctcaaataatttggtttaaccgggtataatgaccttgagaaacattgaagtctctaaatcacactcttgccaatctcaaaagcaccaagcttcacctctaaacggttttgttttccaggaatgaattgggttaatgtaactttctaatttgggtcaggtttgagattggacggtcttccaccacaaaaaatatcaaccattaaaacttttattgttgcccattaagaccgaccttcttttcgtaattttttttttaaaacgtaactttgttgaatttgtaaaaaaaatctcttgtgaaattatcacaatgtttattcaaaactaaataagaacatactagaagcttttctaaattggaagatgtataaaaaaaaaatagaagaaaagaataataataatggaaaacaaatactataaaataaacgtttctttgataacaagaaacggatttgtcttctatataaataaaacacacacctgtctatttatttacacttctcgaatcttctttttcttctctgcgaagctctctctctctctctactcgattatcaaac

SEQ ID NO: 9765 - DNA, 3000 bp, Unknown
  misc_feature (1)..( 3000): cDNA_ID_3032876_gDNA_ID_1972178_Annot_ID_180098 3000 nt of promoter + ATG
ctcattcaccgatactaatcctttgagcatctctatgatgattgttggatcatttggttttattgtggactttgtgtcacatgaagggtcgtatttgcaaaatacttgacataaagatgtggttcagaaaattaataaactaaatttcatatttcgagacgcatgctcatgctggagtactatttgtatttcttactttttcgtcccatgctttcaaaagcctcaagaatatacagagtattttcaataatacggagtagttcttaatcatttacatttgtctatgaattgaatttgactactaatactcggaaacaaaaaaatgattgtagtattaggagcgcaaataccctttaaccattgttctttccatgttcttagtccggctattgttatctaggtaggtgcctgatccctttttttcaaatctttcttattcattactttgactaattaacctatttaatcatatttaatctccctttaatctgcaaactaaagcacatgtttttttttatgaaagaaaaggttagtatgacattcttttggtaaatctcatcatattatttatttaattttaagaaattggagtttaaagtgtaattaagttatgctacctagctaatttccttaaaatatgaacgataagtatagaaattaaagtaaagattaggtttatacggtacgcttattatgctcaaacaagtggacgaacaaaatccatctccatgtgactatggaagagaacttattaataagtccaaatttttttcttgcaaactttatgatttcattcacactagacaaattaattgttcgtaagaaggtatacgtacaacataatgagcttttactgcttccctttgcaaacgaatcagctaaaactttacagatttatatgttcaagggaaactataactaagatttgaaggaaaaatctaacctttctactacaacaataaaagtcaatgcaaggtcctttgaaaagaatcttgttgtcgcatgcatgtacgtaattttgtagtcaaatgtacgaatgatagatatatggggtcaaaacgttaaaatccagcctaagaaagacagagatttactctaaatcttccaaaccaacgttatcaattttgttgttaacattcaattgactttgctgttaattttggattgtagaatcgaattaaaatgaaaatacaaggtgaaaacgagacaatagcgtgaaactgctttgcgtatatatcaagtatcaacagttttgtttcgtttttgttggtttgcgttgggataagaaaccggcattttgtacatggttcaattttgtaatacctaaaccaatttccggtttaagtggtttattaatatgataaaataaaataaatattttttacaaaaatacatagataggaccatgggtccatgacgctttgacaagagccaataaaggatttactgtaaaatcagtaactttattgacaaacaaaaaatgcagctataagttgtccccaccgtatattacaaagattcgaatactttaataatacaagctaaagaataaagagcaagagcctttgactatttccacttataagttttcctccgagaccgagagagatcagagatggagcagattatttcaccacgctccggtcaaatatatatttcttctgttttaggcctcagcaaaaaccacctccatagttgttatgttggatactacgacaatttagtgaagaagtggtctcaatctaaattatcattctggataatgacaaattgataaaagatgcatactattacaaaagttgagaaaagaagattactttacgtaatgtaggcgttttaatgaactccttaatttcatcgttcgtggaaaataataacacaagcaaagcaatgacttttatggacactatgattggttacaatgatcttattgaacatgtgaggaggcaaagtgtatatccttatatctataatgtttttttttctttcttctccaaagatgtcgcctaacatcacgttatttaacactacatttagcttacattagtaatctaaaaacaactttaataataatccaacaatcacgccttatttaaccaatcctaatttatgaaaacatactcatgtatgattgtttgtgcgcatgtgtatatgagtatatggacacagtaggtttctttccttggttggatagatatggttacaaacttgcaatagtggcaggtagttagacctgcggttcctaaactccgaataaatacgtgcggttcaactgcaatgcagttctaataataacgaatatatatatatatatagataattttgttactattggaacatgtggttaggttacaatttcaaaccctaattattgattttggtaatttggatgtattcatattcctgttggttttggtctactcaaaatgttagtaaatctcttatgggatgtatcgaattaacttaaaactcttttttctggtccagaaacccattaatactagcattcatattgtatagcactatagctcgtggggttattataacgtcacatcacttttttgtaataaaagttgaaaaacctgacaagaattcaaatattaaagcctatccttagttaaaatctgttaaggcttatgaatatccttatcttatgtgagtaattaggttaattagatattagtacaataaaagaaaaaaggaaaaattgaagaccgtttcctcgagacaagcagattctcaatcctcgagactgtcagtggaaaacaacttcactctctctcttcaaaaagaaaaacaaaaatacaaaagccaaggaaagccattattacaaaagcaataacacactgtaaaaaagccactcacgaacactcctcagtaaccagagagagaagaagaagaacaacaagccatgtcttaactcttaactaatctcttcttctccctccatttcaccaaccaaaaaccctaaaatccttaaaatcacaagtttcttcagca

SEQ ID NO: 9766 - DNA, 3000 bp, Unknown
  misc_feature (1)..( 3000): cDNA_ID_2185582_gDNA_ID_1972178_Annot_ID_180090 3000 nt of promoter + ATG
atatacaatccctgaaattgaaaatatcagcattagagaaattggaatcattctaaacaaaacagacactctcattaatctctcgagtgtgagaacattggcatacattggtggtgtgtatggttgctcctgtggtcatgctaatggtctgatcaggaaccagctcaacgtttaaccgctgaagaaacaccgcgagtgccacaattgcctccatcaatgcaaactgatcgcctacacattttctaggccctccactgaatgggatgaatctggtgaaaaaagaaaatcatcttttaaattccctaatcaaaaccactaatcttgattcagtagtttgtgtcaaaagatgtgttctactgagtttacttgaaatcagtgtttgtttcgttagggattgcgccatctatgtcgaatcgttcaggcagaaattcctcagctttttcccatacctttggaataacaaacaacaaacacataagaaatgtgggcatgaatgtaatactaggaatgtccactccggttagatatccgaaccacacaaagatcattgaagagaaggattaggctcccctatgttatactatggacgagagaaggaagagaactgtacctcggaagaacgatggatgttatagactgaaatcataatgtcttgtccggtattgaccttatagttcccaggaagaatgtcaggaacttgagctcttcttatcaagacctaccaggaaacaaatcaatcagaaaatttagttcatgaataattagagagatgagcttgattgcttacaggaggatgaggatagagacgcattgactcgtttatacaacgagtgatgtacttcaactcctttatatcctcgaaagccgggtttcttccttctaacactctgtctacttcttcttgtgctttccttaatgcagatgagttctatgaacatagagaatttgaagaggtaaatgagaacagagaagctcccatccaagtaaattctctagcatagcaaagtagaagatacattaaggtaccttacttaggagataaagtgtccaagtgaggacagatccagtggtttcatgacccgctacgagcattgagagaagatcatcccgtaactgcacacttgatacctgaaaaccctcacaatgcaacatcagcttcgattatgcgataatgaaaggccaaatttgcttataaacttaaggaaaaaagtttaaacctcttctctgcttgcaagcaagaaacgcaggatacttgggtcagcatcatttacatactcctcatcattgattctttcgccttctctttcgacaatttctttacacttagcaataaggtcttcaacagtttcccttatcaaagttacagccttttcagctttcacctgtctcgggactatcttacacaatgcatcgatctgaaaaaaacaaccaaaccctctcaattaacaagaatccaattgttccacacaatcaacaaaccacagaaaaaacacaggaaacttgccttccaatatggcagaagatcagtagaacgaagctcagcttctttaagagcagtgtaaacagcttcaatgacaggactatcagtagtcaaagaatcgaaattgtagttaaaaagagacaacccaatgacatcaagtgtcatctgagagaacttcgcttccatattcacagcacttccgtcttctgcataaggctgcaacttctcaacaagcctctctgcacatttgcagaatactctctccacaatcacagacaaatacctcctgtgaagcgatggaaccaccgctctacgcctcgcctatgtaaaaaatcagacttcagctaagcccaatagagaagattggaatctaaaccctaaaattagagttacttatcatacaagacagtcacacattacttccacaattccaaaaacttcaaaattgagataggaggagatgaaattactgtccaaagaggtccttcagcgatagcgaaacccgaaccaaatagaaattcagagacttcagcgactaagcctttagcgtactttggataattcctcaaaacatgtttagctatcgctgggtcgctcacaattacgaaattacgaggaccagcagcgagacggtaaatgggtccgtactcattcatccatttgtagagaggtaagaagagagcacctccgaggagatcagcgacatcgtcgagcttcgcgttcgcgattggtatacctgactcgtcgttttttcctgaggaaagggtacgagtgagtgttgtgagccaatcgggactgacccatgattgggatttcgatgaattggtctcgagtttgggtttgggtttctcaatggaggatctgatggagaatgtgaatttgggttttggtgataaaagacgcgtaggttttgcagtgaagagagaagagtaagaagaggaagatggagaaaagagtgaagactccattgatgacctcttttcgaagcttccgtgcagaaatatttgactctgtgtagaaacgcgaaccgttacgcgtggataaggacgacgatgcataaaacgactacgttttgttaatcaaaacttaatatgggcctcctcgtatttgggccttttaaaagcaagtagcaaaatctgaaacgaaacagagaagatcgaattttctttgaaactctgtaaactctgtttctgtaaagttgttaaattttgtcgatctggtaggaagaagaagtacaagagaacaagaaaaagtcaattcctttcgttagtcggcgaattctagaaacgatgttcaatttctggtatgattttgcgaattttttgccatctgattcatatgttattgatgaaattgcgtgatccagacattaggtctgttagcgattaaggaaatcttgttgttgtgtagtttgttgagctataatgatatatttgaggtttttgaggtgaattgacaagtgtagattttgctcagctactgatttagggttcatagttactgatattaggtttacaatg

SEQ ID NO: 9767 - DNA, 3000 bp, Unknown
  misc_feature (1)..( 3000): cDNA_ID_2185574_gDNA_ID_1972178_Annot_ID_180088 3000 nt of promoter + ATG
aaaatctttgacagtttcgttaaaagttgccgagaaaagaagaacctgttgaaaataggtcaagaacacaagcacacaatcaaatctagcacgagaaagaaagaaaaagagtttcctttgaattgagattaacagccataaatatagtgaaacacaagcagtcattagtacagctttctgcagtgaagatattcataatcattttagcacagacatatatgtcatcttaagatatgacggctctaaacaacagaaaaaaacacagctgaggtgcttctatttactaagagcttctgaacattgaaacaagtataactataagctcagtagactatcttgtgccccctagatatcacgatagatatgccactagatatcaactgtcatcctacttataattcaagaagcatgaccaaatcagacactagttaaacagacctggaaattgggattaactctcccaatgtctttcattatcttcaaggaatcatccctaaacccatcctgcaacagcaatgaattaacaattatcaacaacatatgaagggaaaatataatcacattatacagaagttaaatcattacagttgagaaaataacaagaccaagtaaaacagaagaaagagcataccgtagcaagcatatggtcagcctcatcaaaaaccagaatcttcaaatgatttagacctagtctcttaaatgccatccatttcttaagcgttccaggggtgccaatcacaacatgagcagaaacaggagctcctcttgttgccgccggtgcacctctcgttgagtcaggcacagccaactcagcagtgatcccagtaaacttccccatcttctgaagaacttccatattctgtcattcaaccattaaaagaagtcaacaatcagattactctcagatcataaccaaaatcagagtaactaaacaaacctgattagctaattctctagtgggacaaatacagagagcttgaggctctctcaatgtgggatcaacacgactcaacattccaagaacgaaacaagtcgtctttccagatccgttatgagcctgggcaatcagatgcttgtgtggcggcgtcattatcataggcaaactaatagcttggatcttgctaggcttttcgaatttcatctcaacgtacaagcctttcatcaattcaggtgacaagttcaagtcttcaaatctacttgctgatgtatatggtgtgtcaccagaagtaaccttcaaaaaacaccagatttcaaaatcaaccaaacgaatctggaaaatctaataaccctagactgtaattaggatcaaagagagagagggaattgaagtaatacagctttgatgttagaatcttcaggttcctcaagaatagaatcaggtttctcttcttccttaatgctcaatgaattaagctccgatacagcttcttcttcatcatcatcatcttcaacatcgccccactttttcttctccgtcgtgggctcagtcttctcggcgctattagatgcttcaacggtggatgatgaagatgactcaacaacggtgggaactttctctaccgtatccgccatagctgtagccaacaaaaaaccaatcaaattagaaacccaaattcatcttaacttctccattgattcgtgaaagagctgagattctgagagaagtagaacctttgaaattcgcgaatgagagaatcagagagagagaaggaagacgatgaacgatttgtgttatgtttgaagtcggagacaattttggggaaaaagtgaaaaccccaaataaataagagttgctgctttactttgaagctactagtcaaggattgtaaaaatcactgacgttaatttcaagctgctagtaaaaatggaaatttactgatgttaatttataagctacacgtgattaaaccgactctagtctatgttgtttttgtttataattcggtttatctttctgttttctctaatttcaattcggttcgacgtaagaatatgaagcttaatagtaaaaatgtaaaataattgaacttaatttcatgctagccacaattgaaataacataaccgactctaccaatgattttttaatagttcggtttattctagacgacccaactaaatcattttgggctttaatttatgtataaacaaaacaatatggcccaacagtccaaatttgttacaaaagaagccattttctactaatttgggtcttgtaccaagtagagatttttacttccatggtggtgatatggcccaaactcttgttttttccttgtaatattcttcataagtttttttaaaaagcttatgacttttctatgtacaagaaaggaaataaaccatgatggcttaagcacaatagaagaaagaagaaaggaaaagaaaaaaccatgatggtttaaccacaatctttgaggtggatgccacattacccaatacattattacaagaacaacaactaaaagttggtggagctcacactttgatttcctcaaacatatcatctcttatcaagaaaactgtatcctatcagaattttatattcatgcctccaacggttcaacagaaaccaaaattagattattgaagtattgagcaatcaatcaatcaagattagatgatttccccaatacccatatttttattgatagagctacccttcaaaccaaagcctccacgcgtggcccgaattgaaatttcgcgatatgacggaagtttatgttcgaggatgcaaagatattactgatcatggtcccatgatcaatgaccaaagagactgacctcataaacaatttccacctactctattgcactagcaaatgcgttttctttatcttaaacataagcatggggagaatgattatattttgtataacatgcatcatcttcttaagtctccattttctcaccactactctctatttctttctctctgcttctctctcttctctatttgtcctaacgacctgattgcattagacaggaacgaaaaggaatg

SEQ ID NO: 9768 - DNA, 3000 bp, Unknown
  misc_feature (1)..( 3000): cDNA_ID_3033021_gDNA_ID_1972181_Annot_ID_180130 3000 nt of promoter + ATG
ttgtcacagccgttttcgatgcacatgatccgacaaccattttggttgtaatgatcctgaaaaccttcacactctcattacataacgtcgcaaatttactatacaaccatttcttgacaaacaaatcggtcactagctattcttctgttttttttatttttcttgtaatatttatatatataacgagtgtgacttgggctttgacaatgttagtatagctttaaaacgggggaaaaaaaaatactagaacattaagttttgagggtgcaaatatgtaacatatgtgttgtagaaatactttttaaaatttcaataataaccttggtttagtttccattgtttgaattggtattcatatctgactaccgtagaattcaatttgttagtgcagaatctgaaacagaaattgtgttgtctgtatattctttttttgggctctcaaatatttcgtgtatttttgtggaattttatataaagttggtgtcttttttaggacttttcgttgcattcaattatgttgaatgtgtaaaagtagtggctttccttggtcacatttatcaaacgtgttttcgcctttctttaattttccgtgttcaagtgaattctagctaacttttcggttttacgttgtatgaaaataattggctgtcgtcggtcacatgatcacatagagtttatttgattcaaatccatttaatatatgctgtatctttaatgcatacatagagatatattattatacgttatcttttaataggacattatattttgtttatatgaaagaaaagaatgtactgtatatgcagttatattatgctggtttatgtcaaagatagaagttaacgcaaattaatttctttatttcaattgtgttttgcgttacgatctgttttttttttttttggacaaatgacttaagattttattacttcatttgatattaataaattagtatgggtgatgcaaacgacttgaaggctagggttggtaccacggctgctaaagtctacttttggttggatctgtggtcggaagatcttgacgtgatcacttctataattgaggattgtgtgttgctgctactctcctctcacgataactcacgtggcctttttcttgtttttctttcttcatattttcacaaaacaaaatagtcagagatcttgagagattttttcagaagcatattgggcccaaatgtggacaatttcatgtggttgaattgttaaatttcagatagattagacaactaatcttgttgacgtgcatgcggtgaggatattaagtcgctatacgtcatatacgtgtatacttaaaatctcgtttgatatttctttcttttgtttttatcttcaacgacaattattgcctcaggcatgtcagcagaaaacgacaccgttcatattcgatctcgttattaatatgtttttgaagcaaaatatcattattagctatggagtttctgcagtagcctaaccggaagtctcaaaaagataacgtttatgccggttataattaaatccgataaggcgataaataagtgaacccgtaaagtctaaaattttcacatatatatgaacaaagaaatagtctatagatctccatgcattcttgtacaaacatatttaattttttattttattttctttatataagagttggtgtatgaaactttacattttgtaaatactaacattacatcataatgtcagaaccaataattctagtggaatgatataatctccactttaaattcttatgtctttatccaaagagatcatgaggaacttgagcaaaggaagagggcaccgtttagtagtataggtgaataacgtggcggacacgaggctggtctcattttcaaataaagagagatagagagaaaatggaaggaaaaaaaagctattggcgatgttgatatttgttcgtcttttagtggagacgaccaagagattttgaaaggtcgtcgaggagttagtttattatcttacaattattatggatttcttctgactaaagttttagtgcaatagttttctgagttattatatatttttcgaaattcatccaaaggctaaaactttgtaaggtattctgagtctattacgctagaaatagacacgcttacgtttttaagtcattttaatctgatatatatatatatatatatatactacaattttataaccaattatctttgtttcagacaatttatataaattcatataaactatcagaaataaagagacaattggctgtaaaattgtattattttgcatctatgaaatttttatttctctttatcaaaattgaagacgagttgaaattctatttcttttttaaaaaaatttatatatgggagtgtcaaaaaataattttcctttgtaagagaatattcgtatttggacgagtcttgatttgtgttttccgttagcgttccacattagttgtaaagagcgagaaagatttaagtgataattaaaaagacaagatatgcattttgaatatactctagatattaatcttaagcatttttcatattggttatattttatggtcgaattttgacatccgaaaaatacatcccttattcttcaatttatattgaatacttaagtttttgatagtaaatatgtataaataaattttaaacaattgtcaaaaagacattataacttatacggttatagttgttaaaaaaaaaacttatacggttataccaatagataaactgacattttagatttgagttttttttttttttactttccatgtagatagcgtggaataatacctcatttatatgtatcgttagttgaaataattgacaaaaggaaactattcgtttgctgttctagataaaagcctttaattgagaaaaagaaaatgcctccagctttgacccgttttgcctataaaaggattctctaagatatggactttcctcatcttctcgggtaaacagaatcaactagttttgtttttcctctttcaaaaatg

SEQ ID NO: 9769 - DNA, 3000 bp, Unknown
  misc_feature (1)..( 3000): cDNA_ID_3033006_gDNA_ID_1972181_Annot_ID_180142 3000 nt of promoter + ATG
ataaaataaaaatattatataattagatataatttacaaagttttatatatattaattttaaaaaatgaattgtctccgcggtgtacatctgaaactcatcaacattttctataacagacttgctttcgtctatcctaaaactatgcaacttttgtcttaagtaaaacctcttatgattccaaaacatttgagaaaaccaataagagatgttatttcttctcttaactgcttatgctctattcctcttgttctaccttttattttctttaaattatctttagaatctcttcctcatactgtaaccaagatccagcatcctatcgataggtaaagttgagttttacacttgccaattgccaaacattagaataaaaaagttcaataggttactcggattcgaacacgaggttacatgaatttgaagggctggcctgagtagccaactcgttaagcatctcacgtctctttcccaacttctcgagctcttcagatccgatgggttttgtggagagagttgctttcttcaagcatcttgcattcttaaggatgtatgtagccactgctttctcatcttctcgttgccactcatatcttgtccacacaaatgtctcaagatgaaacaacaaacattcaggaacacatttgggtcgactccattcccagcccaccgaacaatcttctttaggaaactgatatggctgagaacaatgcaattaaaatatttgaaagtagagctcactggaagaaaaacaaaatttagttgactaatgaaatggcttacatcgacgagcttaagaatttgtaatttgggagaactatcgagcatgaaccaaagtagattccaccactcatagctatatgcacgaagctccagcgataaaagctggtagaagattttaccagtaggatactttatctgtgcatgaggcaacacagaacattaatgttagcccaattacagataaaccccgtgaaaatcttaaatcttaagtttaccttgaaaggtgctaagtgtaaggaaagacatttggctgaagttagagagtccataatgttctcattggctatttcaaaaacggcactaattttagcctccactagctctggcgccttctcaatcaaacaaaactcaagaccattaaacccgtcgatgttcaagtatttcaaagaaggagcatttatcacatagcctccaacaccttctccatagtaatcatcatatatggttagtctctgtaatgatggcaccgcaatagtataactctccacatcggtcgtgctatgtctatgcacgaccaaatcttcaagactagggcagccacataaaaggttgcaaacggattcttcgtcgttaaatctcacatggtagagatacagctttctaagagacttcaaacaaaccagagaaggaaaatctaaaagaatgcaatacttgagttccaagatttcaagtgtatcattacaactacaccaagcactcggaaatcttacaaagctttcctccagcaatgtaattttcagtacaaatttacgcatatggcgggaaaatgcaattccaatcaatatcccaacatccaaagcatcatccttatcttcaactttcaaatgcaaactatctagaacaggagctttatgtgaaatcaaagacctgaaaacattatctgaaaacgtataatgataatgatacttagaatcaaacttgagatttggcaccaacttccaaagagatttccattgtttagacaaaacactagtggcaatcacagtttctgttggaagtgacgacaatatgagcagaagcaacgcttcaggcaactcactgatcctgtcctcctcattcactaaacctcgatttctcaaaccttcaccaccgattttgctgtgaaaaaaaaagtcagaagaaaacaatgaaagggattccgagaaaaaacatagacgaaacaaagaaacataccatttttgttccattttcgtttaacagagacatcaattttgctaaaaatccttgagattactaacacttcaacctcaaatgcaaacgcagccgaacacacagaatccagctagagcttagatatgataatggtgacgagattcatcttcaaaattatatccacttgtgtttgattagtaaaagaatcacctaggctagatacaaaaccctaacagaataaaaacagtgatcaaatccgagccggatcgtttttttccaatgaaaccaaaatccaaacccaagacatttacaagcccaaagaataaaaattgattttttttttttcggcccaccggcccaataacgaatagttaaactgagtttaggtcttcactatttaaagctcgtaaaccctagacttggatatacttcagtctagagccgcgcaagaagacgattctctctgtgagttttcgctcctctctacttgtcgtctctctgattatcttcgttgctactgtctcgttttgtgtataagtagggttcttgcttgttttctctcatcgtgtgttctgctgctagctcctgtagatttttctaagttccttgttttgttcatttcgagttttattgatctgatataaatcgtccgttgatttgttattttgttatgctttattgattttgcagaaagtatcgtccttggaatgagtaatattacactttcagtgatgaaacttttcgtttatttgattggttttgataacatccttactgtattacgactgttaatgtaatgtgcatacaaactctcgaaactttgattctttaagagtttgagattgtcacaagtctcacctttagtatagatttaataagagtgatctttgaaatacttcaagattcgtatctgttttactctatttatgttctctatatctttgagatggtcttttgtttttgaagtttgaggttttatcatttgatttccttgagctgtttaaagtttcatcatttgatttaaagtgtgtctgattgatgttttttggcagcttgagttgaagaa

SEQ ID NO: 9770 - DNA, 3000 bp, Unknown
  misc_feature (1)..( 3000): cDNA_ID_2185743_gDNA_ID_1972181_Annot_ID_180146 3000 nt of promoter + ATG
tacaagcatggggattatcatcgctaaacatcgaagccgcgatctcatctccagccacagcaaccgagtaatccgcgggagtgtggaagaaagtgtggacaccaccggtgggatccgtacggtgtgcatcagagtaatagtggttggtcacgtaagaaggatatttatagaaagaggcaaaatggctattacctaaccggtatggccacagttcagctgccttaccggcacgtcgtaccgctttcaataccttcttttcctctaaccggtatcctcgagccgtcactttttgggtttccatctctacttccacttcttccactcctgtacgtaaaccaataacaaccggataaattagttaaaccatctgaccatgtgaaagaaccggaaagttgatgttccatttgaatcggttcattattcttaagaatttggttgagatgttaaatttagatatctacaaaaatgaaaataaaagcataccaaactgaaaaatctttaataaaacatatattggcttgaaaaattaagaaatatttgataaaaataacagatagtttaactttggttaacatcttaaaagtcaaaaccaaaccaaaatttgtgtaagcactcaatacttagattgaacgaagaagaagaaacatatttaaaactcaaaagctttcaatacctttaagcttgagtagagtcttcctaagcttagaagcacatccttcacaatccaagtttggaactcttatctccactgtcatctacaaacacacatttcagctattacaaattcaagctctatatctattgaaatatttgtgtgaattgtaaaccgagggcaataagtaagaagaatggagtgaggtagagatactcacagacatgatcttaaaaactcaatcccttttagaaaaataaccccctccaagcttatacttggttatagagaatgaagcagtgcacaaagtctcctaagtgtgtgtgtctatatatataggtcgattatgtatatgtgtgtgaataaatactactaatattttgattagtattttcatattttatgatagtataagttattatggaaagggttcttgggttgtgaaatagggagacaaaggaagagcatagcacgcgtgaaatagtaacaaaaaaggtgtgagtgtgagctttaggttttcttctctgccccaaatcatatcgctctcactcccttccaattactttctattttatttgccaacaaatataatttaagttaggcatcaaatttataaaccgataaatggttaattgataatgataatagaagcagtccctactataaagcaaactaatatgaaaatacggatttatgcaaagctttcgtgaacccttcacttttttagttcaaatatcttatcatgttttaatatactttagtaatgaaataattgagaaatctcatttaggaaaataacaaaaatcgagaaacctataaactacattatctttttggtttattaaattaaatgcaatttcttggaggcatgattcatgaatcatgatgaaataatttgataaagaaaattatatatcaaagatcgtttcgagtaactaaattttccgataatacaatgaactttttgaataaccattaaaggtttttttgatacatgatgaggattcggtttagaatttgaatttcgatacttgactttcattgatagtagtattatatgaaattaatcaacttttttgtgaatattattgtgaaaatgtaaaagcaagagcgtatagtcagatttttgatgtgaagttgtgattaaggtagggacatggatattttctgaagcatgagctttaattcaaaaatgtcaaagaggacactcctaaaaagatttgttaatccatcataattggtattagctgctttttcctcatcattctgtttccatttgattaagaagaatcaagacgatgatattttcaaatgacgagtacatattcctaaatatatgagacctataatgatccattaactttgaaattggtaacgaatattctcacacaaaaatgattattgtgatatattaagcttccgcaccacgaaagcctaaaccctttattgaacagtgaactccgaccaagacagctctatatatgcaaatgtcatgtcgtaacaaaatcgtcgaaactatatgatatagtagaactaatcacttaaaaaaagggataaacaaaaagggtccattttctctaaatcacatgtgtgctttattgtggtccaaatcaatgctcggtttgttagttgttgtcactttttaaaactgatatttaaacatgaacctaaccggaaaagaagatacatgattactgatgtccctatgtcaattatttgattggttcggataattacgatagattgtctatctttgcctcaaaatgcaatttatttcaaaactttattacaaaaacctctatttcgggcttgggcttagtccttgatcttggcgtcgtcctaggccttttattttcccaaaattcatcttatttataagtttttttttaatagaaaatgtcctttatagtacttttttcaaaaatactacttatcaaatatatcttaaactttttcgaatcttataaatcgtgtaaagcaataaaaaaacaggattttatagtaacgattctgttattttcctttgttatttaccgaataacttacaaaaacaattagaagagttgcacttgtgtgtctcacatttcacctagaaactttaaacatttattcctggtacacacaacatgacacacccatcaaaagtcttgcaaacattaaaacactttagttataaaccaaaccttttcctattctggttcacatgattctctgtcctttccttttctcacacacaaaaagctctccttttctctttctctctctctctctctctcacatctctcttcttcatctttcgtttcacgatcattgattatcaaattggcatgcaacagcaaggagagatg

SEQ ID NO: 9771 - DNA, 3000 bp, Unknown
  misc_feature (1)..( 3000): cDNA_ID_3032992_gDNA_ID_1972181_Annot_ID_180152 3000 nt of promoter + ATG
atctttcacgtcattcgatattacaacactttctaaccaacggtctttttcttacatcattttaccgacgttaaatacgatattaaacaacgtgattagccatctttttgtagtgaatttcttacttcaattttctctttgacccatcttatttgatttatgcaatgcctagagtttacagtttttaattccaatattaactagtccctaccttcaaacatgctcctcttgctattaccatgcattgctatatctacccgtacttgcgccgaaactacttgcagaacttaaaaacgaagtttacggttttgaagtgtcatacttaataggcatttcaaaactatttagagagaaaatacagtgattggtttgcttatactttaaattttggcttcaatcaaaagaaatgaatttgtatttatagagtataccacgtcaagatcagataccggatcctaggctaacccgacgtaagttattgattggtttacctgttctcctcccatcgagagttgggttgttgttggagagaggttgtacgtacgtgagtcgtgacggtgagcttgttagtcattttccctttattctgccaacgtgtacataattcagttttggtatatagtaaattttatgcgaaacaaaagctgaaaattaacatgtttattatcaaaaaaatgtggctgaattctgaaatatcattattagttaggtgcgttttaggaaatcagtaatgaataatgatcgtgcacaacaataaactggacaaaatagcatttgttctttttttctgtcacgaataatttcatttaagaaaaaaatatagaaagtcatttatatgccaacgagagacaggacattgctaaatccagctcaggacattagaaagttattctcacaatctctataaaataatccatgtcaacaaaaaaaaaacctctattaaacattaatcgaatttctaattcattatgaaatataatcagaagagtcctcatcttattgatcaatcgtaatacacaagaaaccatgactttagaggagcagaagaaagtcataatgcccgaggccgtcgcatcggagccatcaccaccatccaaggaggagaagtccgacgattcgaaagctattgttctcgtcgtcgctgcaagtaacaaatcttttaaatttcactgaacaagaattacatatttaaattgcaaaaactacttcaactatttcatattgttcgttttctctaattttcttcttcttcttcacaatatagtttataacacttgttggtataattattgtttatatatctaatatattttggccatgtaaacaaaatgtttttttttcttttggctaaattaatactgttatattttcggcaaagaactgtaaccttttcaatttttgttgttgttgcagaagaacctacggaagacaagaaagtaggttcagttcaccgaggtaatcaacgttatagttagatcatgattgatacataaccaggaaaacaaaatattttaactttttatttgatttttttacctgataataatagttaatatcagtgaagtttatccaatatctaacttttagccaaaaatttcacctgcggaagaaaaaatattaattaagtttatctaatttcagtaatttacatgataatattagttcatttttctctagattttttttttctgataattcatggtgtgtgtgtatgaagatgctgttttggttagactcgagcaagataagaggatatctctaatcaaagcttgggaagaggctgagaaatccaaagtggagaacaagtgagtcctaaagaagtttatataatccattgttttgatgaatttccaaatttttagttccatgatatttttttttgtgttccctatatatttgtatgtaatctcatttattaactttatgaaacagagctcagaagaagatttcttcagttggagcttgggaaaacagcaagaaagcttctgtggaagctgagctaaaaaagatcgaggtaaaagtgtaattctttattctttcaattttgttgttttatttttaacttttacatgaaatgctttccacttttcacattattctaatttatccgctggaaatatgaatgataacaggagcaactaaataagaagaaagcacactacacagagcaaatgaagaacaagatagctcaaatccacaaggaagctgaggagaagagagcgatgaccgaagctaaacgcggagaagatgttctcaaagccgaagaaatggctgcaaagtaccgtgccaccggaactgctccaaccaagctatttggattcttctgatcggagaaatggtctttgatgttgcattgtggtttcatttgttattaacttgagaaagaagagattattggtagttgaagtggttggtgtgggtttcatttggcaacataaaaagttacatggccataatgtaacgtcttattatgtttggagtaatgtgttttactcatgtgtaatttgtacagcttaaccttgagagacttcttttgaactttctaaacttaaactcccaattatttcgtttcaagttttcttcttcaatctcatggtccaagtaaaaatacaccaataccaaaatattgttacatttaagtttagtaaaaacaattaagaaaaataaccaaaattttgcactatttaagattagatttttaatatatatttaaataatattattgttccaaaaacaaaaagtaaaacaaaacacacccttaccaaaattatgtcaagtcaaagcatcctcgttttagggattttctatacttgggcctaaatactaaggcccgtaattaaaggcccaataacgtttgtggtattgtacaattttcatgtagaaaatgtcttatataaagaggtcttgcaaattagggttttcatttcagtaatcgctgccgcactatcgtctcctacctcctttgcctacaagctttcacgcgggagctcaacatcagcc

SEQ ID NO: 9772 - DNA, 3000 bp, Unknown
  misc_feature (1)..( 3000): cDNA_ID_2185753_gDNA_ID_1972181_Annot_ID_180149 3000 nt of promoter + ATG
tctcatatatttaggaatatgtactcgtcatttgaaaatatcatcgtcttgattcttcttaatcaaatggaaacagaatgatgaggaaaaagcagctaataccaattatgatggattaacaaatctttttaggagtgtcctctttgacatttttgaattaaagctcatgcttcagaaaatatccatgtccctaccttaatcacaacttcacatcaaaaatctgactatacgctcttgcttttacattttcacaataatattcacaaaaaagttgattaatttcatataatactactatcaatgaaagtcaagtatcgaaattcaaattctaaaccgaatcctcatcatgtatcaaaaaaacctttaatggttattcaaaaagttcattgtattatcggaaaatttagttactcgaaacgatctttgatatataattttctttatcaaattatttcatcatgattcatgaatcatgcctccaagaaattgcatttaatttaataaaccaaaaagataatgtagtttataggtttctcgatttttgttattttcctaaatgagatttctcaattatttcattactaaagtatattaaaacatgataagatatttgaactaaaaaagtgaagggttcacgaaagctttgcataaatccgtattttcatattagtttgctttatagtagggactgcttctattatcattatcaattaaccatttatcggtttataaatttgatgcctaacttaaattatatttgttggcaaataaaatagaaagtaattggaagggagtgagagcgatatgatttggggcagagaagaaaacctaaagctcacactcacaccttttttgttactatttcacgcgtgctatgctcttcctttgtctccctatttcacaacccaagaaccctttccataataacttatactatcataaaatatgaaaatactaatcaaaatattagtagtatttattcacacacatatacataatcgacctatatatatagacacacacacttaggagactttgtgcactgcttcattctctataaccaagtataagcttggagggggttatttttctaaaagggattgagtttttaagatcatgtctgtgagtatctctacctcactccattcttcttacttattgccctcggtttacaattcacacaaatatttcaatagatatagagcttgaatttgtaatagctgaaatgtgtgtttgtagatgacagtggagataagagttccaaacttggattgtgaaggatgtgcttctaagcttaggaagactctactcaagcttaaaggtattgaaagcttttgagttttaaatatgtttcttcttcttcgttcaatctaagtattgagtgcttacacaaattttggtttggttttgacttttaagatgttaaccaaagttaaactatctgttatttttatcaaatatttcttaatttttcaagccaatatatgttttattaaagatttttcagtttggtatgcttttattttcatttttgtagatatctaaatttaacatctcaaccaaattcttaagaataatgaaccgattcaaatggaacatcaactttccggttctttcacatggtcagatggtttaactaatttatccggttgttattggtttacgtacaggagtggaagaagtggaagtagagatggaaacccaaaaagtgacggctcgaggataccggttagaggaaaagaaggtattgaaagcggtacgacgtgccggtaaggcagctgaactgtggccataccggttaggtaatagccattttgcctctttctataaatatccttcttacgtgaccaaccactattactctgatgcacaccgtacggatcccaccggtggtgtccacactttcttccacactcccgcggattactcggttgctgtggctggagatgagatcgcggcttcgatgtttagcgatgataatccccatgcttgtactattatgtagtcttttagtatacaaaaatatgttttcagttcatcttcttcgtccaaatttgatttgatgtgattttttttgtacaactaatgttggaatgagaaagtaaaatatatatgttgtgttttagtctgaataaattggatcaacatgatctaaacaaatacaatccgattcaaaatctctttcatacgattaaaatgatttgtagtttttcaagatccgaaccactacgaaactgaaattacaagaccgtaaatgatttctaagcctctctttaagtgtgctaaaccgaaattagattacgcagggaaggttttggttcaattcaagtaaaaaccggtacaagtgaattagagaggcaataaccaagttggtcagggaattggtggaagaccgattggtttcctaacgacgtcgtttcagaagccaataaaagaagctcatatataagaattagaatttagggttttttggtaacgtgtgagagaattctcttttctctacgagttgtctcgggtgagttctcttctctctttcagggtttttgaagtaaataagaccgagcgatcgtattattcgttttcgacttcatcttaattcggtcttccaagtttgtattgtttctgtaattctctctctctttcatgattgcatcagtgtgagtctgtgataatataataagcgtttttctgagttcattgatcggttgtgtgttctgcgttagaatttcattaattgatgagttttttgtttgtttgtggtgtgttttgctaacaagtcacacctttactatagttttaataagcgtcttctacaacctgaagatatttctattttctaatctgttttttcttgtttgatgttagcctagctatagcatttagatggcttttagctttgtagggtgaagtcataccatttaacttctcttgagcgtaatggtttaatgcagcactattcacatgttggtggttgttgattttgcagcttgacttgaagaa

SEQ ID NO: 9773 - DNA, 3000 bp, Unknown
  misc_feature (1)..( 3000): cDNA_ID_2185766_gDNA_ID_1972181_Annot_ID_180153 3000 nt of promoter + ATG
cttattgaaataattctcttatttaataacttttcctgtgtataaaatcatcaatttcatattagagttttaaggtgccatatagttttgtatttttgttaagataccaaaaatatattaagaaagagctcaagaaagttaagagtttgaacacaacactttttctgctgtgtaataaaaaatattgcttggaatttggaaggtttcaattggatacatcaatgtcattgattcaatgaccatcaccagtggacaattctttttatatgcatgcctaatgacaaaacaaaatgcaccaataaaaacgaatttatgagagactctttccaaaagagacacttatcaataaataattaaagattattttgctaaaggtcaataaatatttttgaagaggtgtatacactaagtgctaatttaaagttttgttttacgagtttattaattgagtttgatgattagtttagtttggatgtggatctaataaactcttgtttacaaaagaaaatcaaaaaaaaaaagtacggtgacatcactcattagtggtgtaaagtatgtttataattaaaacatgaatggggaacaaacaaaattaacgtttgaaccaattgtttagcccacttaaataaataaaaattagattagtgacgggtttttttctttgtaaagttttctctataatagacagtctattggattaagtaacccaatcaaatattgattcttttgtatatacactgtatttgattgttgatcattatcagaaaaaataaaccatatcttacaacgatgtgatataatcccatctcaaaaaagaaaaaagaaaaacatgtttggtagacaacaacaaaaatgaaaatacatgattggtccacgactttgtaatacattgttgacttaattatactttgcgcaacgtggaattatataagctggttaggcgagatttatttataagttcaagcaaagctatcagtatttaaccaaactatattgtcactgttttaatagaaccagttctctgtttcttaattagatttttcttgatagatacctcttcttggtgaccaaaaaaaaggaaaaaatatgcataaacctcttactatcacaatttatatattttgttcaattttctatccgcaaatgggggtaaagagttgactccaaacaatagtatttgttttatgtcttcaataacgatttttcttttcgttaatagataacgaattatttgttattatagatcgttaaatgataatttatatagttcacaatagacatacgtaaactatactcatatgtcaattatacttaattaaatccacaaaacccttttgttcaatactagagctttttgtgtgcctataaatttcctgcaaatgattgacatgatatatatgattgacatatgatcatgtaaacatcagtactagcatatgcaatatgtcattgtgtacgtgtgatatgtcaatatgtgattgtgtgattcagtgattagatccgaaattcgcctagtatgcaatagcaaaaccatgctaataagtcgtagcacagaaaacgatattggaatcttgaattaaaacaaataaagtatacaataagtgtcaagataactaatccgcagctaacgtcatcacagtgtcggctgccaaggtcttttgctcactgaagtctgaaggcttatcaattatcaatataatcagtagagaggcattgtaaaaattacgtcattttaaatagtaattcactaccaaaacaatccataacatgttagataatcttcccaaagtttccaaacggatttgtatttgtaggacgttttaagaaacgtttcttacttttggagagcttcgtaaaccttgtactatgttttgtgaaaattttctaacttagattatattttttcatcaaaatatagaaccataatattgccacagcattacacccttttctttgttttttcttttgtagaacttggatatattaaggtgctgtgaatgttttcgtcaataatatacattttgacataatgacgagacctataaattattaagttatttgtagttgtcaaaccaataatgctattactttaatactgacataaataaatataaacaaatactatgtaaattaaatttatataaagaacaaaaacaaaagctaattcaccaataatttatcgattttgttttttacaagagtttttcttgaggaaggcaagtaggctttttataagttgcaaaagtcttcttcaactctattcaatagaaaattaactaacttgaacagttgaattagaatatttctactcataaacaataagaataattcacaatatcacatgctagttatttagtttaagttttaccaagacaaagagctggtggattactgtgaaaatgtccacttatgcatattaaaaatttggtagattaatcgactagttgctaattgttccataatttcacaaaaaaaacaaaaaacaaataacctagcccagtcaccactatatcattgtggcagatttattaaagttagccttagcccccaacataatttgaaaaggcaagcaaaacaaagacaaacttgcaaaagtctaatctttctgaaacaaaacatataaattaaaatattaatttgtttatttaaatgcaatgtcgtattgaaattatgacatgaaaattcaaagggtaaggctccacctaaaatttataaagatgtgatgcaatgttccaaattatatctacaaaatatttgtttcgtgtggaacaagccctctttcatatgaatagttctacacaagcatgaattagatattactaattaaactattaaagaactcgacctacaaaactgtctatatatttccctctttcgaattacgtatctgtgtcaaagattgtcatcaccaatctacatatttttattcatcagtaccatacacgtatatataatatatctatttcaaatataaaaaaaaactttggaaaaataaaaatg

SEQ ID NO: 9774 - DNA, 3000 bp, Unknown
  misc_feature (1)..( 3000): cDNA_ID_3032999_gDNA_ID_1972181_Annot_ID_180145 3000 nt of promoter + ATG
gtttacgctaaaatattcggttcaatgagaaacatcaacaaaggtattcagagctacatcattgaaaaatgtatgattacaagattggttatggtacgaatgttgataccttcccctcagtgatgttgctattgtcatctgctaaagatgaattggaatcttcttcgaatataagtggaaaccttattgcgtcaactggagttgctgcttcaacaacttgttcctccaaggtttctggttctttaagaatctacaccgttccaagagatttattaatatcgaacagaatagaaataatatcaaaactgagagtcatgtctctgcaatttgtaggtctgatatatcagaccatgtataggtataccaaacaccagaaagaaattatcaattaccttggcagctttagcgcctcttctctttgccggctctttttctttgtttccaagaacaggttcgggagaaggaatgcgctcaacaaaacgggcagcaaccaatttctgaagagaatctctgattgcttcagaacctatcgtatttcctgaatctgatcatgtatgaagaaaacatatataacagcatggaatccattccgctcgaagcattactgtaatcaaaacgagatacacaaaggccaaaagccaatgcctacgatgacgagtgtaaactgtggtaacataacataagaggtacatatgatatcacgactcacctctatctctttcaataaactgtcccaaggtaagcctaccgttactaagtaaaccatcaagaactgcaccgcactaaacatataaatcaaacaaaagtataagattagcattagagtcttgaagcataaaccaactaatcaaaacactgaacagagagaagaagaagcacgattaaaccttggagtcaagttcttcgtttacaatcctcgaaaacttgttatacctcacacgatgcagaatgttgttaaacaacacaatatactgtacaatagctttgctctcagaaccatctacaaagtaaaaaaaaaaaacatacaaaattactttcattgagttctctatttctgtgtgttgctactaatcaaacaatatagagactaaccaggaggttcaatggagaaagcttgaacacaattgtgctgaatcaagagatagagaatatctttaactttgttatggttgatatctgattcagctaaacgagagatgtctcgtgaggaaagaggtcctttacgtagaagacattcacaaactttctgcaaccaaaaccaaattcgttatacagagattataaattcaacacaagtctcagaagggtttctcaatttaccgagacgacggagccgaattggacggtgatgatatggatggcgtagacaatgccaaactcagacatagacatgagaatcaatcaccaggaagtctctcaatactgatgaagcagcctctgcagagcttgacggagttatggccgatatagagatgtttgccaatcgattgtagcctactactactaaaaagcgaagcaatcgtaatctagcgaccctaaagtttaatttttccagcgatccacacgttcgaatccaaaatttcgataatctaacatgaacccaccaatataagtataagaaaacaccaacccagggctagggcttttgttttttataaggactcgggccggccttaaatatttagcccattttaacatccctaattgtaggttattaattgttggcctagagaagtttgggcctatcaggccctaataaattgaatgtatggtttgacccaagaaaaaaaattagtgatggaacgaaatgtacttgagaattttcaatgattgggccagatgacaatgctctacttaagaagaacaaacacaaaccaaattcttctattgtatttgtatgtgacggcttacatgaagaccatgtttttacttagttaggagaatggaaaatgactttttcagcttcatgaatatgacttatattttaaaacactgtcgttttcatctatacgagatttttgtatttctattcataatcatatacataattttaatctttaacaaataacaaggtaaactaaatctttgattagtaaattctactctgactctcttctaagctacgcatgtttagtggtttaaattagtttcattgttgaataattatccaaatccactattgtttagttagatagtgtgcatgtatcaaaccaaataaaataatataataatttgtatgtatagacaaaacaaaattgattacttcaaaaagatatatgtctcattatatttagtcttctactttttttctataaataatatatttattcttatcattcaaagtcatttttaccatttcttattttaattttacatttttaccttggtcaatttaatttattaacaatcaaaataaggacgttatcttctatttataatataaagtataaacaacgtcaagcatcttcgaaacgtgataatcctagtcaaagacacatgtgcaaaggccctaaaagtgattaaacactcataggctatttttttaatgaaactattcttttgtttgataatacatacacaaactatttcaaattcctatgaaataattcataaaccgtaaattactatcgcatgcttgccgaaaaaaaatattttcaaaagttaattaactagccgtttcggttcagtgtttgtaccggaatcgaaattaaaaaaaccacctcttcaaaaaccgaaacgtcggtctaatcgtaaggatatatatcagcgactcccaccgttaacaaaataattaaaaatgaaaacattatgaccacacgatcaatagaaaatccgctacgatgataacacgtggcatcatcttttagccattttttgcttccacagatactgtagtaattgaatataaatttataaatatcgcatttgctctcttctctgctttcacattctctccttcctcatcatcgttactctcgtgtttatctctccgacgtaacc

SEQ ID NO: 9775 - DNA, 3000 bp, Unknown
  misc_feature (1)..( 3000): cDNA_ID_3033009_gDNA_ID_1972181_Annot_ID_180140 3000 nt of promoter + ATG
ctactggtaaaatcttctaccagcttttatcgctggagcttcgtgcatatagctatgagtggtggaatctactttggttcatgctcgatagttctcccaaattacaaattcttaagctcgtcgatgtaagccatttcattagtcaactaaattttgtttttcttccagtgagctctactttcaaatattttaattgcattgttctcagccatatcagtttcctaaagaagattgttcggtgggctgggaatggagtcgacccaaatgtgttcctgaatgtttgttgtttcatcttgagacatttgtgtggacaagatatgagtggcaacgagaagatgagaaagcagtggctacatacatccttaagaatgcaagatgcttgaagaaagcaactctctccacaaaacccatcggatctgaagagctcgagaagttgggaaagagacgtgagatgcttaacgagttggctactcaggccagcccttcaaattcatgtaacctcgtgttcgaatccgagtaacctattgaacttttttattctaatgtttggcaattggcaagtgtaaaactcaactttacctatcgataggatgctggatcttggttacagtatgaggaagagattctaaagataatttaaagaaaataaaaggtagaacaagaggaatagagcataagcagttaagagaagaaataacatctcttattggttttctcaaatgttttggaatcataagaggttttacttaagacaaaagttgcatagttttaggatagacgaaagcaagtctgttatagaaaatgttgatgagtttcagatgtacaccgcggagacaattcattttttaaaattaatatatataaaactttgtaaattatatctaattatataatatttttattttatagtttacaattgttattaagtaacgtcctgccaaacccgtcccgccaaatccgtccacaaaaaaaactatttattttattaatgttgatcttatttataatatgtttatgaatcattgtcaaaatattttagtcgttccgggacgttgtatccacacatttttcgccaattggttaatatatgttcatttttaaaatttcgaatcacaaaatatgaccaacttttttttgagattttttaaaactctatatattatataatgatgttaaatatttttgatatattaaactttttataaatttaaatattaataatgttttatgaagtttaaatatataaataataatatttaaaaattaatattttttgcattttaggtaatgatataataactctaaaagcaagaatttagaagaattaaatctttaattaaatatttttattcttaaataattaatgttagtaacatgacattgtaaataagttcaaatacatgatctatttatttaaacaacaaacgtttagtaagaacaatatttatttaaacaaaaaactttgttttaaaatattgttaacaaaatacgtttatgctaattttaagggattgattttatacgaaagcaagtctgttatagaaaatgttgatgagtttcacaatttttggttatttgtttcagtgattaacgactaaaattgttttttgaaaattttaatatttttaattttaagtcaagtaatcaactttgttatcaagtgaacatgaattttgtcgttacttttactgcaaaatgatgcatttcggaaggtcaagttgctagatatagtagtttaggtcatggcaaaatacggtcaaattcgatttcatccaaaaaatacgtatatccgtaactctacgaagcaaaaaaaaaaaactacaaatgaatatcagttaagaacagagcagattaaaaaaaaaaagaacttacatattaagacacatacaagttgctctgctttggtattaaaattatgtaagttaatatatatgtaagcataacaatatttagatgtaaattttaaatattgaattagttatttaaatattgaattagttatttaaatattaaattttaataagttaaaaacaaaaattgttttattaaatattgtcaatttttgcagatgacataattaaaccactaagcaaagtcctagaagctttttgtgggtttgagcattactttaaaactagattttaatccgcggtatatcgcggggacaatttattttttaaattagtatatataaaagtttacaaattaaatctatttatttttattgtatagtttacaattgttattaagtaacgtcctgccaaacccgtctcgtcaaatccgtcctgtaaaaaaaacccgcggtacaccgctaatttaaatatataattaaaataaatttttacgggattgcaattgtattttggtttgtcaaacaaatatttgttttaaatagttgccaaaatctagttcaaattttggagaaaaaagatttattggatagataaagaatgtatttaggtgtgttttgctcattttaagggattacaattatatttttgtttgtcaaacatttttttgttttaaatagttgctgaatactgtgtgcgtgacatatgagattggaatatttttagtttgttaatcaatttattgttcgaaaaaaatcaataattaaaagccaaaaatggctgcaaaaatgtatatatagattccaagtagtaagcccatgagaaaagactactctgcttctgaatatgctggattggatttggttttaaatcaaccctaaaaagccatcggtctctcatacgtaaagtcactcgtcgatagtcgtccttctttttcaccagatcacgtgctggagtgtgatgtctaagtgttgttgctaatgcattagttttgatactctgttagggtttccactttggtttataacacaagtcattacttttgaagctgaagtcgtactgcgatagccgatagcactgggaaggcattaaatctgaaggattattagagactagagagtttttttttaaatctctattaacaacaatg

SEQ ID NO: 9776 - DNA, 3000 bp, Unknown
  misc_feature (1)..( 3000): cDNA_ID_2185698_gDNA_ID_1972181_Annot_ID_180134 3000 nt of promoter + ATG
ccgttcttcttcgaacttctgcaactttgtttctcccaaatctgtgaatctcaagtgttcgtcttcaccatcatgctctctcgtttattccttagacattcgaatctccgtttcgtaaccctagtttcatcgaaatcaaattctcagatcttctcttcgtttattcgtccgctttcgactaacagtagcggcggcggaggaaatggtgacgggaatggtcgtaatcggaatgatgttccgtggagtttcactggagtaaacgatgataagtctggacctttctcttccgatgattcttttggttcttctggagttgcaggatctggtttacctggtggagaggggaaatggccggaggagcctaagagatggaatataaaggaggaagaggaaaaagttgtgtttgatactggtggtgaagtaggtcaagggattgagactagtcgcgagaggaggggtaatgaatgggaggagactaagagatgggatatgaaggagggagaggagaaagttgtgtttggtggcggaggagatgaggtggatgggtttggaatcaggggagaggtgaaatctaatgaatgggatgtgtcaaagccatggaatttgaaagaggaagaggagggagttgtgtttgatactggtggtgaagtgccgtttagctttgagaatagcttggaaatggcggaggaagagcgtgtgaagaaggagttgattgagaaggaagagaaggagcttcttgaggttatcaagggtgagacttttttaatttgttttgctgattcttaagttttgatcttatatgcaatgcaccagtagtttcgatatgtgtctagttttggaatgcagtgacaaatgggtagcaaatttgatctcatgactttccttgttaaggttagatttggatttgagggttaagtcaagtagcaaaggttgtgtaatcaatctatttataggcatgcttgctgagtggaggatatgatagtttttggagtaagctcggatgttgaagaggaataagcatttgggtagaaagacttgtgtttgaagtggatagttttgtgcttactgacgctaaggaacagtttagtgcttatgtgtttttgctattaacaatgttcagcacaataaattgaagaatttgttattttgatcacattggtaatggattctgctgctagtaaaacaagcgctagaagtagagtaattgatttgaaacttactattgcaggtcctgatcgagcatttggagaccttattgctaagtcaggtataacagatgaaatgctagatagtttaatagccttgaaagatttccaaggggtcgaaggattacctcctctgactgagattgaaaacctgcgtcgtgagaaaagttcaaagaagtcatcaagagctgagatagaactccagatgcaagaggacattgccaaagcacgggtgagacaagttgacgaaacaggtagagcctatggaactggaagaagaaaatgtagcattgcacgtgtttggattcaacctggggaaggaaaatttcaagttaatgaaaaagaatttgatgtctatttccctatgcttgatcatcgcgctgctcttctacgcccacttgctgaaaccaaaaccttgggtcgttgggatattaagtgcactgttaaaggcggtggtactacaggtaaaacctctccacaatcacttcgttttcttcgacgattagtcccaaagttctctatttacactagcaagtatgatttatgcttaagctagaggatttggtcataagttaacaaattagattgccatctctttacaaaaatcaacaattatccaagcatttccttctaatcgttgttaaccatgtactcaaatatttggtttaaaggtcaagtcggagctattcaattgggtatcagcagggcactgcaaaactgggaaccagatatgcggacatcacttcgagctggtaagcaagatactacaggcatcttagcgttattaaatctgtttagtcttattgatgttcattagcagagatacaacttattgtctgaccaacgttgtcatttgatagccggtatgtgtgttcatgtctgttgaatggattggtcttgatctcgatctttttcatcttcgatatgtttcagctggtttcttgacaagagactctcgagttgtggaaagaaagaaacctggaaaagccaaggcaagaaagagcttccaatgggtcaaacgttgaatccgaaaatgcgtactatatcttctcctttttgtctctgtcattttcattagttcgtctacttatcccgggtttagaagaatcaccggcaaataacttgttcttttggttcaatcccgtagttatctttttgtaccaacacattcttctcttacggctctactcttggaaacttgagtttcgttggtttctgagtcggacacatatttttgtatgtttttttccggcaaattgtcatgtttcttcaaaaggttcattgatgtttaaacataatgatcaactccttatatggattatattattaggtgaattttgattcttttgatcaaaatgttaaggaatgtccaattctcatagactttacaagagttggttacatttgctatatacaaaaatatctaattggataaactctattataccatccaaatatctaattacaagagtttgtgtaaagactttccataacagagcaatggatagattttgacgttatgttgataaattttattcacttgaaggttctattttgtgttacgtgcaagcatctactcattgaatttcttcactcctactacaagtactaacaaaattatcaatttcccaacaaatccatagatatcctttctctagcaatcgaagtaactattttagtttcattaaaataacatatcactcttaaggactatataataacaaattaccttcttgttgttctcagtttcttctcccaataccaaaaatattttgcttcatccaaggtcttgaag

SEQ ID NO: 9777 - DNA, 3000 bp, Unknown
  misc_feature (1)..( 3000): cDNA_ID_2185701_gDNA_ID_1972181_Annot_ID_180135 3000 nt of promoter + ATG
atgtactcaaatatttggtttaaaggtcaagtcggagctattcaattgggtatcagcagggcactgcaaaactgggaaccagatatgcggacatcacttcgagctggtaagcaagatactacaggcatcttagcgttattaaatctgtttagtcttattgatgttcattagcagagatacaacttattgtctgaccaacgttgtcatttgatagccggtatgtgtgttcatgtctgttgaatggattggtcttgatctcgatctttttcatcttcgatatgtttcagctggtttcttgacaagagactctcgagttgtggaaagaaagaaacctggaaaagccaaggcaagaaagagcttccaatgggtcaaacgttgaatccgaaaatgcgtactatatcttctcctttttgtctctgtcattttcattagttcgtctacttatcccgggtttagaagaatcaccggcaaataacttgttcttttggttcaatcccgtagttatctttttgtaccaacacattcttctcttacggctctactcttggaaacttgagtttcgttggtttctgagtcggacacatatttttgtatgtttttttccggcaaattgtcatgtttcttcaaaaggttcattgatgtttaaacataatgatcaactccttatatggattatattattaggtgaattttgattcttttgatcaaaatgttaaggaatgtccaattctcatagactttacaagagttggttacatttgctatatacaaaaatatctaattggataaactctattataccatccaaatatctaattacaagagtttgtgtaaagactttccataacagagcaatggatagattttgacgttatgttgataaattttattcacttgaaggttctattttgtgttacgtgcaagcatctactcattgaatttcttcactcctactacaagtactaacaaaattatcaatttcccaacaaatccatagatatcctttctctagcaatcgaagtaactattttagtttcattaaaataacatatcactcttaaggactatataataacaaattaccttcttgttgttctcagtttcttctcccaataccaaaaatattttgcttcatccaaggtcttgaagatgggtataaaagtttcatcaaagatcaaaagaattctcgcatccacaggttatattcctattttcatttttaaataccgctattatttttattttttctactgcaaatttgcaagaaaatttgtaaccaagaaaataataattttgaaactttcctcgattggtacagcttcaggtagttcaaatcccaaagatggtgctgacgtggatgtccgagaggaatatgcaaacgcctttcgtacggaatcatacaatcacttttggacacgtgtcgtacagctaagccgcaaaaagtccgcagtgtcttcttcttcttcttctccaccaatcgaatcatcctccacgtcagctcgtctcatgtcttatcgcctattcgcgcacaatcttctagacccggatctgaataccattactcggatactagatgtatcccgggtcgggcgacacacccgaactcttctctctgattacttcttggagacggcaaacgctttcttgctttgcacgcaattactaaaaaacattcatcatcttcgttctaaatacgagtctttgaaaccaaaatttcattcggaaaatcataattcattggctttaatagaccaattcacggagatatcaaaatggttcgacccgtttatctcgtcgggttctaggatccagctaatcagatccggctgtttatacttgctaaaacggctagagtcgagacgagacaagacacgagccaaacttaagcttatcaacggactaactcatagctcagggcttctcgttttggctctaaccactacattgattgtaaccatagcctctcacgcttttgctttgtttctagccgctccgactcttttagcctctcaatttaaaccagccggtttaaggaataagttaacaaaaacagcggctcggctcgacgttgctgccaaaggtacttacattttaagccgtgatttggacacgataagcagactagtgacacgaattaacgatgaagtgaaccatgttcgagccatggctgagttttgggttggtagagggtcgggtcgggttcgaggcagtgaagaagttgctcgagagttgaagagatgtgaagaaagctttagtgaagaacttgatgagcttgaagaacatatttacttgtgtttcatgactattaatcgggcaaggaatcttcttgttaaagagattttggattcggatgatccacctaattgttcattcgctcccaaatccaaaaaaaaattgtagtatttctttgtttcgttttttttctcatgtcaatttttattatttcttttgtttttgtctactacggtatgtatatatatttctttttaccctcaattatataatttttaattcctagaaatattagtgtcggaacatttttatttctatttggatgatattcggattctattagtagtcataaaaatgccaaatgcaagagtcttttatttttgggcaagccaaatacaagatagtctaaattatggaatttttaacatttgtcaaaagaaatcccaaaatccattacatatgtcggaaatgtaggaaaaccgattttaacaaatattttagacgacctctttgttttgggtaggagagactattcatcaaaaaatgaaccaaccataacatttttttttcctatatcttctaattaggtaaatcggttgactcataaaccgagtcagcaactcgtccgaaccataaaaaaacgattccaattcgacggaatctcacgagtttccacttttatataaagtcacttttgcaaatcgaacaaatgcttatagaagaaagttatcaaatctagagatagagagagtgaagagggcgaaaaat

SEQ ID NO: 9778 - DNA, 3000 bp, Unknown
  misc_feature (1)..( 3000): cDNA_ID_3033013_gDNA_ID_1972181_Annot_ID_180137 3000 nt of promoter + ATG
ggatgctgctatgtgataaatgccccttctttgaaatacttgaacataagaaggttcaagtatcttaactcttgtctgattgagaaagcgccagaactggccgaggcaaaagtcagtgacgtttctgatatagaaaatgagaacattttggaatctctaacttcagccaaacgtctttccatacacttatcacccttagaggtaatttttagattttagtttttcgacatattttctatgcaattgagccagaaatgttttgtgtactgattaatgttacctcatgcacagatcaagtatcctagtggtagcatcttccatcagcttttatctttgtaactacatacagataaaaggaagtggtggaatctacttacgttcatgcttgaagcttctcctaagttgcaaatcctcaagctcaccgacgtaagcaatttcactagtcagctacctttttttgtcttttccaaaacttcacttttaggtactttgttgatctaatattacataaattgcactgttctcagctaaatatgtcttctaccaaaggaaatcagataggccaaaaatggatccagcctaaatgtgtaccggaatgtttgttattccatcttgagacattcgtgtggacaggatacgaatggcaacgaagagatgagaaagaagtggcgagatacatcctaagaaacacaacaagtttgaagaaagcaactttctccacaaaacccatcgaaccggtaaagctcaaagtttttaaaaagagacgtgagatcctcaacgagttggctagtttgggcagggcttcaaatccaagtgattttgtgtttgaatctatttaatctctcgagcatatatatattatatatggtttgttgaccattgggaaatgtaaaactctcaactttatcaatcgataggatgccaaatcttggttacattttgaacttatactattgtagatatatatttttctaacaaaagctgaacttaggttttgaatagtatggactttctagaagaaatgatatgaattgattgcacataggctttttctaacaaaagctgaattggcaatttgctacttaaatgaatttgattgcataatttattgtagtgcttgaaaattctgaacttgcaagttctgtaataggaaacacatcacaaaataattgcaattggtcccaaaggcgtataaacttgttttcctttccatgactcttttgacctctaggtaatagtaaagccagtagatggaattagcagctaccaacctaacttaaatgaatttacagttgctatatatgattttctttttaatatataatactaaattagaaccagccaaagaaaattaattgagaattattcaaaagccattgtgattttctgtttgtcaagaaaaaaactacttccttaattttttttcctacataaaaatttagattgaaatctacattaatgttcagaatttacagttacaaacagttacagtagaaactctataaattaatattcggtaaattaataaacacgataaattaataaattatgtcgattccaagtcgggtcaatgtaaaaattaaccaaaatcgataagataataagataataattttttttgaaatctctttgtcaaaatatggtctcaataatatcataaatcaataattactaatcttaaacatacttttaaaggtaatctagtacaatatgactttagttatatttgttttttcttaaagtttgaatctttctgaagttcatctctaattttctttattgcatcaaaaactcttggtgttgtctttttgatatgcatccaaaagttgtgaagagttttagacgcgataattgcttccttacgtgtcaatatttaagaaagtttcacattatcgtcttcaagttcttcaccaacattataaacagaaatcacaatttcttcgaaaaactctgaatttttgagtatgcttcatttgcacctagatattcgagtaggctattgacatttattctattccgaaagaagatagtgttatattttgcttaaatatttctataaattaataaatattaatttatcctgtaaaataatatttattaatttatagaataaattaatttcactataaattaagaaaatttcatggtcccaacattattaatttatagaatttctactgtatatggaatctattcaataaaataatatgactaatgaaaatcaaccactatttattttgactaaacaagttacacaactactacaaccaccaaattctcatttttaattgtaattgtgtaatgttgatgaactttttcagtctaaatctagaaacttgggacaaattaaacaaaaattaacactaattatctcgaaatttaactcttaaattaataaccaaaattttgtaagaaaatagtattatttatattttatcttcttcacacaacacaacacagcaagctccaaagtagctctgcaactgcaagtttaaccccaaagtcactgccacaaataaagaaagcaaagctaacacgagtccagcgagttttgaatcttccttctatggcatgatttccatttcctcttccgttttccacgggaagacacttcccttctcttctttatcttctctcaaattcttcagttccttctcgaaatcattgatcttgatttgagctttagagaagagaagaacaaaattcataagagaacatagaataagtagtgagatctaatcctcttcccatgtttttgtctataaagtagcaattagaacttcaatcttcaatttcatttccattaacattgtttcccattcacaaagttgacttttttttctttggttttagcttcagttcaagattcttcagttgggtgtactaaagttttgaaatttctttgtttaaacattaaaagtttatgttttgatcgttaggtgtgctgcttcattggtctatgatgatgaatgtgttgttataactctgtatctgttcatg

SEQ ID NO: 9779 - DNA, 3000 bp, Unknown
  misc_feature (1)..( 3000): cDNA_ID_2185690_gDNA_ID_1972181_Annot_ID_180131 3000 nt of promoter + ATG
gttaactagatgtccttgttgtagtcttcttgttttcattcttgtccattcttattatgtgaagtatatatatgatagatttatttctacttttcctttaacttagtgtctcaagttcaagacagaccaagcacaagaagcgaagaagatggagaaactgaataacatatttttcaccctcatggccagaggacctgatggtaaaaatttcattttctgcatatctaacttaaagaaagaacatgcatcatctatctcttagtgtttgagaaaaaaacctcctttgttttattgagctatgaggttatttctattatgagacaatgtatcacatcgtcaccggctattattttctcaaaacatcgcttttctcctaccaatcttgaaagaatggaacttgaatgtgcatcatctcacaacctttaaaaggaaagctccttttgtgctgtgtaacattgggtgtattatagcttactttgtttatttatgttggttgtataatgcagtcgatctctcagaagtcaccgggaaagaacagatggagacacagcctgccaagaaaggaagaggaaggaagcaataagtctcaagatttgttttccgtttgtcttggtatcaagattttgatccatttttgtttgatattttgagatggtagggttgtcaagattcgttctaaagcttacgacttttttttacactttgatcgattaatcacttttggattagcctaaacccaaaagctaacctttttaacttggattttgaaagttggccaactccttatagcttgattagtaagaagactaaagatagtctttgaaaagagaaaaacacctggtcaattatgatggagacagagaagaaaaacgagatgattttcttaaccgatgatctatcagcaaatatcatatcgagattaccgcaaagaatcatcaccacttccaaactagtttgcaagcaatggaaatcactcgctgattctccgtattccagccaaagtaccatcaaaactcgcattcatgactgtcatgtacacacactcacaagaagaggtcatgggttactatgcacgcaagatttggggacttccacaaaataaattaagtatatttagaaatgtaagaattgtgggacccactggtaggggcggttggggcgatacaatacgattcgagaataatatcagaccttagaacttaagctttagttgacaccctacatacaaatacattttgtgtcacaacgttagtgcaaaatataatattaaatctggtatctatcttatacattttgaacataagagaaagcacgtaggaacatccattgattgttatatgaagcaatatggtatttcatggggaaaaagcttaagaagagatcaaaatcatggcatttgattcaaggaagagtcttaattaatcaaagaactaatgacgagagatcactcttttccttttcctttccctatcgtcatgtgattcctaaacctctcgagggtcgtagaagttttctacaaagagactgacattttcacacatcctgagttgatgaaacatcacgttgtttcttaattccttaacaatacatctcttttgatcagaactatacgactatgcaagttctttttttagtttctccgtttaatcttttatgttgtgtggaaataagcggttttcttatgtgacaatgtgcgtttttttttgtctgtttcgaatcctcaatatgacgaagattaatacatttatggttgtgtttcttttgtgttgtataaatatgtgtttgttttattttcaataataagcttggtttggtttccattgtttgaatttattgggtatacatattagaccaattagaattccacttgtaaatgcatattctggaacaataatgttgactatactaataattttttcttgggtctaaaacatttagtatacttttcttgaattttatgtaaagttattctgtttttaggacttttatcctcactgaattatgttgtgttaaagtagtagcttatatggtcacatatctcacacgtgtttccattttttttctatctaagttttcggtttttacattgtatacaaaaataaatggcatgccttgggccttggccactgattcacatgatcacgtagagtttgtgtgtgattcaaatcctagatgagaagatcatccaattgatctaagatgtgtctttcttatatcacacgttttattttaataatactcttcagttgggtttgattccatttatgatttatctatgaaaacagaatatgtcctcatgctgattatttcgtttgtggttgcattttaccatctgtagttttttttgtttactgacaaacaactaagattttatgaattcatttgatgataaatagttaatcaaatatattattatgagtgactcgatggcgaaagctggtattatcttatggctgctaaagtctacttttagaagaagaaaaaaaaagggtctgttgcattaccctgttgttgcgactctcctacaataactctcacgtggcccgtttcttggtttttgccctattttcacaaaagtaaacagagattttcactagcaaattgggcccaattggagacaacttcatgtggtttgaatcgtatatttcagatagattagacatctagtcttctttgatgtgcggtgaggatcttaagtcgctataacgttgtgaaaaaagaaaagaaaaagtcactataacatagatcgcaactaaacaaataaaggacactatacatgtacgtaataatattcatttattttcaacgacaatgttccctagggtggtaacccaagtatttttcatagatattatacttctagcgaaaagccatcaattgagaaaaaaggcctccacgtttgacccgttttgcctataaaaggattctttaagatatggaccttactcatcttctccgttaaacccatttaaatagttttcattgtccttgtgaaaaatg

SEQ ID NO: 9780 - DNA, 3000 bp, Unknown
  misc_feature (1)..( 3000): cDNA_ID_2687287_gDNA_ID_1972187_Annot_ID_180166 3000 nt of promoter + ATG
agcatagatcatgctaaaatagattttacaataagttcaaaaaaagagaggaagaggcttcgatcagtatataaaaaagttgcaagaaaacgacaagacacaaaaaatcaagatgaacacgttctcacgttgtgctcagccttcgtgttctattgcgaaagtgaaaatgaagaaccttttgtgaactcaattttctgcaagtaagcaaagaatgtgagaaataaaatggacaaaaaagcgtgtggataagactcacacgtgcgtggggtcttggtgaaaaaaagaaagaaaaatcatcttcggtatcttccacctttttaatcttccatctccttaatttcagagaaaaagctacacttcacatgacatatttcagacggctttgatttttgattttttttttttttaatttttgttgattaaatattcatatgtttcaacaacaaaattcgtaacatccaagaaaaacaaaagaaacatgtaaatttaccacagatcctgtttctagagtagtaaaaattgatttgttcgaactagaacactagaaatttattttaaacgtaggttattaaaaaatcgaaaaataacaaatgatgggtacatgcatgacaggtttgtaattttatgcgttggagggtttctcatgaatgtgcatgaagatttgtaagcctatgcttgaatatatgtatacaaaaatatatgtcccttgtccattgtaagtctttttcgatacacatttgtctcgaaatgacattacgatgtcgatattgttcatcatccacatgctgcgtctgcttgtagttgccaatctctatcctgacctaatgtcgttcacattattattatcattaaaatttgtatagtatatagtaaaatttcgaacaatgaaattattaatataactgatttgaatactttagctcgaaacattgttttaacaaaattaaagatatgtaagtgttcattaattattggcttaatttaagttacatgtacatatatgtcttaccaactaaaaaatatatgtctagtcttacaaaaaaatgactaatgtttcaccaaaaaaaaatgactgatgcatgattatattcaccaaaaaaaaaagcaaacaatacctggtagtgagacggccagagaagaagcaatcacattaagggcactgagcgacctcaaaatgtaagcaagagattatcagagaatcttgatttagtgaaatcacattaataatttctgagacggccagagaagaagcaaagagagtatgtttattatttctcaacttgttttaaattcttttatctgggcttggcccaatatatttaaaccaatgatcgcatatgtttagaaattccaaatattgttagtgggccttcgttcagcctatcctaaaaacatatgtttgttgtagtaggtaacaacccaaatcctaaaaacataatacaacaacacccatggcttcctttggtcatcttctcgttaattattcaaatatccacagttttttggacgttaacaaaaaaaaaaaggcagtggaacatacaacgttattcgacaatcttgcacgtaatattacagtacaatccgattcaagacaaactcaaacttcgaaaagaaaattgcatagcttaatttaggaacttaattattacaacacgtcaacacattacaaatcgaaggcaaaccagcaactattttctgtttacaaatcacaactacaagttattgacaattttatcctggaatgataaaacaaaaaggagaatcgtactcattatttgtcacatgcacaaaaatatacatttcacaacaaaaagtagttaaaacaaaaacttaaaaatagataccacaattgtacatataatctcttgaaaatttgaacaatacgaattacaagaatcgaacattcatttaggtggaatatttaaagacgagaaaatggcagcaaatggacgagtgatcataatagcaatgctaatggtggctatggtaatgaacatgacatggtgtgtcaacagcaaaggctttgttaacttaggaattagtcctgaagaactacagagttgcatcaagacttgtattccggaacaatgcatgcccgaggctaataatctgaccgtgtgtgagaaagcatgtcacaaatattgcaaccgacctgctatgtcgttcaagcccaactatgtcgttcctgtagatggaaatgatgttgggtttataaaagctgctttttgcaagctatggtgtgaagaaaactaattctttctttttaatggtgctaaaatttaattaaacctcttcttatcaatgagctcaacatctattattttctttaattggatttggtgagttttaatatgtgacaaaatactgacttgtatatcctaatgttgagtgtgttttgtcatcatcgtattattgatgattttgtttagtttatgccaatatatatttatgttattggtcgtatccccagtgagaaggggtctaaaagtaatttggggatagttggggtaaatatgataagactaaacatataaagggtgtgaatgaaaataaactcttaaaaaaagaaagagtagctcaatggccgtccgatgaaggtttcagttacacgtgtaatacgatgaagcaaccgactcaatattgaaaaaggaaaaaggaaaaggcaaacacatcagtcggcggatagcgccgaccaataatcatcaacatcgttttctttcttcgccaaccaattttagctttttaattaattttttcatcttcttcttcttattcctctgataataagatccaagatcttgttttcttcttcgtatcgtcgcgaaactcgcgatttcttttttgtttttcttcttcgattttgagtttcttccgtttctgttttttatctgatcggaagattctagctttcttcttttttttgttctttagatagtttttttcttactcagaaaaaccattggagctctcgttaagagttttatagtgttataagccatg

SEQ ID NO: 9781 - DNA, 3000 bp, Unknown
  misc_feature (1)..( 3000): cDNA_ID_3033212_gDNA_ID_1972187_Annot_ID_180191 3000 nt of promoter + ATG
cgtccgcttccgttctgcagatctcccacatgttcgaatccccatattataggccttcgcgttatcaacactcgtgtgcggtggatttccctccgtcggccatcccgtctccgccaccatcaccaccacgtttgcggcgttgatcttctccaacgccgcattgaatccgtcaaccatcgcctcaaacatattgttgtaatacaaatcaccgtctatcactaccggtgtattggatttgaaactagcgtaatcgagtgagatgtgatatggatctgacgcgtatgcgaagtacgggtagatattcgtcatgagaggcgaattcgtctctgagagtatcgatgtaatctccgtcatgatctcggttagatctgggaggaatgttgcagcggaaggtggatatgtattggtcaacgcggtcatagctaaaaccgtcgtgacagagattcctgtgacgccggaattcgttagcgcgacgttgacgttttttatcgcggcggcaacaaattgagcgatttctccggggaagacttcgttaccaattgtgatccatttaattgcaacgtcgttttggtaaggtgtaatccaggtggagacgaaatttgttgcggcggctggatcgtgagctagggattggatatcttcgtttcgtggaccaaacgcgactaagagacctgagccacgaagcgcttcgagcatgtctgcgaagggctcgtacatacggattgcgtcgatgttgttgcttttgtatagagcaactgtatctgccggcgttgggagattgttgccgttccggccgtaacaatctccggtgatgtcccctgcaacacctagaaggacacaaaatatagtaatcaaaccgtactcggttattgtttggtttaaaatatttaatcgtttccaaaaaacggagttagactgaaccagattacatccaaagaaaatcaaaccatgagataatgctttttattaatttaaacatagattgattaaataaagttgagtttttgttgttgttattattgtgaggttaattgtgatgaaaacaaaataaatcaataaatcagtttttacccgctgtgcaaaagatttggatggacaggagcataatcacaacagcgaaacggattagtttggaatccattgatgtatggtgcgtgtaaatgaactatttaggagagaattgatacgagattattctattgtgtttgtgtatgtttgaagatcttaatattggtgaatgtggaatgtatttaagggtggtttttttttttaggaagcatgcgtaattactactctaataataataggctctcaagcatgaattatttatccattaaatgaaatttaagtgtacctagttttgcaactgataaactatacaaattcgtgctacagctttgtcattaatggatgatcaaccattttttttttgtttaccaaaacatcatattattatgccacttgggttgggttaaacgttttctcttttggtggtttgcgaaaactctttagatcataggacttactcactatttttacattgtgtgcataaatacgtaattacctctgaagaaaagttacaggtgaagttcatcccctataaaaatgaagaactgtttggtaaaaacgttttaattaatcaccttcaaatacattctatcaatcggcgatatattaagaaagttaacaagttattaatttgtttactagatcaagatttcaattgtttactaatttgtcgttttgtgcaagagttatgcttaggtattaaaaatcaagacaaaaatttcattctacaaattgatttccacaagttttgaggttccagcttcgtaaatcattaggtattaatgcggtagttttatcatttcacaaaaaaacatttgaaataacattatacattaatacatccataaataattcaaacatcatgatctccttaattatatcaattaatctagttttttttttttttgctactcgatagttttaaagccaaaacattgtaaacaacggattctagtttaattggtgggcacaaagagtcattttcataataatatagaacatgtacatcacatgtaattaatacatacattctctttctgccaatcaatcataatcaaagcaatatttttttaaaaactaatatagagcaaatctaacaataaaaaagagagagtggtatcatcatcataaacaataagaaggctccaaaaaacagaaagttaaaaactaaaataaaagaaaatctaatttggatctaaatgaacttctgaaaaaagtaatgacctaatctccaattactacaaaaaagaaggatcaataaataattaaagaatcgagaggtaaaaaaagcattatccgtacgaatgaattaacgtggtcgtatctcgtgagtcatccaacgagtaaaaataaaacacgtgtcgtaacaaaggaggtgcacgagtactagcctacgcctcacacctctctatcatattctcttgaataaaaaagctgaaaaaataattaaaaaaaaattctggcaaaaatgaaccgttcctctgttgcctgcaaataacgcgaaaatctctctgagaaaaaataaaaataaaataaaagaaaccgaaccagtcgtgggaaggatccgaaagaagatgaaccagagaaatttgaagaagaaaccctaatcttagcctcgcttttattctatcttcttcttcttcttctttcttcgttcttaatctgagaggcgccaagattggtacgggcggagctaggctagggttaggattttaggctcgggaaattagggttagggttttgattttattggctgtttctttctcctgtggtttgggaggtgaaattgaaaggcggagttgtattggaggatttgggattttagggttagggttaagtgttttctcgttttttcatgggaggtgtgggagtttatggtggtggtttgtgtcggttatgaacgttgaccaatgccagtggcggaagaagatg

SEQ ID NO: 9782 - DNA, 3000 bp, Unknown
  misc_feature (1)..( 3000): cDNA_ID_3033216_gDNA_ID_1972187_Annot_ID_180190 3000 nt of promoter + ATG
tcccaggaaaattcaagatgggctccatttttttcaagtcttctatatacacctcaggcatccacagagaacaaaacagatgagcaaactccgccggcccaccattctcagtttttgagagaacaggtttaaggatgccacccttttttggacaaagcaagcatggtctttcagaatcagcacgaccattctccagctcacaccaagagcacaaccaaggtttacctgaatcttcaagcaggccatagcattttttgtgaactgtagctttgcaggaagtgcaaacaatcaactgatgatgaccagtgcagcaaaaatcacataacaacgcattcccttcacaaggagccgcaaccattaatttccccaaacctgcatcactaccaagaagcttccgctttttggagggcctttctgatgtcaacaaaatcctatttctattacctaaaacccattctaaactaccagaatagtctgacccagaggagattccattccctacattgtcaacacccattggcttaacaacatcctcttcttttcttactgtgccttcagatatatctttagtgagaaggttcttaatttgttccagaacaacgccatctccacaaacaacatcctcattctttgcactcgcatcagtttccctctgttgaatatcaatagaatcgtattccaccgatggaatggaaaagcaatttctagaagataaagatcgtagagatgctaaatcagacaaagtttctaaatcaggaaaatctaagcgcctaaagtagtcctcatgttcaagccagatactcccacttctcaacttatccccttgcctagaagacttcttcttcttcttatccgcaccagaatgagacttcttatgccgtttcttattatccgaatggttcttcagcaaattagctaaagcaataggtagagtaggcacacttaacacagaagtagaaccatcttcaggaacatcaaaaggagacctctcagatagatttttgctagcttgagctaagaaatcgatttccaacgaacccatatcctcatacccattctccttatctaacgcaaccctacgaaatggtcgataaggcttctcttcagcaccacaacctccgtccactcccctacccatcatcttcttccgccactggcattggtcaacgttcataaccgacacaaaccaccaccataaactcccacacctcccatgaaaaaacgagaaaacacttaaccctaaccctaaaatcccaaatcctccaatacaactccgcctttcaatttcacctcccaaaccacaggagaaagaaacagccaataaaatcaaaaccctaaccctaatttcccgagcctaaaatcctaaccctagcctagctccgcccgtaccaatcttggcgcctctcagattaagaacgaagaaagaagaagaagaagaagatagaataaaagcgaggctaagattagggtttcttcttcaaatttctctggttcatcttctttcggatccttcccacgactggttcggtttcttttattttatttttattttttctcagagagattttcgcgttatttgcaggcaacagaggaacggttcatttttgccagaatttttttttaattattttttcagcttttttattcaagagaatatgatagagaggtgtgaggcgtaggctagtactcgtgcacctcctttgttacgacacgtgttttatttttactcgttggatgactcacgagatacgaccacgttaattcattcgtacggataatgctttttttacctctcgattctttaattatttattgatccttcttttttgtagtaattggagattaggtcattacttttttcagaagttcatttagatccaaattagattttcttttattttagtttttaactttctgttttttggagccttcttattgtttatgatgatgataccactctctcttttttattgttagatttgctctatattagtttttaaaaaaatattgctttgattatgattgattggcagaaagagaatgtatgtattaattacatgtgatgtacatgttctatattattatgaaaatgactctttgtgcccaccaattaaactagaatccgttgtttacaatgttttggctttaaaactatcgagtagcaaaaaaaaaaaaaactagattaattgatataattaaggagatcatgatgtttgaattatttatggatgtattaatgtataatgttatttcaaatgtttttttgtgaaatgataaaactaccgcattaatacctaatgatttacgaagctggaacctcaaaacttgtggaaatcaatttgtagaatgaaatttttgtcttgatttttaatacctaagcataactcttgcacaaaacgacaaattagtaaacaattgaaatcttgatctagtaaacaaattaataacttgttaactttcttaatatatcgccgattgatagaatgtatttgaaggtgattaattaaaacgtttttaccaaacagttcttcatttttataggggatgaacttcacctgtaacttttcttcagaggtaattacgtatttatgcacacaatgtaaaaatagtgagtaagtcctatgatctaaagagttttcgcaaaccaccaaaagagaaaacgtttaacccaacccaagtggcataataatatgatgttttggtaaacaaaaaaaaaatggttgatcatccattaatgacaaagctgtagcacgaatttgtatagtttatcagttgcaaaactaggtacacttaaatttcatttaatggataaataattcatgcttgagagcctattattattagagtagtaattacgcatgcttcctaaaaaaaaaaaccacccttaaatacattccacattcaccaatattaagatcttcaaacatacacaaacacaatagaataatctcgtatcaattctctcctaaatagttcatttacacgcaccatacatcaatg

SEQ ID NO: 9783 - DNA, 3000 bp, Unknown
  misc_feature (1)..( 3000): cDNA_ID_3033187_gDNA_ID_1972187_Annot_ID_180172 3000 nt of promoter + ATG
cgaaaaaggggaagataatggctaagaaccatatgggtacaaccacgggtaatctagccatggctcttttgaacatgctcttcgtctcatgcacacctatcaatttctcccacacaaaatataacggtgtagacgcgaatccgaacgttataaattgatgaatgagcatgaggatcactgcggtatctctaaaaccagtcttagggagaagagagagcgcattggaatgagttagtagcttatcgccaaacgcccaataaaccgcagacgcggatggtagcgttagcgttagtacatatatggtcgctagtagatatatcgccttgaacttttgcggtttccacatagcgtgcattatctccctattatattttttcaaatttccaatacataattagttaagccattaattaagccattttatttttccaaacaaaaaaaaaatacttacactgtgacggcgtggccaccaaaggtgtagagaatgttggtggctccggtgaagtaaagcaccattgtggttggaccagagtgtttcacatcctcagccttttttatatgaaaaataaatatattaaacaacaataaccaggactatatgtctatatcttataataatcaaaacaagatttgtgttaattataatgacctggccatgaaggagtgaagcaatggtgagataccaagaagtgtaagtggtcatagcgagtccgaggaatgaccaaattctataattgtggaaggaaggaataaaaacagttgttgcacagcacgccccaaatatgtatgtccatgtcctcttgtccaatttgtcattaatataatatatattgctgcaaatcattttttatattaattaattttcaatatgaaaaaaccatataataaagaaaatgaacattgattattaatttacctagcacaagcaatgagctgaataacagatccaaagagaagaaaagtgcagttaaagatcaatccaaggttcctccaatgtttccccaacaatccatctaacacctcaaaccacttttttacacaaacaaaaaaaaacaaaaagttaaaattcaataataccaccaaaaaaataaaaaattataacgagtcacaagaattagaggtggaataaaacctgaataacgtggttacggaaatcgaatttttctcgttctttacgagttcgatattcaacgtaaagaacactaatgagataagcagtccaacttcccattaatccataaaagagttgaaacaaaattcccgacatcatcccaagttgtgagaacgagtatggtaatgtcaacagaacttgtgccacctgccatttttataacaatttagctatagaagacgatacatacacatctatatataagactaaatctgtgggaagtacatacctgatttgaagcacaactaaaccaagcatcgtagacagaaccaccatgccagaagaaattagagagttttgttttagttgaagatttcttgttaccacttatgttttcttcttccctctccatttctaagtaattccctgcgaccactgtctctattttctctgccgccatttttctcttcttctctcagtttctttagcttctttacttccactctttaaatagactagtgaaaagctttttcatttatttatttgttttatgggttttgtttcctttcttttgctctgtgtgcaattattgagtaacgagtgtcgggggacgaagtctttagtcacagctcacgagttgtcatggggatatcggtttatgattggttggtgactgagttatgtcacctacttgtgactgttactgttttcggcgagcgtggcgttgtttttttaatgggcttgatttgattgttgggcttatgggccatatttctggagcattacacgaacgggtaggcccggtttgagattgttaattatatattgaccccgataatatgcaaaaaaagagggttagctaattatagattttaaagtttaaagtagtgagagtagactaattgtaaattgaaaatagaagtgatgacaatgatgttttttttttttgaaagaaaggctaaactattattatcattaacaattatttgaatcatgatgattgtaacaactagaaacaatgaataaaacatattggtcctttcctccttcttgtgatgaggatgataacgatctttatgtagaataatcaattatatttctaagtttttatgttttgtccgattatattacatagctgttacctggaactcgaaattacataaatttatgcctttgtctaccatatggcatcgcacatccaaacgcttgatttagaagtagaaaaacttggttaaaagagaggaagaaatagtgatttgtgaggtaatcgaggattggagatggatccaatggaaagaatgattgctaatcaggtgggattagtggtaaacataattaccacacgtgtctagctgtctaagctttatttaactcactaatttcttagaaatgtctcctttttagccccatacttttacaatggatcgaattattaatgagaaggtatcatcattttagatctttatagctttttaacccggccaaaatggatggcagcggaaagaagactcatcgccaattgacattaaaatatgcattttcaaatgtttttttttttttttttttttttgtgattcaaccttatttaggctattgagatatctccaaaagatataatattgtcgtccctaaatagagcagatattcagatatcattggtaataatactgaaaaaatggcgagtcattgtagttaaataatttgacatcttgaaaccaggaactcgattctactggatggttacagatggttcccataacgacaaagattgtgagatttgttttgattttcatcaatttatcttcgtcagaaaatctgtttaaccaaaaaaaggatcatgactatacaaatttattaatggtgtaatattcaaaaagcagaatataaga

SEQ ID NO: 9784 - DNA, 3000 bp, Unknown
  misc_feature (1)..( 3000): cDNA_ID_3033181_gDNA_ID_1972187_Annot_ID_180176 3000 nt of promoter + ATG
cttttttatggtgtggtcattagcaacatacaagtagaaatcaagctccttgttaatgaatgtggtgttgtgaatgatgtcaggaaacgtttttctgaagcacggatctgaactaagattgatcccgcgtgatagagttggagctgtgtttgtgatggatccatagatgatgtgtaagcaatgattaaaaactcagttccaaaaaaaacataataatatactgaaatgcttatgtacaacttcgttgaataaatatgtaatcgtcacaattgaagtgagttgaatttggtcaagttatatgtctgttataattcatatttagataacgtatgtgcactaaaaaagagtatggatctctctgtatatgctaactcttgtcaatataaatatttatcttgtaatatagtttttttattaaaatatatttttaacttttattttattttaaagttaaaactgtaaggttttttatattttttaaataatattttggataaactatttttttgaagtgttttaagttttatattttgtgtagactttggatacaacatccaaaactaagcggtgttttagatttaatatgctttacatataaagtttttaaaattcgaaccaaaaacttgaatattaaatttacataataataggaaaaacaaattgaatgtttgggaatcgctaacgactgactaaatgatggattcaaatccggttagatttcataccattatgtaaatttagtatacacagaaacaaaaaaaatttaaaaaacatacacaacgaaaaaagcttttaaaaattcgaaacgaaacataatcaaagttttaaaaactatttttaaaaatccgaattaaaaacttgaacattaaatctacataataataggaaaaacaagttgaatatttggaatcgctaacgactaatgccggatccaaaaaccgattagatttcatatcattatgtaaaattgacattcaaataaataaaaattgaaattaataatatatataaaaatttagtatatgattagggtttaagttttagggtttatatatattaaaagctattaaaaaattatgaagggatagaaattgacctgtttcttaatgggtaggtgaatgggctttttgttgggctgaatatgagaatccaatccaatctcctccaccatcgtgtctgtcaccatacctcctaaaccagagcattgaagattcgacgtcttttgatgtcaaacaaaacctcctacgacgaggaagagtgagagaagatatcaagagacgaagggagaataagaattagaagcatatcttcttccaccacgccacgaagtttgaagatgaaatagaagcacgaatcgagaaagaaaattttaaaatcatcgtttgacgtttttggttggatacttaagaattttaagaagtcatatttactaaaagtcaaacgccgaatgtaggaagtaaaatatacgatgtataaatcatacgatagtggttaaaatatacgatatacgataatgattgttattaacccagagaaaaatgcgctcctctacggaacctaaacgctttaaaactccacgattgcaaaggataggatgatagtgatgagtatttaacaacctaattttataatcgatttttaaaaattttaaaattccgtaattttgtaaaacgcagacacaattatgagtatgtcacaaaacaaagctgaaacagtgaaacgaaaacagagagctttgattttctttataaaaaaattcacctaaatgaaatctacttgctgccagaaacagtatttacataagaaaacgaaacagtcatgaacaaataaaattaaaattttatacacacagtctcggctataaaacagaacaggggcaaaacagagagatcatttgtggaaacaaagcgtagcttatctagacaaaagcatcaatacgtgaaagtagctaatctagatacggagcgtgtgtcaagtattaacaatattctatatagcaagcaagataagtaactaaactctaaaatgtacgaattcgtctattcgaaagaaactaatataattaggaagagatcaatcactaacgaaaacatgaagattataacggaacaaaaagagatgggaacggatcttacggagttcggttttaaaatcagagttggatcgtcgtgtttctgaaacagtatcttcagtcctccggggaaaataactgcaaaagagacaaaagcgattcatcactagctcgaactaagaaaccttaaagatcaagagaaaggatctgctatttcagtggagtttacctgaatgattgttcgagcagagcatgatcctgactgactcatgagtaggagtgaaggaagaaagagagaaacttgaccgagagatggtgacgacggtgatgtctctctctcattatcttttctatgagcagaagaatagttgaaatttgtaaagagaaggaagaaatgtgttgttggtaatgagattgatagcgtttaagggagtatttataggaatcttcaccaacggctatcttcttacgaaaagcttcaccaacggctataataagttacaacgttcgactgtcttctcattgatttgacaaaattagccgttgcattagtattactgatttgtaattttgtaaaccaagccaagaaaagagcagtactatgtgatgggccaattagcccaaaaacgcacatagcgaaggcccaatggaccttaaatctggtatcggattgaattctaagaaagaaggagaagcggcaataaggagttcgaatctcaaacaaatttctgggttttttctttcctccaaaatttttaaacaatttctgtgtctgtggatttctacttggacggcgatggcgagaattggggctaaacccagaaattgaggatttgaattctgctgctgcggcgtctctgtggtggtttggtttctcgtttctgaaaatctacggtgtagtaagtcggagatgcagttgagatttagca

SEQ ID NO: 9785 - DNA, 3000 bp, Unknown
  misc_feature (1)..( 3000): cDNA_ID_2034611_gDNA_ID_1972187_Annot_ID_180178 3000 nt of promoter + ATG
acataacaatataacatatcattctagaatgtcttatgattcatatttttacttgtaaatcaggatatttgtaagttgtcttaaaacccatgtttttctgtcggagaaatataaacagtcagtaaatttcagcaaaatttaacaagttcaaattatgtttttgaccgtcgcacgtgtgcaacaaggccattgcacgtgactagtcagagaaaacataatcttcgttaggatcttgacgccaggccgccccgaaacaggtggttcgctttagattttgatgacgtggtttcaatcttgaccgctcaagttttcaccacgtggcaccgtctatgtcgttggattcttcgtagacgacggtattaggtgggccgtgacagcccaatgttcaaaagtgggtccacatatgtgccagatcagcttgatcattccaactgtagaaagatgtttataaaaatataatgacgcgtaattagatttaattatccgtaattaaagagtcatttgcctctcttgtcatatatgtctttaatttcttgttcccaaatcatggcgaatcaaaatctacgcgataaattatttttaaatgacaacgtcgcttggtcatgcgatgatattgatataatataagtatatagtttcctgaattattaagatgtgtattattatttactcgaattaaaaaacacaatcatttgaatctaataaccaataacaggctattgatatattaaattaaatagatctatctgacaaagtgatatcccaatcttatttgattatttggtgagagagaccaatgcattgtatatagtataaggattaggctctaataaggatcttcaacgatctctttgttatgcttttttacgttgaataaccttcgtactttataaaacatgaattcaatagtaaaaaatttgaccacagtaagcaaaaaaagataaaacggatacaagactacagtaatcctagaagaagcctcattttcaaaacactgttttttttgtataatcattacctcgtgctcttcaatttaatgacagcttcttatatgattagatcgaggcaaaataatgtatactctacaaaagaagtcaataactttccattagattaattgggattcaaccatacgactgtacgtgttatgtatgttacacttctatattcgtatagtatattaatcacatattcacacgatatcaaaatgaataactagcgagttaatctaagatagattcaacgaattaaattgaatatcaactgtagaagaactgaaactttgaataccgaccgacgaacgtgacataataaaagccacacagtagaacaatttcttaaaaaaatatcatcatgtggttacaaaacattatcacctggttcattacttaatttcattcgcgatgacgattatagttgatggtcgatcacagttaatatacagatacaattaatttggattagtactagtatagtttttttttaaagaaggagataaacataactaatcatttggtcttttacgtgggtatcacattaaatccatacaacgtagtgcacgccggtacaccttttctaaaatattataaatatatttaagaattactatagtctatataggctcaatcaaatgtgtcgatcgcttgagtccttttgttttttaacgttactaaatagtactagtagtaaattcactcttacaaaaccgttaggtgaatttacctttattctaacaataactatagtttaaacaaatttcaatgatgaaaagcggtcgacgaagtttctaactgcaatttgcttctgaaaaaatcagagtaaccaaaacagaattcgttaatttttacacgcacgcttaaatgcgtgtcgacgagtaaacgagcacgtatacatcaaacttgccggattttttttgttttgtgatgagttcacatgtaaacgatagtgacctttttgttataccgaaatagatcatagaccaattctcaaaccaatctctaaaatggttaatggtagccaatatgtcacattcctagatttcatatgttcaacttttaaacgctgttaacatataacgtattcatattttcaagttatcaacaacgcaatatacatgtttgattatttatatgtggctaatcgtgttacttctttttttttgttctaaattcaaatatgaagatttttagtggaaagaagatattggcccttgacaagttgtttatgatctattaaagttttgtttttccttttaattgaatttcctctatgtttatcacaaaataaagaaaatgaggagtaaaaacaaattcagcagaaaatagtgaaacaaatgattcatttccatatataaccacaaggaaaaagaaaatttccctattctaatagttttgttcctcctaattactctgattacatatatttaaactaaaactgaaaagtacacatatagtaatccggtcaggtgattactgtctttttttcaagattttggaagttttacccattttaaagaaaattttgaatgctgttctattatagtattaacatctgtttagtgaagtcaaaacattggtcataacaatgtgattaaagttaacatctgtttagtattaacatttttagggctggtgggctttttgtgtccacttcccgatggttactgcaactttaattgaattttactattttaccctacccaatattaaagctttttatttatttctctgcttctctcttttgctctgtctctttatcctttttcttttgatgcttcattctctcttttcttttttttcctctgtagcgtttctaggaatctctctccaacgtttaggtttcttctcagatttagaaagtttcttctctatctgaagaattttcatttcgatttcgcttcttccttcaccctaatccgtaatcgaatgccatttcgaagattgtgttgaagagtagagaggaagaagaagactaagaagctagggtttctctgatgagtag

SEQ ID NO: 9786 - DNA, 3000 bp, Unknown
  misc_feature (1)..( 3000): cDNA_ID_2034597_gDNA_ID_1972187_Annot_ID_180186 3000 nt of promoter + ATG
ttttcttatttgtctgtagtaaaattaatttcaaaaacaaatctaaaatggtaaaacatatgaatttcgtttagtttagaataatttttttttttttttggaattaaattattcttggggattcagtggtttaccgttcatgattcgtgatcacgtgtaacaattgccaaatctccatatcaaatttagtggtcgccattactctagctaaatgaggacaagcttgaagcttatatacgcatatgttggagttaagctatatgttgccgacgtcaaaaagaattaagctatcttgtcaatttagttgtgaattatggggcagaaaatcagaaaacagatatatattgtgcattctctgattcataaaaagagtttttcggatcttatatatcaaaaagggtcaaatactcctagatctttgtagacaagcatttaatcaaaaaaagtaaattaatatgtgagaaaattcttgtatttgatgaacaagtggacgcatcacaaatgaatgcgtagtctttggactaaatttcgagagcttgaaattcatttcacctcccatttgcttattagaagccaaacggttttgaataagctccgccctttccataagcacatgcagcttacttctaagtttccggcttttcagtgagctcacgctttcatttagcgacacatggccgtcgacttcataaattttgaggtcacgattttggtgttaacttcggcgttttatccatttttcttggatttttttgtgggttcattttggtagttcgggtatatagttcactttaacatgacttgcaagataatgcgctactgaaaatgtcgttatgacatgataattataaattctgtgcaaagttgattattacttactagcataaaggcttaaaaccaaaattgactcttgaatttatttcattacaccggatgcaaaagataaaagttagcgggtccatacgttcttacacatgtatcatttataattaataatctaataatcgaaaatccattttagtagaaaacaaaacaaaacagaaaatcgaaaattcaaacaagtgacaaaaataatattacgacccgtccctttgtttggttgccccgttcgtgtatttgcttggccgttggtgttcccatgcgccacttagcctccaaagtcttctctctaaactccttttttataccataatctctgtttagtttatacttaattgcgctttatcttcttaatcgtcatgtaatccataaaaatcttcgagatatttactttctcgacttaattaattaatacaatttctctatattaaactagtcaacaatatgctcaatatcatatcatacatatatgttttagcccacaggattctcactctccattttcttattattacactgacgtctaatttgacgttgattttaagaaattgaagtcaatatagacaaaatctatctgtgaatatgctgattaatacccttttatgtaatatgtatgtacacgtgatgtacttttaatcttgagtcatacatctatgatattttgcattcattaacatacaatttcccaaaactatgagcaagtttacgtgttacttttgtctttaatcatcattcaatattatcgaaaagttcgttgccatatcatatatttgtggaataaaactaggtaatattgttcttgttttacattaactaatgcatttttttttggggggcacacattaacttatgcatattccaaataaataaactattttgtcgccgtgacacattgataaaaaaaacattctagtgcttcgattgaaaattcaagtttctccaaaatttactctccgctgcatccgcactttacaattgtaaaagagaatacccagtattttgcatagacaaatctattttttttttttttgatgggtattttttatatctatgtcgtaagtacgttacgttagctagctagaacattccctagcaagaactagtagtgagtgaggaagagaaaaaagaactcagcattgcttatacaagagtccatgtttgtggatccaagggaaggtttatctcagctttttttcctcaagagaaaggtgtatcttgcccgtggttactcgattgttgttcgtattcaatttattaaattttatagcttcaagggaaggcatgtgtttcttcttttttaagtgcaatatttttgtttattacataaagtacttcctggaagtttcgtatagactccaatagggtttctctgacttttccaatttcagtgtcggagtacattaactctaaagaaataaacatgcatgaacatgctttttcatattctacatatattttgcagtctataattggtttttccactgtggtttacgctaaaataaataatatgttcttgttaaatggccacaaacaattccgacaccataaatgtgaaacttttaacaaaactatattatcaataactagctaaattatgatcaagaccagtaaacatttcaacacttaacgtaaagaaatgaattggctattgacgatataatttttttccatagaaaactatgcatatgtttgtcacaatttttttctttctttgtattaaagttaagtgttgagtgagagaggtatcataatcatagtaccctcccacgatattgcccacggatcgaatccttagacccgcattttatttttaacttcatatcgcattagtatttaaaagcaaatatatatatcctatgaaataaaaatctcccgccttaaaggccaaaccttaggatctaggtaggtgggtccctctactcagcgaccacacaaactcacatttgtcaatttctcctctctcttaatttattaattattttatttactcatctctgtaacgccccctataaatacaacctctcatttactcattcagaaaccaaaaaatttcacaaaccaaaccaaaaccaaaaaaatagcttatctctctcttatcaccggttcaatcactaaaccatg

SEQ ID NO: 9787 - DNA, 3000 bp, Unknown
  misc_feature (1)..( 3000): cDNA_ID_1031898_gDNA_ID_1972187_Annot_ID_180184 3000 nt of promoter + ATG
tagttacctttaaaaccatcaaaaatatattaatagaaaaggaaacttcctaaaagaacaatttaataaagtggataaaaaaagataagaaggtaggcagaagaaaacgtatggccgcgactcgtaacaagggacgtcccgaccactgcggagacggcgagacgctgactgattttttctttttcttttcctaaagaacgttgtttcgtgcttacaagggtcaaaaccatatccaattgttctgcctattattatataactaaagatcccctcttgtgctttgtctttattcgtgatatataatctaacttaaattagttctaaaatatatatgtcctacctatgtttctactgacctcagtccctagttagctatatggacatatgtgaaaatgacgcccaaaatttgaagagttcctcttcctgcaactaactcttatcttactcattgagctatgttaaatattgaatgttggcactctcgtattaaatatgccagttgcacctagataaaaaaacatgatagacatttagtttaaaacttgaaatgttatttgaactctttggattacgtggattgttgtatggattaaattttgaagatatttatatattgaagatgtttatatatattagagtttatatagcagaaaatattgatgtagatgttgtccttttgtagttactcttttttgttgcgtagtcctttctcctcatcctcctatgaagaaaaatccaaatagtttaaggaaatttttgtgtaattcatagtctttttcgtaaccacagttctatgtagctatcgtcatcatattcctctttgcaacaacaaaaaagatcgtttttgtaaaatttagtagggcactaaagtcgtcatttgttgtcctgtcgaaatctagcgttctgtcatccacaaataagttgtttgattcgagcttccaagattataatcttttttagatgggtcatgaagatttctaacttcgtatacgagtgtatccatataatttctaacatatacgtcttgtttttggtaggctctgcgtcttttgagaccacccccttgctaatgttttgttgcaccttagacaatccataatacgttacgtgagtcgaagttgcaccaaaatggtccaaatataatttaaatttggccacaaaacaacattttacaaacaaattcaacaaacatgcatcgtttcaaattttatttattcaatggcgttatttgttcattgtaaatattctgtttaactcactgacgaattttttaatttttcaaagaagaacatttttgatataaataacattttatggaaccaccggttaagctcgatgattttgagttttagttttgtcgttttgtgaaatcattaacgacctacatttgatccctcattactttaataattaggaatcaaacatgatgattaagttcaccaaagacgtctcttatggctattaagagtcagacgcaaggatgaccggggtcattaagacgtcttatattcaaccattactccactaattgctaattaatcagattaatttgtttaatacgataatgtattttgattaagtagctctcagccaacaggcaaaggataaattttggattattcaaagatttgtgggcttccaaaagcatagggaatggctccaactacattgggaaatatattatttaaatctccattcccatttgccacagtcgttggagtttattttttttttccaagtggaagaatcaattataattgtcggaatttctaaatcctacttgttggaaaacaaacccaagcaaaattagtttagaaatgtacggaaatctactatagaattatactaaacatatcaatatagctttgactttaaaattaaaacaattattgtgggcaattagttagatattttaccagggaaataagcagcactgttcatgcactctcttcttaattactatactttgaaagaacttatatgtcactgtattgccagttgccactaatatataaacaacatttcacttgttgacatcgctgtaaatgaagtttggaacgaccctcttaacaactaatagggttaattaaccactaaatttttccaagttgtcattttgtcttaatgtgagacgtaatatctaatacgtcggtctaacctaagagttggttccgatcacaaatttttgagaagtacctttcaataaaaaatttgttgttataatttcaccgtgttaagtaaaaacttaattaggagctattttctatttgatgtgaatttgaaaatgtcttcataaaaatagtatggaaaagggaatgtaattaatatagaccacagatacaaaaagatgtcccgtgcttaacacgtctgagtcattgtcgtacccttttgccaactttttcaagtttctttcgtgaaaatgactacactttttaaaataaattgacagatgattgttgcatgcatataatattcgcaaaatgccaaattctacccttaaccaaataatgtggtaatggatataaaatagttaacataaacaaaaatttggaaattttgaaaaatagagagtaaattgattttttttaaaaagtttgaattgaagtgaaaaaatatataaataaaaataataaacctgtagtttgatatatatagttagatagctcaagtttgagtaacttgaagtcttgaattactttatatgtttttctcacagattatattattttcgttctatcccaagaattgggataatattctctatattcgaggcctctctcttaagaagtcggtgtataatcttaagcccttacttgacacaaggcctctattaaaaagcccaataataatttttcttttcaaagcccaacacgtcaagaggagaaagaagtgcgtttgcgtttggattgaaaacgtggcgggcggttggaaactgaatcttaaacccttcactcacattcatcttcaccgtcaaatctctgaaactgagcttcgacgatg

SEQ ID NO: 9788 - DNA, 3000 bp, Unknown
  misc_feature (1)..( 3000): cDNA_ID_2034624_gDNA_ID_1972187_Annot_ID_180170 3000 nt of promoter + ATG
accagaaccatcgctgcatactaacttgttgtcatggtacgtgcacaccggcttcttcctacacacaattcaaaaacaaagaccaaaaaatataactttatttctgcatttgaattacttttacttttgcatatgaaattaacaaaggatgaataaagtatatcatgtaaatgtaaaagtcatggtctagtatgaatgaaacttgattagaatcataattaaagtaatcatgagatgttgttaaaaacgtaaaaaggacaaacctggaggaacagaaagaaatgacgtaatcagaggcagtgcaagtcataatactggtcggatcatcataagcataactataagcagtaggacaagcttgtttaaagatctttgagtaataagttggttgacacacaactgggttcccataaactcctctacaacaatactcatctctatcaaacacatcacaagcactcctacacgatatgactttcccgtttgatttcactgcgagctcctgcggacaatgtggcctcaaatcagctacgcaaccggcgacgctgcagtttccttttccgttcatcggagtcaccgacatcgggagattgaatccgtcgacgaggctcacgtcgtagaaatccaatgcggctaatgtgaattcagctagtgaagctggtggttttccggaggctgaacattttagagttgatccgcatgaaccggtttcgcatgttccggttccggttgagtcgaatttacaaccggttcgtccccaaattctgcctgaccagcctactggtgcgtggaatacgatggattggcccggtttgagctcgaatcctcctccgttgaagttttctcctggagttatcgccggccagatcgtttggtcacatgagtttatgatcgtgaatactcgagctgattctgaccattttgttcctgtggagtaattcacaggagttctaatcgttatccaaaccctaattaattaatacctagacaaggaaagacgtttaattacgatcgaaaatactataatgtttgaattattttacctgataatatggtgagaaagagtaacaagatccttggtgacaaaccgaaacgaattggcatctttactagaaaatattttaggatcaaatgtaatgttattttctgatcttgaagtgagactggctttttaagggaggaagaaagaataacttgcatggagagtctatcggtacaattataataatcggttgtagtactatatgtgttttcaaataattaaggttccttgttttggaatatgggaaagagttagttagtgttattcgtttcctgatgtttcatgcaagtattctttgggatgctgttaaggtaatcaaagtccaaatggccaaggatctatactgtatgtggctttttatctgtctatttgtatcttctattattgaatttggataatcttgttgatattgattattttagccttcatgtcatgggtcaattcatctacctactgatatattaggcctaattaatgaatcatatggcccatttatgtcgaactcaatctcaattgttcggtccattcttatattctgctttttgaatattacaccattaataaatttgtatagtcatgatcctttttttggttaaacagattttctgacgaagataaattgatgaaaatcaaaacaaatctcacaatctttgtcgttatgggaaccatctgtaaccatccagtagaatcgagttcctggtttcaagatgtcaaattatttaactacaatgactcgccattttttcagtattattaccaatgatatctgaatatctgctctatttagggacgacaatattatatcttttggagatatctcaatagcctaaataaggttgaatcacaaaaaaaaaaaaaaaaaaaaaaacatttgaaaatgcatattttaatgtcaattggcgatgagtcttctttccgctgccatccattttggccgggttaaaaagctataaagatctaaaatgatgataccttctcattaataattcgatccattgtaaaagtatggggctaaaaaggagacatttctaagaaattagtgagttaaataaagcttagacagctagacacgtgtggtaattatgtttaccactaatcccacctgattagcaatcattctttccattggatccatctccaatcctcgattacctcacaaatcactatttcttcctctcttttaaccaagtttttctacttctaaatcaagcgtttggatgtgcgatgccatatggtagacaaaggcataaatttatgtaatttcgagttccaggtaacagctatgtaatataatcggacaaaacataaaaacttagaaatataattgattattctacataaagatcgttatcatcctcatcacaagaaggaggaaaggaccaatatgttttattcattgtttctagttgttacaatcatcatgattcaaataattgttaatgataataatagtttagcctttctttcaaaaaaaaaaaacatcattgtcatcacttctattttcaatttacaattagtctactctcactactttaaactttaaaatctataattagctaaccctctttttttgcatattatcggggtcaatatataattaacaatctcaaaccgggcctacccgttcgtgtaatgctccagaaatatggcccataagcccaacaatcaaatcaagcccattaaaaaaacaacgccacgctcgccgaaaacagtaacagtcacaagtaggtgacataactcagtcaccaaccaatcataaaccgatatccccatgacaactcgtgagctgtgactaaagacttcgtcccccgacactcgttactcaataattgcacacagagcaaaagaaaggaaacaaaacccataaaacaaataaataaatgaaaaagcttttcactagtctatttaaagagtggaagtaaagaagctaaagaaactgagagaagaagagaaaaatg

SEQ ID NO: 9789 - DNA, 3000 bp, Unknown
  misc_feature (1)..( 3000): cDNA_ID_3033189_gDNA_ID_1972187_Annot_ID_180168 3000 nt of promoter + ATG
catatttgtggtggtttgggtattcgtagttgggttcgggtttggaggatgggcaagtatggtcaactttgttcgccagatcgacacttttggtctctttaccaaatgctaccaatgccctcctcacaagccatgatatacaaatttgccattcaagaccttctagaaagagagtttcatataagggggttttgatttcgagatctaatatatataagttactacatccaatttttttttagtatttattaaaaatcacatctctttgtaattgtttgacgacaataatcttttacctcgggtttgtttaatttgttatgttgagttatttttggtaaattgggttttttttgttccttagttaaggtgtgatggctatcttaggccaaccctattattatttagtgttcttctatagctcaagaaagtttcatgtgtgttttgtgtttaatgatctcgttattctcttttactgagatttaatttcatcgtcatttgaagtgcactgagtttttgatgaaaattgactataaattctgcgatcagtccaaatgaaatgatatggaaatacatgatttaaaatcatacaacctcgtgcatctatactctatagtaaaataaatttatgtgggtaagattatgagagttttattttagaatacattagattatctttgaagcaatcaaatattgatctaaattaactttttttcttctgaatgtgagtgatcccgatctgaatccatcatgggcaaattagcatcacatcacaaaaagggaaatgaaaggcgtatctttataaaagaagcaaaaggcaatggcaggctctgtgtcagtgttgttagtacataattaggcagactttttacaccaattgattcaatggttggtgcttggtaaagtcaaataactgatcaatcacatatgattattcgtttagttagatcatttttaaataaaaccaaaattggttacaaattttgatagatgtatcacaaacaaaacaaaaataaagatgaaatagtaattcatcgcgatatcatcattgaataaaaacaatcagagaagtaaacatatattagaaaaaaaacttaaagatgcaatagtcatagaaaactctaaaagatcatttaaatgaaactagtacttaatacactgctcttgttagttcatgatttgaactagttttcatatgacgtaattaaggaacaaggtagacaacaacaacaacataagcgatatatcgatatagctcgtaataattaagttggaacaaactcactatcatagtaccatgtctacccgaaaactgacatttgggttgagtttgcgagatggttacatttgactaacaacttcatattattattaggtactatcgaaaatgaaacctttttgggggtcaaaatccaaaaaaaatgaaaatcagtttttaaaaaagcatttaaactcataaaaatatttcatttattgccggaacaactagacttattaccaaaaaaaactgattccgacgacgggacactaaataattcaataggcataagttgtgatagatatataaatagaaattcatgattcagagtgtcaaaagttaatattctaacaaaccttttaagcgcttttatggatttgccaatctagtaaactgctttttgactagctttctaacttccatgctccaatcaatctcatgggaagttgggtcatcactattctgccattttctttacctactaaagatatagacaaaataatacaaaaacaatatggccaaaatgaactaatacaaaaacgttatcataatctatccttgaatatatatttaacctaatttgcttgtgctctgtgagatattacaaaagaagaagttaagtaggaaaaggacgaatttggggataattttggaaaaaaataattaaacgtatggtctaatattcctttgattcaaagcgttatgaaaaaataaatatgtaaatactatttactttacatttaatcattattataaaaaaaacaaatacgtgactactgttttattggcggatactgtatcctacatgcatatatttctataaatatgaatatactgtatgtagataaggtcctattgacattttgcttgtgaattgctatcgacatacatatagctaagcctagtttacaaaaaaataaataaataaaaaatacatatagctaagcctaattaagtacttagttcttaacaaaaaaaggcactaagcacgtatagtttatgacttttttttggaacataaaattccaaaccaatattgggatacaattaaataagattaatataagagttgtatacttagtagttagtacgaacatgtattatttattcaaatcatgatattaaaaatccgacaagatcaaactttaaatcagcatagatcatgctaaaatagattttacaataagttcaaaaaaagagaggaagaggcttcgatcagtatataaaaaagttgcaagaaaacgacaagacacaaaaaatcaagatgaacacgttctcacgttgtgctcagccttcgtgttctattgcgaaagtgaaaatgaagaaccttttgtgaactcaattttctgcaagtaagcaaagaatgtgagaaataaaatggacaaaaaagcgtgtggataagactcacacgtgcgtggggtcttggtgaaaaaaagaaagaaaaatcatcttcggtatcttccacctttttaatcttccatctccttaatttcagagaaaaagctacacttcacatgacatatttcagacggctttgatttttgattttttttttttttaatttttgttgattaaatattcatatgtttcaacaacaaaattcgtaacatccaagaaaaacaaaagaaacatgtaaatttaccacagatcctgtttctagagtagtaaaaattgatttgttcgaactagaacactagaaatttattttaaacgtaggttattaaaaaatcgaaaaataacaaatg

SEQ ID NO: 9790 - DNA, 3000 bp, Unknown
  misc_feature (1)..( 3000): cDNA_ID_3033369_gDNA_ID_1972192_Annot_ID_180206 3000 nt of promoter + ATG
atatcaacatgaagcattaatagtaaagagaataataagtgtagaggaagtgattagtgccttaatgacagtccaattctgatatgcaccaggagaccatggattaggactaacaagacgtcttggtatcccttgaggaacacttttccaaggtatgtatgatatacaagtccacactaccaccattactggaacaccataatctgctataaacccacgtaaccattctgcaatgacaaggataccgatgttcctgaggttcttgcttggagaagtaaatgacttttagacagatttttttggtttttgattcactgtttgaataaatatcaaggttccttaccagcaccaaatctccaagaccttgcttttcggctttttagtccagtatagagaagtccagaagacaaaaccaaaccgaacattccatttgcaaacacccaagcaggttgaaactcagctgatcttggatttgttcttccggggacaccaaactcatccacaatgccctgaaaagtagagtttcaacataaaggaatgcctttggtgcaaatgctagtataagttgtgaatgtaattgataaagaaagctcttttacttactctaatggcttcttgcatgaaaagcatggctattagaataccaaacagttccccagcaagtcgagtgaatcgattgatgaaggtgcaagcgcctaatacagctaacaagaacaacaacagccccgtccacaagcaaacccttaaaaagaaatcatccatgaaaaacaaaaaggacaatgcccctctcataaatttttgagactttaaaagcttttgaaaggaactgagctatgcaaagagaaaaacttgagtttaccatccggtccacgctagaaagagattagagcccaaatccgttctacttttagcaaaattgaacatgaaggtgtacattataacagtaggctctgcaacaccaagaatcaacaatggttgtccaccaataatggaatgtatcactccacataatgcagtcgaaactaaggtttgaacagcggtaatcttcccatcttgttgcaaaagaaacaaaacacacaagttttctgttactctcacaataatcaaagacagattatttgaatgagggaacaaaaagagttatcatataccagtatctctttccaactgttctccaaatgtaatcaccggaatagcggatgcaaagaatatgtaagttgttggtgccagaatcctataatatttttgcataaattaagttactatcaaagctcaagcatcaacatttcctgaaaaatgaatatacctaaatccagctctgagaccactgatccaatcttgcttgtagcagttgagtctccctttgacatctttctttataccctgaaacgggacaaagctctctgcttcgtccatgtagatttggtgtgttcaagttttcagtgtcctacaaaacaacactcagttctgttaaaactcaaaacccaggattatgatgcatgattaagataaagcatgtagtaaccaagataggaaatctgatacaactagaatgatttagattgaaaaaaattccaatagtgtaaccaaaataaacaaagagtaacgaataaatcttaatacccttttaattactaagaaactcagatccgaatacaaatatttgcaggaaccttaaaagaaacccaaagaaatgtcttcaaaagcgttaattgcggaggatgtctttaaaaggagttatgtagatttgataatgggtgatttggcaaacaaaaaggtgagaactttacaacacatttagtacggaaagctcatagaaaaatcaaaagctggcgagaagtaaaaaagtcatgggatctctgagcttggattcaagaatgactgagagagaaagaaagaaaaacacttaccagagacaaatcagctcaaaatgactaaaggaacacaactttagaagactgagagaaaatagctttcgttttctaggcttgacctctctagtctctatacaagagccgtgggagattttttatcagttaaaaactactgctggaggagaaaaaaacaacagtaaaattggattttaaaaaagggaagagagtgtgatgtgttgagatctgatgagaggagagagatgtctgtctctgtgtctctttgactccggtttcagacaatgctcgtgattggttttgtacacttcttccgcctaacacggcgtttaaatgtctcttatcactcttttaccaatttttctataaatgagattaagttaagagtcaagttggttcatttatctcattctcatctcttccaaactaagacatttttagatttttgagtcatacatttttctcggattgatgaattggaatctttttccaaaaacatgtcacattttctgacaatgacgatttacttgatttaatgggtttttagttttttacaaattctttggacgaattttcctaataaatatcttctatttactagctagtggcatcctaatctacagtactaatgggcggtgatttccagcactcactgattagaaaatactagtttgctaaccattttttatagtattcatttttctcgcataatttatactataattttaattcactctacaaacatctttttttttttcttttgtaatacactcttttgtattttattaagatacgaaacacatacatcaagctaaaaaggtcatagacaacaaactagccaaagcaaaacataaaacctaagacttttcaaaacgaaaagcccaactatgaagcccaacaagaagaaaccgcatcagaagagatatcaatcttattcttagcccaacacattaccaaaaagaaatcttattcttagcccaacaagcagagagagagagagactcagactaccttagggatccgtttttcaactttcccccaatttctctccagaaatcgaatcgaactttgttcttcttcttcgtccaagctttagaatcgaaaatcgatg

SEQ ID NO: 9791 - DNA, 3000 bp, Unknown
  misc_feature (1)..( 3000): cDNA_ID_2991799_gDNA_ID_1972192_Annot_ID_180209 3000 nt of promoter + ATG
aaacagttgcgctttgcattctcggggtaagctactagtagtttacacaaacatagaaactatgagatatcacttcttgccttgtcttggttaatccctctctgatggatgtttctccatgttgatacagaccaaagtcatcccagcaaaatacataatgaagacggatgatgatgcgtttgtacggattgatgagctcctatcaagtctagaagaaagaccgtctagtgcccttctgtacggtttgatctcatttgattcatcaccggaccgtgaacaaggcagcaaatggtttatccctaaagaggtaaaacttctcaatatttctcacacctctgtgggctctaatcctcttagagactcatatatggctttctctttgtgaaggaatggcctttagattcataccctccatgggcacatggccctggctacatcatctctcatgatatagcgaaatttgtggtgaagggtcaccgtcaaagagatcttggagtgagttttgtagtttcatcaccatagagttaagatataacgaatcctagatatcataagtgacgttgttcttatgttgtttgttgaaagcttttcaagctggaagatgtggcgatggggatatggattcaacaattcaaccagacgataaaaagagtgaagtacatcaatgacaaaagatttcataacagtgattgtaaatcaaattacattcttgttcattaccaaactcctagactaattttgtgtctttgggagaagctgcaaaaagagaaccaatctatttgctgcgaataaatctctcgagcatgtacgtatgtaacttttctggttctgtttcacacttcaggaagaagttctcccagttaaagacacactggctcgagtatgtcagagtatattggctattatctgtctttgtagattctctcaatcagcatatctacaaacatattcgaaccatagtttataggccaggagcgtgtcaaaggtgccattagtgtcttattcattgtcctcgtaaacgttgttgcttttgttgtatcggggcacacttatccggatttatcgattatgcaattgccctactacatcacattattatttaaatttgtcttcaagtttttatttcgcatagcacatatataaagaaaacgcttcgttcaaactcgtctgtgaactccataaaacttattaaaaaatccgtccaaaaaaatatatagtatagtttggatcgcatgaaaacatatctaaacataagtctttgttaggggtcggattgggcccttctcaagtagttcatcagctcgcccttctcaagaagctcgttagctcgctccacttcgtcaagctcttcagatcgcctttaagctcttcaaactcgactcgtcctcaagctcctcagctcgtcttcaagctcttcccatcactcagcgaccatttcctcgcctagctgtcagctagtcagctcgtccaactcctcgtctagctatcagctcatccctcgtcaactacctgccgacctacctccaatgacggcctagctcacttattctaatatgaactacgtgtggcttgatccctttctaagggtacgtaggcaaccttttacaaggttcagctataaaacgaataaactctattcttcctcggacatcaagttcgtcttccggcctcaagctcgcctttcatctacaatcagctcgttcttactccatctatgctcgttgaagaaatcatcctttgtaatccgtccaattcgcctaagtcgcaggctcgtctttaatagaaagattcttccttccctagagatcccattttcgtacttgtgtgattcgtgcatcaacagttggcgcgccaggtagggggatagctcgaagtggcttgatccctttctaagggtacgtaggcaaccttttacaaggttcagctataaaacgaataaactctattcttcctcggacatcaagttcgtcttccggcatcaagctcgcctttcatctacaatcagctcgttcttactccatctatgctcgttgaagaaatcatcctttgtaatccgtccaattcgcctaagtcgcaggctcgtctttaatagaaagattcttccttccctagagatcccattttcgtacttgtgtgattcgtgcatcaacagttggcgcgccaggtagggggatagctcgaagatatctctcaaaactacgaccccgcgacgaagcaaagtgataacaaacagactacatggagcattcgataccgactcgtcaggctctggaagtaaaacgacaacgtcgatccccgggagagccagtcactcgacctcttcattcgatatcgcagcatgttctccgacaagaaaaggacttcaaggaactatcgaccccatcatcctaggcgatgacacttccagcccggcagtcaggacaataacactgaccaacgaggaagtgccgccgatcaaagaggaacatcccataacctcattaaacataccgacctcgttatcactcacgcctaaccaagaacaagaggagaagtcatcaggcgggcgtcacttggagaacctcgacgatgacactcccagctcggcagctcggacgataacgtcagcgcacgggaagacaactcaaataaaggaagaatactactcggtatgtaaaaaaattttattattactttttcaacctagttatttgcaggtaaaaaaatcattactttttaaaaaggctagcagacgaatcaacacggtatgctattaactaaaaccaaaataaaaataaaacttagtggttttccaaaaataaaaaacagtgagcggatgacagttgtcaaaagcagcacatggttttacttactttcccggtttaaagaaagaagcaaaccctagttttagagcatctttctttctttctttctttttcccgtcgcttttaaagcatctttcttatccgtcgcagttcatcttcctaactccatctctataaaagaaaaaccccggcaaca

SEQ ID NO: 9792 - DNA, 3000 bp, Unknown
  misc_feature (1)..( 3000): cDNA_ID_2025043_gDNA_ID_1972192_Annot_ID_180216 3000 nt of promoter + ATG
agatatcttcgagctatccccctacctggcgcgccaactgttgatgcacgaatcacacaagtacgaaaatgggatctctagggaaggaagaatctttctattaaagacgagcctgcgacttaggcgaattggacggatttcaaaggatgatttcttcaacgagcattgatggagtaagaacgagctgattgtagatgaaaggcgagcttgaggccggaagacgaacttaatgtccgaggaagaatagagtttattcgttttatagctgaaccttgtaaaaggttgcctacgtacccttagaaagggatcaagccacacgtagttcatattagaataagtgagctaggccgtcattggaggtaggtcggcaggtagttgacgagggatgagctatagctagacgaggagttggacgagctgactagctgacagctaggcggcgaggacatggtcgctgtgatgggaagagcttgaagacgagctgaggagcttgaggacgagccgaggagtttgaagagctgaagagcttgacgaagaggagcgagctgatgaactacttgagaagggcccaatccgacccctaacaaagacttatgtttagatatgttttcatgcgatccaaactatactatatatttttttggacggattttttaataagttttatggagttcacagacgagtttgaacgaagcgttttctttatatatgtgctatgcgaaataaaaacttgaagacaaatttaaataataatgtgatgtagtagggcaattgcataatcgataaatccggataagtgtgccccgatacaacaaaagcaacaacgtttacgaaaatttaacaagtccaaaagtaacagacatgataataatatcctcattacaaaactcaacacacgatcaaaataagtgaaacataacataaaccataaaccctcaagtttcaatacgtatcaggagatttaatgggggggggggttaaaatcatatactcctccttgccgaactattaggggtcggattgggcctacttggcccaatgcccaaacccaagtcaaaagcccaaaataagttccaaaccaaggaggagtattaaggcgaagggtagtttcgtcaaatccctcgatgaatgccctacacgcgtagtgctataaatacggaatagcatgtcatgtcgaaggggggaattccgcctgacacgcagacacagagtagctcgcctttctcaagtagctcgtcagcgagcccttctcaagaagctcgttagctcgctcctcttcgacaagcttatcaactcgttctcttcaccaagtccctcagctcgtcttcaagctctccaactcgtctttaagctcttcaaactcttcagatcgccattaagctcaacaagctgctaagctcgtcttcaagctcctcaactcgtcttcaagcttctcagctcgtcttcatgctccactcaacgaccatctcctcgtctagctgtcatctatacagctcgtccaactcctcgtctagctatcagctcatccctcgaaaacaaaactcatctacctcctcgcctagcggcagttcgtccattgactgcatagtccacctatctcgtcgtccagctcgtctagaccttcagcaaacaactcggtttatccaactcgtctctctaccacggttcatccagcttgtcgcacatctgccggctcgtcaactacctgccgacctacctccaatgacggcctagctcacttattctaatatgaactacgtgtggcttgacccctttctaatatggactacgtgtcgtctcgcttgactatcaccgagacagcacattgtcagctcgcccgtctcacgaagatcgtccgtctcaaatagctcgtcagctcgtccttctcaagtagctcgtcagcgagcccttctcaagaagctcgttagctcgctcctcttcgtcaagcttatcaactcgttctcttcaccaagtcccccagctcgtcttcaagctctccaactcgtcttcaagctcttcagctcgccttaagctcttcagctcgcctttaagctcttcaaactctttagctcgcccttcttacaaaaacaaaaaaggatatcaattatgtagatcaaaacaaaaacaaaaaaggacttacaaggacgtagatatcaattatgtagatcaaagaataagcagtccaaattccagcgttgatgaaacgaactaacgatagccaaaacggcatgtacttgaaggtcttagtctccggcggcattttgtcctaattgtttcacgcattaaaaacttatcaaaaccagtttaatagtttacttatctatatattcatcaataagtgagagccagagagagagagagagcttactatggtaaataaaagatagatgataacaatgttgtaaacgttgcaaacaacaccaatgaatgtatgcttgccggccggataaactcccaaatccccagatagtcatacaatagactgttgccacaaaactaaactccaacggaagcaatagataaaagagtaatatctgcacatcaacatcgacatcatcaaaatcaatatacaatatttttctggatttgttttttttttctttgggatatttctatagaatttagtcaagattgtgtttgtttgttaccaccttttgtgcaccagtcaccaatccttatttttattattaaatctatttttgatactataattcgtgattttccttttagttttatatatatatatacttacagagatgcgagcttcatattattatttttatctttttgaacaccaaaaaaatagcctcgtattatttttaaatgatcaattatgtgatcatatttaaaaatacgatccggtttttaagggatttgaacggatcaaatgtgtttccggttcggttatataaaccggtattttaccatatccaaccgaaatgagtatcgacgggaattatccgtaaacagagtgacagtgaggtgtgaaggaagaagacg

SEQ ID NO: 9793 - DNA, 3000 bp, Unknown
  misc_feature (1)..( 3000): cDNA_ID_2034426_gDNA_ID_1972192_Annot_ID_180218 3000 nt of promoter + ATG
ggaataacaaaatctccaaaagctggtcacatgtggctcattcttgtccaagtcaaaccttcttcacatcttttgtattttattttattagtacaataacttattaatattactcttaatttccgttgcaatatgcttttaatgctctcattcggctgactaattttcacttttcgactttacagaccaaaaaaactttttatttcttgccatgaagtgacatggaattgatactcatggtttggtttactaataagtttctcaaataaggtcttaaccaagaagacttttttttttgtcctcaatttaactcttgtattattcgcattggatatgaaatttcttttgtatgtgcaagatcttggattcttttaatattcttaattatgcaacgtatccaaaattccaaattgattccttcaatggcatcaatgcctatactaagaacctcggaaagcttatttgaaatcataaaacgcttgagttgtcaaaaacactcacataaaactctatatatatgtatgtaatatagttatatagggatcccataaatacataagaaattattatttttgttcaaattatgaaaatagtttttgcatagtaatataaaagatgtgcaaaactagtttatctagaaatatagttgttataccacaacaaaaattgtgatggatactatttgaaaccactgtataatttttttttgacctctattagggttgtattaaaagactacaacaaataacaaactaaattgtctctcttttgtttaacaatgttcacacatatatattatcggatgtaaacatgggtttattattagatgcaaggccggcccaataaattattggatcttgtgctatgctccaaatttttttacctaaaactctaaatatttaaaaaactagaccctgttttgcaattatttgaaaatttggaccctaaaatataaagaaaaaactgaataaagaattgggacccggtgcactagcacactcagcacctcccaagagtcgggcctgattagatggtgaccatactgaaacaaactaatatgatatgtcaatgttttgagtttaattctatttggtttctcattattcaaaataactctcattaaatggaacaaaaactcttattagtttaaatcttaactttttttatgaagagaatgggcttctttacctactacactcaatgagccctctggttcgtttggtcatcagttcaaatggacagtgactttggaatagatctcgaccgttggtcatcatcaccctaatgctttgtgttgccgttggattggtcatgtcatgaccaaaccaatttgacttctttatgtgatgtaaaagtcttattgctctcaaataatcttctaaaccatccacgcgcctgactaaagcaactgaacgtcagacgctacaatagatccaaattaagaaaatgggaatacaattttttttttttttggttgggaaaataatatctctcacttcagagttcagatatgaaaataaatatttatatcttcttgttaattcgacataaattttaccaaaaaaagagaaaaaaaaactatcgtactctttgttttaaaataatttaatcgcataaaatacaattaatttatagcattggtttgtaaataccatggaaaactcataaccaagaaggaaaaaattgtattactaattgattggtgagtgggtgaccaaaatcatttgtaagaaaggctttcgattggcatgttgttcattgttcttgtaacagttgcatcttaagtaattagtatatacgtgtaagatttatggaaaatggagtttaatggatggaaacaaacaatatcagtgacacaatactattttgcccatgctcaaatggacatcatgttctattttttcttgacaagtagagagattcatcgctttttaaaatcaaactttcattttgtagtgggagccttaattgtatttgacccataaatccaatttcttcatggacgtgtcgtggtccattgattaaaataaaaaaagtagaataaacaatcgcttttaattctttttaaaaacaaagaaacaatccaatgtaattttcgattaaaatcattttgattcgatgtgatattgtgtagagaaaacttcattagcaattaatttactaaaatatagtaattgtagtacaaaatatatttcctataatctaagtacagtattttatcgatactaaatctaacagtctaataatcaacgtccctttcctatacatgaatgtacaattaaacaaaaaatagaaatttatagactcaatgatttaaagtacataccaccaaatatggcagcctagtgattgttgtaataagcttttctaaaatatttctacctgattttcaagctttataatttgtatttcagattcttatttatataccaacaaaaatatctacgtaaaatttatcattttcttaaaatatattttggtatttaaaaggaaaagaaatagagaagaaaaaacaagaaataaaataaaaaaagagaagagagagaggagaggagaggtcactaattgtctatgtttggcgcgtatattaaccaccaccggcaaaacacccacgaaaaaggcgaccacgcataaagaaagatcaaaacttccccatcacttccaaaaagcaataacacacacacaaacttgttaccagggaaattataaataaaaatcgtagccgaaaattataaaaatattttatttttattttagttcaaaaaagttttcagctttgaaggcagagagagagagagagagatcaagcgactagtgagagtggtgttgaagcgaaactacgatcttcttttttccttttcagattttcacaatcacaacactcttctttgatcggagctctaacattccgacaaaagctcaaaaaaaaaaaaaaaaaagacttctttcttttgctcttttgagggatttgtctccctctgtagagattagggtctatca

SEQ ID NO: 9794 - DNA, 3000 bp, Unknown
  misc_feature (1)..( 3000): cDNA_ID_3033335_gDNA_ID_1972192_Annot_ID_180222 3000 nt of promoter + ATG
aagcaagtgaccaagcacgatgcaagcacaaagcaaagctacgaacaaattcatggagacgaccgatgcatgatcagaagcgaaaagagcctctgttttttccagcattgtgcttaatccgatcaccatttccaaatctcagctttaagagtatatttcctatatatatgtaaaaaaacacgaagcgtgatttgtggaatttagatttctgattgaattagtatctaaaattgtatagtttccttctttagccgccgagaaaaattcaaatcactaaaattcctaaataggggaataataaaacattccaaaatcataatgttccagaagaatcaaaaccctggaaaattccaagaaaatttgaaaattcctttagagtttgtgtcaggaaacatgtaatttatcaatcttcatcaacaagagctcaatttatcacctccatgaacagtaaaaggatctaaattaaaaagcatccacagaaatgtttttaagaaaaaatcgataaagcattcaaacacatattacctggcagagttatgacgagattcgaaagatcgaatgattcagtttggtcgtagagagggatgtaacagttctgttgaagggacagcaaagagacgatcgaagacgagagaccgccaaagatggcgtaaatatataaataaagattttttttgcagagaagccaagtggaatagagagaggtcaacggcttttaaatctcatattagctaatctccatcgtctatttatccatctcaagaactttattccaattaaacggttgagatgattttgttacaccgttgttatgaccgtaagtggaattagctcattggttatcatgttgtcgtgtaaaaggagtatcaaaaaacaacagaggggaacacgcttttatttttcttatgaccaaatgtaaatgatcttaggattattctctttttaggaataaaactgaataatatactgtttgtactgtattctttttatggcaccgtattacataatagccaaatacttccttaacagaactaaattacgtactttgaatgataaccagtttcataaactgaccccaaaatatttatttgaattatattaattgtgatagatgggggttgttctttcttatgtcattcgacgtttacttgataattaaatataagttggtcattttttaataaggtttccacgaatctctgatgaaaaataaataccaaatagagaatttcttggtaatctacatatgtactaattaataattatggactctttttttcttggtcgttttttttttttttttttgtcatgttttctatatgtactaatttttgggtcttgattaaaatattggatgtaaaaagagtacttattcatcttcatcattacaaggaaatagcttttgtaatatgaataattagataatactagtcgcccagatgtttgtttgttcgattttttctttcactgttcttattctttgcacttacagagagggcaaaagccaattctagtgtacccattttgggggtcaacatgattaagggttcatcattgtacgtctcgatttatcctttttcatcgtgtaaattcctttcatcttcattattttgttagagatgcaaaatttgtattctaaataagaaatcaaaaaccatcttgaaacataaaaataggtagttcaattgtttgaagaccaagaaacttagaattcaaggctaaaagttcaatttttcggtaagggtaagaaaaacatgtacagggcaatagaactagtataaattcttagattacaggcatctaacatatacacgaaacaaaacaatgtagttttatgattttttggtaaactattgttttcagtttattgtattaatatctatgaacgttgttaacatgtccgatccattgaaaagaaaagaaaaactagagagtttttcaaagctattgggaggcttaactggttggtcaaatgtgaatgaaccaatcccatggtacatggatattgaaacattaacagcagattagttatagtagtgggtcaaacatgtgaccctttagtttggcattttgaatgcctcgtggtctgcttttgtgtctctccgatctacattattattatctatttacttttcttttaagacgccacacatgttacatgtatatgacatataactataatacatgtataaataagtgttgacaattggaaatatttcagcctcatactcatacagtgaaaagtaacgaatctatagtttagctacttggattatttagttttgttttcttaagaaagaaagaagaaagaaaaggaatgtagaagaagaagtaacgaatgatgatagattgatagtgtaagacacattaatgacttccacattatggccggtcaaaagtatcttttgattttcaattttagctgttacacaacaacaacaaaaaatagattctgaattagtgatcaatggttaaaatattttggtcattcctcatctacgaaaatgaagatttgatcaccaccgaaacgtatacagtagttgtttttttcttaattttattgacaaattcgtgcaattaatgaggcggctttatctagtctagttttagtttatatagtagtggataaaactagtcaacggattatatgaaaaaataagtgaatttaagatcaaactcataccaaaaacgtcatgtttatcattttttgttgttgttttttccacacaggtttatcatccttatcctatcagcgaataatagaagaaaaagtacaaattctctaataaagcggtaaaagcgtttaagaagatgaagaagaaaaaggaaacgcctccaaatcaccattattgtccgaatcttcttcgcgtctctcaccaacaccacttctcctaccttcttcttcacaccaaatgattctctcgtataatattcatcaaacccagatcatgttttcatcatcaatcatctcttaaactcctctatagatctcaccgcatg

SEQ ID NO: 9795 - DNA, 3000 bp, Unknown
  misc_feature (1)..( 3000): cDNA_ID_3033331_gDNA_ID_1972192_Annot_ID_180226 3000 nt of promoter + ATG
ttgcccggtgtgattttttggtttgtggtgtgattttgtaaagccggtccgtttttcgttgtttgagtttgtggttttgttgaaaaattgtaactgtccatgtaaatagggactgatataggggtgacttgagtacacctagctcatatgcagacgttagcgtctgcgtttggagattcgagtttgcgttggtgggacgtgagcagattttttaatctaaagtttgtgtacactttcttgtacttcttatacaaaacaaagggacacgaatctttctaatgttcataatttattactgggttttgcaagaaacttgttgacaatatacaaataaactgataacttatatataaatataacttttgagaaatctaatcttatttttatgcttgcacgtatataaggacaaagtgagtgggtatcaatcaaccttatagtaacatatacaatctttcacgcataaaaccctataatgtgaaaacaagaaacgtcctttacatatttcttctcacctagatattattaattttaatattgagactttgaaaccccagaaataagataaagtgtgggacaagaaaagaaggcacctttttttgttgttgcttttagccgtgaggccagcatatgcagtaactcacatgcatgcgcctctaaccttgtggcattttaggaattatgcaataatgcactatacttaaatacgttaattcacaaagtaatacattcattcagttcataaacacgtctcaagattaagacaaaaataatcataaaaaactggtgttttacataaacttatgtcgaaattaattagtagtctacatataattactcaagtgttatttgcatgtaaacagtacaaatttttggaacgtttgattttgatactactataaactgcagtatactgtaaagcatgcatatgacgtcactttaatttgaaacgtaatttcaactttttcaaaaggttctttagcttagcgataaaaaaaaaaaaaaaagttagtgtatagtaaacgaacaaatgaaatgaaaagaagagaaaagtataagtcctcaaagtgtattgaatcacttaacggtaaattagtttttatttttatttttatccagagttcttaagttaattatgcatcaattatgtggttctgacgtaatatattacttgcgtttttcatctaaaccaatctaaaactgtaacaaaatgttaagtggagaacaataaaaaatacaaatagtaaaaaaaaattgaaaatcaaactaaatctaattttattcgttatttttaggggacaaataaactcatgaaaataatgacgtacgtggtctaaaatatatgaatgacctatatagctgaaacggcaagaagccggagcgagaaacaatagacggcggcgaagacaaagtagatgaaaactccgggagcttgagaagacagagaagcaagagatgaagccggaggagaagccgatggagcgaaggcgggatcaggatctgcggaaacgtcgtcgttttctggttcaggaagtgttgaagaagaagggatggtttgagtggaggagacggcgggtgaagggaggagaggagcgatctccggtgagatcttttcttcagagggagagattgtttgcgaagatgggattgtatttgtcgtcggcgaagagagagaaagtgaggagagaaagatgaaggtgatgagtgttagcaatatagatgaagccatcttttttggttactgtaatgatgaacaaatcaaagctgagttgtttttttccttaactgatgagagcgcattttgtgttgtaataatgatactgtctctataaaagaaaacttttagctctaatagtaaaatattataaattgattttaaatggaatttgtctcacctttttccaaaaagattattatttatcaatttaaaggatgtgttcggtggaaaagaaaatatatttgctgaattcttgaagatgggcgtagatcgagttttcactttttagtagaagctcttatatattgcacatattttcgaataaacatgtgctttactttttgctgaaaaatattatgttaatgcaaattatacatattgctaagtacgagtaaaggcatctccatccatgagaaacctacaaagtttctaaaacaaaaaaaatattaatattatattataatttaattatttgattaaaaaagtaattttgttaaaaaattgaatcaatagtgagatgagaattgtcatgatgggttgtagagaatatctcaaaatttttcaagtgagaaactttctacattttctctccttcattttcattatttttatttttttaattgtgaaaaactcttatgaaataccttcaatggagatggtctaattacgtttgttgttgcctcgttggatgttcaaataaaaagcacattttatattgggttgttcctaaacaaatattttgttgtcttttgtactaaagtttattggcgagttaagaaaagctttgtggtgtgtgggaattattattattatttattatttattgttctttagtttgctatgcaattcgagcccactaaagaggcttcctatgggcccaaaaaacgcagcccactattgtagtgcaaaacgtgctgagttttctacattgcatgcccaacaatggccaccagtgtagttaaagactcaagaacttgctgacctctatttgtttgactttcttttttgtgtgaacaaaatcacatattgttgatgtcatttgttctgctataattcttaacttcagattacagataacgaattttctcttgatgatttaaacaaacatatataattgtcaatatcagaaaatgaaaaggagatataaataatttttttttgcgcctaatcgaaacttcacctaccattttttagcgtataaaaacgttaaaaataccaaaatttagaaatccaataaaagttgtgaaaaaaagccgcaaagggtcgttgttgtttgtcgcctctca

SEQ ID NO: 9796 - DNA, 1470 bp, Unknown
  misc_feature (1)..( 1470): cDNA_ID_3015862_gDNA_ID_1972192_Annot_ID_180234 3000 nt of promoter + ATG
ttccaccaggttggtaaggttgtcctgaggagggtgatggattttgaaaagccgacggagatggtattctattaattggaggaacactgcaagcaaaaaccataataacttaggctagaatctaaagaagaagaaaacccgagagtagactgaaaaattaataattgaataagtaaccaacctaacatcatcattagacacatagaactgaaagagaaaaggaataaaagcaagccatacgattaagaatgtctaacctttgaaccccacctggtcggtaaggtttccctatagagagctgagggttttgagaagccgacagaggtggtgctcgctgaattgaaggaccactacaagccaaagttacgaaagaaaactgagcgaatttacgaaagaaaactacaacaagtagcacaataggctcttcctatggaggctcagaaacaacctaacatactcgcatagaaagaaatcaaagctgtagagctaaggttaatctaaccttcgaattccaccaggtccaaaagattgtcctgcaaaggctgaatggttttgagacgccggtggttgaattgatgaatcactacaagcaaatccaacattcgcagtgtgtaagaataaaaaagaaaggtacaatctaagaacaaaaagcaaagtaaagcaactcgcagcttctcctaaggaagatgaagaagcaaaacccgactgcctaagtgatatagaacacaatatcatagaaaattcaagatacttctctcattctcatgatcctaaacactttaatacaacgatagcatatatgtaaatttgacagttcaaaaaaatctctgagtataatagatccatagcgtgaaatgaatcctaaaaatctcaaaactcgaagaaaagtccgattgaagcatagatacatctatagagaatgaagagcacacctagtggttgaagaagcaccgaacggtgtaaacggcgctggcttagagctcatcggacctaagtccttcccgaaaggcctaaacgccattctctgagaaaattccttgacttgattatcgctgcctctcttctaattctccttcaaccttcgtttaattacgtcgccggctaaagtcgaaaccggagcaaattgaattttctgttctggtgacgcctcttccgtccggcgaggattattttacgtttaaaaccaacgacgtcgtttttatttccgaattttatgttgggccttttaagtaacaataggcttattatgggctttggtcaaggaacaagaataattgttcaaccaagaagaacgtgcgcatgttgtcaccatctcccttgagcctccttgttttaggtagaacatcaacttttcatgaccgttgacattttttttccctctttattttccgagaaaaaataaataaaattatcctctagttttcgatctcgatcatctggatccaagaaattactacgattgctataatg

SEQ ID NO: 9797 - DNA, 3000 bp, Unknown
  misc_feature (1)..( 3000): cDNA_ID_3033327_gDNA_ID_1972192_Annot_ID_180228 3000 nt of promoter + ATG
gtatgctataacggtgacaaaaattgttttttctctagagtagtgaacagaatcatacagattttatttttatttgttaaggtttgctaggcatagaaaaatttggggtgaatgatgtaaatcttttttacctgcagctgtacaattccgcacaaagaagctgcattgcaatgttgtgatgaagttgatccattggcaaaggtctgatttgctaaaaacagcagataattttgttcgcaaccccaatcactatcagatagcataaatagccatcctgcttcaacctgaatgtttacttttaatatcatacagtctataggagctgtgaacactatactaaggagaaaaagtgacggaaagttgttgggttacaacacagattgtattggttccatttctgctattgaggatggcctacgaagtaagtctatgttcacagctttttgctccatttggagaagtttcggttttagtcatggagccttctcctctgtttgttttttcaggttcaggtgatccaagcagtgtaccttcttcttcttcgccattggccagtaaaacagtggtggttattggtgctggtggagcaggcaaggctcttgcttatggtgcaaaagaaaagggggccaaagttgtaattgctaatcgaacttacggtaaaatacatgtccttaattggaaatttcgctttgtgaacaccttagattattctattaccggtcatgctcgaccttgacaatactcttcttctcctcgtcttttattggttataatgttagatgtagtaactgatgatatgatttgttttgttcctgatgttgtgtttctaaagaacgagcactagaactcgcagaagcaataggaggcaaagcgttatctctgacagatttagataactatcacccagaagatggcatggttttggcaaacacaacatctatgggtatgcaaccaaatgttgaggagactccaatttctaaggtaagctctccttgtaacagctcatccttttgttttctataggtaacgaaggaactgttctatcctttttctgttattgaaataccaaaagccagcttatcgcatgcaaactttgttgaaatcttaaatctataagacaaattagtaagctagcttgtctttgtttcccccaggatgcattgaagcactatgcactggtctttgatgcggtatacactccgagaatcaccagactgttgagggaagcagaagaaagtggagccataactgtctcagggtcagagatgtttgtcaggcaggcttacgagcagtttgagatcttcaccggtttacccggtaagtgacactaatactggaacaaaaccatgtgttgtattaaaatttaaacaaaagaagcctacttaatggtggtccctttgttgtgcagctccaaaggaactctactggcaaataatgtcaaagtactgagacatagcttaagtgtgtgtgtgtgtacttccatgaaaagtcgtcgattcaataaagctttagattgccatttgtatgttccgagaatgtccttttttgaggccataagccgaatgactggttctctctttgtatttatatatatgtataaactattaagcctaacattaatcttttttaagtttctttgatttgatgagtctactataaaaaagaagggttaagttgcatactagtcactttttaaaacttaattggaaaagtagtcactttactattcataatttgtaaaatagtcatttttcactgtttgattcgtacacttagtttgtacactatttttagtgtacagatgtatataaaaaatacacagcgtacactttacatttgcacactaaaagtgatgtacaatccaagtgtacgaatcaaaccgtgaaaaatgactactttgcaaattatgaatagtaaagtcactactttcctaattaagtttgaaaaagtgactattttgccaacacacccaaaaaagaactacaccaactatgactcggtgttctaaatactgttcttctgtaatgaaagcttgatttgaaactcaaaattgaaaatttcgtaaatttcgtaatttgatattattagaaaaccgaaagaaaacgcatcggatttcgagatttattaatttcgcacgaacgaattatttgattcccgccaaagcaaatagagcaaatataggaattacagtttaacccgccaaattgaaaatggattataaaatctcacaaaagaactttcggttcagttttctctgtcttattttcgcgggcagctcacatttctctccaccgtctcctcgtcttctctcaccaaagtaagcttttttcttcttttttttctttcagtttcatgtttccattattgattgattcaaaatctcaaccagcaaagaattaaaaaatgattcagaactgattctcaaccatagcgtttattgctctctctctatccacattcacatcacatgggcttcgtttctttgtacttcactttccattttgattttttctttcccaacttgaatttgatttgatgatgattcgtttagaatactctgcgtcatacggaggagtcttaattctaactaaaattgaaggtttgatatgcaattactttaaaatacgtcatcttttctaattaaccccaaagttgattaaatttactaaaatcatcaaaagaagaaattagatggcatttagtttcacattacaggcgtcgtgaactttagtcggattcattcctctccggtgagtttctgtaatttctctcactctccaattgagttacctcctatttcataattattcctctgatcgtataaaggttttaatttggagaatccaccctcctctgttttatccgctccacaattcgccgccggttttgtctctgctgttcgaattctcgattctccgatgagttcttcaactgttttgttttgttgagctccttacttttaggtttctttctcatttgctttaattacttccgaccaaa

SEQ ID NO: 9798 - DNA, 3000 bp, Unknown
  misc_feature (1)..( 3000): cDNA_ID_2033208_gDNA_ID_1972192_Annot_ID_180235 3000 nt of promoter + ATG
ggggatctttaacgacatatgtcaagtaactacagttgtcagttttgggtttcaatgtaaagcaactcattttccttctttctttattctactatatcgagaactattagtgtaacacctatgttttcaacgtcaaagtgctccgatataatatattttaggagctgtgtgtaaacaacatttcgacttgttcttctttctcgcaaacatcggaagaatccaccgggaaagtatcatctgccttgcgcttcctcgattcattctcctcagatatctccatcatcgaattatcatcatccgcgtttttcaatttggaatccatgttggagtaaacaaccctagatctacgagaaacgacgacttttgtagttgatctaagtcacgagactcgatcgcaactatttcagggggaaaaataatctattttcaaatttttcatcacaaaaagttgtattatatatttaacgtaagttgttttaatataattcaagttaaccagacgaaaaaaatcattctataaagcgagacgatacatgtaacaacaatcagaaacaagaaaatgaaactcgatcaagaaaaaaaaacttttaatgttacagagaaaaagaggagtttaaagtctttaacaagctttacagctacgtctgcaattcccagggatctctggagttccaaccatatactctggattctttccacattctccaagcactgcccatctctcacagctctcgtttacgtcagtacagttaccatcatgtgtcaatatcttatcgaatgagtccacgtggatccacttagtagccgaccatttctctccttcgatcactggacaacctccgtgaaggctaaaggggtctgggattgcgtcttgttggaggttgaagaacaacagagcattccctttcttcggtttcactaataacattaccaaccaatatcaaacacaaacattcttagagataacatggaaagaacaagtcatgattccttttatatatagctcaccagcgattcctttctttgcacaatcagaaagatcgtctttattctcagaaagcgagcggcgagagaattcctgcgcagaaatattcatcatacagaaaaagagtaaagacctatttgtccacgtatatagagaaccaatacaagattagcaattgtggaaatgtaagcggaaattggtggtattgtctgaaaaacaacaaacctgtgcatcggggaaaacagtttctccaccctttgtgacattggacagatacaagagaaccgttgctatgcggtgtccaccacgggcaatgttgactttgtcgtggaagtagtcaaagtgagcatcatatttctgaccgtgctcatatctcaatacctgaaggtcttccccgttttctgtgaccacaaagtgaagaacttaggaaacaataatatcttctgaaaaaccctttcaagaaactcaacaacagttaaggttccttgtcaattgacattgtgaaacagagagaccactattgaaaaaccattcagattgttaaagttaccttttgggagaaatgtccatgttgagagcttgtcctcgataccggaaacaataggatcctgtcattaaacaaacgaagcttcacattaagattgtaatcacactgagatatctaaatttctcaaatctgttcctaataatcactaagtatcattcatcatccttcatccatacacagaagtaaatttatgtctagctatcaccctaaaacctttttagtagtaaacaacaatcacaaatcaacacaatttggggtcaatttactaagatctcgacttatcaacatcattttatcaaactctgatgaccagttcaatatgtgtgtgaacttttggattgaattattctaaaatttctatttccatcagatcttgaggggtttgacttatcagatccattagtatcagaaatcacatcagagattcagagttcttgaggtcgagtgtcataaattagaatcaagatcaattccaatcaagccattcaatgagatctgatgtgccgaattaaaattgcacctttcctttggagataaaagtgccggagctggtacgaacatcactgacttgactctcgccattatcgttatcagcaaccgcagatctctgcagattctctttcgcctttccccaaaaaaaaaaaaaccaaaattagatactgaaactagcacatttaagccaaaaagtttccaaatttgagctcaaacccaaagagcaaaattcgcactcacaagagagattagatgatcacattccaagtccgtcaaaaaaccttcatacacaaatgccctgaagaaacagtcaatacacacagttggaggttcaaagtttccaaatttgcttcatttctcactaaatagacaagagaaagagtaaaatcaaacctgggcttcgacgaaacctgtttgactttagaaggattgatgatagaacttggagaactaatcagacaagtggaagactgaagcaagacgagcaatatagcgacgaacaacaacaatccgagccgagacatcgacattatagcaatcgtagtaatttcttggatccagatgatcgagatcgaaaactagaggataattttatttattttttctcggaaaataaagagggaaaaaaaatgtcaacggtcatgaaaagttgatgttctacctaaaacaaggaggctcaagggagatggtgacaacatgcgcacgttcttcttggttgaacaattattcttgttccttgaccaaagcccataataagcctattgttacttaaaaggcccaacataaaattcggaaataaaaacgacgtcgttggttttaaacgtaaaataatcctcgccggacggaagaggcgtcaccagaacagaaaattcaatttgctccggtttcgactttagccggcgacgtaattaaacgaaggttgaaggagaattagaagagaggcagcgataatcaagtcaaggaattttctcagaga

SEQ ID NO: 9799 - DNA, 3000 bp, Unknown
  misc_feature (1)..( 3000): cDNA_ID_2034408_gDNA_ID_1972192_Annot_ID_180223 3000 nt of promoter + ATG
gatttctctaagcagctcctccgggagctccgaccagctgaaagggtctgaactattagcggttgaggcggcggcgtgaactacacggtgtggcctagaccgcatttcctggagtaaacttcggaacgtcatgcggtgagatctatagaggagtttaagagatgattgatgatgaaaacatgatctgggtttgatgaatattatacgagagaatcatttggtgtgaagaagaaggtaggagaagtggtgttggtgagagacgcgaagaagattcggacaataatggtgatttggaggcgtttcctttttcttcttcatcttcttaaacgcttttaccgctttattagagaatttgtactttttcttctattattcgctgataggataaggatgataaacctgtgtggaaaaaacaacaacaaaaaatgataaacatgacgtttttggtatgagtttgatcttaaattcacttattttttcatataatccgttgactagttttatccactactatataaactaaaactagactagataaagccgcctcattaattgcacgaatttgtcaataaaattaagaaaaaaacaactactgtatacgtttcggtggtgatcaaatcttcattttcgtagatgaggaatgaccaaaatattttaaccattgatcactaattcagaatctattttttgttgttgttgtgtaacagctaaaattgaaaatcaaaagatacttttgaccggccataatgtggaagtcattaatgtgtcttacactatcaatctatcatcattcgttacttcttcttctacattccttttctttcttctttctttcttaagaaaacaaaactaaataatccaagtagctaaactatagattcgttacttttcactgtatgagtatgaggctgaaatatttccaattgtcaacacttatttatacatgtattatagttatatgtcatatacatgtaacatgtgtggcgtcttaaaagaaaagtaaatagataataataatgtagatcggagagacacaaaagcagaccacgaggcattcaaaatgccaaactaaagggtcacatgtttgacccactactataactaatctgctgttaatgtttcaatatccatgtaccatgggattggttcattcacatttgaccaaccagttaagcctcccaatagctttgaaaaactctctagtttttcttttcttttcaatggatcggacatgttaacaacgttcatagatattaatacaataaactgaaaacaatagtttaccaaaaaatcataaaactacattgttttgtttcgtgtatatgttagatgcctgtaatctaagaatttatactagttctattgccctgtacatgtttttcttacccttaccgaaaaattgaacttttagccttgaattctaagtttcttggtcttcaaacaattgaactacctatttttatgtttcaagatggtttttgatttcttatttagaatacaaattttgcatctctaacaaaataatgaagatgaaaggaatttacacgatgaaaaaggataaatcgagacgtacaatgatgaacccttaatcatgttgacccccaaaatgggtacactagaattggcttttgccctctctgtaagtgcaaagaataagaacagtgaaagaaaaaatcgaacaaacaaacatctgggcgactagtattatctaattattcatattacaaaagctatttccttgtaatgatgaagatgaataagtactctttttacatccaatattttaatcaagacccaaaaattagtacatatagaaaacatgacaaaaaaaaaaaaaaaaaacgaccaagaaaaaaagagtccataattattaattagtacatatgtagattaccaagaaattctctatttggtatttatttttcatcagagattcgtggaaaccttattaaaaaatgaccaacttatatttaattatcaagtaaacgtcgaatgacataagaaagaacaacccccatctatcacaattaatataattcaaataaatattttggggtcagtttatgaaactggttatcattcaaagtacgtaatttagttctgttaaggaagtatttggctattatgtaatacggtgccataaaaagaatacagtacaaacagtatattattcagttttattcctaaaaagagaataatcctaagatcatttacatttggtcataagaaaaataaaagcgtgttcccctctgttgttttttgatactccttttacacgacaacatgataaccaatgagctaattccacttacggtcataacaacggtgtaacaaaatcatctcaaccgtttaattggaataaagttcttgagatggataaatagacgatggagattagctaatatgagatttaaaagccgttgacctctctctattccacttggcttctctgcaaaaaaaatctttatttatatatttacgccatctttggcggtctctcgtcttcgatcgtctctttgctgtcccttcaacagaactgttacatccctctctacgaccaaactgaatcattcgatctttcgaatctcgtcataactctgccaggtaatatgtgtttgaatgctttatcgattttttcttaaaaacatttctgtggatgctttttaatttagatccttttactgttcatggaggtgataaattgagctcttgttgatgaagattgataaattacatgtttcctgacacaaactctaaaggaattttcaaattttcttggaattttccagggttttgattcttctggaacattatgattttggaatgttttattattcccctatttaggaattttagtgatttgaatttttctcggcggctaaagaaggaaactatacaattttagatactaattcaatcagaaatctaaattccacaaatcacgcttcgtgtttttttacatatatataggaaatatactcttaaagctgagatttggaa

SEQ ID NO: 9800 - DNA, 3000 bp, Unknown
  misc_feature (1)..( 3000): cDNA_ID_3033343_gDNA_ID_1972192_Annot_ID_180220 3000 nt of promoter + ATG
tgtggtctgtagatggtgtagtacttgtccaaaatctcaggaacgttaatagctttctctggattctttctgacaattcaaatctatctgttgtatttatttgtctttcatgcaaagaagcgtaccagaaataggctacgattacgtttttttctgaaatttacaaacaaaattaatttactttgctacaggatttagttcacaggaagagggaaggtttgttttttctttatatggaaatattatctacagtgagtcaaaaactccttggctgcagcattctcctcttcttcttggctgcagcattctcctcttcttcttcctctgctcgaagatcatcttctggtagcttaaactgactaaggttccggacaaactctgtgacggcatggaaatgatctggggaaaagaaaagtgctctcccattctctggtaagtgaacagatctatcgctgtattttcgtcctttaggttctctgtgatcctctcaaaaccgccaaggtttggttcggatgagttttgtcctgagacgatgactccgtgtttcttgcaacaagtcttgatgtgagcaagcaatgtctcagggctcgagagagatttcagtgattggtatatgaagagttttcttgaatcttaatttgttgtatatgaagaccgaattttggataaagaagttacatattagtatattacgcgacaagagatacacgaatgcaacttcgtactgtatatagaaacgcatgcttttacattaatataacataaacaaaacaaatcaagacacagacaaacacgtgtgaacaaatacacagtacagggaaaggatggatttataagcttttgttcatgttctcttggagagtgctgaccagatggataaaactagaagaagaagtgaagcaaatagagataaggcaagcgaagttgcgatgtaacgacaaaacttgtcgtagacattacagatcttgttccacccaacttcttcgtttcctttcaacgctatgtacgcaactcctcccgccgttcccgttgcagacgccaaaatccccagcatcacctgttcatatatacatattccggaattattacttaaaacaccctaattaacatggtatatggaagtttcaaagttccttgtaaaacaagttaccatgtctaacgaggctaggtaaatggagaactgtgcagtgaactcaggtttcaagagtagagagatggagacaagtgttgatatgagcgcatagaaactagctaccacgagagcaaccacgaagtatctgcatagatatatagccaatttaacacattaagtttaaactagaaaacattccatgattatgatcaaacatggaggaatttaattaattaaagagacaaacatgaaagcgggcgagtcattgaactcggcggagacaggagccggagacgaaactccagggagctgagtcatctctgtctggtcgctagtcaccattactataagagcagtcagagtggcggagaaaagcagaactcttgttataatgtctattttacgacaatctaggaaactggcggctgatgagggtggtggtgtagccgacgcgggaatcggttcagatttgccagtttcagggtcagggttctcagtagacgccatcagatgattctataactcttttgtggattaggttgtggttaagtttggactgtgagttatgaagttggccgctacatgagattatttgtgagtatatatatatagatagtcccggtgatgagttgtagttattacccacacgccaagaaacaaatttatatttatttacactattcactaatgtatatatacaggaacatgaatatcaattcatttaatttctagcttgcatttttcattgtttaaaatttcgaaatagtttttggaaaattcactagatgttgtagttttatttcaacgttaacatataatgtttgttacaacaaattttgcatgcatatctatttttgattaatagaaaaattaatatatttctataggtataagttatggataatgtagatatatacaatgggaatgtgttaggccaaccccgggaaggttggtgaggaaattgggcgacggtaatcaaaaacaaaatacaaaaaaggagagtaaagaacagtaggagtggttaaccaatcatctgcatgaaaaaggtaattttatacatgctcttaggtatcactttgctttctgcttgtggctgcaaatcatgtaaatggatatcttattttatgtaaaaacattaaactgcaagaaacaaatgtcccagtagcatgaccacttcagcacttctcaaacatattataatgttttaacatggataaagctatttcagatactaatccagtcgaaatagagtagttttgtcttagcaaaatcaccaaactttatctcttgataccaatacagagtgactgcacaagtctgagaacaacacaaaaaaagtcagacctaacagtaataatatatatgaactcatcatgatttttatttcatatcttaataatacctaactggttttagtaaatccaaatatataaaattagagatagctttaacaaattgggggcgatgatcaatcacaaagattaaaaatagtgtaactggagaatctttctcgagcagctccagcatagtaataagttggggaaaatatcgggcttgaaagtgggtcttatgggtcagtcaggcccaactatgattaaacaaagcccaaatcgcgaatgttccaaaacaactctcttgctcaggtggcgggtaattaattactaattccccgttcgatgaagcgactagttacatcgtagccatatatttattcagcttaatcaacggttacaaattaccctgaagcttcggtcgttttgcaatttgtatctaaagtttcactttttttttaaaatctttattttactttctcacaagcgaagcgaaccctcgatctcaaggcgaaagcagatttcgtagcttccatg

SEQ ID NO: 9801 - DNA, 3000 bp, Unknown
  misc_feature (1)..( 3000): cDNA_ID_3033351_gDNA_ID_1972192_Annot_ID_180217 3000 nt of promoter + ATG
caccaagtcccccagctcgtcttcaagctctccaactcgtcttcaagctcttcagctcgccttaagctcttcagctcgcctttaagctcttcaaactctttagctcgcccttcttacaaaaacaaaaaaggatatcaattatgtagatcaaaacaaaaacaaaaaaggacttacaaggacgtagatatcaattatgtagatcaaagaataagcagtccaaattccagcgttgatgaaacgaactaacgatagccaaaacggcatgtacttgaaggtcttagtctccggcggcattttgtcctaattgtttcacgcattaaaaacttatcaaaaccagtttaatagtttacttatctatatattcatcaataagtgagagccagagagagagagagagcttactatggtaaataaaagatagatgataacaatgttgtaaacgttgcaaacaacaccaatgaatgtatgcttgccggccggataaactcccaaatccccagatagtcatacaatagactgttgccacaaaactaaactccaacggaagcaatagataaaagagtaatatctgcacatcaacatcgacatcatcaaaatcaatatacaatatttttctggatttgttttttttttctttgggatatttctatagaatttagtcaagattgtgtttgtttgttaccaccttttgtgcaccagtcaccaatccttatttttattattaaatctatttttgatactataattcgtgattttccttttagttttatatatatatatacttacagagatgcgagcttcatattattatttttatctttttgaacaccaaaaaaatagcctcgtattatttttaaatgatcaattatgtgatcatatttaaaaatacgatccggtttttaagggatttgaacggatcaaatgtgtttccggttcggttatataaaccggtattttaccatatccaaccgaaatgagtatcgacgggaattatccgtaaacagagtgacagtgaggtgtgaaggaagaagacgatggcgtcaatgtctctctccttttcttcttcgctatgttcatccagaatccccgaaggtaagcgtaggtttcgtcacagagatgtgggcatcgttagatgcgttttggctgcttcgaaatcttctccgggaagtgttacgaagaagaggctttggaaagacggcgaattccccggaatcacggagccggttaatcagagaagaactccgataaagaatgtgaagaagaaacttgacaggagaagcaaagctaacggatgggttaacaccgtcactgaaactttgtccgatctcatcgccaaaaagcagtggttacaagctctcgaggtatttcgattttctctcttctcgttcatgtttgattgaatttgaactcaattttgaatcacgagtataatttagctgaaagatgattttgattgaattgggtattttgttgatgatcttaggtttttgatatgttgagggaacaaacattttatcaaccaaaggaaggaacttacatgaagctgcttgttcttctcggtaaatctggtcaacccaatcgtgcacagaagctgttcgacgaaatgcttgaagaaggacttgaaccaactgttgaactctacactgctcttctcgctgcttacactcgcagcaatctcatcgacgatgctttttcaattcttgataaaatgaaaagctttcctcaatgccaacctgatgttttcacgtacagcactctgctcaaggcttgtgtggatgcttctcagtttgacttggtggattcgttatacaaggaaatggacgagcgtttgataactccaaacactgtgacccagaacatagttttaagtgggtacggtagggtcggaaggtttgatcagatggagaaagttttgtctgatatgttggtgagtactgcttgcaaacccgatgtgtggactatgaatatcatccttagtgtgtttggaaacatgggtaagatagacatgatggagagctggtacgaaaagttcaggaactttgggattgagccagagactcggactttcaatattttgattggttcttatgggaagaagagaatgtatgataagatgtcgtctgtcatggaatacatgcgaaagctagagtttccgtggacaacatcaacctacaacaatatcatcgaggcgtttgcggatgttggtgatgcaaagaacatggagttgacatttgatcagatgcgtagcgaaggtatgaaagcagacacaaagaccttttgctgtctcataaacggatatgccaatgccggtcttttccacaaggtgataagtagtgttcagttggctgctaagtttgagatacccgagaatactgccttttacaacgcggtgatatcagcgtgtgctaaagcagatgatctgatagagatggaaagagtgtacataagaatgaaggagagacaatgcgtatgcgattcaagaacgtttgagatcatggtcgaggcgtatgaaaaagaaggtatgaatgataagatctattacttggaacaagagaggcaaaagcttatggatcgcactgttgctacaaaagagatggagaatcttccggcaggatgattgcggtttgtgtgtgaatctctctctctctctctctgcaaggagagatcgatgtctcacttgaaagagtagaataaaagagtttgtaatacacttgattgttcttgcagctatgcgtgttatatattttgatgggcccaaaattatgaatagaggcccatagataaactgtgacgtgcacaagaaatcggacaagtccaaaaagtggataagtgcgtgtcgtctttctataaataatctcttttctctcatcttttaccgtttcttctcgaacaatcaaaaacgaactaaccaaacataaaattgaacacatcctcttcctctgctctctgcaaacaaaaaaacaccgattcggtcaggaatcattcgtcgtgaaatctgta

SEQ ID NO: 9802 - DNA, 3000 bp, Unknown
  misc_feature (1)..( 3000): cDNA_ID_3033354_gDNA_ID_1972192_Annot_ID_180213 3000 nt of promoter + ATG
tcctcaagctcctcagctcgtcttcaagctcttcccatcacagcgaccatgtcctcgccgcctagctgtcagctagtcagctcgtccaactcctcgtctagctatagctcatccctcgtcaactacctgccgacctacctccaatgacggcctagctcacttattctaatatgaactacgtgtggcttgatccctttctaagggtacgtaggcaaccttttacaaggttcagctataaaacgaataaactctattcttcctcggacattaagttcgtcttccggcctcaagctcgcctttcatctacaatcagctcgttcttactccatcaatgctcgttgaagaaatcatcctttgaaatccgtccaattcgcctaagtcgcaggctcgtctttaatagaaagattcttccttccctagagatcccattttcgtacttgtgtgattcgtgcatcaacagttggcgcgccaggtagggggatagctcgaagatatctctcaaaactacgaccccgcgacgaagcaaagtgacaacaaacagactacatggagcattcgataccgactcgtcaggctctggaagtaaaacgacaacgtcgatccccgggagagccagtcactcgacctcttcattcgatatcgcagcatgttcgacaagaaaaggacttcaaggaactatcgaccccatcatcctaggcgatgacacttccagcccggcagtcaggacaataacactgaccaacgaggaagtgccgctgattaaagaggaacatcccataacctcattaaacataccgacctcgttatcactcacgcctaaccaagaacaagaggagaagtcatcaggcggacgtcacttggagaacctcgacgatgacactaccagctcggcagctcggacgataacgtcagcgcacgggaaaactcaaataaaggaagaatactactcggcgtcatctattgtaccgacctcgttatcgcccacgcctgaatacctagcgttgcaaaaagaccaaggagaagcttcacttagccgatttcatcgcctggacgatacggctaaagccaaccaacgcggcgaagaactactcaacatcatcatcgatcatttaaagcagcgcgacgcgattattaaccgccgcccaagagcacatacaagataaaattagccgcatgcacatgagtcgttattcgcatacccaacctacgcgaagaaattcaggttgtcttaaaccaacccagctcggcaattcctcagaccgctataaacgagataccaagtgcaagaccttcactcccaaatcaattgagccatctccagggtccatcaggtcggatgcgccataagagatatcgatgatccgacatcgacgatccgacactgacgccaatgtttagcgaataccgcaaagcaatgaccacaccaaaacgactaacaaaacacatcatgtcggcaggctacgagaagctaaacgaaagaaccagacggctctggacgtacacaatgacgcaaccaaccaaacgccatttgcgccatcttgcagagtgaaagtaacagcacccgctggagctaggcgaactgaagaaaagccaaactctccacaacagcaaaattcacatcgtcactcaaaacgtcggagatctcgttccaacgccatcccactaaaacgaagaaaacgatgccgcttagcataacgtcacgtcggacgaacgaactgacaagaactagggcagacattgagcatcgtcttttcgataattgtatcaacgaactcgaccgtcaaaactcgatcgtaccacaaactcttgcgttgagataagtaaaattttcgtttttgtcgtaattcaattcgtcagtattcttaaaaagggttccgctggacctcgtagcgatcgagctaatttacatcggtgtcctggcccggcattcgatcgataaacgaacgcacgaaccccttaagtatgccatgtatcggtaaaacggtcttggataaaacctacacttaagggagtgctaagccgagctccgcgctcgcaccgtttcgacggaatcaatagtttcgacaaactttggtttcgtcggacgacagattaagccgagctccgcgctcgcaccgcttcgacagaatcaatagtttcgacaactttggtttcgtcggacgacagattaagccgagctcgcaccacttcgacggaatcaatagtttcgacaactttggtttcgtcggacgacagattaagccgagctcctcgcaccgcttcgacgaaatcaatagtttcgacaactttggtttcgtcggacgacagattaagccgagctcgcaccgcttcgacggaagtttcgacaactttggtttcgtcggacgacagattaagccgagctccgcgctcgcaccgcttcgacggaatcaatagtttcgacaactttggtttcgtcggacgacagattaagccgagctcctcgcaccgcttcgacgaaatcaatagtttcgacaactttggtttcgtcggacgacagattaagccgagctcgcaccgcttcgacggaagtttcgacaactttggtttcgtcggacgacagattaagccgagctccgcgctcgcaccgtttcgacggaatcaatagtttcgacatctttggtttcttcggacgacagattaagccgagctccgcgctcgcaccgtttcgacggaatcaatagtttcgacatctttggtttcttcggacgacagattaagcctacttggcccaatgcccaaacccaagtcaaaaacccaaaataagttccaaaccaaggagtattaaggcgaagggtagtttcgtcaaatccttcgatgaatgccctacacgcatagtgctataaatacggaatagcatgtcctgtcacgagggggattcggccaggacacttagagacaaagagtagctcgcccgtctcaagtagctcgtccgtctcaagtagcttgtccttctcaagtagttcacagagcacatcgatg

SEQ ID NO: 9803 - DNA, 3000 bp, Unknown
  misc_feature (1)..( 3000): cDNA_ID_3033365_gDNA_ID_1972192_Annot_ID_180207 3000 nt of promoter + ATG
taataagaggaagtttaggcttggtgactgaaaattgtcgttttttcaaataaggctataggtttttaaaacatttgggcttagaacccatttcggtagggacttaaccaaagataactgaaacatttgaactcctaggccttgtcatctaacacacatttcttatttacataatggcttgtatgatttgaactacaagccaaaaaacttcaaaagggtgtaatctttttgaagatggatgttggtcttcatttcttggccagtaatttcttcgggagcttatcgaggggcgttgatttaagtaaaaatagcctcgcagctcgctctcgcaatgtccctctgcatttcagaccgcgtgactgaagctcagtcttcaatctctccatccccaaaacctccatatctgtggctgctttgaactcagcaaagttaagcggttcaacaggtttgcaacacactctttctttcgcagttcctcctctctttacgacaaaatcatcgtttccacttgatttctccaccttttcaagttgatccattgcatcagcaacagcaaaatcatccatcttctcttcgttaattctttgaacaaccgtgatctctcccttaactacatctgaactttggtgcactacaaagtcgttctcaccatcatgggatccatccaaaacagagcctgagctttcatcagtatccttatgatctgaatcaacttgaccaccaacaacagatttctcatcttcctcgtcactgctatcatcactgtcactatcttcaacagctctctttccattccatattttgattcgtttcgatttttcagattctgcagtacccatcttcttcccttttctcttattcccattcttgaaagtttcgttcaaagccaaatgcacagccaaaatacacttatcagatccccccttatacttgttgacattcttctgcgtagctccatctccaacaccttgtttagcattattggattgctccttcagatactcaagagcctttttctcaaaattcctcccttattcaccatccttccactcctgaagcctgttctcggcgtttacatctccgttcactcatatccctacacgaatcgaaattgtttgtcttcttctgtccagctttcataaccacattacgaagtaacgatccgagtccacctttgcctccacggagggacaggacaagattcatggtggtgtcagactgagaaatcgcggatgcgccggggatttggaatcctccgcttatcaatctctgtagatgcgtcggaatcttcgtttgctcgaagatccgctgcttgatctgctcgccacacgctatcggagaggaaaaggttagggttactgattttccgtcgagtagtctcacgaaaaactgcaacggcttacaactttgatccgccatcgattttcgattctaaagcttggacgaagaagaagaacaaagttcgattcgatttctggagagaaattgggggaaagttgaaaaacggatccctaaggtagtctgagtctctctctctctctgcttgttgggctaagaataagatttctttttggtaatgtgttgggctaagaataagattgatatctcttctgatgcggtttcttcttgttgggcttcatagttgggcttttcgttttgaaaagtcttaggttttatgttttgctttggctagtttgttgtctatgacctttttagcttgatgtatgtgtttcgtatcttaataaaatacaaaagagtgtattacaaaagaaaaaaaaaaagatgtttgtagagtgaattaaaattatagtataaattatgcgagaaaaatgaatactataaaaaatggttagcaaactagtattttctaatcagtgagtgctggaaatcaccgcccattagtactgtagattaggatgccactagctagtaaatagaagatatttattaggaaaattcgtccaaagaatttgtaaaaaactaaaaacccattaaatcaagtaaatcgtcattgtcagaaaatgtgacatgtttttggaaaaagattccaattcatcaatccgagaaaaatgtatgactcaaaaatctaaaaatgtcttagtttggaagagatgagaatgagataaatgaaccaacttgactcttaacttaatctcatttatagaaaaattggtaaaagagtgataagagacatttaaacgccgtgttaggcggaagaagtgtacaaaaccaatcacgagcattgtctgaaaccggagtcaaagagacacagagacagacatctctctcctctcatcagatctcaacacatcacactctcttcccttttttaaaatccaattttactgttgtttttttctcctccagcagtagtttttaactgataaaaaatctcccacggctcttgtatagagactagagaggtcaagcctagaaaacgaaagctattttctctcagtcttctaaagttgtgttcctttagtcattttgagctgatttgtctctggtaagtgtttttctttctttctctctcagtcattcttgaatccaagctcagagatcccatgacttttttacttctcgccagcttttgatttttctatgagctttccgtactaaatgtgttgtaaagttctcacctttttgtttgccaaatcacccattatcaaatctacataactccttttaaagacatcctccgcaattaacgcttttgaagacatttctttgggtttcttttaaggttcctgcaaatatttgtattcggatctgagtttcttagtaattaaaagggtattaagatttattcgttactctttgtttattttggttacactattggaatttttttcaatctaaatcattctagttgtatcagatttcctatcttggttactacatgctttatcttaatcatgcatcataatcctgggttttgagttttaacagaactgagtgttgttttgtaggacactgaaaacttgaacacaccaaatctac

SEQ ID NO: 9804 - DNA, 3000 bp, Unknown
  misc_feature (1)..( 3000): cDNA_ID_3033361_gDNA_ID_1972192_Annot_ID_180208 3000 nt of promoter + ATG
gactaaaaagccgaaaagcaaggtcttggagatttggtgctggtaaggaaccttgatatttattcaaacagtgaatcaaaaaccaaaaaaatctgtctaaaagtcatttacttctccaagcaagaacctcaggaacatcggtatccttgtcattgcagaatggttacgtgggtttatagcagattatggtgttccagtaatggtggtagtgtggacttgtatatcatacataccttggaaaagtgttcctcaagggataccaagacgtcttgttagtcctaatccatggtctcctggtgcatatcagaattggactgtcattaaggcactaatcacttcctctacacttattattctctttactattaatgcttcatgttgatattcatgaaagtgcatgatgaataaactgcaggagatggtggatgtacctgtgctttacattcttttagcggttgttccagcgtcaatgattgcggttctttactactttgaccatagtgtagcctcgcagctcgcacagcaggaagatttcaatctgagaaagcctcctgcttaccattatgatctgtttcttctaggtttcttggtaagagatgaagtgtatgtttttcttgactgatttattgacttgaccagttacgaaatatgaaaggttggaactcttcttttgtagacaatcctttgcggtctcatcggaattcctccatccaatggtgtcatccctcagtctccaatgcacacaaaaagcttggcaacactgaatcaccaggtttgattacatattgtagtgtgttttatgtaggccttcaattgtatttctcaaaaggcatttaaaaactggttgatgtgcagttacttcgaaacaaactcgtggcagctgcgcgtaaatgcatcagaaacaatgcaacaattggagaagtctatggaagcatggaagaagcttaccaacaaatgcagagccctctgatacaccaagagccttctcgggtatgttggtatcatctatatattagtttataatttgacctttttaactcatccctgatcaagcacggtgcaatatcagattcaaggactcaagcagtcacatattcaaaaggcttcaaacgccgatgcactggtcgatgaaacagtgttcgatatagagacggaagtggagaatattctgccagtagaagtaaaagaacaaagagtaagcaactttcttcaagctatgatggtggctggatgtgttgcagcaatgcctttgatcaaaagaatcccaagctcggttctttggggttacttcgcttacatggcaatcgaaagcctcccagggaatcaattctgggaaaggatcgtgcttctcttcactgccccaagtagaagattcaagtaaaaaacaaacctttcttcatcaatctgaaaatcttgttgttggtgtattctcatggtctctgtgaactttggtctctttttttgtgcagagttcttgaggataatcatgctgtgtttattgaaacggttccgtttaagacaatggcgatgtttactctgtttcaaaccgcttacttactggtctgctttggcatcacgtgggttccggtggccggagttttgttcccgttgatgataatgtttcttgttccagttaggcaatatgtgttgcctaatttcttcaaaggagctcatcttcaagacttggatgctgcagagtatgaagaagcacctgctatcttatcattcaatctcaaaccggtaattaattctcttcttcttctcttcaaaagcttaaggctttatcgagaacataccggtaatatactggtttcttcgtggttgtgtgcaggaaggggaagtgagccgtgcgacgtcgtttgcggatagtggagaagtgatggacggaatgtttacgagaagcagaggagagataaggaaagtgagcagcttgaagctaggcggtggaggaagtggatcgacggtaggttcgccggcgggaggaggagtggagttgatgagaagagtggtgagttttcagaatccaagggtgtcggagaaagtgtacattcggagcttaagtgatttcagaggaggtggagagattagtccacgatcgtccgctggaagagctccgttcagtccacgatccgccacgggtggtggaggaggagaacagagactttctaatttaggaaagtctgtttagtaaacagtatagtgtagtctctctctctattcatatttgttctaaccaaccaatcctatatagccaagttattccatttgcctgtcattatgagatttaagaaatgaaaagaagattatctctcggagaatttgtttatttcaggaaaatttgaaatgattttgatctccaagtacaaaaaaatggacaaaaaaaattattagagtcctagttagtagtccaagagtacaaaacaaagcaatacaaaaaagttaaaacgacatcgttttcattgtaaataactgacatcgtttcgttgttatataaaacaacgtcgtttcctatagcaacaagatgctctctgcttcagctggccttcgtcgtctctgcctgggctctgaaactgcatttggctgatcttggatcttcatgaattatgtacttgaaagatcatcgaaattcaatataaaacgggtaaagcttctcaattttacaataaacacaacttttcagctattgaaacagtgactaagctgtttttcttttgagctatatttctttgttagtgctaagtaatagtaaacaacaatttactatgatcttgcttctgggtctccttatatccattaaagactgatcctttctgcaccaattcagtttaatctttcttcttttagcttaaatgtctctggttagttatgtctgaagtatacaacaccggttccaaagttcgttgaccattgtttgagttcttcttttattaggattgtgagaataagaatcggattatgctaactctaattcgtaatctgcgttttactttaggttactca

SEQ ID NO: 9805 - DNA, 594 bp, Unknown
  misc_feature (1)..( 594): cDNA_ID_2185922_gDNA_ID_1974073_Annot_ID_180281 3000 nt of promoter + ATG
tccaatgaaaggcttctagtgctttgagtctagtgcaattttgcgttttcaagctgcaattacccttcttcttcagcaactaatcgagaaagaacttcaaaatcgtcttcgcttcatcactttggttgagtggatggaccgaaatttgtgaacaacaatttatgcttccatgtttttaacttttttgccatgggaccatttgtataggtttaaaatctttgattgtaaacctaaactttttcattttcaatgaaatatttacattcttagcaaaaaaaaaaaaaaatgcagcaagttttagcatcttgaataattgcattgttctaaaaattatctacaagactatacaatcaatgaaacatttccaggctatatgggctcatttaaaatgggcctgtagacgcatgaggccgtaaataatccagctggcaaagaaatgagcgggaacatttttatgtacaaaatcctcgaaacaaaacatcacacgtaccgcacgtgccattctcccgctccttctccatttgcccctcaaatctcaaattctcaaatccctagcttttctctctctccctcagattcacagcatttgcaatg

SEQ ID NO: 9806 - DNA, 3000 bp, Unknown
  misc_feature (1)..( 3000): cDNA_ID_3033507_gDNA_ID_1974073_Annot_ID_180293 3000 nt of promoter + ATG
atcttatggaagttgcacggtcaatgatgtttcacacaagtgttccgaagaggttttggggtgatgcggttctaaccgcgtgctaccttatcaatcggacaccaactaaagtcttgaatgacttatctccctttgaggaactaaacaacaccaaaccgtctattaaccacttacgtgtctttggttgtgtatgttttgttttagtacccggagaacaaaggaacaagttagatgcgaagagcactaagtgcatgttccttggctattcaacgactcaaaaaggatataagtgctttgatccaaccaagaatcgcacattcatatcccgagacgtcaaatttcttgaagatcaagagtatgataacaagaaggattgggaggacttaaaagatctagctcattcaacctcggatcgcgttgcaactctaaggtttctattggatcatttgggtaatgaaacaacaccaacgaccgagaatacgcaagaaacacattcaccaaatcaagaagacttgcatcaagggagtgatagtaatgaggaagagtatttacaacatcaagaagaccttctcaatatacaagaagatcatgaatccgtccaagagactcaacatgactcaagtgactcaagtgatgatgaaaaacaagaacaagtcctagttcttccaactccatcacttagaagaagcacaagaatccgtcgcaaaaaggaattctttaatgctcttgcggtagctcatccattccaagcaacatgttctcttgcccttgtacctaaagatcatcaagccttcctctccaagatttctgaacatcgaattcctcaaacgtatgaggaggcaatggagatacaagaatggcgggatgcggtggccgaggaggtgaatgcaatgaagcgaaatcacacttgggatgaagatgagttaccaacgggaaagaaaacggtgagctctcgatggatattcacaatcaaatacaagagtaatggagatatagagagatacaaagctcgcttagtagctcgggggtttacacaaacctatggatccgactacaaagaaacctttgctccggtggccaagcttcatactgtccgggtagtcctcgccttagccacgaatttatcatggggattatggcaaatggatgtcaagaatgcatttcttcaaggcgaactcgaagatgatgtgtacatgactcccccacccggcctagaagacacaattcaatgtggaaaagtgttgcggcttcgcaaagccatatatggtctcaaacaatctccacgggcgtggtaccacaaactaagtcggacactcaaagatcatagcttcaagaaatccgaatccgatcacactttgttcacactacaaagtccccaaggtattgtggttgttctcatttatgttgatgatcttatcatcacgggggacaacaaagacggtatacaaaccacaaagacctttcttaaatcatgttttgatattaaagatctaggtgaactaaaatattttctcgggatagaagtgtgccgctcgaatgcgggtctttttttatcacaaagaaaatatactcttgacttgttgaatgagacaggttttatgaattctaaaccggcgagcactccacttgaagatggctacaaggtcaatcgaaagggggagaaagaagatgagaaatttggcgatgcacctctttaccgcaagcttgtaggtaagttgatttacttaacaaatacaagacctgatatttgttttgctgtgaatcaggttagccaacatatgcaaatcccgatggtgtaccattggaacatggtggaaagaattctaaggtatctcaaaggcagctccggacaaggcatatggatgggaaagaactcaagtaccgagatagtaggatattgtgatgcggactatgcgggtgatagaggagatagaagatccacaaccggttattgcactttcatcggaggcaaccttgcaacttggaagacaaagaaacaaaaagtggtctcatgttcaagtgctgaatcggagtatagggcaatgagaaagcttaccaacgaactcacttggctcaaagcgcttctcaaagatcttggcattgaacaacacacacccattaccatgcattgtgacaacaaggccgcaatatacatagcctcaaactcggtgtttcatgagagaaccaagcatattgaagtcgattgtcataaagtccgagagaagattgtcgaaggggttacgctaccgtgttatacaagaagtgaagatcaattggcggatatcttcaccaaggccgcaagtctcaaagtttgcaacttcatacatggcaaactaggacttgtggatctatctcactcttgatctcaagttcccctaaccatgaacatcacactctttttcccttagtaaagttttctcccatgtggttttctctactacggtttttaatgaggtgatggatcatgtgttccaagcttagacttgcgtgagtcttacgcttgagggggagtattgagcaagacctaataaaaagcatccatccgtacaaataaagaaaagaggccgagtgttgtgtgtaagctacaaggtgttgggccgaacacattgagaagcctatagggagcttctagaatgagtgaaggcacacaaatatctcttgtagccgttgaagagaactcacgagtggtcttagcttcatggtcaaccaaggacctgtcactctcaccattaagaccaaggaatctcttctctcatgtctctttcattcgcatgttatgtgtaaacggctatgttccctttgtgtgtccttaaaatacaatgtaaacacacaaaggtaactaaccaattctagtaatatgttttggtcattctcactcataacaatgctctcttgttcctcatgattctcttacccttactcttactctttccaaactacaattccgcatattctttcaagaagtccctcatacgtattacaccgggtggatatatagag

SEQ ID NO: 9807 - DNA, 3000 bp, Unknown
  misc_feature (1)..( 3000): cDNA_ID_3033503_gDNA_ID_1974073_Annot_ID_180294 3000 nt of promoter + ATG
taacttcggccaaagatgtgaccagcataaggaacaatccttcaggtgaaggaacgagctctgcaggagacattgtctggtccacttccaaaccatgaagtatcatccagctatcctacgtcgatgagaaaacatgtcgctgctgttcccccatgccgctgcactctttaattatatcgtaaagagttaaagttgtaggcctgaactactcactggaacatctaggatgggaagctaattctctggggctgttcttgactgaattgttttgcttcagatctttgcatcaagggcctaaaataggcgtgtggtctgatggggacgacacctttcactgctgaccctgcacaattaaagatctgccttgactgaatacacaccatcacattgttaaattcctttcctggatccttagccgtctccacagcttatcacattgttaaggtaaccaggtgccggtccaacgttttcaagggccctactcgagattcatttttttctccttttaaattactacttaaaatcacacataattaataccaagtgttttgagaactataagagttagagatagactaaatgactcaaaatcaatctccacatatgaagaacaatatactaaccttaacaaacacatcctgcacatacctttaacgttacctcttttatttaatcacttattcctcacgaatcacaaaaaaataagtctctcgtagagtaattaaaagtgactctgcactaaactaaagaattataaagagttgatggttttataaagccataataataataataaaaacataatacaccatcagtcgattccactcttttttctttcttgccgtcttacaacgaccttgtgattcctaggaacatgaaggacattgagtaactacgaggcagtgaagacttatgggaagtagccaagctgcacaaccgtgaaacctctttgcctgaggtaaaatctcatcttacctctcttataaactctccattcatttgattgctgaatttgtgtgacataatacaaatgctctgttcttctttgccgccagcatatggattcaaataaaatggttttcattgttagtccagaacatgatataactttaaaatgtaaattactgataaagtgatttgatagatgatcgtgagagatgaattcaaatagatttttgtgttgttgtttcaggaattgtacgtgtcaaggtacttgaaggggatggagttgagaaaatggggcgaactcaacacaaaacgaagagagtttctagacgcaattccacggtcacttcttgaactcgttgatagatgtttgacagttaaaccaacgcaaatctaatattgaatttcaagaggatgctctcaagcacgacttcttccaaccagtacatgaaagccttagaaaccaaaggctccttaaactgcagcaaatgcaatcgcagccttcagtggttgctgacgcagtcggccaaactctaaagtactactgtacaatgtttgaacaagtaattttgggtccgtaatatagcccaaatcacgaaaatgcccgaaaaagtacttaaaggtcaaaatttggggtcgacaaaaagtcaatggaaaagttccattgtcctgcttctttcgtcggagggctctctttgggctttccgaaaaggtatcacatgccaagtttggcctcacggtctaaaagttatggagtcataaagttttaaccaaaaaaaaaaaaattaaaaaaaaagagggatgcaacacgaggacttcccgggaggtcacccatcctagtactctcgcccaagcacgcttaactgcggagttctgatgggatccggtgcattagtgctggtatgatcgcatccgttagtatatgcaatgcaatcgtatatattcttttttgaagacttgatgaaccattcgccgtgggtcccacccgctatgtagggataccccatctagtcttaacgagctttgatgcatgaaaaaattcgaaaacaatgcttgaacaagtaattttgggtccgtaatatagcccaaatcacgaaaatgcccgaaaaaatatttaaaggtcaaaatttggggtcgacaaaagaaaacattacatgaaaatattctctccactgtccacaccacacagctctagaaaactagatagtttgttgtcagtgttttcactgtattattagttgaattataatcctcataatcgatatacttattattctcctaatttccatgcatgtatgtacagtatgaataggaaaaccagacttttgatattagtgaaccttaacattgttaaaataaattgaaatcttgtttctgtcttgaaccactgacagccacaaaattttgggtcttcaaaaatatatgtggagaggaaaagtagctctcgaggaagtttctgtctattttgcctagaaattatcttgaaatcttgtagaatggctacgtctcatcatcatacataaattcagtgacgactgatagccacaaaattgacttatcgttatagagtagaagctttccaaggaaaggaaggggacgtttctgtatcacacaattatggtcttatcttgttagggatttgatttttcaaccactaaaaaaatatcttgtacagtaagtcttctatgcaagtcttctaagaaaggaagaccaagtttacgtattatttgccccaattgtcttgtaatgggatttgattttaaccactaaaacaatatcttgtatagtaagtcttctatacaagtcttcgaggaaaggaagaccaagtttctcctctctgttactgtgttgtattattgatatacttcaaagagttttcctttgagaaatttcgtctcttctctctcatcctctgccatggcgtcttcttgcttcaaatagatatacaatgttctcagatggatatataatgttttcgcgagcttcagtggagaaaatttcggcaaattgtttcgtggccatcttgtcaaggagctcgagctcgaccgtgaattg

SEQ ID NO: 9808 - DNA, 3000 bp, Unknown
  misc_feature (1)..( 3000): cDNA_ID_2185956_gDNA_ID_1974073_Annot_ID_180297 3000 nt of promoter + ATG
ttggcgcttacgtagggaatcctttagcttctgtaattgcttcaaattggaaagagatgcgcgagaactcatcctacgatcatgcttcaagcatgtggccttaccaggtggagaaatccctaagtatttcacgtatcgagcttatggagattccctaactgtcactttacctcagagctctctttctcaatacttctttccatttaaggcttgcgtcgtggttgaacctccctccgagggcaagggtttttatccatccttgaaggtaaatgttggcttcaatggcaaacagtatcagaaatcattttttgaagatgcagacctgcagttttgtaagacggatcatctgtttttctgttccttcaagatctggtctgaatggactttcaacgatgtggagtttaagttttgttgctccaataggatcaaagaatgcggtgtacgactcttgtatgtctatcaagaaacagagtacaaccaacagactacgagaagcgagaagcggatgggggtatcttttgacttttgattagagctgaaaattataaagctatcttttgacttttggtttgatttttcaggatcgaaacaccatagggacagactatttaatagaatcgatcgtttgatttataatgcagatgacatcggggacatctgaagaatatatcaacttaccctatggccaaattgtagcggactcaggattggccgctctaaatatggagctttcgttagggcagggagaagcatcatcatcaacatctctagagggggaagctttgtatgttgattacatgataactgaagaacaagatgaagaaattcgtatcttgtctactgattctggtaactgaagcatcttatcattctgttttactctgttttaggataacttgggatcgactatgactataatgataatgataattaactgcagatgatgaagatctttaggagaaccaaagtccgttacattatccagctctgcgtttgttttgaacatttcacttttcctgaaagaaaaaatgtttcagaaagccatactttagcatattctggaaaaacatctttggcatggttttgttttgtaaaaacatattctatttttaagaaagacattgaatttgggagcgtacctgcttgagtgcaggtactacccaaaatagtcttgcctttttaaaacatagatctcaatgtttatgttagtaaaggttgtttttctctttattagcaatgaataaatcagactttgggtacagaaaacaacaagaatgtgttggaaatattttacatagcaagtcactcgtcatcagcaacatttgcatatccgctgattcaatagccaaaaggcaaaagcgtttttggcctaacttcggccaaagatgtaaccagcataaggagcaaaaggcagatgatggagcactgacaactagaaaacttttatggttccatgtccagaacagcagaagcactctgttcttacttctctctgttttgcttctttgaaaaattcgctttcctgaaaagatgtaaatataacagtcttgtcttttgaaacacacatatctctctacgtgtatgttaccaaaggttatttttctctctttaaatcaatgaataaattcggtaaagaaaaatgtatttcacaagagaattatcaacaacaaaaaagtgttggaactaaatttttaaatagcaacctcatcagcaacaattgcatcactgctaccgtggcgtttcctacactcacagtaaaaaacagtgattacaacataactcagcaccaccactgccccatacatacaaaaccagcttccacccgtcctactcaccggccacaaccaccaaactcaatcacgaccctgaggtcaagtgagctagtcattgtcacatttaggatgtgaaagctaatttctctggtgcttattttagctgaattggtttgtgcaggtttgcttcagatatttgcaccaatgacctaataataataaataataatataatacaccatcagtcgattccactcttttttcgttcttgccgtcttacaacgaccttgtgattcctaggaacataaaggacattgagtaactacgaggcagtgaagacttatgggaagtagccaagctgcaatcgtgaaacctctttgcctgaggtaaaatctcatcttacatcccttataaactctccattcacttgattgctgaatttgtgtgacataatacaaatgctctgttcttctttgccaccagcatatggattcaaatatcacataaaatggttttcattgttagtccagaacatgatataactttaaaatgtaaattactgataaagtgatttgatagatgatcgtgagagatgaattcacatagatttttgtgttgttgtttcaggaattgtacgtgtcaaggtacttgaaggggatggagttgagaaaatggggagaactcaacacaaaacgcagagagtttctagaaatcttcactccactgtccatccacaccacaccacacaactctagaaagctaaaagagttttttttttaacaaactagatagttagtgttttcactatattattatgtgaattaaaatcctcataattgatatacttacaaattctcctagtttctatgcatgtaagtatagggaaacaaagactgaattccccactcaacatgtttacgataagctgtcctttttacaataagcaaagaccttggacaccaaaataaatctaatattgatttaagaggcatcataacttgtagttgagcggttgaatacttgaaatcaggttttaaatgcttcattggccttggttcgaacctcattacaaacatttcgctacatttttatatttatggcctatgggcaaaaaataagaagtttccttgcgcatcccacccttaaggaccggcctcacagtaatcactctaatcaataatcactgtgtattcgatttactgtacttatcttctcctcatcatattcc

SEQ ID NO: 9809 - DNA, 3000 bp, Unknown
  misc_feature (1)..( 3000): cDNA_ID_2185964_gDNA_ID_1974073_Annot_ID_180299 3000 nt of promoter + ATG
ggagcgttttgggtaagtaactaagtatgattaggcatgaaccttccacattttcaagcataacgatctgaaactgctgaaattattgctttatttagggggaaaaactgtataataaagcatcaaggctgtctcaagaatggagattctgattgcatcatccttgagcaccttgaacatgacagacctgattcattgaagagagaaatagatgtgtatcagctgcagtggtacggctactgcatgttcaaagctctatcgagtctgcataagcaggtatgcagattttggactgaattatttttagcattcatatttcaatcacgcaactaactagttctattttttctcttcacaatcttgaagggtgttgttcatagggatgttaagccaggaaacatcctcttctctaggaagaccaacaaaggctatctcattgattttaaccttgccatggttagcattttttgtcacccttctcttatcaaaattttcctggcgacggtttttggttagtgtttcttactatagaatttgaagtaaccgaaaaaaactgcttattcaattctaaggtcagtgtctaacagaggcactgaaaaacttgaggaacacaaacgttcatgttaaaatttactgttatgttcccttccccacccactgatattaatctcttttttttcctgcatggttcaattaggatttgcaccagaagtacagaagagcaggtaaacttctcccctcatgcatatgtgctgtacttggctataaaatatggaaactaaagctatctcttgttatgttctgtagataaatcaaaagcagcttcaggtcttcctaccgccagcaagaaacatcatacattggttaaatcactcgatgcggtaaaccgagggaccaacaaaccttctcagaaaactttagcgcctaatagtatcaagaaagcagcgggaaagacaagagctcggaatgacatgaccagatgggagagactcaatagccaaggggcagaagggtctggcttaacttcagctaaagatgtgaccagcacaaggaacaacccttcaggtgaaaagagaagagagcctttgccatgtcatggaagaaaagcgcttttagattttctgcaagagacaatgtctgttccaattccaaaccatgaagtatcatccaaagctcctacgtctatgagaaaacgggtagctgctcttccagggaaagctgagaaggaacttctttatctgaccccaatgccactgtgctctaacggtcggcctgaagcaggtgcagttctggtgtaatcattgacttttgtttttgtttcagagtttaatttaaaccttaagaagagtttttctgactttactaggggacgtaattgagaagaaagacggtccttgctcaggaaccaaaggcttccgagctccagaggtacatcaactgtaactatagctcacttctcttaatacgagttaaatatgaaaatcttgtgccttcagactaaagttgtaggcctgagctactcattagcacatctctgatgggaaagctaattctctggggctgttcttggctgaattggtttgtgcaggtttgcttcagatctttgcaccaaggacctaagatagacgtgtggtctgcgggagttactttgttatacctcataatgggaaggacacctttcactggtgaccctgaacagttaagatctgacttgaatgagtacaccatcactcggttccactcgtttcttctttcttgccttcttacaacgaccttgtatttcccaggaacataaaggacattgcacaactacgaggcagtgaagaattatgggaagtagccaagctgcacaaccgtgaatcctctttccctaaggtaacatctcatcttaccactcttctgtactctccattcatttatgagacacatatacttgctctgttctttttaccgccagcttaaatatcacataaaagggttttcattgttagcgttttgtgttctattgcttctactgcactcccattacagaacatatatatcttaataatgtaaattgatgacaaagtgattaaatagatgatcgtgagagatgaaatcaggtagagttttgtgttgttgtttcaggaattatacgagtcaaggtacttgaaggggatggagttgagaaaatggggcgaacgcaacacaaaaagcagagagtttctagacgcaattccacggccgcttcttgaactcgttgatagatgtttgatagttaacccgaggcgacgaatcagcgcagaggatgctctcaagcacgagttcttctatccagtacatgaaacccttagaaaccaaatgctccttaaacagcagcaaatgcaatcgcagcctacagttgttgctgacgcactaagcgaaactttaaactaattatacaattcttaaaaactaaaagagtaatttagcaaactagagagttaattttcactttagcaaactagagagttaatttaatttagcgaactaattatattttcactttagtatacaattcttagtgttaatttagtattttcacttatattatttgaattaaaatcctcataatcgatatacttattctcctaatccatgtgcatgtatgtattgggaaacaagactttgatattaaacaatcataagtacattcttacgataaaatgtcttgtacaaggacaactgacacccacaaaatatgtgtgtttcaaaatatctgtgtagaggaaacgaatgtaagtttctgtctaattgcctagaacttgaaatattatttctgtcttgtacaaagactaagacttatcataattaagtgacaaccacaaaaattcaatctctaaaaatatctttgtatgtagtgtaaaaaagctttcgaggaaagtaagacgaagtttctcctctctttctcacactatgtcttgctgatttacttctcttaaaaatcttcgtctcttctctgagttcgctctatcatctccc

SEQ ID NO: 9810 - DNA, 3000 bp, Unknown
  misc_feature (1)..( 3000): cDNA_ID_2185940_gDNA_ID_1974073_Annot_ID_180288 3000 nt of promoter + ATG
atcttatggaagttgcacggtcaatgatgtttcacacaagtgttccgaagaggttttggggtgatgcggttctaaccgcgtgctaccttatcaatcggacaccaactaaagtcttgaatgacttatctccctttgaggaactaaacaacaccaaaccgtctattaaccacttacgtgtctttggttgtgtatgttttgttttagtacccggagaacaaaggaacaagttagatgcgaagagcactaagtgcatgttccttggctattcaacgactcaaaaaggatataagtgctttgatccaaccaagaatcgcacattcatatcccgagacgtcaaatttcttgaagatcaagagtatgataacaagaaggattgggaggacttaaaagatctagctcattcaacctcggatcgcgttgcaactctaaggtttctattggatcatttgggtaatgaaacaacaccaacgaccgagaatacgcaagaaacacattcaccaaatcaagaagacttgcatcaagggagtgatagtaatgaggaagagtatttacaacatcaagaagaccttctcaatatacaagaagatcatgaatccgtccaagagactcaacatgactcaagtgactcaagtgatgatgaaaaacaagaacaagtcctagttcttccaactccatcacttagaagaagcacaagaatccgtcgcaaaaaggaattctttaatgctcttgcggtagctcatccattccaagcaacatgttctcttgcccttgtacctaaagatcatcaagccttcctctccaagatttctgaacatcgaattcctcaaacgtatgaggaggcaatggagatacaagaatggcgggatgcggtggccgaggaggtgaatgcaatgaagcgaaatcacacttgggatgaagatgagttaccaacgggaaagaaaacggtgagctctcgatggatattcacaatcaaatacaagagtaatggagatatagagagatacaaagctcgcttagtagctcgggggtttacacaaacctatggatccgactacaaagaaacctttgctccggtggccaagcttcatactgtccgggtagtcctcgccttagccacgaatttatcatggggattatggcaaatggatgtcaagaatgcatttcttcaaggcgaactcgaagatgatgtgtacatgactcccccacccggcctagaagacacaattcaatgtggaaaagtgttgcggcttcgcaaagccatatatggtctcaaacaatctccacgggcgtggtaccacaaactaagtcggacactcaaagatcatagcttcaagaaatccgaatccgatcacactttgttcacactacaaagtccccaaggtattgtggttgttctcatttatgttgatgatcttatcatcacgggggacaacaaagacggtatacaaaccacaaagacctttcttaaatcatgttttgatattaaagatctaggtgaactaaaatattttctcgggatagaagtgtgccgctcgaatgcgggtctttttttatcacaaagaaaatatactcttgacttgttgaatgagacaggttttatgaattctaaaccggcgagcactccacttgaagatggctacaaggtcaatcgaaagggggagaaagaagatgagaaatttggcgatgcacctctttaccgcaagcttgtaggtaagttgatttacttaacaaatacaagacctgatatttgttttgctgtgaatcaggttagccaacatatgcaaatcccgatggtgtaccattggaacatggtggaaataattctaaggtatctcaaaggcagctccggacaaggcatatggatgggaaagaactcaagtaccgagatagtaggatattgtgatgcggactatgcgggtgatagaggagatagaagatccacaaccggttattgcactttcatcggaggcaaccttgcaacttggaagacaaagaaacaaaaagtggtctcatgttcaagtgctgaatcggagtatagggcaatgagaaagcttaccaacgaactcacttggctcaaagcgcttctcaaagatcttggcattgaacaacacacacccattaccatgcattgtgacaacaaggccgcaatatacatagcctcaaactcggtgtttcatgagagaaccaagcatattgaagtcgattgtcataaagtccgagagaagattgtcgaaggggttacgctaccgtgttatacaagaagtgaagatcaattggcggatatcttcaccaaggccgcaagtctcaaagtttgcaacttcatacatggcaaactaggacttgtggatctatctcactcttgatctcaagttcccctaaccatgaacatcacactctttttcccttagtaaagttttctcccatgtggttttctctactacggtttttaatgaggtgatggatcatgtgttccaagcttagacttgcgtgagtcttacgcttgagggggagtattgagcaagacctaataaaaagcatccatccgtacaaataaagaaaagaggccgagtgttgtgtgtaagctacaaggtgttgggccgaacacattgagaagcctatagggagcttctagaatgagtgaaggcacacaaatatctcttgtagccgttgaagagaactcacgagtggtcttagcttcatggtcaaccaaggacctgtcactctcaccattaagaccaaggaatctcttctctcatgtctctttcattcgcatgttatgtgtaaacggctatgttccctttgtgtgtccttaaaatacaatgtaaacacacaaaggtaactaaccaattctagtaatatgttttggtcattctcactcataacaatgctctcttgttcctcatgattctcttacccttactcttactctttccaaactacaattccgcatattctttcaagaagtccctcatacgtattacaccgggtggatatatagag

SEQ ID NO: 9811 - DNA, 3000 bp, Unknown
  misc_feature (1)..( 3000): cDNA_ID_2185932_gDNA_ID_1974073_Annot_ID_180286 3000 nt of promoter + ATG
aatcgatagtttggtttattatacagatgtcattaggaaactctgaagaagatttcaacttaccctgtggccaaacagtaacagacacaggattgaccgctccaaatctggagcttccattagggcggggagaatcgtcatcaatttcatatccatgtctggagggtgaagctttctctgttgattccatgataactaagcaacaagctaaagaaattcccatcgcatagggacgaagattctgaggcatcatggtaactgaaacatcttactattctgttttgttttgttgcagcataacaagagaagcaatctttattgatctatcaaataacctgaattacaatgaagagaactgcagagtttcaggctctgaaacacaccaattcaatgattggataatcaatctctcacagaattagagactctctatatatatactttaaagactctcaacatttagtcataatgttgactctttgactttgttcttccttcttttataggtcatcagggtcagcaaagcctttttaagtctccaactctagagcatggtactctgttcttacatctttgtatctacttctctaaggcttccgcatttcctgaaataataaatacatgttttgaatttgtgagcttagggtttgcagacttaaattagtcctgaattttctaaaacacacatacattgcaaatggattttttaagcaattaataaatcagaatttggatcaacaaaaatttaaaacttgtgccgtgagagttgaccttctaaccaagggcaaggattggtatccattcttggaggtaaacgttgccttcaatggcacacagtattggggatcaatttataaaattgaagaacggcagttgtgtaagaggaatgcttatctgttttcttgttccttcaaattccagcatgcaaatcttccatctaaatcggctttcaacgaagtggagtttaagttttcttactccaggaggattaaagaatgcggtgtacgactcttgaatgtgtcttcataccaagatgatagtgatggaagctctgaaaaagagtacaaccagtctggagaaaaaggtgactttgtagtagagacatcagtaacatctgaagaatataacaacttaccctgtggcctaattgtagcagactcaggattgaccgctctaaatccggaggtttcgttagggcaggtagaagcatcatcactttcttcttatccatctatggagggggaagctttgtgtgtttattccatcataactgagcaacaagacgcagatattccgatcttgaacagactcattagctgtcatcatggtacctgaaacatcttcttattctgttttgttctgttttaggatcaacttgggattgactatgactatagtgataatgacacgagccattttttactgtagatgatggagagctctcggagaaccaaaatccgtttaattctccaacttcggagtctgaaagtgtttgtaatttcttttttatctgaatgcagaaatactctgtgtttgctttgaaaattttgcatttttcctgaaagaataaatgtttcaaaaagccacactttagtatattctggaaaaacatcttggcttggttttgtattgtaccatacttagaaaccaaatgctccttaaagagcagcaaatgcaatcgcagcctacagtcgttgctgacgcactaagccaaactttaaactaataatacaatttttgaaaggaaaaatgataacaatcgccatttattctgaattctttatgcaatctaccacaatcattcattccttacacatcataccacatttcgatctgaaatgtcagtattgccctcaccatttcttctctactttatctctccttcctcgaaatccgtgcgctttaaccatacatcattattttcccgaagacaaaacgaaacgcttttgtctctctctcacttcccctgacaacctgcacagattctctacatgtaactttcaattaaatttgtcccccaattttattcatcataaattctctgttgtatctagatcttgtccccgatttcatcatctttcaaaattatcatgaatccaacatcttatccaccaattgttatcatttaaggatttcatattttatttagatttttcaccatctattttggtcaatagattagttgagcattattgtcttcaccgatccgaatttattcatttttttcttctattgtaaaataacaaaaatatccagttataacatattatcttgtctaccattcgatctaaatttgtcccagatctaactctatcactcatttgatatgaacttgtccccgatataacatattatttaaataaaattatatgcaattgtaaacgtgtaggtgaagacaataacgttcaactaatctgtggaccaaaatagatggcaaaaaatctaaataaaattcaaaatccttaaatgagaacaattgatgaacaagatgtgagattcataataatagagcaagatgatgaaattgaggacaagacgtagacgtaacagagaatttctattcagggacaagatctggagacaaaaaaaaaagtttgtcaccaattgtcctttatctgacacatcagtctgtcaccatcaagggcaatttcgtccacaaatgtgcatgtgataatgaaatgtgatagattttgtaagagaaagctttttgttgtatgaattgtaagaaaacttcaaaaaagtggtagattttacaagattcccttcttgaaaactaaaagagtagttttttttttaattattatttatttttatttttttaaagagtaatttagaaactagagagttaattagtattttagtgttaattagtattttcactgtattatttgaattaaaatcctcataatcgatatacttattctcctaatccatgtgcatgtatgtattgggaaacaagactttgatattaaacaatcataagtacattcttacgataaa

SEQ ID NO: 9812 - DNA, 3000 bp, Unknown; identical to SEQ ID NO: 7836
  misc_feature (1)..( 3000): cDNA_ID_2036371_gDNA_ID_1974075_Annot_ID_180349 3000 nt of

SEQ ID NO: 9813 - DNA, 3000 bp, Unknown
  misc_feature (1)..( 3000): cDNA_ID_3033600_gDNA_ID_1974075_Annot_ID_180370 3000 nt of promoter + ATG
tctatgcaggatggatatctatggaagatgagcaacttcaatatttgtccatgatcatgttgcattcggcagacactttctctatgaaggagtcaccgcttcttctaactgatggtagaaacgccgaagagcttatggatgaaaatgctgtagttatgcaatccaagatcagtcaaataaaagacatattccctgagtatgggaacggtttcttagctgcgtgtcttgaagcctataaccagaatccagaagaagttatacagaggattcttgaaggaacactccatgaggatttgcagcgattggacacttcactggagacgatgccacaacctaaatctgctccaactcttagaagcaaagacaaagggaaaggaaagctcattgaatctgacactagtagctctgctagtgccatctatacagagaaaccgatcacacggccctcccttccagcttcatcagcctcatcagcaacagttggcagatttgtcagaaagccaaaggatgatactccaagttacaaaattctcgatgctagaaaagaatccgacagagagaggaacgcagccctacttgcacaatacgaatatgatgatgaatacgatgattcttttgatgatctgggcttgagtattgcggaatcaggtactgaagaaagcggagcgtttggtaacagagctggatccgagccctctgatgctccaaagtggggtagcagaaagaatcctcaattctatgtgaaggatggtaagaactacagttacaaagtggccggcgcagttgctgtggcaaacgccaacgaagcttcactggtaaatgaagcagagggagataagatacttgggttgggacgtggaggaaacattcctctaggagcggttagaaagttgacagagtatcaggcacagagagatgagaaaggtcagtctaatgtgaatgtgaacccaagcgatggaagagagaatgggagaaactggagaggagtaaggggaagaggaagaggagtggtgaacagagagcaaccgcaggagaagagtaatgagagtagtaataacaactcagaggttaatacagaggcggagaacggaggaggacggggtcgaggaaggggacgaagaggaggaggtggagggagaaatcataatcataaagatagagctatgaagaaacatattgctagtgtttctggcttctagaggtttaaaaagtaacaaaaagcacaatacgtttttgtgggtctgttttttcggatacaggggagaaacttaattacaaatcgatacttcatttgattgtaatgcttgtttctggtaattaaaagaagaaaactagcatattattattccctttggttttggttaaacaagtttcttttgtaacaggttggtatgaatctaataaaaaaatgaactttttgtgaaaaaaaaaaaattcttttgatatatatgcaaaggtaacaacaacttataaccattccaaatctccaattgaactcacattgtctaagttctatctttttatctttattcttcttcccgtaaaagaaagagtagttattacttcgagtgacagaagttgtaaaaatttgtaagcatgtaagccgcaataatataaaaagagaagaaacatttataaatgtgtgttatatataaagaattgtattttatttgaggtagataatgaatgatctacaatcaacaactacacggtttgtgattatatgtatccacgtgatttaatatacaaatagatttgttttctctgcaaaaaatacaaaaataaatacataaaagaaaagccaaatcctaaacgtaactggaaaataatatacgtatgagctaatttcaatttggattagacaaagaaaagaagaagagagagacgtaattatacaaaagcttacgagaagtttgttccatcatcacttgagagaaagatgatcaaatcatacaagagaaacacgaaccgttcaacgggagggaacgcggcagcactatcattcgctttggttcgtcgtgcagaatatttaggtacatacatatgttttataaattttatcatctttttgaatgcatcataatttacaatatttcgattacgagaaaactagatgaagagaaccttaaacatcctttttaacataaaaaagaacactaaactaacacaagttctacacattagtataatttcttagctgataaaaaacacaccattagtatttttccctttttggtaacgttttttttaagataatctaaaccataatactgaatcacaaagctcataaaaaaggaaatcgaaattataatcacgtcggcaagtaaagagccaacggtgagggatgagccacgtgtgaaaggatattccttagatgtgaatgggatctaattcttgtccgattaaaccgagaagagtcttggtacgcctctctatatataaaagtcatcactttcctcctcacgtttcttcctttggcatcgacgaaagtctgaaaactcttttctctccacctctttctctcttaccccaaacacaaaatctcctctttaatggatatatcgcctctccgatctcattcttcctcgtttttatctgccaaactcttattgctcttcttcttttgtagttttcgtgcttcttcgatttcttcttcttcagttgtttcccatcgtcgtaatccttctagctttcggtttctttgataattccctttgaattcgtttttcttcttctttcaatttccgcaaataatcagccgccgataagataatcatggggaggagtaagatttctcttcttcaatttttattctttaattgattcaatttgcaactggatttgtttgttttagggttttaattgattactaatttactatgaaatctcttatataaccaatttctgttttcgttaacgcttttataaatttggatgctttgattaacttttgctggaattgtttttttttgtgcagaatctcagcgtaagaacgcgaca

SEQ ID NO: 9814 - DNA, 3000 bp, Unknown
  misc_feature (1)..( 3000): cDNA_ID_3033608_gDNA_ID_1974075_Annot_ID_180368 3000 nt of promoter + ATG
aagaatatgttaatgtgtcgtgaaggaacaaagcctgttgttgtcgaccccacaagttgactgatcgtgttcatcatcatgcatggcttcgtttcacttatttaattaacgacttgttcacgacacaaatgattgtaccagtttaagaatctcttgatctctcttcatcatcaccaaatcttccttgagaaatattctctccatcatcaagtgtctccaacctatatatatatatatatagttgcacaagttcaagaattatcataacaacaaactaacaaacaacaacaacaacaacaagaaaggcaagagttgatcagttagagcgatggacgtttttgttgatggtgaattggagtctctcttggggatgttcaactttgatcaatgttcatcatctaaagaggagagaccgcgagacgagttgcttggcctctctagcctttacaatggtcatcttcatcaacatcaacaccataacaatgtcttatcttctgatcatcatgctttcttgctccctgatatgttcccatttggtgcaatgccgggaggaaatcttccggccatgcttgattcttgggatcaaagtcatcacctccaagaaacgtcttctcttaagaggaaactacttgacgtggagaatctatgcaaaactaactctaactgtgacgtcacaagacaagtaagtggaagatccaatatataatgtttactttcattcactactactacgcaataaactaaataaaatatcattaatttgtgggatataggagcttgcgaaatccaagaaaaaacagagggtaagctcggaaagcaatacagttgacgagagcaacactaattgggtagatggtcagagtttaagcaacagttcagatgatgagaaagcttcggtcacaagtgttaaaggcaaaactagagccaccaaagggacagccactgatcctcaaagcctttatgctcgggttagaaaacatactttatattacttcggtctcaaaaccaaatgacaatgagtaaagtcgttcttaagtgtgttatcaattgttgcagaaacgaagagagaagattaacgaaaggctcaagacactacaaaaccttgtgccaaacgggacaaaagtcgatataagcacgatgcttgaagaagcggtccattacgtgaagttcttgcagcttcagattaaggtatgtagattgttaaaaggattttttgtttttagtcagaatcttatcataactcatgttcaagttaactaaccaaaatgcatattttataaatgtagttgttgagctcggatgatctatggatgtacgcaccattggcttacaacggcctggacatggggttccatcacaaccttttgtctcggcttatgtgaaggacttacaagttacaatgtcaatgtaaagaaacccatttagaacatatatatccctatttgagccaaactaaagagatctacgctaagatcctaccattttcttcttgttgttcattctgatatttttattattcttaacttcttttgtctctttcgtcattatggttctaagaacttttggtactctttttcttttcttttttgtaattatatttttaaattatgaaaaagtcaactcagactaattaaataacaatcgtctttccttttgcaatttgaaaacaaagataaaattgtattattttatgccagggtttcggttatgtttcgtacgactccaaaattcaccaatcttcgaaaaaatatattgatttattcgaccgactttatagcaactcatgataaaagatgtatatcaacttttttttttttagtggttacttcatattgttgattatcattatcactttatcagtgcatattcagacataaggtgcatattggcacaaataatcttttaattcttgtgaatagcacataacttgtgtctaaaaagttaagtttttgaatacctaattaaacaagtgtttgtggaaacaccctacaatttcttttggccacttaattttttatgatttgagtctagagatgtgattgtgaatatgtgatgataccgcacaaatcgttctgctgtgcgacgatgtgatcgatcaatggaaaaaacgtccaataacaagcggatttgatatcattcgcaaagccacgtaccgtacgttcaaaagatgtccttcatatgaatatcgactaagaacgttttgatttttgatttattaacctttcattgcatttctttccgacatcttctctccattgtatttagaagatgaatttagtcaaacattgaaataaaatttgctatgataacaaattttgtgtcattcatcataaattttaaattaggtgttataggctaacacttatattctaggttttagaactcataaagttatcccaaacatctgactgtaacaaactaactatacatcccaatttatgcttttacacgttttacctcccaaactttgatctattaccattcaaaaaaattacagctcttcactaaacattacgatatattagaagctacacaattccaaatctctaactgaaatattgttttttcatttagtatactttgaatttttttattagttgtttttaattagatgctatatgtttttttaattaaagatgcaaagattcaaattccatgattttgaaaaactcattttttttttttttttttaaataccaaaactcaaaaattatcaaaatacaactattatatgttgacaaaaaaacaatttatccaaaatttttacttaaataccatcccttgaacacgttcctagtttcggtttggtttggcttgatgttctaaaaagcgattcggctttattagtcaaaccaaaccgtatcgtgaattcgtgatcgcctttagccaccgtgaagcttctccgcgagctagagggtcttaaacactaacaaaatacggaactgacaaacacagcaaccgagactctctcttctctctctctcgctctccgtcgctgcc

SEQ ID NO: 9815 - DNA, 3000 bp, Unknown
  misc_feature (1)..( 3000): cDNA_ID_3033596_gDNA_ID_1974075_Annot_ID_180372 3000 nt of promoter + ATG
acagatgcaggcttttacaactgtcatgtgatttgttgtaagagttccagttttgtcactacaaatagttgttgcagatcccattgtctcacaagcagcaagattgcgcactagcgctttgtcattcatcatctttttcatggcaaaagcaagacttaatgtcacagccaacggcagaccctccggaactgcaaccacaacaattgttacagcaacagcaaaatattctagcatcgccatcaattcatcagcagtccagatccagtgagaattatctaggcgcttctgattagccaatccttgaaccaaaacagcaaacgtaatgacagcaaaaaatagacctattttaccaatgatggttgccacaccattaagttttacttgcaacggtgtctcatcatcaccgccttcacttagtgtagccatcagtttaccccattgagtcctcattccaactgtagtcaccaacattttgcaagatccatcctgaaccttggtaccagagagaagaaacgggtgttccacactgacactaaccggttcactttctccagtcaagctcgattcatttatcagaacagaaaaccctgagataaaaagcccatctgctggaatctggtctccaatgccaagatgaacaacatctccagggagtagatcatatattgagattttttgcctcagtttgtctctcgtaacctgaaccacaatctttttcttctctgcatccaggtccttgaattgcagggattgcctataatcactagtggcagtgacaaacacaacaagcagaatactcgccactataccaagtccgtcatgggcaccaataggccacccttccatcagtattccaactataagtgaaacaaacgcacatgcagctagaatcataagtgttgtatcctgaagggcttcccaaacaaataaccaaaagccacggctggggctttctgtgaattggttgattccataaatttcttttcttacactcagcaggtcttcagatgtactaattccactagcaatagacgtggaaagtttttcagtgaggccctcagttccaccatgaattttcaactttttcaaatcatgaccttctacaattgatcccaactcatcaggacaaatctcaaaccctgcttttcttacttcttcaggtagtgtatactcactggacaactttaaacctgtaagcacgcaataccttctcgttaaggaaatcaaatacatattgaataacacaagggagtagtctattctcactattaatgaactgaagtgcagcttgtgaaactaagaccgccactcgaaatttttcctgcattcataaggttgacaaaggaaaatggtattagaacaaagcaccaatagcagtaagaatttattctcaaaggaaaaatgaacagaacgctttgatcgctctaattaacgcctccttcaatacaaactacaagaaacacaaggcttgaaatgggttgtttgctactaatgagtcatatttgcttgaacattcttactagcaaacaccacgaagaacctaaaaatctacatcttaaattagaaacagaacctaatgtaatcatgtctagtgataacaatccctaacctgaggataggtaactagaaaaatactaaaaacgagctcacttagatcccatccagtaagtacagtgagtcaaccaaacaaaaaactcggaatgcagaaagatcacttattagatctccaacagtatacaagcagaaatagaaagaaatgtttcagtaatcaaagtgagaagaaagaagcacctgattggaacgccgaatcgcctcggcctcggaacgcttagacagattagcagtgaatctaaatctccttttaggattcttgacgatccagcagagcttcctccaacgctgcaacgcctcatcggacgagttcttcggcttcacatcgccgaagttttcgttcaagtagctctccatttcttcagcttactactctcgaacaacgagtgaattcgtaactatacttcagatgagataagattagagaaagagagaatcaaggatctcgtaaatcgagaacgaagaagatatgatatataacaagaagtcctctcactggtaatgggtgcttttaacttattgttatttacctttatatgggtcaagatgaagacgatgctttgacgcgtcgtctcgcactaagtgagcttcgtcgaagtttcgtctgcctgttctgaaatttcctcatggccatggttttttttttttttttggaacactcatttattcggacatgactcggagctggtcaagaaagtcaaagctatttactgacttggactttatttcaacaaagtttttagtatattctaagttttgtgacttttgtccattagaaatttcacacaaataaattagaataatttactaagtatattttctaaagaaatttttacaaaagtagacgaaaaaagatttgctctcattgtttgtcaaagtgagaactggttttcacgttttgtcttttcattcaatttcggaccaaattaccctgggaaaacttaataatggcataaaccaaaccgtgcagcagttcgtatcggttaagttgacggcgtaaaccaaaccctacagcagttggtttcggtttagttgatgcggttcagttttgaaaaagacaaaaaacaaaaaaactgaaacgaagaaaccgagaaaacgaaaaagagaataacggagagattgagagagaatcagaaagcgaaacgaaattcagtatccattgcttcaaaattcgacataacttcgaattgttgggtagttgaattgtgccactgaactcccacatccggtgaagtgaaagttactgtttttcccggcgaagccaagagaaagttactgtttttcccggcgaagccaagagaaagttactgtttttcccggcgaagccaagagaaagttactgttttttccggcgaaatttgaacctccggcgagatcgcatctttagct

SEQ ID NO: 9816 - DNA, 3000 bp, Unknown
  misc_feature (1)..( 3000): cDNA_ID_2036339_gDNA_ID_1974075_Annot_ID_180371 3000 nt of promoter + ATG
gtgccttatccatagaagtaggtggttcccgcgaatcatgggaaggtatggtttgttctggccttttgccttttggatcaagggtagcacgtatctggtcacggacaaagtctttcatatcttcatgcatttgatacatttggtcttccagctccttcaaagacctcctcatttcaacaataaacctctcaggcacaagctctccaaaacaatcctcagtagtctcttctttatcacagtccatttcagatttctgttttttcatagcaggttctttagggctcgggcccggtgcatttcgtttcctcttaacatctacaatagaccagttgctgctattaattggttttcttctaggtgcaataccaaaaaaatttgtaaaaacatttatacttatacttacctgtctcttctagttgtggtgggcgcgactgctttggtactctagcatagcctccaacccattcatcctcctgccactggtgcccatctatcaacagtgcctcaatgtaatcaacccttggatcatcaacttcatcatcccatgaaagagatggaggacaaacattatcagctggtttcacaatatagttgacctcaacctacacaaataagtatgttaaccatagataatgtacatttacttattatgtacgtacatacacaatttaacacacctcatcagcagcctcacactccaaaatgcgagatgtccggattgctcgcagagaggcaagacgatggatagacctctcagcaaatgtcctgttaggtacatcatcaggtcctagcttagcaattgatgggattgtttcgaaagctaaaagctggagagctaatgggaaaccatggagtgcataagaccctacaagtataccccttattagtttctgagcatcgtaaggagtttggaaatttgctatcctccccaaagtacgggtaaaggacacccttccccatgggtatttgcagaaaaactccaggttcttagtcatctcgacagtctttgaagtaggcctgttggggttactgtgggccgctaccacaccgtcaaccaaaataataagagatagtgccagttggttccacccctccatgctttcctcctcctgcagccagctcaccaaatcagcaattgttggaaccgtgtccccaaacctctcatgaaacagagtattccaaacactctcacactcaggtttcacactgataacatcatcaacgtctttcttcttgggatacttcccacattccagcccagttaagatactaaattctcttaatccaaatctgattggatgaccgccgaatacaatccacatctcattcaccttctttgtcactaactgacggcatattagtccaaggacaagcttagcattgaaagatgccttgtttttgggtattttaaaaagtttcccaaatggagaatcgagaagaaactgcatctctggtttcccctttagtacttttgctatgtcagaaatgtactccggtttagagtacgcgttcatcttcgtctcggaagggtaccggtctagagcaaagagtcttggtggtaactcttcaactgtaagatcttcagtcggagcaacacttggactacctgcaattaaaagtcatatactgttgagcaaacagaagtagtgtacgtacacagacattttccagattataactcaaaatcatatttttggcggaaacagagatttccaattctacttctcaatttttcatcctaaagatatgctaaattccgacaaattctaacactttaatcaaacaagctttacaattctgatacacccaaagacaacaaacggtaaattagagattctaacccagttcctccgttgcctttgtcgcagagcgttttctccgcggggaaactcttaatacacgcttctccttccctggaccatgctgcttcctcgggacttcgtcgttagctttattcccagccatagctaaagatgcgatctcgccggaggttcaaatttcgccggaaaaaacagtaactttctcttggcttcgccgggaaaaacagtaactttctcttggcttcgccgggaaaaacagtaactttctcttggcttcgccgggaaaaacagtaactttcacttcaccggatgtgggagttcagtggcacaattcaactacccaacaattcgaagttatgtcgaattttgaagcaatggatactgaatttcgtttcgctttctgattctctctcaatctctccgttattctctttttcgttttctcggtttcttcgtttcagtttttttgttttttgtctttttcaaaactgaaccgcatcaactaaaccgaaaccaactgctgtagggtttggtttacgccgtcaacttaaccgatacgaactgctgcacggtttggtttatgccattattaagttttcccagggtaatttggtccgaaattgaatgaaaagacaaaacgtgaaaaccagttctcactttgacaaacaatgagagcaaatcttttttcgtctacttttgtaaaaatttctttagaaaatatacttagtaaattattctaatttatttgtgtgaaatttctaatggacaaaagtcacaaaacttagaatatactaaaaactttgttgaaataaagtccaagtcagtaaatagctttgactttcttgaccagctccgagtcatgtccgaataaatgagtgttccaaaaaaaaaaaaaaaaccatggccatgaggaaatttcagaacaggcagacgaaacttcgacgaagctcacttagtgcgagacgacgcgtcaaagcatcgtcttcatcttgacccatataaaggtaaataacaataagttaaaagcacccattaccagtgagaggacttcttgttatatatcatatcttcttcgttctcgatttacgagatccttgattctctctttctctaatcttatctcatctgaagtatagttacgaattcactcgttgttcgagagtagtaagctgaagaaatg

SEQ ID NO: 9817 - DNA, 3000 bp, Unknown; identical to SEQ ID NO: 7840
  misc_feature (1)..( 3000): cDNA_ID_2175516_gDNA_ID_1974075_Annot_ID_180351 3000 nt of promoter + ATG

SEQ ID NO: 9818 - DNA, 3000 bp, Unknown
  misc_feature (1)..( 3000): cDNA_ID_3033624_gDNA_ID_1974075_Annot_ID_180361 3000 nt of promoter + ATG
ttaggtgaataagtccaattcctgaaaaaaaagaatacaaaataaactcattagatgaacaattgatcatagaattattggggacaatttgaataaagaagtattataataatgtagaagaatggttggaaagagttggcgaggagagagtgagggcaggtgaagctgcactgcacagcaacgaccgggccaatataatgcacggttgggcgacgtacaccgccggacgaaactgacacgtgtaccctttgttctttcttcttttttgtacccctcaattactacattcattgtaatgttttcgaaataatagagtatatatgtattttgtctctaaatagtagagtatgagtgactagattcactatatgataactggagagtgcaaaactaatcatgacaaaaagtaagggtatgaatgattttggttattcgtttcgattctaaggtgatttgtgagttagatttggtactaattacagtttagctcttttcatcatattcttacatgttatatatttcaaaggaattatctagacgcaaacaagctttgacaagaaaaatgaaaacaagcaaaatcgagaatacatcttaagtaaggcaggggatgcggcccgattcaaaattctatgttctaaaaaattatttattatatatggagaaattaattcagacaatttgtgggttctttggatgacgatctccatctcttcttgacactgggagaagaattctaattcttactcgttaatttatatgcatttgatgatattatttttctcacatttgtctaattagtgttagtattaatttaatttggtatgctagacgggctcaattgggtgagtttttttaattagttccaatgaaagttgatgtgaaaaaagtattgtgagccaattagattggtaattagtaaaatttagaaaagtcaaatgtatggaaacactatattaaaacatctattacttaatattgttaatgctatagcattttattaatttataagaaattgttagaaactcctttttaattctatttgtttatgcagttcattctttttatacattcttttattttaatgactgttttactcatatttgaaaatattttagattaacaaaatgaaataataattttttccgtcaaaaatatttcgaaaataagtttctcgtaaaacaaatccgacaaaaaaaaaatctaccaaaaaattttcccaaaaaactttttcttgtcaaatttttttttccaaaaaattcatttcccccaaataaaatatttttgccaaaaaatagatttacttgggtttacttctttttttctgttttctagctaaaaccaattgacaaaccgataccataaatctaagataatagataaatattgttatgaccgaccataattgtaaatttgtttggtgaaaatgggtttctcggagctgaatcttctctaactgtggagagatgtggagaaaatatagacattgcagagctcacagacttcctttgtgctgcttcgatggttagagaatttagtgagtttcacactgaccctgaagatcgaaagcttagatatgacgttaagaaaaaaagttagaattgaaatatgagccaatgtcagttgttgatgacgagccggtttgcctaccaatgataaaatttggggtttcaaaagagacatgactcatcacacatagatcacttccggagttagtcacaaagcaactttttttctactatgagaatgtctttctcacacctaaaagcgtttgaaaaactatctcaggatacttgtttgatatcccacctaagttttttgactcgaaatatttatgtatttcagcacaaatcagcacaaagagaggtaacatccacaatcttccaatccataatagaatccatcaactgccaccgaaatacacaattcgtgatgcatttccatttactaagagatggtggccaacagactaggataaaaaagcccaagctaaactgcattttgatttgtacaaggagtgcccaattaactaacatgatccgtttagcccttgaaccttacaatggagaactaaaaccgcataatctttttctgacgaaataatttaatgaaactatagatgagcaatactattgtatctaatgaaaattgatgttaaaaaatattgtgaaccagttagattggtgattagtaaaaatttagagaactcaagatgttcaataatggaaatccgaaaaactattattactagagttttttcttttttctttctgttttctagccaaaaacaattgacttaaccaatgccacaaatctaaagacaatagacaaatattcaacttatgctttccaagaaaatatcatcaggaccatattgagtgatactgtagtttgttttgctctttctgccattttggatctgatttgtaaaaatgtaaaatcatcttagaattctgcataatttttactaatcataaaatgtaacggattagtaattccaatcatttagtaattagtaaggaccaaaatcacatgaaagatatcttataagaaccaaatttggttattccaataaaacccttgaatgatattttgccgttttcaaaacccttaaaagaagaaaaacaatcagagggttggcggtgttcccgtcagaagatcacgaggatcatcacattaaactctgttttgttgatctctctttctgttccgtttctctttccactgccaaaagttaaagctctctctctcactcaatcacacactcatttctcactatttcacaacttccttgtggacaaaattagtcgacttctctgttctctccaacactgtttcgttttcactacccaaaattcgaatctgggttattgaaaaagttccaatttttttatctgggtttttcgaaagctgatatctttttagaatctgatctatctcttctacttcatttcccttgcatttttttaataagttgtagaatctgtcttgttctggaaaaat

SEQ ID NO: 9819 - DNA, 3000 bp, Unknown
  misc_feature (1)..( 3000): cDNA_ID_3033620_gDNA_ID_1974075_Annot_ID_180362 3000 nt of promoter + ATG
gggaggatattggaaccataggatcattctttgatgccaatttagccctcacggaacaggttttcaccgactctttattgtttcatctccagtgcagggtggtgactcagtgaaacctaatcatgctatttgtttctgttttggcagcctcctaaattccaattctacgatcaaaaaacacccttcttcacttctccaagattcttgccacctaccaaagttgataaatgcagggtacaatatcttgaattcgattatcccgttgtttcagctaatgattcatcgatcctcatgttgtaaagtgtattatggaattgcagatacttgattccatagtttcacatggatgcttcttgagagaatgcagtgtgcagcactcaatcgttggcatacgatcacgtctcgagtctggagtagagcttcaggatacaatgatgatgggagctgatttctaccaaacggaagctgagatcgcgtctcttttggcggaagggaaagttccggtaggggttggccagaacacaaaaatcaagaactgtatcattgacaagaacgccaagatcgggaagaacgtggtcatagcgaatgcagatgtatgttttcaaagatctttttggttattttgaagaaatggttgtctgattttttgttgtgttgggttgtggcagggcgtggaagaaggcgatagaccagaggaagggtttcacataagatcaggcatcaccgttgtgctgaagaacgccaccattagagatggtctgcatatttaagcttttaaacctctctttaggagcagtgtatgtggcttcttgtgattttgtaacgagactagttacgttcgattaataatttaataaaacaagaggcacaaacgaatgacagttttagcaactttaaacgtgatcgttaatcttggtaaatcttaatgattacgtaaaacacagagagaaaccaatcacaaacagacgagaaaaaagcatgtgtaaaattcttcactctcacgatcacaagtcacaacacaagacttgagactcccatccatatatacactttacaaattatagatatttcattcgagttttatgggactataaaaagagtcataaaactcttgtctcttattgcagtgagaatgagagaataggttctgaagactaaatggtctgatctttagagaaggtaaggaccactagaagctacctcaccaactcaattagtgtcaaattaatccaaggccaacagtcctgaaaaagtctcctaactttttatgtctgcaactgtatatgggacatccctagttttcttaattttgaatcttgattcttgagttaaaacaaaaacccaaatatacaagtatgcatgaaacgtaaactttcagagaaggtttctcacattaagtatcctttgagttaagtatatagtccataagactgtttttggttttaattttagtatttgtgtgtttgggcctcccaaagattgttggcagaaaagttgtcattatcactggaccaaactcgcatgctcaatatttatcatcaccagttataattacatacaccgactgcttttttaattttattcattttatattctctcggcctcatggcaccgttacttcccgcctcacgttgacgatatatgagagaatattttatcatcatatcatagtgaagataatagcacaaaatcacaacacaagtttttggtaagtaatgatcgtccgctgtaatgatcgtccgctcaatagggttattggtaagtaagaatgaacctgagctataataacttgatatcaaaatcgtgtgtgattgtagaaaaaaaaaatcttataaatgattatttgtttactttttgtcaaacacttatatataaggtatttaaaactagatataaggtattttagactggtaaaacaaaactaagaaaacaattatatgaactaaatatggacgacaaaaaaaaaaaaaaaaacataagaaaagttatttttttttcttttgtcgtccataattatttttctgtttgaacacacaaaggcgcacttgagagtttagaagtaccatggaaaatggttatttgaggttaaagatgaaaatgagtaagaagcaaccatataaatatatatccattctaatttggtcccatgaatcaaattgaaaactccagaaaaggaagactatttttaataattttgtgttatgttgaccttttgtgacttatgctcatgctcatgcacaccctactcgtctatattgtatattgcttttagtaatataacacctttttttttttgttaaaatagtaatataacactcaattgctttgttttgactttaattaatttccatctctaagagcatgcctttcgtgttccttaaggctaattgctcactaatttatgctgcttttgaaataaagtattatatatatatatatatataatgattaacatattatcaacttttatgaaaaaatcaaaacatattaagcaactccttttaactcgttgttgtggtcacaaactgtaacaagttttcttcttatccaatgtggaacgagttagcccaaaaaaaagacttgagagaaagaagacaaatatgaatgttttatgtcttataaatggaatgtaaaaccatttcaatagaaaaaaataacaaaaaaattcttataccaattttcataattaaatcttatcccgaatcccatttgcctgtaataatgagacttttaaaagtttttattcgagaagcagtgattcataatttcaacgatgtcgagaaaaaaaatgtgtataaccctaaataatagccaaaataagaaaagaataattaaattccaaaagaaatggttaaaaaagcgaattaacgaattaaattcgacatttatattttgcaaccttcccttcgacgcaaacatttctctcttttttctctaatcaccaaacctgcgtcttctctctcacactactaacaacacttccttcttcttcttccgact

SEQ ID NO: 9820 - DNA, 3000 bp, Unknown
  misc_feature (1)..( 3000): cDNA_ID_2034746_gDNA_ID_1974075_Annot_ID_180363 3000 nt of promoter + ATG
taatgatgtcactgcagtcagtggcatcaatctcagggtatgtttacgagttgctacacttctcattttgaacctggatatagagaaacaataaaccaaattactttctgcatctgttctaggaagaggaaaaacaattattagattctggtcctaaaaagaacgatcgtgtttctaaagcatatcgaagacttgtgcatggagaggaagaaagaacgcttttgcagaaaattccactgcagagaaagctgacagaaattagtttgtgtttcaactcgtatcttagctgcttctttggtccttacttggaatcacttggagaagaagtttatgtatgctttcatatatgacagtgggaaaaagtggtttaaagcatatagaccatgatgtagagcggtgcttgtctctggtgagatgttaacaccttttcttggaattattagccttcaatttcctgtttttgttttcgtttttctcatggctttgcgcattcagtgtgtggaggagaggatgcgaggactactgtttaatataatacgaatatcaaagcaggtcagtctactttctcttctcatgcctccttagatcttgttgtacctaaatctttctgaagttacaagagcttttgcagcggactgatgcagagaagtgtagaaatcggacttttatcacatctgatatccggaaagaaattaatgaaatgaatcagaaggtgaaagaggaatgggaaaagaaacattctggagaagaaaaggtaatggtttgtcctgagcttaatatctatttgtcttagttatcagtagtaatgtctagttttttttttttgtatattcattgatgtagaacaaagaaaatgatactgaaaaagaagaccaacgttcaaacgaagtgaaggtatttagaacttgagccaactacctaaacctttggagatatacacatacgtacactgaaagaggtttattgatcacaagtcaggcaaataagaaggacgaagataaagagagagccaaggctgcaaatgttgctgttcgtgcagccgttggaggagatgataggttttcaaaatggaaacttatggctgaagcacgtcagagatcttctccagggccaggaagaaactccaagaaactttctggtaagattggtaatcccgtttctatgatctgaaagagtaaatctctcagttctgttgctggttattcttgtgtttcgtgctcctaattgcatattcgaactttatgtaggtggtacacaatttgggaagaaccaaggtttaccaaaagtagtccggtcaatctctgtgaaggatgtgatcgctgtggtggaaaaggagcctcagatgtcaagatcgacgctattgtatcgcgtatacaatagaatctgctcggatgtttgaaaccaagaaaagacataggaccaattctttatttttttttgtagaaaggttcttattccattaaaactaatgccattacaaactcctaaacatgatcaagatgctaaagtacatccttatttcttcttcctttcactacctaaagcaagctgcatgttttttctagtttttgcctgatcccttcgtgctgactccgccgtgtccatatcctcctccaccaccaccgcctccgctgcatgaacctccgcatcctccaccaccaccgccaatgatgactccaccaccaatacctcctccaccaccaatacctcctccacctgacccgtatcctggaccaccacctccgttgcctccatcccaacccaaaccaccacctgaaccatacccggcacctccaccaaatccaccaccgattacaacaccaccaccgccgccacctggaccgtatccaccaccaccatatcccgggcctccaccgccgtagccaccagctgtgagttcacccttaaatccggttacgtgtcggatactctttccaatctcactggagtgtgcttcattcctcatgagcttactctctcttccaatctcactcgagcgtgctttattcctcatggacgcactttctcttccaatctcagtggagtgtttttcattcctcatgagcttactttctcttccaatcccactggagtgtgcttccttcctcatggaggcaccttctcttgcagcctcggcaatcatatgaccgatgagacaaagatacgaggaaacaagaaaccacaagatcactctagccatgatggctgcttagtgacacaatttgtttgcttagaatctgaaaaaggaagtaaaaggacttgtgtgtttgaataatacacagccacaaacacacaccactatttatatatcttgggacataatacaacggtgatggttggcatgggcgtgccagtagagagagagagaggtgcatatatggtgactcaccagaaaggtgtaacaggtgatggttctcattcgcatgatttttcccacactttttgctgcattttttcattattattcattttgcagtctcaagttttttcttaaataaaagaaaacaaggagtgactcgtgtaccaatccattgatctgatttgaacatattggttatcacacatatgttccagaggaaacaatgaattatgaaactgtaataaaatgattataacatgaataaaattgatagataagtcataagtaatcaaaagtaggatcatggcatatttttttcctttaatcatactttcgattactagttcttttggtaattatgctgtcataaataaagcgttaaccaaaatgaagagaattagagattatggaccggtttattgagaaccacattgaataaaccaaacattaatagtactaattttcgcacgtgtgtgtaacgaaaggccgtaatttggctaatcgatgaacgaacgttccctctcttctctgaaatctttctcgatccatccatcttctccattttcctccatttctgggtttcttctcatcttccaaggattaggaaattagtttgttttttttcatctgctcaagtgatg

SEQ ID NO: 9821 - DNA, 3000 bp, Unknown
  misc_feature (1)..( 3000): cDNA_ID_3033629_gDNA_ID_1974075_Annot_ID_180359 3000 nt of promoter + ATG
gtgaaatagtgagaaatgagtgtgtgattgagtgagagagagagctttaacttttggcagtggaaagagaaacggaacagaaagagagatcaacaaaacagagtttaatgtgatgatcctcgtgatcttctgacgggaacaccgccaaccctctgattgtttttcttcttttaagggttttgaaaacggcaaaatatcattcaagggttttattggaataaccaaatttggttcttataagatatctttcatgtgattttggtccttactaattactaaatgattggaattactaatccgttacattttatgattagtaaaaattatgcagaattctaagatgattttacatttttacaaatcagatccaaaatggcagaaagagcaaaacaaactacagtatcactcaatatggtcctgatgatattttcttggaaagcataagttgaatatttgtctattgtctttagatttgtggcattggttaagtcaattgtttttggctagaaaacagaaagaaaaaagaaaaaactctagtaataatagtttttcggatttccattattgaacatcttgagttctctaaatttttactaatcaccaatctaactggttcacaatattttttaacatcaattttcattagatacaatagtattgctcatctatagtttcattaaattatttcgtcagaaaaagattatgcggttttagttctccattgtaaggttcaagggctaaacggatcatgttagttaattgggcactccttgtacaaatcaaaatgcagtttagcttgggcttttttatcctagtctgttggccaccatctcttagtaaatggaaatgcatcacgaattgtgtatttcggtggcagttgatggattctattatggattggaagattgtggatgttacctctctttgtgctgatttgtgctgaaatacataaatatttcgagtcaaaaaacttaggtgggatatcaaacaagtatcctgagatagtttttcaaacgcttttaggtgtgagaaagacattctcatagtagaaaaaaagttgctttgtgactaactccggaagtgatctatgtgtgatgagtcatgtctcttttgaaaccccaaattttatcattggtaggcaaaccggctcgtcatcaacaactgacattggctcatatttcaattctaactttttttcttaacgtcatatctaagctttcgatcttcagggtcagtgtgaaactcactaaattctctaaccatcgaagcagcacaaaggaagtctgtgagctctgcaatgtctatattttctccacatctctccacagttagagaagattcagctccgagaaacccattttcaccaaacaaatttacaattatggtcggtcataacaatatttatctattatcttagatttatggtatcggtttgtcaattggttttagctagaaaacagaaaaaaagaagtaaacccaagtaaatctattttttggcaaaaatattttatttgggggaaatgaattttttggaaaaaaaaatttgacaagaaaaagttttttgggaaaattttttggtagattttttttttgtcggatttgttttacgagaaacttattttcgaaatatttttgacggaaaaaattattatttcattttgttaatctaaaatattttcaaatatgagtaaaacagtcattaaaataaaagaatgtataaaaagaatgaactgcataaacaaatagaattaaaaaggagtttctaacaatttcttataaattaataaaatgctatagcattaacaatattaagtaatagatgttttaatatagtgtttccatacatttgacttttctaaattttactaattaccaatctaattggctcacaatacttttttcacatcaactttcattggaactaattaaaaaaactcacccaattgagcccgtctagcataccaaattaaattaatactaacactaattagacaaatgtgagaaaaataatatcatcaaatgcatataaattaacgagtaagaattagaattcttctcccagtgtcaagaagagatggagatcgtcatccaaagaacccacaaattgtctgaattaatttctccatatataataaataattttttagaacatagaattttgaatcgggccgcatcccctgccttacttaagatgtattctcgattttgcttgttttcatttttcttgtcaaagcttgtttgcgtctagataattcctttgaaatatataacatgtaagaatatgatgaaaagagctaaactgtaattagtaccaaatctaactcacaaatcaccttagaatcgaaacgaataaccaaaatcattcatacccttactttttgtcatgattagttttgcactctccagttatcatatagtgaatctagtcactcatactctactatttagagacaaaatacatatatactctattatttcgaaaacattacaatgaatgtagtaattgaggggtacaaaaaagaagaaagaacaaagggtacacgtgtcagtttcgtccggcggtgtacgtcgcccaaccgtgcattatattggcccggtcgttgctgtgcagtgcagcttcacctgccctcactctctcctcgccaactctttccaaccattcttctacattattataatacttctttattcaaattgtccccaataattctatgatcaattgttcatctaatgagtttattttgtattcttttttttcaggaattggacttattcacctaatgctttttagtcatgaaaattccacgaccgaactataaagaaatacgatatatccagtttgtttcaattattgaaccaattatagagtccttatatctctttataaaatcatcaaccaagtgattagatcgacaagtctaagtgaccatccactttattttaaaacactttatttcctcggaaaatctaagccggagttgcaagagagcttagaaaatg

SEQ ID NO: 9822 - DNA, 3000 bp, Unknown; identical to SEQ ID NO: 7841
  misc_feature (1)..( 3000): cDNA_ID_3436784_gDNA_ID_1974075_Annot_ID_180350 3000 nt of promoter + ATG

SEQ ID NO: 9823 - DNA, 3000 bp, Unknown; identical to SEQ ID NO: 5771
  misc_feature (1)..( 3000): cDNA_ID_2033485_gDNA_ID_1974077_Annot_ID_180395 3000 nt of promoter + ATG

SEQ ID NO: 9824 - DNA, 3000 bp, Unknown
  misc_feature (1)..( 3000): cDNA_ID_1582322_gDNA_ID_1974077_Annot_ID_180419 3000 nt of promoter + ATG
gtgtcgatttcttgaataaacaggtcctggagcgtcttgtttcaactctagatcgatgtgcatcacgtacatgctcattgcctgttgaaactgtagagctgatgcctgcccattgtagcagattttccttgacatgcttacaaaaattgttttccttgagcaggtaataacacgttgagcatgtcatgtccatgattatagcatagtcctttactctcttgactgcttcatctgcaaaggcactagcattttatacttgataatgtactagctcttgctcctcatatgagtccctaatcaactctagttgtgtattttgcatcaagcacacatagcaatatgcatatatatcatagagagagtccgcaggcacattgccatttctgctgcagaagattaggaatgtccatggatttggtacccattcctgctccctgtttaacatactgatatcaattaattttttagtttcagctctgaaaccgagaactggcactccacaagagcagaagtgagcaagatctctatcaccacactaatggccagatgtgaattcattttgagtagatttttaatcgacgaaaataatctaggtaaggctctccattttcttataaactccaacatctttttcgcttgccattccttaatcagtggttatcttttggcaggcaaccgtccaatcccaacagctagacttgaagagattatctttaccctccaagaactttaccgcctcagcattcatcctgaggttgcatctgttcttccgttgcaaccctacctgaaaaacgttctacgcgaagataaccgtgacacccgtgcacacctacttgtcctttttccctctctgtgcgagattgtgttatcaaggtaatataacttctacaattattgttttgtgttcgaagcacaaaagggtgacagcaaattctctgtatggaccctatcaagttaagattttgagagtttttttttcaccagggaaatgcgggtgagagagctggtgcaaattttactacgagcagttgctacggaactaggcctagaaaaggttagtctatccagttgatggcaatagatgggaatgtttctcagcagatttgagttcttacattagattcttgagaaattttggttttataccatataggttgtattctttgttttagcgtgttctgaattactctgtgtgctgtattctacaatacgccattctccgagattttatgttggtttggttcaacaaagtactctgttaactgattctgagaaccacggttcgatcatcaatacagtctagaccatcctaacctgccttcgtgtacttggtccattgacgatgtttggttaacttgtgctatttcattctgatcttgttgaaaataaatttgtgtttcaactcgtatatgcctattttaattaggtaaaattaaaaacttgagaatcttatatagatcaacatatatacatttgtttaagtttatataaacttgcttctcaataacaagaaagaagaattgcatcatttggactgattgatccgagcggcggcagcgacagaggcagccacaccggttgggtatgtagtgagatgaggatcgttcctcatctcggcgccagtcactccctctgcgtcctttctcgttgctgctttatccgatggtaatttgctactcgctccctttcataatcattgtttcccaaaatcgaaaaaaaacattagaacccgaaaatgaaagaaataaaactagatattggattcaagcattttatgtatcacgtcttatgtgctattacttacagtgagaacgtcggctagcgtagtcttggtatcgtcagagccgatacgagcattaagagtggcggctgattgagctgaagccgcaacaccgccgggcatgatattggtccgccccgtagctctaacctcggccgcttgaatggcggctgcgtcactccactccaccggcttattccctgccgtgagaaccgctgcctctagagcctctccaattgttatggttccttccgatttcagaggattagctaccacctttttctggttaacttctccctccgcctacaaatttaacgttctaattatacaaattatgatattaacacaacagcgatgatactagcacaaaccactagattatatagtcacaaatcaacctgttcaccggaggcctcggctacaacacctttctctttgtcctccgccgccttaatgcctccctccgttgtcgaaatcttctctgcctctccttttacatcagcacaatctataggtttctgcagctgttcttcgctcattttttggggtaactctttctctcttttcctttttttctctaggcaacaatatttataaatgtaatggtcagaatttatataagttttgcattagccattcaattctgtgactatcttacataaacaacaacaacggctctcctcaactttctctgattttccctcttaatttagccaataacaatcaaacatatgaatgattcggttcggttttcactgaaccgaagaaatccaatcgatttcgctttggttagaacaatcaaaccgataattgaaccagttaaatactatccggtttagctaactcaatcaatcggttagggtcttttaattagggttttaaagtttcagtctctctcacttcttctttcactcacataacaaaaaaaaaaacttcgttcacttgccgcaaagtcgccggaaccaacttacttagctcaccgtctcgccggagtttcgacaatcaaaggtttctcttctctccctgtttcacatctcacgacggatcaaattagggttttcaattgaatcagaatcagtgctggctctgtttgaatctattgttccgaatttgtgatttaatcttctaattagctttgttgtatccattttggagcaatcattcaatttcataatatctcaaataccttgattgatcaatagcgagaagaagcacgaaga

SEQ ID NO: 9825 - DNA, 3000 bp, Unknown
  misc_feature (1)..( 3000): cDNA_ID_2033414_gDNA_ID_1974077_Annot_ID_180420 3000 nt of promoter + ATG
ggtgaccttctagataaaggtcttgatgagcttaatactacagctgaagatggaagtgtcgatgaggtatttcggaatcttacgctaatttcgtgattctttctttaatggggactgataagttttggtttgtgatgctactaaaggtggcgaacttactagtagatttgtacgaagattgctgtaacggtaactatgaaatgcttgaggaactaagggcaacttattctcagacgagtgcaagtgttgtcaaggttaggttctttctactacttccgatactgtcttgtccctttcactgagtttgagctcatgtcaagtctactttggtttggtttttaacaatctagttaagatagtttccgagagttagaattgaggctgtttagtttcttataccaattatggtgtttcaggtttcaaacggtgatgacgaggaaagtgatgatgaagatgatgatcaaaccactgacatgatggtggatgcgtctaaccagaaacaagaagccatgcctgttgatgaaccagtagccgatgatggttggacggttgtttcgtctagaaaaaacaagggaaagaggaattaacccggttttgatccccaaggtgttgtgtaatttgaacagttttgtttgggttgctttgtttatttattttgataatattatgatagtatgacttgtgtaccgtcactttataaactaaaatcataagattgagttttcacatattaatctactctcacataataatcttatgatcccatctttgacgcctaaaaaaagactcttaccagttatcatctcctccgcttcaagataaatgtttttttttctttttaatagaatgtaaatattcatttcagtggaaagtttgagttacacaattaagcatagccatagtcaaatatggtcacacaaatatggtcacatgccaaaaaaaaaaacagaaagataaacagcatggaagcgtaccaccttcttacaccaaatgatcaagttggcttgtgggtcgtgggttcgtgtgctcttggggctcgccgagtaattttggaccgtggattggcttttgagagttgaatcttatggaaatattctattttggcaacaacttgggaatcactacaagtaacttggggaatattctaagaatattctctcgaaacctacctcctctactatataaagaggcattcgtctctcattatttctcaagctgtcaaacagaaaatactcttagttctaaattctcgcatctattatgtttcttaaaagtaagttcttagtttagtagttttttagaatatatcgtagattaagtttgtttgagcctattattgtgtgctcgggtataagtttgtaatcggttgtatctaggaattcataaaccgtgattgtccgaaagcacttatggtcgacgatttattgaattaagaaaaaagatataatatcttgtttatgtgatttactttttgtctttaaatacagttgttgtaattcgttgttcataccgttattttaataaaattggcatcttttctcaatttggttttgcattcttacaattttattatggccgattaaatgaattaagattgtagaagcgcaaaaacaaagttgagaagaaaatacaaattttattaagataacgataacatgaatgaattacaacgactgtatctaaagacataaaataaatcacggaggcaggatctgctatctttttctttaatttattaaatcggctgtaactactttcagacaatcatgatttatgaatcccaagatacaaccgacaaactaatacccgagcacatgagtaatagactcacaatgactggatctaaagacataaaataaatcacggaggtaagatctgatatatttttctttaatttattaaatcggctgtaaatactttgagacaatcatgatttatgaatcccaagatacaaccgacaaattaatatccaagcacatgagtaatagactcaagcaaacttgatctacgatataatctcgaaactattaaactaagaacttatttttaagaagaaagagagaggcgagattttagaactgatagcgttttttatttgagagcttgagaaataatgagagtcaagtgcttctttatatagtagaaggaggtaggtctcgagagaatattctccgagtactccccaaattacttggagtgaactccaagttcttgccaaaacatagaatatttttgtaggatttaactctcaaaattgggcctatccacgatccaaaaattactcggcaaggcccaagagcccacaagcctatgtggcccaaaagtcgacgatctgatgaccatccctcgtgcctagcttggttcgatttagcccaagttactcactttacaccctttttctcatataagtcaactccgtttttgatgtatgagtataacatcttgcagtactcattaccatatttccattgcacaattgatctgacaatttcgtttggcaggaattggcaggaaagccgccggaaagtcactttttcaaaaacagttccaacaaaaccatatagacaaaatcttagtcaaccaaaaagattaataaaattatacaagaaagagatataagcacaatctacatatactaattattgtacatcaaactggattaggcttattgtagcgttacacgcaatatactattttttcatgttttggtattttattagattttagtaaaatatctatatttatagtaaaataaataaatagtaaagtatactatatattaatacatatttatagtaaattaattttatatatagtaaaacatataaaaattaaatgaaaaatgtaaaaaatggaggttccttttcttgagattgaaatgcaattaataaataatagtcaacaatattcactatttcctctatataagaaggccactagctctaaccagattcaagttaatcaaaatgcttgtgtggaaaccacactagtgaaagagat

SEQ ID NO: 9826 - DNA, 3000 bp, Unknown
  misc_feature (1)..( 3000): cDNA_ID_3033733_gDNA_ID_1974077_Annot_ID_180428 3000 nt of promoter + ATG
atttataaggaatgccattgacattaattattttcaattaattaatgattctaattagtagcattttcttatataatatatcttcattaattctaattacttaaaaaaagagaaattttaagacattattaatatatacttgattaaaagataaaatattgtagttaattaaacttttataatatttaacgaaataaacgtttagaatatttataatatatgaaatctataaaattaaataatcatttgaaaaaaacttttaaattaagttgaattataaatcttttaagaaaagtattatttaaacaaaaaacaaaagaaaatatatttaatttcaccgaacgggattagatggtaggatgaatttataatatttataatatatgaacttttaaacaattaaataaccatttgaagtaaaaaaaattgatttaaattatatatcttttcaaataaagtattattaaaataaaaataacaaaatattttaaatttcatcgaacggggttaaatggtaagacagatttgggtatataaaatacaagacgctatactatgggtaaaatccattagatatgtttaatttcactgaacggtattagatgatatgacgggtttggatcgatagtaatacgagatggtataccataggtaaaatcctagatataaaaatcaaaatacaattatattatcttaaacactaaacaaaaaaataatattaataaaacaaatataattaaaatttgaattatttagttatagtctagattttaacttaataaactatgtgttattctttctatatttttaaacagtaaaatttaaacatagtaattgtacactaaataatatgtagatataagagttgtacatttagaaaatacagaaaattaaatcatatatattttaaatctactaaacaaattaaatttttatttttaaaaaaagatatagccccgcggtgtaccacagattaaaatatagtttgttacacacttggtaacattttttagaaatgtgatctgatttttggtaaaacaagtgcattcgtatttaattttatattatcatcgggtaaaatcttatagcaaaaccaagactagttctgaagacatgtagaaaagcaagtaatctttttttttaaacgtctaatagtaaatcaaatagaaccacaacgatttttgtagatggttaaactcaatcctaaatcttaatccacacactcttttgatcattgataattcgtgctttctttaaagaaaggagaggcaacatgcaagagggaagattcgggtaagagtggaagccgtacacgcgaacatttatgaatagtgtgatctctattttattgtcttatcttgaatcactaaaacaaccatgctcttttatttgtttaacgaaccatcttgtaaatttctacgaaaggtgacaacacttttaaggattacatgcatacagtctccagactagttaccaccctccattgtaacgtgtttttttttttttaataccaatagcaactgtaacgtataaacaatttctaaagtattcttaactttcattgataaagaaagataattgatgggtcaacaataatgggccatttgattcaatttttatttttttggtttattttatttataaccaactcacaccggtaacgtgcgtctctctcgttcaataattatttcgcataaatgaaaatagttatatattctcatacatgcatgtattcgcctatttaaaatatttgttcttttctcatacactttttgcattttattgttgtcatttttagaatttttgtgagaggtactctaatcattcttattagcactaggagtcttttggccaaccaaatatttaaacagaaaagaagaaaaagaatcttggtttgcttatatggtttaacttttatttatatgtgtcaacccaaaaaagatagttgaaattcagaaagaaattttataaacagattaaacgatcaaactaactccatttgtaatgactaagaagagtaaaagactacaatttaagagatgattcttattttccatatataactatttataagcctttattgcacattttttggcacgttttcgtggaagatgagtcttatctaccaaatgctaacgtgctcctgatcccatttgtgttatgagttagagtcatttgacttatcacttatccgattctattattgtgccatgtttatgtatctttttgttcatttttttatataataactatacaatcataccaacataaaaaaattcgacatccctattatatatggtctaaaagtttaacagttaaataatttattcaacatttctattatacatagtctaagtaaaaaaattcgactatgactgcctttcataaaattaaatcccattcgcaatccacaaaagattagattgatagtcctcatcgttactattgatagtggtttcttgctcatttgagttcaagttatctaattttcaagaactcatgcaataactaatttagaatattgtttttcagaactttagaggatttatttatatacaattattttttttatgactaaaccaatctgttaaatcgtttaatatatatatatatatatatatcaattaatatatagaattccatgtaacaatatataataagagaaaacaattaattattgtaatttttaaatattgtacaataaaatttttattagaaactttttttaaccattttttaattttaaacagtttcaaacgctagaaactaatttttgcgattaatgttttttttgtcaattttttgtgattaatgtgaaaattgccagtaatcacaaccgcacataaacgttgaactatgcatcataaattaaattttgataattcacatttctcataatacagaattctcaaactactaaattactttgaaattcagcatatttaattaagaaaacatgagttaacaaaaatgtttaaattagtgaaaaaaatcctcatg

SEQ ID NO: 9827 - DNA, 3000 bp, Unknown
  misc_feature (1)..( 3000): cDNA_ID_2033378_gDNA_ID_1974077_Annot_ID_180433 3000 nt of promoter + ATG
ctaacaaatagagatttctatttttcaggaaccattgaagtaaaaatagagatctctattttttcttctctatttacatgaaaaaatagagacaactattggagatggtcttagagttatggtttacacgatgattctctttcgcgatcttagggttaggccgcttatggttaaaaatttacttattatttattcaggaaaaacattatatggaaatttattttaaaaaataaagaagatataagaaaacaatctatactattaattggaaagcattggataaaatatcacaatcatttgaagaggcagattgtgttatatctttgtcaaactaattctagagtcttttcaagatagtataaatcaatagatataaagacgctcattcgtataaatataaaaagcaaggtaagggtaaaactatcgtattcgtataaatcctctatatattaatagagaaacatttttaaaaaataaccttacccttacgtgtggttaacgaaaatgccatgctgacgtgtcgcgtttacaaagctcatcaacccatttaattaattctccattttctattagaatatttacatcaatttgacattgttactactaacacttattttactcattaattaatccaaataaaattttaaaaatgaacttaacatagcaagacacttaacatgttatttttcaatcaattaattaaaaaaaaattacattttaatatatgctattaagagttattaatctttacaagatgaaacacctaatattttgtgtaacgacaactttatacatgttacagttatcccttattttatagaatctattaggactttgacattatttttaacagaaataattgtcaaaacatattccattatgtcatatgaaattaataatcttatttatgttacaaaattttctaatagttacatttttcaataatctttatctttataataatcaaaattttgtgtatatataaatgtgttttaccacaatctaatactttttccgtccacccaaaatttgaaatctaaatcatatatatgaaatatgaattatcgttaagatccttaaacagttgtagatgtaaaatcttagtaatattttgttttttttaatattccaatatttatggaattcttaacaaaatctagaactgaaaatattttaatggtataatcttattttcagtacatgaagtaaaatatataatgtcgacatatgtgcacatttgttaggcttttgataattatatgatatcgaataagaaatatccccactaatttaatatccaaagtatatttaaaaggatgaataatcaaatatctattttaaaatttgtaatcaatttaagaagatgcatatcgactaaatatctaaaatatggaatctaacaatattttataattgattgataattttaattctttcaccaattatggtatttgctaactaaattaataatcaaatatataattacctaaaaactatcatataattttacctataataatttacatgaatagttttatctcgcatatagtacgggttgttatctagtttgtgacaaatataggttaaaggtttttgaatttgcatgtcatgaagattaatgactacttggccttcccattgttgcaaatgaaaaaaaagtttaattgatactctagcctgaatggaacacaactccaaagaactttcctgaagaagaggacgcgttcaatctcagatgaggtggaattgacatttgtcttatgccacatggcacttagaagagagatttttagaactttggggagagtgctgacgtgacttctcgtaagactaaaacaatggtttgttgtaaaccattttacaactggcgaaaaaatatttccactataatagtgtgttgtaataaaaaactaggtgagacatggcaaagttagtgttgataaatatcaacacccgtgaaagtagaagagagaagataagtgtgacaagtattatattttgattggttgctttgatttttattttttttgtttcatctcaattatataattttacaatatttatacataaaaatataaaaatttatatcaaaatttataatttttcattctctataaatagagactatttttatttgatttggatacagaaaaaactgttttagacccaaaataataataatttctagttctcgtttttattatttgtaaaagttttttaaaatattttataaaaataaaaacaaatattaaaacaaaattattttataatttttttaatatttaattatttaaatttaatttgatagtaacaatgattaataatatgtaatcacaaaaaaacagaaacataaataaaataaaaaatatgaaatgaaaatggtggggtaaggtgttgtaattttattaaacaaagtattgtaatgatgaaaattgtgtaggtgttgaataatgatgtggaagagagagaagatgatgtggagtattaaaagtaaaaaagtggatgttgtaaatgaataaccaaatggattagccctgtaacggagccggatatccggctttttcagcgtataaccactatgtgttcagtttaagttggctcttcatgataagttgtctgataagttctcttactcgaattgttgctctgtgactgtgactgttgttgattatggtttcaattcatcttaataaggttttttaagcttataacatataatgttggacaagtcatgggtgcatctatgcaggtaatcaataaaattatatagataggtttaatttaaattggggtttagaacattgcttgagtttttttttcaactttatttcttcattgaagagctgatcctggttatgagagaggtgctcgaaggtttgtatttgatgtggttgcggctttaggagatatagataagataatatgtccaagcaaagactgtcgtaatgtgtaccaccactcaagtagtgatgtggtggtcatcttgtaacgagagggatg

SEQ ID NO: 9828 - DNA, 3000 bp, Unknown
  misc_feature (1)..( 3000): cDNA_ID_3033719_gDNA_ID_1974077_Annot_ID_180436 3000 nt of promoter + ATG
agagaaagggttaaaggccatctaagcccatgttattaggttttgtactaggagttctcatatatatatgtaatgtatgttatggattaatgtaaccaaggctacctctttgagcaatcaccctcaaacatttatacgaatcacaatcgaatttttttttgtttttgtagacaatcttaaagcttctctctctctttagattctttgcacaataaagctcttcatgagctattcaatttctcttctaataagctcaatgagcatcaatctattcttgtcatatttagcagatagcaagtaggatctaagtagttgtgggaagagaattcttcttttacatgggacagcttaggggagttaaacgaggtaaagaaaacacggactcttcgtgagacaaataggtcaaaagaaccttaaaagttctcacactaatgtctgattttgtggtgaagagatgctgctatctacatccaagtgatcttgattttgtatcttgctacatatgttgtctcacccaagtcaagccatccgaattagccagaaacttttattgctacctctgaagatacaaaatctagatcctttcaagacatgaagtgaatcttgtgaagtgcatgtttcttggtctcatattgctgctaataatccttcatatttgctgggttcaaaattgagactgattcgagaagataagagcacacatagattatgtgccttcattagatcatgcactgaaaatcaagctcttcgatcatctaagacaaacttaacaacgtcgttttcacacccgctgctaagtttgcggggaagtattagagcaaacatagaagcccaagaaatgattattagagaagtccatctatgcccatgttattaggttttgtactaagagttctcatatatatatatactagataaggcccgcctaaataggcgggtaaaagatataaatttattcaaatatttatcgataatatttaaaatttgaatagtaaatagtgatccacacactttttctaatatttaatttagtaatttttgaattaaataaaatttcaatcatacacattcaattttactatacattttaactatctctttcatcataataaactgctttttaattttatacactccaacttattgatgatatttgaattttaaattgtaactcatatttttcagtatttaatttagtatttccttaaactaaatttcaatcttacaaattcgattttacaatacaatttaaatatcttttttatcataatacaatacaatttagttcgattgtatacaattcaaatacaatccaatttttcaatacaaataaaatttaattctatacacttcatcttattgttagttttcctttttaattaaaaaaattataagttaaattttttagatatagaactataaattagtatatgtaaatatgtttttttttttttaaagaaacttttttttaacatatgtcaacatctcaatgatagacctgacacgtgtcatgatctcgtgagttagtaactccgtactttatataataagatatatatatatatatatatatatctatgatgttgtcatgtaaccaaggctgcctctctgagcagtcaccctcaaacatttatatgaatcacaatcaaaatcatttttgttcttctagacaatcttaaagcttctctctctctctttagattctttgcacaataaagcttttcatgagctattcaatttctcttctaataagctcaatgagtatcaatctattcttgtcttagaaatgtcaacaattaccatcaattaaccctaatttatcttctaaaattccctattcaggaaaccctaattttgataaaatctaacaataaccctaattaatcccgatatacacaattaaattgttagatctatatattcagaatttgattggaccatggcttgacacaaatctccaatttatgcacgttttctctccgatttggttcaccaaactcgtccatgttgaccaccgtcggttgagatgatgaggacagtggataagagacgaatttcgttgatattctcttccgatttgatgaacatgaacgcgtgaggctgatgatcatcagagaccgttcaatcgccatcgcaccaaagaagagaatagagatatccagaaatgagaaaaaccacaggcaactgaaaaaaaaatattgttttgtcaaaacacgcgtccaatgagaaatggacacgtcatcgaaccttaacaccaaaaaaaactctaagcttaggtcgttcgtaagtttatatcacatgtttcatttaaattttgtcttattttgctaaggattcttgataagaaattttcaatccccaatggacctgctctaacatgacaatttgtgtagaatcgttatgacgtggtaatatatgctaggattgaaggatgacatatgattgttttggttgaaatgaaaagaatcgagagaagatgtgattgcaatttgtcttatgccatgtagcttcctcttaaatatttttcatttaattgacataaacacatggaaaaactttaaaaacttcttgcagctaatcaatttataatatatatgtttatttgaattaaattaattaaaagaaaatttctagaaaataaaaatcaaaaataagtaaacaaaagattagaaataattatacagtatacaatgatattgtcgttcgttaatcaaataaaatatgaaagtatgtttttataacatgaatgatcaaaatagacaattgttttgtctttgtatatcaaacccgaaacaaactaatctattctctgggcatggatattgtaaggcccaattaaattcggcccatcaaacgaaaccaaccctaataatctgaaagagagctatatataaataatctagggtttagtgtgctcctccttccaaagccgctgcgaaactcgtcgattttcaaaaccggagctcagagactgatctcggaaagtaaatcgcagccatg

SEQ ID NO: 9829 - DNA, 3000 bp, Unknown
  misc_feature (1)..( 3000): cDNA_ID_2033385_gDNA_ID_1974077_Annot_ID_180431 3000 nt of promoter + ATG
tctaaacgtttatttcgttaaatattataaaagtttaattaactacaatattttatcttttaatcaagtatatattaataatgtcttaaaatttctctttttttaagtaattagaattaatgaagatatattatataagaaaatgctactaattagaatcattaattaattgaaaataattaatgtcaatggcattccttataaataattcaaacttgaggatttatttcataaaatagctgcaaaaatgtatatataaatattttatttaccacatattccaagtgaaaactaggaaggattcgaaaaattattcagtaaataattcctacctttttgcaaaaataacggatatatcaacatcgtcaataagttggtccaattatcgtgtttttatttttatttttatttttatataacatagatcttgcataacactacaataagttatttttatccgatgacattttattttacattataccaccttatttatgtaaatcatagaaagtaagttcagtagttacttacggctttacaacaagttctataaccaatttaaaattttgacccaacaaaataaaataaaaaaccagttacaaaaaaaattgattatgtaacaaataaacccaagaaaaaagaaatagtatatagcggaaattatcttgtaatttaagcatttaactgttccctacagaaattaggaaagtaatattgagtaactctcaattatgaaagagagttgtatctttttctgtcaaactataatctttattggttaaaagtctttatgtatttaacacataacaaattttcagttgaaaattatataatagaaataagaatccgattaaagaaagcaatgatcattctaagtattttattccattatgtcggcgaaagatctcataaaggagatacaccaatctatatcagaatgaaaagcagacaaatgacaagccatttaagccacttttaaatattaggttacaacaaaaactcaaacaaaaaaaagtaagggtaaaatagacaattccaaagccgatccgagccgtgattgaaactgacccggataaagacgtgcagatcctgcaagataaaaatggacctcgattcttaaattatttgtcgatttaatgaatcctggtccaaagtgataaaaggttttaaactctctcaggcacagttaccaatatcgtaaaagaagttactaacttttgaaaaaacagatcttacccactttttactactaaaagaagaaagtttacaaatttggtcaacgcttttcaatctttccggtgaactcttggtcgccggaggacatccgtggtgctcccaggtgagtctggcgtaggaggtgcccctcactctgtggtctccttgctttctatcttgaggtcaagagaacaacttctttattcagccctctagttccagacatcctcaacgctcctgtactacatttccaatggtgtatgctcatgctaggcgcccacctgtagcagtaatacttggtctggtaacttcctgcttactctcttgatacttctctctccctgaactatctcacttttgtgaagaactatcctttttttgagaacattgtagtgaaactttcagcctccgggcaagaactatctcaccttgtgtgaagaaccttttggaacgcttgtttacctctagtgaagcctttctccaactcctacgactcaaagaatggagagaagaatcccatactacctgaaaaggaaagaaaaaaagaatgagttctctccactccctcgaaagagaataagagcaccaaccttggataatgctgaccttatcagggagaactctctcatactcatgggaaggctcacaaacccagagatccaaagactctggtccctcatctctttcctctcaaaccgttggaacttgagagacaaagcaacaggttctgacctaggcagaggatgctttcaattccgctttgactatgaggaagatctacagaaagtcttggataatagaccgtatcatttcgaccagtggatggtgattcttcagcgttgggaacctgttatctctgcttctttcccctctcagatcccattctggatagagctccagggactacctatgcatttctggaaaccttatatgcttctgtcaattggatccgagataggggaagtcgtggaccacgaaataacaccagctgcagcaaagataaaggtcattattgacggtctcaaaccaataataaaggagacaatggtagattttgatgacgacagtgagatattagtaactttggagtataaaaatctcaagaatcatcgcctacactgcttaagattgtcccatgagaaaaaggactgtccggggcttcaatcctcaaaagtttctccaaaaaagagcctccctcctcctcctaaagctgcgagcaaagctaaatctcaaccctcttacacaccaagagattactctagaaaatcagtggcggggaaaagtcactactctgatcacatcacttatgaaagaagagataccagcagaaggggaaatgatgatggacgttacagaacacaaccatcttctgggacaaggcggtatgagccaaaagatctaccttatagaagatcacccccagatcctatgcatccaccagagaagaggctcacaagtaccctgctagatattctcacagtgactccagacaaaacttgcaatggagagaaaaaagcaaatcaagagacagccatagaattgaaaactcagattcatcaagcacaaggctctgacatctagagagaaacacaaaagcagaggttacccccccccccccccccctccaccttttgccagttcctactactgaagaagttatggggggaactgcgagaggttacacttcaatataccagttgtgctgatccaacagagagcgcaacacgaaaacgcagggttgtttaaagagaagcgagagatcttatggctgagactgcagctcaa

SEQ ID NO: 9830 - DNA, 3000 bp, Unknown
  misc_feature (1)..( 3000): cDNA_ID_3033750_gDNA_ID_1974077_Annot_ID_180421 3000 nt of promoter + ATG
tgaaagaatctaacagatttaagaaagtttggaaaactcaattcagcggttacgattcttttgctctatcagcggttacgaagaccatttttctttcagacgattataggacatgtgtgaggataaatacatcttgtgaatagtccttcttttatttgggagtagtacttatcaagtcttataaatagggagcgttacttatgtgatttatgacctttaatcttaaataaaaacaagtttaggaaaatcttgatttttaagaatttaatggatttaagaagatttggtaaacatgcattcggtcacttcagtataatcctcgtacgagttgtagattggtctgactatcagcggttacgaaactattttccttttcgacgactatatgacacgtcttgtgaattaagatatgatgaacatattgtaaaccgttcatatattataaaaccagaaaatttagaagaaaaaaagagagactcatgcatgttattaaaagggtttagatcagtacgatgttcaaaatttctttaattagtagctaagcttttgcaaaagacctaagaaatttacatggttttttttttcttttcagtctaaagaataaaggatatataaagattaagaagacatcagaaactttacaacatcattgacaatcaaagaaaagatttcaaaaactaaaccgatggatgataagatattttcggaccgtaaacccaaaagaccgatatgaatataatacataaccaataacaaaaagagataaagccgaaacaaacaagagaaatgaaactatagaaccataatctagcacaaaacaacatgcgtactaccaaaccaaatgaaggataagcttgtcaaagtagcgtacggaaagggaagaaaaaccacgagaacggagagcaactcttctactaacaaatgaatcctacctctctaagaaagaacgaggtattagtaccaacaagaaaaaatctagggcggaataactagaaccaatcacaatttctaaaaccggcgaaaatgaagaatacgaaaaaacaacgatcttttaactcttaataagaaataaatgataacttgaaatcttgatcaagaaaacgtcacaatttccaacaacggtgttagtcggaaatggcatatccgacaaagttctgacaaagtcaaatttgtcggaattttttggtctaaagatcggagcaatcggtaaggaaaactacgtttgaaatatcacttccaatcatacacttcatcaggtgcgcatagcgtagatcaggttgtattaacaaatttatttgaaagtgttgagattgatattttatgggtatatgtgacatttaagattttttgtaagagggggattaagcaacctccggttaacccagcttaaaccaaaaatggatcgaaaaaccagtaaactcagcccaaagatgtaagtctgatcagatcgacaccaacctacaagataaaggaaaagatagaggcaatctaggaagctaagttataatacaaaaagaaagaaaaagatagattttcgatagagaaataaggaaatcaaacatgtatatgttaaactaactatcactttcttataaatagagaagcacccctttgaaagggaaatatgtggactcatacacaagatcaaccaaaacacctagaaaaaacccttataacataaattatgaatgacttgatcccttatgatggatatataaacaacctacataaggtgcaactattatatatataaaatctcaatttgtcatcctacttttgttgttaaacttgaaccttgttgaaatcctccttaaaaccgacttgatttatcaccttgtttaccacaggtgatatctcaaatctacagatatcaacacggtttgtcaatatcgtataagtgatgactaccacatttgattaactccggagaaatagcttttttgtgctcgagtgtcaagtacatgtacctacaagagaccaaccatgtaggatcatagattacttcaaaataaagcgttgaatacataattttaatatagttgaaaatgtagtaagtctaaaatatttttttggtgggcaacatctaaattatttgttttaaagttttttcaacattatatatatatatatatatatatatatatatatattagaatggataaaaatatagattccattcattctcttgccaaaacagttgtagcagcagaatttcttttaagtttattcacatttttataatgactgaaaatttagaaaattactttggtcaatcaaatttattttattataaccactgacacttcacacaatggacagaaaaatatcaattttgttttgacgttttcatctgtaccattcgagcaaagaatgattctttgcgtgacaacttcgacaagtttatagaaagtactaaaatccattgcaaaagcaaaaagtttatttttctttgctcttctctttggacgttttcgccatattcgttgttattattctagcaaagactgattctcttgcgatacaacctgtgaaacctttcttaaatattataaaggttttaaaatactttaaaaccatgattgttataaacaacatgtcacatatggatgaacagtccgctggagatattaataaattgtatctatggatcttctttgattagttctcgaaattagctggactatgaaactaaaatctatccatcaaaatatatataccacataattactttaattcaggggataaataagtaatcataagaaaatcaaattcaagcacatatttttgttgaagagttaaccctctcaaagttgttaaataggtaaaatttagaattttctctattataacagatgatggtattaattcatgtattcttttaaccactcaaaactccaaagagattcaagttttatccaaaaatatttgtggagcctatattgctaaaaaggttagaacaatcggtgaataaatatggcagagaaggtggaggtgaccacg

SEQ ID NO: 9831 - DNA, 3000 bp, Unknown; identical to SEQ ID NO: 5770
  misc_feature (1)..( 3000): cDNA_ID_3593709_gDNA_ID_1974077_Annot_ID_180401 3000 nt of promoter + ATG

SEQ ID NO: 9832 - DNA, 3000 bp, Unknown
  misc_feature (1)..( 3000): cDNA_ID_3033754_gDNA_ID_1974077_Annot_ID_180417 3000 nt of promoter + ATG
tccgatctaaatgttagtgtcttgaagttgtaactctccttagtttctcaatgttatgatcgataatggtgatgaagcaaggttgcagggacgaagacgacgttatatacacatgtatatacacacttcatgattaggttttgttgttaggtttttgttgggcctataatgggcttagtgagaaattgagtctcacattgaaaccttatattacagataaaatcttagaattaatggatttgggtagataataatatggggcgctatactataggtaaaatcatataattaacaatcaaaatataaatatacaatcttaaacactaaatagaattatttttttaaagaaacacatctcaattcttttataagaagtttatacattataaacgtaaaatggtctctattttcccacgagaacgatcgtatctagccagataaagcccgatctttgacctttgtctgtatacacatgaaacggaagttaaatgcttatttccccaccaattgaaagttcgagagcttaatgtccatgaatcctggtttcgtcggtttagtgcgtaaacccgagacgaaacaatgtttcggtcgtaacttaaccaaaaaaaaaaaacagattacaacctattgtcgttgtcttcataaaaatcaaaatcccaaaacccccaaattcaaattaagaaccctaaaaagctgaattcttaattttgtaattgaaaaccggatttccagtttaggatgagcaacctttcatcgagttcgacgggatcaacgggaccacgtggaagaggaagagtggtcgaagtgccatcaagatgatggtgcgaggaactaaattggtagtcaacataaaattgaggatttaaatcaccaagtacatagttcatgctttaaaccaacgaaaatggtaaactaatgatttaaatgacatttttcccaatgtatatatataataactacccaacactatgaatcatgatagttccttttttctttgataatattaaggacatcaaggcactaacaaacatggcaaccttatgaaagtataaaacaatttacataacaaaaaggttaagaccaattagtttaactaaaaatgaatgttatcgaatttacaaaattatacgtgatttgaagtattccattatatacattttttttgggacaaattccattacatacatgtttttttttgggacaaattccattacatacatgttttttggggacaaattccataaacaaaaaatacttcactttttttctctctctcgggcaactttctaaatctagtttttttttcttctttttttttatttctttttaatcttcacttgaggtttacgacttcaacggtgaatcaagggggagcaagcttccttctccaacaacggtgatgtgtgttattcgtcatgtgacgcatctatggctctttcatggcggtttgagaagctatgatatcgttcgctctgattcgaggacggaggtttcatagacgagtgtctcacggctcatccgccctattggccgctgcgactagcggtggaagttatccgacgacttttttcgtgctatgtttgtcaatctcccaaaatatttctgtatctagattattcttttttggttcattataaataaatatatttaattttaaacgttcatagtgtattttaaatttggaaccaataaaatgggagagaaataacacatgtcaaataaagagatgacatatgtcacaactttagaacatatgttttgtgaaaaacttattttattatataagatatgttggttgtaacaaaaaataaaataaaaaattctacttcacgggttctctcctagtttctttaatgagttatccgaaccaaataaaaacttgattcgaatccggattttattcaatcgaactgaactaatcaaaatttcatcaaaaagtaataaatcttcttaatatatttatatcattgaaacatattaaaagtctataaaataattaggtttttaataaagaaatccagccccaatccaaaagaaaagaccaactaattcctcgccttttgcaatttcgtataattatttcccaatttttgtgtttgttaattaaatctctaaatgttcgctgacttcataaatttggattacgtaaaaaacgactttcattagtaaaaagctgaagaagagtggtgaacatattgtaccacgacccctcttgttctacacatctatcgaaaagcttagagactaacaatattttatgtaagaaagttgtttttttttattctagactttcacatgataacaaaaaatataacatatatctagctagatatttacataatgattccatagtagaatcatatttttgtttgtgtgaaatgattgtaatgttttcctcatcttgaagattcaaatcctttttttcagaagttgtacaaaccacaaccaaatatctttatcttccacctcaaccattgtttaaagaattagctacaaacatttacggttatcttccacctcaaccattgttaacagttagacttttatgaagtcaacaaattcttaaagacaattggcaaacgcaaaatttagtcattttatccaaaattctaaactgaaacggagccaaaataaaattcagttttatttggtgcctaatttataaaatccaataatacgtaacccacaaatctcgaaccaaactataccaaagaatacccaaaattaatatcagatttgaggcacgtgagatacgcctgctaagatacacacagctcgaaatctgagtccttctcttctttttcgccatcggaaagttcttaccttcgatttcaatttcttgctttcttctcagttcgtcacgatcggagctttttgtccgatctcaaatgcccaaactcctccatttagttatcttcccggtagcatctaagtagcttgaaatccctaatatcggagttgctctctcccagaaaatctcgagaggttcaagtaacgaaa

SEQ ID NO: 9833 - DNA, 898 bp, Unknown
  misc_feature (1)..( 898): cDNA_ID_3033995_gDNA_ID_1974083_Annot_ID_180461 3000 nt of promoter + ATG
atcctaatgaagctgtgaagaagagagaaagaacatttacgtttaaccaactcacggcgccatttcactacccgttttgcttagacatatacatctcgaaagagtctgtacgagcatgtgtgattcacagggtgactagtaaggttgtaactgtggctcattcgatttcaaaagacatgaaattcgatcttggttcgagaagaaacgttgcagcttgcgctgcggttggggcagttcttgctcaaagaagtttggaagatgacatacatgatgttatatacactcctaggaaaggagataaaattgaaggtaagcttcaggtcgtgcttcaagctcttattgacaatggtgttaatgttaaagtgaagcttaagcagaggaaacttaagaagaagactagtcatctaatgatggcctagaggactgaaattttctagtttgtaatatgggcccagaagatatgtttctgtgtggggcccaaaaaatgttatccgtttcatttctacgtttcttgtcgggtcaaagtgttgactttctaacaatgatatcatcgttttcttatacgtaacttctctgctcttccatagccgatcgacctttgttcacaattcccaccgatttttatttgctagatcgatatattttcaggtatgatgatatatatatcatggtttgtttattcatctggaaagtttttgatgcatcatgatcaggacaaagttggcgtgaaatgaaaagttttaaataagttttttttttttgttgttgttgtaaacctataatcagatgatgagatgatcctatattaatcgaatattttgattaattatacatgatatttaacaattgcattcatcttttttcttttgtgaaatctaagcagtgagcttgaaacatg

SEQ ID NO: 9834 - DNA, 3000 bp, Unknown
  misc_feature (1)..( 3000): cDNA_ID_2033794_gDNA_ID_1974083_Annot_ID_180483 3000 nt of promoter + ATG
aattaagatcaatatattatatcttattgctaagatttgcatcatctccattcgattacaaacaatcaatgcctattcaacgcttagagaagggcagagagcctgcattgcattcacaggatttagagacttgatactttctggttcttaaatgtggcaaacgtttgcaaaaactgtgaatgggggtagtatgcgaagaacacaagccctcatggtcatcttcttctcgttttcttgttgttgttacaggttgaagttctttagatgatgtttcagggagactagcggttcttaattcaattatcttcagctctaactatggtgaggaagtttcttactttcatttagcttgtgctgtaaagactccgatgatcaaaccatggctcttgtcaactaaagtttgaggtatggaaacaaacgtaatgcatcatttcacatgtttcggctcttgttcataacgagagaggaagtattgatctcaaattctctcttgtaccttttattaaatgcagtatttgattttaacttatcaggattcttgcttttcgtatgtgaatagtatgtgcgcgtggttccggtgtggatattgctgtcttctgttggtttcttcccattgcatatagcggttgaaggttggttcttctcatatctaacttgaaaagtttatccctcataaggtttcatgtttcataattaaggctagattgttgcgtgccgcctaaagtctgtcatattctataggatgttttgtttcatgcaaagtgaaacaagtctttgggatatctttttctatttgccatctctggctcttgagttttgaacccaaaacagttagattgctgccatctaaacttgatatttgttgagagagctaaatggtctgttcttcaaactgtgttctggaaagtaatgtttattataaaaggtaaagagatccaaaatgctctccgttggtacaacaaagcaatatcacccggagagtagggatttacagagcataaaatacatcacacaaaatcacaacgaaatgtgaataaatagggacaaataaagaatgcaatctgagtggcacaaaagcgtatgggaaaatagtaactcagaagattgccatgtaggaaaccgcggagaagaaggcaataagaggaaatgagaacttgatagagcttccatcagacgatgggggtccgtctccttctcctactggtacggttttcgatccattacctggtcctaaaataaattcccgatatggatgcattagataacataaagactgtattgaaattggtgtttcttctttatatctgttttaagtcatttacctgaagagtttggtgattctgcaggagagtcagaagtagaaccaccaccaccaccacctgcaaaaacagaattccgcgtaagattcgcaagaactaggattggaacaatcttcactaacctatgttttgaaagtcttaccggtattacagcgactgacaggaggagtctgaacattacaagccctaggcagaccaagagcttgtgtttggttaacattgatcccaagctgagagcctccaccgttaaggacttgacacaaacagtcaggagaagactggactactctactcaactgattacagcattgctgattaggagaggtagagtttccagttatgtagttgagacacggcgacatgctaatcaacgcgtttgtgcagcttgactgagcagagaccattgtagaagacatcacagccataaaaactgtaaggaacactaaacccatttccattttcatgttttcttgaagatgttgtgtttgaagaagaatccttttgagtttgttttgttggtttttgttatgtttgatttggatattgtggagtcttttgatggtataaataaggaattgaggaagcaaaggtggcttaatttgggtgaccaactctttcctacttttctaacagtttttggtttgttttgttcagattcggacaaaatgatgagtgttgtgttgtgaacagagaactggtccgtttgtaatatttggggtcggtggtctttgtgacggtctaggctttggttgttgaactacttcctttgattaaggtttatggagttttgctatatctacacaataatacataattgttttgtattattgacttgaccaataacaggtgtcgaaaattctcagttagtacatcatcttttacaagtcttttgacgttctagaccaaattatgttgatttttgaatcaatggtgagttattttagtcatctggttgccgtgttttgaaactaagaaaagttgaattatataccgtaaagaagaagataatactaaaaatccgaatacgacctacaatgaaactaagaaaatcagtagccaagaatgattttgagtcaatggtactaaatggcaaaaaacattacaaactaaataaatgacttttggtggacgtctaataaagtaatagcaatgaataaaagtaaagtttttgcaatagagtctttcatttaattgtaaatggatgtcttgttaaccaaacaatattttgattgttttcattgctatgtgctttattgagaggatgagagcacatgcatgtcttgttttgtaagctgtacctttttttgtcataactcaacatgatagtaatggaatggaatctctttgatctcttgttaagttaccaaaacagaacaaccgtgagagagtggttcatctaatacaataacaagacatgtatctaccacaatcctcacatacacatgtacgcatcccattggccaattcacttccaccaacgaccccaattaacaaaaaccaacatgagttagttattagtagttgacctatactcacttcttttatcttccctccactctctccaatctataaaaccaaatccaacaattgcttccttctcatcacacttcaaacacaaaaccacaaagctttaaacttccaaaagaatacaacaaacaatcaaagcttaatctatccaaca

SEQ ID NO: 9835 - DNA, 3000 bp, Unknown
  misc_feature (1)..( 3000): cDNA_ID_3033973_gDNA_ID_1974083_Annot_ID_180481 3000 nt of promoter + ATG
ggtaagctcttcttcttcttcttcttttagctctgccattagggaacggttttggttatttggtcttgtggtcatagaactatgcgagatttatgaatttatgtttttttatcttaagccttatgtgcctgtgataattgaatgttaaagcaattttaagtttgtaagaatgatattgtaaagcttgaattgaagcttccctctgtgatgttgtggttatgataacattaaggttgctgataaactcatatggcctttgctctggatttccttgtttatgattggctacttattattgatggcggaaaatttgagatatctctgtgtgttttctttatgctccattgaatcagaatccgtattcggtgaatatcctgatggctggctatgacgatgagtctggtgcatcactttactacatcgactacattgcaactcttcacaaagtcgacaagggagcttttggttacggctcctacttctccctctccacgatggacaggcattaccgcagtgacatgtctgtagaagaagccattgaactagttgacaaatgcatacttgagatccggtcaagactcgttgttgcaccaccaaactttgtgatcaagattgttgacaaagatggagctcgtgattacgcttggcgtcagtccgtaaaggatgtcacaactgctgttgtctgagttggttttgtgtttggttttcagatgttatgtgtctgtgacatttgcttttgattttaagtcgggagttagtgttttgacactttttaatcgttgagcatcaatagtgtttgcgattccataaaaatgatgatgtattacttcaacaacacaaaataaatctcactcgaaacagagaacagtatacacaaaagcttattccacaaagcaatgaccaaataaatggtttctttctataatcaacgatgcataaatcaaatcacataaggaatgcaaagaaacaaaaggaatcatcagtagaatttgagagctacgagggcgatgctgaagaagagaagagatggtgagagtgcgtaggcggatgaaggagtctcagaaggtcgactggtgcttcctccgtcgtctgatgttggagctccaccgtcgacggatggtgtaaatggtcgggttgtatcagactgtggtgtctgagctgccggagttggctctggaacaattggatccgtctctggtcctggagacatcgatggtccaaatgtagcagcaggtcctattaccaaaacagaattttttatatcagtttatcttccaagaaaccaattatgtgattaattgagataataatgtcattgattgtttaccaggagcagcagctggagcaatattggctgtaaaaagatggaagatcaaaacatttgttagataatagattcaagcaagtttattaaatgtaatgattagaggggaatgatttggttttatttaccttggcattgaagagggactctaggcatgttacaagcacggggaagtgagacagcggttgtgcggttaataggaatattgaaaggaacagttccagtgacaattagacaaagacatcccattcctccggtggtcaaagacctcagcgagttacaacaatcagacgacggcgaagttccattgctgctactgttggttatgaagcccatacaaggactcacggtggtcatcattgatggagtacattggcttagaggttgttgttgaccacgaatcggcaaagctagcactgcgatcatcgccaccacaagggaaataatcttcgacattgttggatagattaagctttgattgtttgttgtattcttttggaagtttaaagctttgtggttttgtgtttgaagtgtgatgagaaggaagcaattgttggatttggttttatagattggagagagtggagggaagataaaagaagtgagtataggtcaactactaataactaactcatgttggtttttgttaattggggtcgttggtggaagtgaattggccaatgggatgcgtacatgtgtatgtgaggattgtggtagatacatgtcttgttattgtattagatgaaccactctctcacggttgttctgttttggtaacttaacaagagatcaaagagattccattccattactatcatgttgagttatgacaaaaaaaggtacagcttacaaaacaagacatgcatgtgctctcatcctctcaataaagcacatagcaatgaaaacaatcaaaatattgtttggttaacaagacatccatttacaattaaatgaaagactctattgcaaaaactttacttttattcattgctattactttattagacgtccaccaaaagtcatttatttagtttgtaatgttttttgccatttagtaccattgactcaaaatcattcttggctactgattttcttagtttcattgtaggtcgtattcggatttttagtattatcttcttctttacggtatataattcaacttttcttagtttcaaaacacggcaaccagatgactaaaataactcaccattgattcaaaaatcaacataatttggtctagaacgtcaaaagacttgtaaaagatgatgtactaactgagaattttcgacacctgttattggtcaagtcaataatacaaaacaattatgtattattgtgtagatatagcaaaactccataaaccttaatcaaaggaagtagttcaacaaccaaagcctagaccgtcacaaagaccaccgaccccaaatattacaaacggaccagttctctgttcacaacacaacactcatcattttgtccgaatctgaacaaaacaaaccaaaaactgttagaaaagtaggaaagagttggtcacccaaattaagccacctttgcttcctcaattccttatttataccatcaaaagactccacaatatccaaatcaaacataacaaaaaccaacaaaacaaactcaaaaggattcttcttcaaacacaacatcttcaagaaaacatg

SEQ ID NO: 9836 - DNA, 3000 bp, Unknown
  misc_feature (1)..( 3000): cDNA_ID_2033838_gDNA_ID_1974083_Annot_ID_180468 3000 nt of promoter + ATG
tgagtacacaatttagggttattcctcatctctgcgctcaccactccctcggcatcttccctcgtcacagctctgtctgccgataacttccctgctgcaccctatataattcattcggttcgaaaacatttagccactactttaaaaggaaaacatcaaaaacattgatgaaaatgttttgaaaattagggtttaaccgtcaaaacatcacgaagcttgattttcctctcgtcacgatctacggtagcgttgtgatccgctgcagattgagctgaagcggcgactccagctagagcaatgacgttggtaccggaagctctcatctctgccgcttgaatcgctgcggcgtcgctttgatccacaggtttgtttccagctgtcttcacagttgcttccagtgcttctccaatcgttattgtactttgcaaagcttcttcgtccgtacgcgcagcagcgactacacgcctcggttcaacgtgttgtccaacgacctaaagcttcaccattactccaaaacaaaaaacggatatatgaaaagaagtactagtacttttcgaaacaacttgtgacctgtccaccgacgaattcggttgtgacagttgcagcagggaccgtttgctccactgtggcgcctcgttcagcgacaagctcagttttgtcatctggatggacaaagccaccgcgtatattggtggtggctgcagattgcatgaccgcagctggaccgcctttctgagtatggccgaacacatgtgtctccgcggattgcatcatctttgcatcctcaggtgctatgggcttatcagcgagttcaccggagacttcaaaaacgtccccgtatttgactggctctcttggcctccttggttgctcttggctcatctttgttttgttacgttaatgttctgttacaaactacgataactcctacctgaattgagtgtctattatataaagagaggtgcatgagtatgggatcaacgttctgagattttgacacttactcgtagatgaggtgactaggacactcgtgtcagtttgcgagtttgtagctaaaaagataaagcttagattgagatagggattttacttttctttttgtaaatttgtcatttagttttaagagtgaatgaaaaaggacatgtttccaacgttaccacatatgagtcgtataacattggacacgtttgtttcaatatttgtttttgttcttgtagacacgtttcaattttaagacaaacataacagaaaagtcaaatgttggaaacaaaggtcaccaatatgtcggaagtcaaataacaaatctttgtcggtctaacaaaactcataaacttcccctaactcttcggatctctctagatccttgtttttcgttgccttaattatctttctcttctcttatttcatgttagaaaacagagtatacaacagaaaacacaatcgtttatttttgttctctgtgttcccatacacaaaatcttccagcttctgtttctccgttttgttcaacggagttacaaagcggaagaacctttgccttcggcctgaaagaccaaagatatgggaactggtggaataacgtccaacgctcacgtggtctctcccacgtggcatcacaagcacgtgcctcctatggatgacgactctgttcttcaaagagacatcggagagcttctttcacggtggggcgggcttcaaatggccgtaaagaaccagtggggaggccatgattctctcaagaaatctcaagagctagctcacaatctttttcatctcatctctcaatcaaatggttcgattttctttttacttctttagattttatgttatgatcatgaatatattgatagtttgattccaacattatgatatgagcagtgattacggtggaagaaatagagaatttgctacatgaaagcttgcttctttctttcaacacagagattgaagatggcagcattgaagaggtacgtactatttcttgaaaatgtagacgatcaatttacttgtgaattatgtcgactaatctttcatcgtgtgatttcgtcaggtagctgaacaattgatgatactccatgaagaacatttacgtgggactctttaagcagtagcttgaacgatttatatcatttttggtgtataattagatcaatgtaagatacaaagaattgaaaattgggtggacaacaaaatattattcatcagaaatcatagaatataggaatacgtatcaaaatctatgtttatttgatgtaatcattttgtagttgtgatgaacagtttttcctaatgtaatttcaaattaaccagtaagacactccatcatgattaatgtggggaatatggaccgagtgaccgataccacgtagaaaatatatatctaaattttccaatataatgcaacaaaattcatattgaagcaaaaactccatgtaatttggattcttgacaattttattatggtcaaatcatgtgtgtaatatgcaaataaaaactagagagatggcaataacatcattagtatgaaccactaggctataaattggtcaaagtagaaatggtgcaaatgaaagactaatttacgtgagtgcgattacggtaaaatcggtcattaaagacaaaaagacttaccgtacaacaagtcatttacatgaaaaccaaaaaaaaaaaaaaaaaaccctccaaaaagggattgtccaacataagggcacaatagtcaatttcaagcgattcctcgtttattcgtgtttcatcttgatctcagctagaggaggaactaaaccacatctacagagtcagaaaataaaaagtagaagaagcagaagcgagagtgcaaaaaggttagatctgctttcaaaattgttcgtactgcttctttaccacataaagttcatagctttttacgtttctaccgataattttgcattccgaattctccattttctcaattttgcttaaatgggtgtttctcttctgcaggaaattaggttttgagtggtc

SEQ ID NO: 9837 - DNA, 3000 bp, Unknown
  misc_feature (1)..( 3000): cDNA_ID_2033821_gDNA_ID_1974083_Annot_ID_180473 3000 nt of promoter + ATG
aaaaagtattcaacaattaaaaatttatcaaatctatgtgttatataagttttgatactatattcgaataaagtgtaatataccttttcaatttgtattatttaactaatttaagctaactaatatatttgctaatcttatacctatcaaaaccgactatcgtttcttatctctatactatttttgcaagacttttttggtggatttgggtaaaagtgtattcgggtcatatggtacattcccctattaaataaaaatggtatactcctatgttattagctaaaatgtttagattataattcagagtcatattattaataaaattaatattaataaaataaatggctttttggcaagacggatttggagtgacgggtttttgaatcaacattaataaaaaaagttaaatataattaatataccgtttcaatacgggttaaatctttaatttattattttttaagaccactaatattaaacatatcaaatcatcctaatttagaaaagattatataaaaccaaaaatgttatggggtatgtataatgttactatatataaaatataaatgtattagagaatgatataatttgcaaaacttttatattcttaaattttaaaaattactactttaaaaaaaaaatcacgggacgggtaaagaaattatagaacgagttttattttgtaattgggttatatggtggatgtatttgaatcaatatttataaaattttaaaatattattaatatgctgttttaataggggttacaactttagtttttcaacaattgtctcatagattcgtgttatagccttacttaataacaattataaactgtaaaatataaatattttataaaaataaaatttgcaaattttaatatatattacttttaaaaaataaatcgtcccgcggtataccgcgggttaaaatttagtcaatttttatggaacaagaataaaacctaaaacattaaactttatggaccatagagtatgtagtagcaattaatagtgtttgtttaaagtaatgattatcaagtttgctcatacgaatttatcactagttttggttttaagtagtgatatttttttcgtgttatacatatataatataacaagtgtgtaatgtccacccaaagagactagccagctacgaaagcaaaagagatattcagttaagattgtgaaatatattcgtacgtatgatcgtatctcattccattacgattctgagcgaccgagtccacccacacttagctcccatgctaacaatatagtcatcatcaccaccacaacgtaccttaacatcattacacgagaaaaagtatatatgaaataatgattttaaaagagaaccaaaagttctcgtattcatcatctctatttgtctcccgttgaagaaactagcttagttcgtgtttatatgagttactcccgttgaagaaactgcggttaagagaaatttttgatggataaagttatacttatagtcacgataagaagatatgatcgataaatccatatacatatgtgacattattttactagcaaaggatctctttctgtctttcatatcccatctataattttagatgaaaatgaagtagaataatatattttgtttctacatttccatctccaaaacagtcttcttcaatatctttcttattcacaccttttaaatatgtaatgttatcacctaacagtaatagacaatttacttaatcaccatatgcaagtgagaagtacatttttcttctatattaaatgacatgcaagacgtaaacaactttgcaaacttctgttttgaaaacgttttagtacactataatgtgaatttctaatcaaaatacgaaaagttatataatactataatacttaaaataaatcacatatatttcaatatttgtgatagtacattagtactcctccattgatagattagtcgtaactagtacgatatacaacacgagtattattcaacttctttctcattaaatttctaaagttccttttctctaaaataaacaaataaaataatatagaaagaaaactataagaaaattccaaaataaaataaaaagacgaaagggtcagtagaaaacgacgtgagtggttccttggcataacccaaaaagcaaaataataaatcagcaaagaataaaaagacaaaattcctaaaatcaataataatttatacaataaaacgaatttaggaagtttcactggtgaagtggttttcttcacccactgatttctattgtaaatctctctccctctatatatgtgattcatataagtattattatttgatagagaagctaagtgtgtgtctctttagtgctctctgttttcttctgcttatgaaaaaacttcatggcgaattttgaggatatggaagagaatcagtggggatgttttgttttcttttctctttctcagttcatcgaaactataacccactaaacatacaaaaccaaattatttataaaaagcaaaagcaaacaaaaacaaataaacggatcaatttctttcttttgtttgtttcttcttcttttctccaatctctagtgtaacgtttcatgtcacttgataaataaaatattttaggaagaaagtgcgagaaactcgggagttatacaaaaaaataacatttttgtagaaaaaaagctctcgtcttttcagttacttttctcttttgtcacactttcatatttttttctctaatcatggaggcaacagaattgcattagcttcattttctctcatacttccacaacctgtaactttctgatcttccaggttagttcacacaattttgcatgattgagttacaaagttatgatttttatgtgttattgagttacatgttatgatctttttgtgtaattgttataaagttttgattgttataaagttttgatcttttttgtgtgtgtgtgtgattgagcagtgaattatgctaaagaagagatcaagaagcaagcaagctttaatg

SEQ ID NO: 9838 - DNA, 3000 bp, Unknown
  misc_feature (1)..( 3000): cDNA_ID_3034002_gDNA_ID_1974084_Annot_ID_180510 3000 nt of promoter + ATG
cttttgctattattcttaattcatcaatgaaaactattcagattatgatttgtgtttctattgtcatgtctgagtaatcaccttgttgggtctaggaagtctcaatagggatttagatggattagtagatcgaaaaccccttaggattactcttaaagttcttcatcttgattattcttaatgctagttttagattgatcacctagaacttgatattagataataggtattcccgccataggtatttgttatttgaaccatcatatatgatcctaggcatttaagaaaaaacaggtaggctcatagaagggctctggtttagatactaggtgaactaatcaagcttattaacaatgcatgctttagcataggatttctcggcttctccaggtatcttagttgtaagtatagagagtttcgcggaacgccaccggttactctagaattatattttgagtttgagaacggtgcgataacaatcctgatattagctagatctacaatttatctatctcccgagacaattccttagacctgacgctttaatcacttaactctacaactcatttacttgcttattagttttaaatattcaattacttcatttagcttagtaaacaacatcataagtctattgtgtgaacatcgagagctcagtggaattcgacccttaagtgctaacgacgatctcttatttgagggagtaagcttaaggcaatttgagctatatcagggacagtgacctttaagtcagggggaggcgtttactaactacgtttttctttttgattcttatttttactttttgagtcattttattgagtcaaaatttagttaggaattaggatctatattctttagattattgcctagttgattattgttgcaggttcaactcaatctgactattggcaaatccagatggcaaacgaacaaacttgagaatatcctagtttccaacacaattcattaaggctggagctaatctcactgatcttccttttacctcatcaaaacagttagtattcatagaacttgactccttacaaacctgatattgagaccaatgtgaaaaagaaaaatattcctctccccttattataaataaataaaaacaaagaacagagattgatatgattttcggtagtgtataggggtaagaatgtttctcatgaccctactattatacattattaggaatgatcaattacaaaggttagaacttgccgaggatgtcaatccagtatgcgagtactcctttgtttacttttcaaaaagaataagcataggggagagaaagaatgctaaaaagaataaagaatggtcaatttatcatggtatagtacatgaatgattctagaaggttcttgaatattagcttgcttgatgagacctagcgatgaaagactggtggatatagttaaggaactaaggtatggaatcaagaatgttgtgtaagcttgcggagatgtacatgttgtttaggatttgattacacttcctaggcatatggatttggttagaataaccacggcaatagactagagaatgttgggagttcctgcgttttcaaacctcttccacgagttcggcttttgtgttttgcttgagggcaagcaaaagctaagtctaggagagttgatatacctcaattttcactgtttttagctatgatttgggtatagattttagaatcttttgttatttgtagagtttttctagtcttttttaggtctttacatatgtgggatgcatttggagattatggagcattctggatcaaaacagacaacttaagctgcagaagcaatccagagacaaaaatctacgtatgtgtcgatcaacaccacccctggtgtcgagcgacaccaatatctgacggcaattcgattgcgcaacttattcaatttttgaagattttcaaattcggcccagaacgtttctaggaacttaagtatcaatttttaaggtcaatgtttagacctaacacttattatctattctttactagggagcaaaaccctgttgagactccctttagagaagatctttctaactctattctcttcttaattttattactgctttcttattcaaacatgttttgctcttttataatcatgtgtgagtagttctcttgttaggttttcgatctactaattcatctaaatccctgttaggataatatatttagaattcttcatctttgtttgttcttaatgctagttctagagtaattaactagaacttgattttaatataacatgtatacccgccataggtatctattactagaactaccttatatgagcctagtatttagatgcggactagcgtcgatttagatacttaggtaaacttatcaaactggattagaatgtttgcttacttctagggattatatgttgaacgatgtatttaattttaacgtggggtttgatgataactatcataagaatggtagttatcagaatgtggaagaactggtccgtaaccattcaaataaattctacgacttgttagaaggtgcaaataatcaattgtacaatggttgtcgtgaaaggcagttgcaattatccttagcggctcgggtcatgcaaaacaaggctgagtagaatatgagtgaaaagttggtggactgagtttgccaaatgtttaaagttttttttaccaaaaggaaacaaggctaccacttcacattaatagaccaaaaaggtgatgcgctattaggacttccatatcatacgattgatgtttgtaagaacaattgtatgctcttttggaaagaagacaaaaaagaagatcaatgtcgaatttgtggcgcacaaagatggaagcctaaagacaaccgtcgaagaaccaaagtacaatatattcgtatgtggtatctacctattggtgaccgattgaagagaatgtatcaaagccactagatagctgcgacaatgcgatggcatgctgagcaccaataaaaggagggagaaatgaatcatcctttat

SEQ ID NO: 9839 - DNA, 3000 bp, Unknown
  misc_feature (1)..( 3000): cDNA_ID_4254512_gDNA_ID_1974085_Annot_ID_180524 3000 nt of promoter + ATG
tactgagctccgaaagctcacgaaccagtggcctcaaaacccttctcatttcaggtgaccattttcttgattctctctcactcactgaattattgattggtgcgttcaatcacgagatcgagagtttaggcccattgggccttattagaatttcattttattatcctgaaagtgatttttttttatcatgtgtattggtagagaggtatgccaagaatatgcaagagaagttgagaagttagcttttaggctattggaacttgtctccattagtttgggtctacctggtgatcggctaaccggtttcttcaatgagcaaactagttttttgcggtttaaccattaccctccttgcccgaaccccgagctagcattaggtgttggacgtcacaaagatggaggagctttaaccgtcctggcccaagatagtgtaggtggattacaagtgagtcgtagatcggatggacaatggatccccgtgaaaccgatctcggatgctttgatcattaacatgggcaattgtattcaggtaaacgtagactttcggctcaaaaccaattagcaatgaacgaagttgcatgtcaatatatcttcgatgtattatattagagttgatgaatgaaaataagattttgtggagtaggtgtggacaaatgatgagtattggagtgctgaacatagagtggtcgtgaatacaagcaaagagagattctcaataccattcttcttcttcccatcacatgaagccaatattgagccattggaggagcttataagtgaggaaaacccgccttgttataaaaagtacaattggggaaagttctttgtttcaagaaacagaagtgatttcaagaaactcgaggttgagaatatccagattgatcacttcaaggcttagttaatcacattataattaaaccttatgttgatttctattcgttctttttatataagttagccaagttcatatttcccaaaatgcacgcgagattttacatgtttatgtttaaaataaacggtcatcagaatgttgtgtcatttgcgatcttcgtcatttttcatttccaaatatacgtagactgacctaatgttgataaatgcgatagttcttaatttcacatgtttaaaattcgaattgggatttaagaaaaattctcatcaaatatttatcattagtgtatatatatcagtgttttacatttgttaatcctaaataataaaccgatctgaaaagttgataaatgcgttgtcaaaagacaaaatatacatccaaacaaatcacgtgattgccttcaacttgccacggttcaaagatttaacaaatcttctaaaacaccaacttaacccacgaatacacaagcacagagtggtggtaaacatacaagttaatgagttattcaaatgagattttcaatatcattcttcttcagcccgtcacaagaagccaagattaagccattagaggaagtttataaaccgacaaaacctgcttagatacaaagaatactagctaatgtgtttcaacaaacttcaaattgacgatacgttacattcatattaatcacttcagagcttgattattcaaattattttttctactgtgatacatatatacacacatgttttgcttttctatgattctatctacattttcataccgttgaataatttatgtatgaattacgatgcaatttccttcattatgcttgaataaaatgcttttggacatgcatgcgatattggatctacttttggattctatttttaaaaatcagcgagtttgttgctttgtaatttttaattaggcatcaagaatttctaaaatgcacgcgaactggtgaaaagaggaatgtttacgtttacccctttattttcttacagctcataaggatactgtcagaagacagaaccaaggctctctgactataaattggaatccatttaaacataatgttatgaccaatgatggccaacggttagcccaaactaattaactacaagtcaagttccaatattctaaggagaaataatagtatactaaacatacattagagaggttaaacttctttttggatttaagtgtgtatgcataggctatttattcttaagtataactattaactgtagctagatttatacaagaaatacataaaactttatgcatgtgaggtagccatgaatatacgtacatgttgcaatcgattatacatgttgtatttggatttctctatacatgttttaacttgtcattctctaagtatatacataccattaatactgtgggcatgagtttatgataagacttttcttttggagaccagttttgttttcctttccacctatatttgtctataggcttcacggtacactagtttacaagtgtttttatatgttctaaataaaattgagattttccggaacggtatgatctgtttgcaaataaggacgtatatataacagtatcaaatatatttgttgttataaggcaataatatattttctgagatattgcgtgttacaaaaaagaaatatttgttaagaaaaaaaaagatggtcgaaaaaggggagtaggtgggggcggtcggcttttgattagttaataaaagaaaccacacgagtgacctaccgattcgactcaacgagtctaccgagctaacacagattcaactcgctcgagcttcgttttatgacaagttggttttttttttttttttttaattttttcatcttcttgggtttggttgggtcactcttcaggtcaggtgtgtaaaaaagaaagaaagaaaagagagattgttgtgttgtaacccctttgactaaaatctaatgaacttttttaacacaacaaaactccttcagatctgaaagggttcttcttctctcttagtctctttgtccttttattctccgtcgtcgtttcatgatctgactctctggtcttctcttcttcttcttcttcttctattttttcttacttcgtcactgttgtgtctgaacatg

SEQ ID NO: 9840 - DNA, 3000 bp, Unknown
  misc_feature (1)..( 3000): cDNA_ID_2186249_gDNA_ID_1974085_Annot_ID_180533 3000 nt of promoter + ATG
ctatttttattattataaatgcttcatatattaagaagaaaagttgtaggcttgtagcaaccgattcatagtggaaaatccttttttttttttttatgaaaatcagatcggccgcaaaaacaactttcaccatgcacgaagctagaaactgcattgatgtaccgtgtacgctgtttttaatataaaataattgcagttttattagttaggctacaaatatgaaatcaggagaaatataccaattaatgtacgtcctaattgcttggtatgttacataaccttaagttgtataatatttattaatttattttatactggagttgatagctttaaaagttgagagcaaagtaacttgagaccattttagagttagcaaagtaatggagaaaataagaaaaatcacacgcatgcagcatgatgtataattattggaaacatgtatttccaagaaagtaatcagttctctgtacgcctgaattcgattttcataaagctcacttccttggattgctagagcaaacatttatattgatatctgcgttaacatcataacatgtgggtttttagtaattctcaacagtatgggtatttttgctctctctagagagggtaaatttgtgattccatctgcaaattattcctcctatatatatatagaacgtgatgaatcaaatttcttaagttgcaagccatgactaatcttgatgagtttcttgaagagctaagttctattgaatcacattctcagaaaatcgtgaagatagatgagcatttaaaaaagttggatgaagagacgaaagaagatgaagatgaagatgcggcgaagataattcaagatcggagtaccgcgagagaagcaggttaatttcttctccttcaccttgtaatttaaagttgttcctctctcattctcaaatcttgttgggtcttggaaacgcagaaattgctctacttatggatctccgtcagaactttcttccaccaccatcgatgtcatcctcctctcttcaaccaccgtcatcgtcaactctcgcaccatcgtcatcatcctctcttcaaccacccgcaccgttgatagacttctttcggtcatcagtgtcatactctcatcaaccaccgtcatcttcaactctcgcaacatcatcgtcaccgtctcttcaaccaccgtcgatgtcatcctcctctcttcaaccacccgcatctttgagggaattctttacgtcgtcagtgtcatactctcatcagccatcttcatcttcaactctcgcaacatcttcgttctttccgtcgtcaatgccatactctgttcgacctcccgattcgtctgatcgaccatctttgagggaattctttccgtcgtcaccatcatcctctattcagccacccgaatcatcatcatctaagcgagcacggcttagtaacatctttccgtcacctttatcctcctctccgtcaccgtttgttaacccgtttctccgtccgcaggcccaagaaccaacaataccaaatttcataaacccaataccacagatctctccaggcctacctgctctattcccaaaccctaaccctaatcctaaccctaacccaatcccaaacccaatccgaaacccagacttggtgtggacaaataggcttcaactagtgtttgatgacgcagttgtcagacttgggggattattcagtatgcaactttataatttttttatttattttgtttattctttcaactcctaactattttcctaattttttttttttttttcaggtgcaacacccaaagccataaacgaactaatttctgaagagggtctcactggtgaccagatccgtagccacttacaagtcttgcgggatcgtcaaaaggctattgcagacaaattagccttggagtgaagaaaatattgaagatgagagataggattaaatagaaagagtgatagtatagaacgtttctttttcttttgttgttaatcttgcatattacaaacaattactatatcataatagaatttatgttaatgttggagttattaaaaaaaaaaaagttaaccataataacattcttactgtacgcatgagtgatcatttatcacaatctattagagcaaccccaatgggtgggatgatgacagtccctaaaaaaccaaaaaataataatattttaattttttaacatagtttgacaactaaaaaacctacacatgtacatttaatcttcaggtcccttatataagggtttttggagcccttctctcctgtgtcccttccattttaattattttttttttttttatattgtaagggaccttaagagagaccaccattgctggtgcaggctgtagaaaaatttgtttagcttctccttcttttcttaattttgacagataagtctcagcctctctccccccataagggtatgtcttgacatttagattcgttgaatcaaaagtttttcatgtttgttcatattgtggtctaatcttcttaggcagatatgacctcagggaagaaagattattatgagttgctcaaaactacaatctttaaataaatatttgggtgatgaaacttctagttcttttttttttttggtctaaaatgaaactattacttctagaagagaaatatccaactcttttttttattccaagcaaatgataaccaaaaatgcaataaaggtgttaatttttatcataaatatattctaactatggtcgtaacttgtaatggaacacctaggcattttttatttttttggtgcacacctaattcgaggaaaaaggttgaagtaatcataattacataagtttctaactatggtcgtaatcgaacacatctaaggcgtagtaataattaaggaaaaaggttgaagtagcaaaacgacgaggttacgatttgtaaattccataaatgccctctctcattttcaacctcaaagaatcgtttttggctttcatcagccgcttcgtatttttgttttcttcagtaacggaaaaa

SEQ ID NO: 9841 - DNA, 3000 bp, Unknown
  misc_feature (1)..( 3000): cDNA_ID_3034037_gDNA_ID_1974085_Annot_ID_180530 3000 nt of promoter + ATG
tccctctcttctgaatcaaaagatttctcaactggtacatgttccttctcttgtcctccttgttcatcataatcttcgtcgtcaaacacagaagctctggaatttaaaccactcaaagcaaatgcagctgataagtactctctttttggtagtaggtgatcttcctcagtaactacttgaagctcaggcccatcatactcttcatcattgctcccataatctacacgacatatcatcacaagtcagtgaagctgatgaccgggaattggtagtggcaaatagtttcagtttgtaactgctatgggtgggacttgttgcgtatatcaaaatctcaaacataaaaaccttctatttaattaactcaaaacgctgagcaataaattatcccacaataagtagattatgactagagcaaaactaggagaatgcaatacactaatgaagaaaccatgtaagaaactgcaaatataacctgcggaagtctcgttgtcgttggactcagacataataaaaccctcgaatgcaaagagtggcgtgacaattttgcttcccaaatagcaaaggaactactgaaaagaatcaggagcaagaacaaatccacgactcaacgaaaacctacaagggaaacataccaccatcaaattttccggtacaattagggaataacaacgttcatacccaagtaccaattttcgtcaaattttgttgtttagtaaggaaccaagaacaaaaccctcgttgatatctaaccgagacgacgacattcaacgttatgtgggattggcggtttcctaattgagagtatgtacacatttagccggaggaagtgaagcggagctcaatcgggtgattggaagatacaacggaaagaagaaatcgtctgagggatcaaagaggcgggtattaacatcggagtggtaatttatagggaaaagtttataacccgccccgattctgatttagttgtcccgggtcccatttttttttttgcacttcaaagattatgtttattaatggtccacagaatacagcccaataaaagcccatttagttacatatcccgggtccaataaagtaaataattagtcaaaaattatataattaagtaattaataattttgatggaaatttggcaagacaagtaaataaataagagtaaaagtgattttctcgcatattactcttcttctagattttggcgcttttttaaaatttacgttagaaatactaaataaaacaaacaaaacctatgccctgttcgttttcctgtcgctggatccagcgacagcgaccaacgaccagcgacagcaaccagcgacaacatatattgttcgattgtctgtcgctggactcagcgaccaattacatcaacaatcgctaataattgtcgttgtgttgttcgtttgactgtcgctataaacagtcgctatatttttttttaaaattaattatttttggtactaatttatattttaaaatcaaaatgtaaatcatatatatcatacaccatgagaaaaataaattaatagatttatttattttagttttatcaaatttaatttgactataattagtttatgttatttgaatttaatttattttaacttaatttaataagaattattttaattaaactagaactcaaacctttcttgatatcgcagagaaaaatattataaatttatttatataataatttctttaaaacaaatctaactccaaatgatgcatattctaaatttcgtagttattcaatagtatatatataactaaccggaaaaaataactgtaaatattttgacagaaaattacaatataggaaggttgcaataaaagacacaagcgagaaaaaacaaccatcaatattttttacggaaagttgcgattaaaagacacaaccgttcagagtgcaaaaagacatttattttaagtttaatttaatttaattctgtttaatttaattatttttaattattctttaatttatattttttgatcgctaaattgttcgtttgcatgtcgttggatccagcgactaaaaccagcgactaatcgctgaaatcagcgactgatcgctaaaaatttcagcgaccaaaaattgcggtcgctggtcgctggcgattgtcgttacttttgatcgctatgcaaacaaacaacttttggtcgttgtcgctggtttcagtcgtcagcgacaggcaaacgaacacagacaagcaaacgaacacaggcaaacgaacaggaccctaatttaccaaaatgaaacaaaatataattatccatgtccaaaaagaaaaagaagaacaataattgtcatatgacaaaattaaaggatatacttgttacggtgtatattgtatagtctctttatttcattcttatagtaacagacccaaaccaaaccaaatcctacgcaaaattagtctattttttttattttatctcgaactttgacataagccgctaggaaatatatattttaatcacgaggcgagataattcgaattaaaatggaccctctctagtctctactgcttttttcaatgtcttagccgtttgaatatttttgaaaaaataaaagaaaataggtttctcatttacgaaactaacctctacaagcctactttattacgtgagaaagccctttccaaattcaaattcgaacagcgcctcaaagtacaaaacataaagatgcaatctcagccgtccatttcatcttctttcttttacattcctttctccgtcctgcttcactgctcaaatcatgcgaatctagaaagagagagggagtgagagagaaagagagagagcgaactctttagaagctcgacaaattttggattttgttgctcaatttactacacaggtgagatctatttcagcctttaaacccaacgagcttcttagctttagctatggattccaagtttctaaacttatcatttctcgtgtgtcgatttcataaattttgaactgggttttgtttcagattagggtaataca

SEQ ID NO: 9842 - DNA, 3000 bp, Unknown
  misc_feature (1)..( 3000): cDNA_ID_3034033_gDNA_ID_1974085_Annot_ID_180531 3000 nt of promoter + ATG
catgaataacctttggataactattatgtatcaaattatttaggccgtggtcaacgaagattccaacgaggatgtcctggaattacgccgtcaaatccgacttttaaaggcgtgtaacattttaaactgccgttaggtgctcgttatgtgaagctgtaataacgctaagacaattttttgtgtctgcggaacaggaagagctttccctcctcaagcgccagaacatatccagggcgttgtcatttggatcagcaacagccaacttcgcagaatcacaagtcgattcgccatcaagtgtaatgcatgagacaggacaacagcaggctggtaacttgcttgtgtatgaatctggaggctgtgtaaggatgtctagaaagcaggtatatcaacttgagaaagtatgttaggctttactgaggattcatatgcctctgtcttgggattccactaaaaatctgtatatgtttatatatcagttgaaatctttggagataacacttgctggctcattaagacgagaacatgtggctgatgcttcaattaagaagcttgaagcggagatagagcatctaaaccgtttggtaattctttttcacctacactgttcccattcccacttatgtttcagatatcgcctgaatccatttatgatcatttaactttaggttcgacaaagggaggaagatactaggagcacaaaaatgatgctcaggtttcgagaagacaagatacagaggctagaatcacttcttggcaaccatatatctgcagattcttttttgctggaagagaataacgtgttgtcagaagagattcagctgcttcaagctaaaattgataaaaatcctgaactgactcgctttgccctggaaaacataaggctactggatcaacttagaaggtgataaatcttcaaaaacatgtgatgccgacgttaaagataatgtgtgcttttttatatataaaaagttttgttattatggtacttgcagatttcaagagttttatgaggaaggtgagagagaaattctactgggcgaagtctcaaatctgcgaaaccaggtacctctagttagcacaacatcctggtatcgattcattcttcttttcgattgcaataccatccttaaccttagctattgctcatgcagctcttccagtttcttgatgaaaactctgactggcaaaaacatgttgatgatggaatagagccacaggttacatctatttacctctttctatatgttaatatctcttaatatccagcaggattgtgcttcattggttgcttgtcaataatatcttgttgtatttcgtatggcacagggtgcatcacgtatgagcaaagaaaattgttctctacaggaggaggtcgagtcactttctttctcttgtttcttgtgcatcacgtattttcaatttcattttcttaacgtcttttccattgcagttaaaaaagacctgttacgagcttgagaaatgcagaagtaaccttggttcttgcctggaagagaatgcaaagcttagtaggttagcaaatctgatttgatgattcttgggtttttcctggtatatggccaaatgagttctcattttccccataccctgatgagtcttctcgccattctcctgcagagaaatcaatgatctacaagctatggtcagcgatatcagagcttgcacacctgatgaacatagcagtgtgaacaaacaaaaggtttgaacaataagtacaatgtgatttactaatctgcccaaccatctgttttgttgtttctgcaggttaaccttgagcgtttcacttaacagttgaattttgtaaaaaaattgtaggcgctgttggggactcaaaattttgagccgcacgaaacacttgcttgtgagcaggccaattatgtcgaagaaatcatcaaactgcagcttgatctggacgtacaaaaaattatacttgatgaggaaagaacactacgtggtgatacagaggcacaagcagttcgcttaaaatttgatattgaagtgttgaaggaccaactacttttgataagcaagcagcaaaaaaatgtttatagcgagctgggggagacaaagtctgcagttgcagctctcgaatcgcagaacattatattgatccaagaagcagtggagttgaggagaataaaggagaactattttgagcttttaaaaaagcaagagcttgatatcccagcaatgaagtccaaacagtgcgatgagttcaaagataatcctgcagaggacagtgaaattgatacaaagtttaagaagatgcaagcatctcttgaaaaagctaagagattgaacatgctgtacaagagtgatatcgcttctaaggcatgtggagatgaagaaatggatgaagtttgcaagcaagctgaagctgcaactgctgaggtgattgtctgtttgcagaatgagcttgaagttcttcagaaggaggtcaatgatttccagtcaaaagaaaacgtgactgaaaagcaggtagagattttagaaactcagatggaggagctgcaggataaattacgagacacgaccatggataatgagcagttgcaagaacagctcagaggcaaagacatggaattactgatcatatcaaatgaaatggaacttctcacatctgagcttgaagaaattctgctgaatgggaatgaaggccttacagatgcgtgttaccaggctgatcttatttcgggttccttaccagataaaaggatatggatatctgaacaggttggaggattaataagaacactttctgagagggaattaatgattgaagatcttgaaagctgtttggaggatgccaataaaaagcgatgtgatatagaatccatgttgaagtctcttaaaggggcagcaatagtaatgaatgaagcgcaccagagagagttcgaggaaaaggagacagatgttctcctcctgaaatcgcagttgtgcacaaaaacagagacaatattaaggcttcaagagaagctgaag

SEQ ID NO: 9843 - DNA, 3000 bp, Unknown
  misc_feature (1)..( 3000): cDNA_ID_2186069_gDNA_ID_1974087_Annot_ID_180575 3000 nt of promoter + ATG
taaataggctgaaaaccataaattatttggagccaagattaaattatgttacataaatccttttctcgtcatcaatactcaaatttaaatttttttattttcatagatatttttgggaatttaaaatccttccaaataaatttgggaaaataatagatgttttaaaatatttttgttattttcgagtagtttacactgattttacatcactttatggatcaagaccataaaatttaactacatttattataacttatttgaaaagacatgaaactttcattagagtttaggaaaatacggcaaactattagattatcaccctcttgtgactaatgttaatactatttggtaaagcaaataatcccataactaattttattttgatttgttcactatcaattgtatcatagacgatccgatgattaatgtacctaaattttgatttaaattgtattccttgtagtacgcatagtaaaacaaagttcacatgttcttttacaattggttttctaacattttagatttcattttaaactaaagaaaaagggtttttcgatcccaacaatttttaaagtatgtttttgaatttcaacaaacgactagtactgatatatacatcaatgcttacaaaaatcaaattatctatctcaacgtttacttttgtacgtaattacaagtcaatattaacaaatattagtcaactgtaacggttgttgactcaattgatacgtgtacgtttaggtggcatgttttttaataaaataattttgttttatgttttgggattaaaaatatttacttttaaaaaactaaaccgaaaaactggaacccccaacctcacatattcatcaccatcgtatccacaaacattatcgagacataaataataatttatagatatatagcaacaaattggaattaaattaatcaaacaatgtcatttagaattggggaaatcctaaccgacgttatatgattaattttaattccaatttatgtatgtgtatatatctataaattattatttatatattgatgatgttcgtgcatgatggtaatggtaacctttaaaacttttgaatctcaaaacgtaaaacaacgtcatttggtttgaagaacatgccatctcgacgtacaagtgttagctgattcaacaaccgttactgttaattaccataactaacgttgactcataattatgtacaaaagtaagagttgaggtagataatttgaattttttaaatgttaaagtatgaacattactaattgtttgttcagatttataaaacacagtacctattttgatgtgttaaaatgtaatcgggaaaataggaattttcccaagaaaaaaaaatacactaaaattttgatgtgttaaaatgtaataaatacaagtacctatttctttctacaacaggtatcacatgatctgctcaatctcattttgaaggcaaggtcgaaccctgtttgtaactaaatattttacaaatacactaaaagttttgttttgttttcctcatgcagaaaaaagaaaagaaagaagaagaaaaaaaactcacaaaaacatacattgttctacaatatgttaaagtaattgttctagggtaataaaatccgtgtctgcctcttccacttcaataggaaagtgtaagtttttcgaatctttttggccagataatttaaaaccgaccgaggaaacttacttttgtaaaagtgaccatttgcacataggaagtagaaagttgataattggaaaatttataatattttatacaaaagaagtgtttaagaaccaccgcttggtctcaccactcaaattcgaacgtatggctcgtgggcacaaactcctgtaccaacctttagatactagcggcacgaggagacttctattttctctttgtttttaagtttttttatcgacttaaatatggctttttgcaccatttaatttcaaaaccaatgtctttctctcgaggaactttgtttttatttcttagaagatgaggggagatttactatctaaataaaattttaaatgtttgtaagtattatgagctcaacaattttgtcaatagtgccacaaatttaaacgtttgctttttgtcttctttgaaaaatcaaatgctgaaaaactgttacatctctttttcttaaaaactcttgtctctctccttttccttctgctgaggtaattgaatgctgcaaagagaaagagaataacttaaacccaaaattacacttaccgccagaaaaaaaaaagagttcagtttaatctaacatattttatacaatacaattgaattatattagtaaaaaaaaaacttccatataaatcatggaacaaactggaacacatgggctctcttattttaatttattttcttttttgagggatttaaccatgtttattatatagttttataaatatatatataccatctctccataatttataaaatgaaagaaagagagagtcttcttgttggagtaaacccaaacggttttagattacttattagctgttcatcagttcttcctctctaaaagagtaaaacctaaacatctctctctgttctattagaaccaaagaccaatctttgtgaacaaaacacatctcgtatacttcagatctagactcgaaaattttagacctctttacaattggtctttgttcatctgaagttggagaaaatagttagcttaggtcggatcttttcatatgctttggatcctccttcgtctcttttgtataattttaaccttatcaagagttctttttgaatctcaaaagattatatagtagtatagaaggtttatatgtatatgtatagccagatagtttatgttgtttaaagattcgatgatagccaagttgggttaactttctttttccttgcctccttactcacatacaaaccctatctgtccgtacaaaatactaaaaaccctaacttttctctctccaccaatctagtttattgtttcatttccacttcaacg

SEQ ID NO: 9844 - DNA, 3000 bp, Unknown
  misc_feature (1)..( 3000): cDNA_ID_2186077_gDNA_ID_1974087_Annot_ID_180577 3000 nt of promoter + ATG
gtttgtggtggtgcttgggttcttagagatgatcatgggaaggtgttattacatagtcgaagagccttcagtaatctctctgtcaagaaggatgccttgttttgctgtgtcaagtgggctattgagagtatgtctagccacagacagtctaaggttttgtttgcttttgagcctggggacttactgtccgcttttgccaggccgaaagcttggccctcttttgcttttcatgtttcagaactaactcattttttggagaagattggagattggaaggtctcggaggaaaaggtcgattctaacaggggagcttctcttattgctcagagtattgttaaaggagataggtttcaatcttatgtagcggttggacatcttcggtggctccatcaactatttgagggtgagagaatctcttccaaggccttgtttctttgctttggtttttgaccattgtcaatcttcagttcttttggggaattgttgtttgcccgactattcctgtaaccttaattggtctttttgtaaagattctgtatcccaaacaatattcatcaatatatcattattcagtgaaaaaaaaaaaactatattcactatgggtttggaagaccaatgtacacctattattagtttaacctatataatagtttaaaatataaaactccacatcaagcttttgattgacgagtgacgcaattttttcgtgtcgacattgtaaaaacagaaaaaaaaaaaatgtgtatggcttattaaatattcatctgaaaaatataaactaatagagtcaagaaccaacgaaaaatatttatagcagctataatacggtggattataaagtaaatcgaattgtattatcaaataaaataaatcgaagcaatgttcatgtgtcttgattaacggtgataaccggccggccatgtggcttgtcttacatgccaaagtcaatgccaaaacaaatgtgcttcgagtaatgccctccttaaacttcccaccttttccatatactatgatatactttttaatgtaattctatatttttctactaataaagtacatatatagattgatttctctttttttttttttggatacactgatttctctcaaatcaaaatttcagttacattgtcttttcagggtgcttgtaaattatgtaactgtaaccatcgcatttttcattcaaaagttctttatttcatgaattcgattttctctaagacaaccttgataagcatcaataagtttacatgcacatgggggcacaaatgatatgcttacaatagatataagtccgtgtaatatttagattgcttatatagttttatccataatgagatgtcttttcctgatttgacgctaccaatatgattattatctactgataatgtactcgtacggcaaatggatgcaatggctgtacaatggtttatatattaaactttaagaagtcagcttgtatctattaacaaaattaaaattgaagtagatagagatatataatatttaatataaaccacaattgttaccaattgccttgtatatatttcgtaaagttttaactgattttatcatttctacggtaagatttcgaccacaaaatacatgtgttctttgatttttcattcgtagttcctctaaaaactagacattgcagatagttaaatataatataaattggtagttatggttatggttggcataaatgtaaaataattaatctttcgaaacgtacgtgtactcattttagaattctgttaacatataaaccttagatttaattcatagaaattgaatttacgtattagccaaaatcacatgcttaagattattgtaagtttgagctgcatcacatttcttacatcaaaatataatatcatcaatactatatatgggtatatgcattgtactcaaatatactacattataccttttaacaaaacaaaaaaaagacatgcaaatacattaataaatgcatggcattatccataaccacgacgttaaaacttattataaaacgctacctaacctcaaattctatcaagtcggcgttttgattgaaactagggaataatatatataaagcatgaaaactagacgtggtatcatgtaaccatgcagtttgtagtacccgaaaggccgaaacaccgatgataagaaacttctaaattatgtaattaactataaagtaatctttcttcttattttttgtgtgcaaattctattagtaatcaaacttatctaatatgtaattaaacttatgtctaatagttaaacattcataatagataatgggatcactgtttcaattcttccattaccccttcgattatggttggtcgtcactgtaaacattttagagtaaaagaatatctgaatattgaatcaattatgaatttgctaaaaaaaattagtgatatttatagattttgccatttatacacagaaattttagtttaatattaatacagtacatcagtcatcgtaaaacggaggcataacactatacaccttcaattaacaaataaccatttactacaattaaagactttttagtggtatttatagattttatgaatctataagatttttgaaatgtaaaggaatttgataagaaagaactaattaccctcaaagtggctaaatacctcccaaacaaattaatttggtttaaagctggaaataatgttttgaagtcaaacaatgattcaatcacggaagcctaccaaaaaaataaaatgatccaatcacggaagacggcagttaacaaacgccgttaaagaaactgatcacaccgtaagactcgagccaaatataattaacggagttaggctgcttcttcacaccttcgttacttgcctatactctctctctatatatatataagcttaaatcttcttcagcttctccaagttaattacatctctttctctctctctcctcttacatttttcttcattatacacaataggagagagagctttgatatatccaacaatg

SEQ ID NO: 9845 - DNA, 3000 bp, Unknown
  misc_feature (1)..( 3000): cDNA_ID_3034093_gDNA_ID_1974087_Annot_ID_180576 3000 nt of promoter + ATG
aaccgagcggacaaaagccggaggccccaccgtcgtcagcagctacgaagagacaaaacaagtcgcaaaggaacataaacaataactctccgtcggcgaatgtggtggtcgcttcaccaacttctcaaactgttaaatgaaaaacagagacaaaaagaaacaatataaatattattatgtaccaaataagaaagagggcaaaaggaaaaaatggcagcgtacccgagtgtgccacttctcgtgcatgcatgggatcttgaagacaaatggagggtcatgattaaagctgtttggtcggggtccgggtttttactccattttttgctttttcttgtcgagtcggttcttttataactctttactctttttaccttcaggatattgtagagatgattaattctggaaatggtgtttgtgttatatttctggagagatgattatatagttcttttgttgttgtaattggttaatattacatatgtggctcatttcttgagtcgagcttacatatcgtttataatgtgaatgttttaagaagagttgaatgatacaatatttttacacaaacattgataatgataataaaaatgataattaatgtacaaaattatttgtaaatatggacatatggacaatttaagaaggaattgagataattaattttgtacattaattatcattatcaatgtacaaaattatttgtaaatatggacatatggacaatttaatgatagtaaaaatgataattaatgataattaatgtacaaaatgataattaatgtacatatggacatatgtacaaaattatccatatcattcacatattcacattgtaaatatttgtaaatagaatgtttacatatggacattttaagaagagttgttccttaccactttgattctatcattttcttgtttatctagttagcttgaaccctttgtattattgagtaacgaaaatctttggaggaaaaaaacaagtgaggtaggattataattttcctcatataagtgtgttgtttgtgatacatcattattctttcttatttttggttaaacccaaaaactggaccgcacctaaggaattgagatattcaaaaaaacaatgatctgacccgtgccaaatatccacaccacacctttctccattcaggccctactagaaagccgtgagacggttgacaacttgaaaacaaaagacttataatgagactatgagaaacaaaaaagaaagtggagttgatgaaataatctgatcttatgaaagtgaagttgattacaaaaggagcagcgtggtagttgaatagtttcagatgttgataaagacgtgacatacatagttgtctcagtaatctaatcaaggactcctcatgtttctaacttcttcttctataaagttgcatgagatttatatctggagaacatatattgctctaattatgtggtcttattatcatcaatatatgcctttttctacatatgaatatatgatcgacatgtatagatattttttgttgttcaaaaaaaaaaaatgtatagatatttttttcattttccaaaaggattgaatttcgaaatggtgtagccaccttagaggtatacaacaataaataattttcccgacttgtaacaaatgtttggaacaaaagtgtcaattagaatcaaagtaaccatcagatgccttttataaatttctttatctatgattattttttaaccaaattcagacacttctatattactaaaagccaaacttgatatctatttcaacaaaaaaatttttttttagtctgctgtgactcagtatatctaattgttttcacatcattcataaacttttactagtccattgtaaaatacagtatattagaaattgttttcctatctatatatgcttaggtttaagaaaacaacttttggccatgaatatttgagtttttaagtggttttggattatagattttgccaaaaggaaaaaatattgatttaaaattacaaaaagaaatctgcaaacaattatcaaaaactcattaaagtgggatttatttttcattttgtttacaaaaatgcgaactctaatcttgattggataattaaatgggtttttggaaaaccaataactatgctataaagtataaactactaccattcaagccttctatttttctatgccaaaaaatactacgcaaaaaaaattgagcgtgtttgatccaacaataaaacaaattactcaatcttgtttgatgtcaaaatccaaatccaaaatatgtttcggacacctgaccggtctactcgattgacacccctgaaatttcgaaatagacaatacacaaaaggacatagacaacataacttcatctcacttagatattcacatttcccatttttcaaaatattggctcttcattttctgtgtacttccaacaaattgtcttctagagaaaccaaaactatctaagatttctccaccttctccatcatccaccgttgattcactcatctcatgtctccaatgactcatctacggtcaagattcaaggagcatgaaacatcccatgaaccaaattacacaaaaacatttaccttgataaaaaaacatcattttattattttggcagaagaaaaagtcttaattcgaactttgagcgtgcttatagtttaatcaattaaagttataaagaaaagtaactttataaattcaggagtaatcagtagatttataccattcttgtccatcgctttaagccacacttgatcggacggtaagcaatcaatccggtttacactttctgattataaagattccaacttttggttatatcggacggttaataatcaatacggtttgagtttaaatcatagccgttgagatgtttgactaaagtgtttacaaagtagtcaacactctctttctgctacaaaggaccagtcttgaaactcaaagtccttacctttcccttctctaacctctctttctctttctctgtctctttgtgagaa

SEQ ID NO: 9846 - DNA, 3000 bp, Unknown
  misc_feature (1)..( 3000): cDNA_ID_2033914_gDNA_ID_1974091_Annot_ID_180587 3000 nt of promoter + ATG
tgattttggagtctttggtggcctctttagccccaggtcttcttcttcttcacccctccaccgaaacaaatggctttctcacaaagtcgggctttctcttctgagctccagcttcgaactaggcgatgatccattcagaagggactacattgtgcttgcccctcaggtcaaggtcaacaatgttaatacagcaactcccaagctttccagtgatccttgtgtcattgtggaggaaccaaggagatcaagctcatcatcccctatggatatcatctccacgtactctcgctccctctctgggcgtgagatggctctctctgaggactatacctgtataatttctcatggaccaaacccaaaaacaacttatatatttggcgattgcatcctggattgtgaccccaaggacttgggaaaagaagatattgagatacacgaagaaggggatgattcttttagcacagaaaaacctcaaaatcacaggttcttctggctccaacttacaaagcagcattgagtggtctttttaaccttgaactaattacatctctgacattttatttccgtgaatgaacaatagggaagtatcagcagaaaaggaaagtgagaacgctggtgctgaagaatcatgttacgaagaggaggatctgtttcctatggcaatgcctcttaacccgtaatgagatggccagagtgaagggggtttattgtgtgggcctctccctctttgagtgtgacatttagtgttgtaaggttaggtgtggggatttttgtgtgctcaataaaaagctttgattcgggtgagttttgctgtggcctgatgccccggctcatcccttttcttcgtcttgttttttttttcttcttactttgtatgattgcgttgttactactgatcctcatttgatggacacacttgtgttttctctctatatcaattgttttagtggctcacgttgctgaataaaaatggatattatcgatagggcatcttttattctattttgggatacaagaatgattgaaacacaatattggaaagaaaagctaagttgcaaaaaaaaaagaaaaaggaaaaaaagtcgaccacagtgggagtcgaacccacgaccttttgatccgaagtcaaacgcgctaatccactgcgctatgcggtcattcttgttacttatatcatgaacaacatggtaagccaaaacttcttctttcctctttcttctttctgttttctggtcgctcgttaccaccaagacctcgtcgaggtttctctctctctgaaaaagtgcttttgctgcgtttccatgctctcggaaggaacttggctgaatcgttggagaattatcgatctggcgtcgttggtgcatctctagctgcgccaattcatcggatccggtttgatttctccctttcgcgaatctagccttccgtgatcttaggtgggttttccgaattgatctgtaattgaggatgtaaatcgaaactagggatttcctagatctcgttagctgtgtatttgattattgcagcagagtttttgtttaggtagagatatagggaattttgatatagggacacttaaattttggtgtatcaatttgctgcagcagccatgttctatggcacagctgtatgggacccttggcttatcgttggccagattatttgcctccaatgctcttactatctcactcttggactcttcaccatggtctttcttggccttcgtgttcctcgccttagtcttgtctacttcttcgattacgctactctcactacttccaccttcaccggttggtctgttattgcctcattcctcttctcttcactcgctgggtattttgctttgccccctagtaatagtatccatccatttatttccctctttattactagtcttttcagattccttgtattcattttaattggcagggctgtgtacatgatatttttggtggagcgagcacggaaatgcttagatttctctgcaactctctacatcatacatctcttcttttgcatcatgtatggaggatggccttcctctatggcgtggtgggttgttaatggaaccggactcgctgttatggctttgctagctgagtacttgtgcattaaacgcgaacagcgagagatccctatggatcgcttccactcaagtaagatgatcattctttcttgaaatctctctgtgtgaacaagcatatctttaccttttactttctcaagactgacttaacatgaaattaaatttggctgcctatgctgctgctgcaggggtttgaagattggtgaaagaacaagtgatgaagattcttgtgggttagcagcgcgactcgtagagcctagtagagcctagtactcttaacaattgtgatgtacagagatgaaatcagaggagtagaatgggcgaaaggaagttcagctagccaagcaacaatgttggacactggtgcaccaactctgactgcaatttttagtgacttcaaatactaagactttggaatacgtttcaatttgttcttttgtatgaaaaaaacattagactcgaataggttattgatttcatgttgcttcttttttttgtttatactggattttctcttctatcctctacttggtgcagctttgtgtgttttaaaaccagtgtctcattcatcatactcttttaccaccaattgaatccttccaatttactgttttttgggggggaaaattactgtgtactaacaagtaaaaagggccgtccgtcaaaatgtaacatctcctatatacggtgcggtcaagttaaaaaaaagagcaaaaacgcgtgataaaacgacgtcgaattagagatcctactagacccagattcagatccaaatcgccaacgcgcactggaagtgggatcaccaccactgcgcttcttcttcttcgtcatctctgatcccccctgcgatcaggggccatttccgtcgataatccgatctccggttcagacattcgtttggacttgcaaagatg

SEQ ID NO: 9847 - DNA, 2258 bp, Unknown
  misc_feature (1)..( 2258): cDNA_ID_2034694_gDNA_ID_1974091_Annot_ID_180619 3000 nt of promoter + ATG
ttcattctttaatttacagccatatcacacatgtatatatggacttttttcatcactttgtcgaagagtatttaaaagaaaaagtgacaggaaaaaaaaaagaaaaagaaggaaaagtacaatactttatcaaaatgtgtatttttttgcaacttatataaaaaaataggatattggcaagaaaaaaaaaaaactcacctagataaactgcacttgatgagtcagcattcatcatccattgcacatcaccatcatcaaaaataccaaattaaaaaaatatatgaaaaagatcaagaatcaaatcaagaacagtcgaaggacaaagtctggtccgaagaaaaaggagtctccgagttcatcggaatccaatctaagaccaaaaagatctaacaaattcttgttagttgttaccaacatatacgtgttaagtgtagacaaaccttgacgtcctttcttggtctgtgtatcgttccagctgttcttatcccacaaatgcgcttcgtatctcccagtccatctatgcctattattattcaacaatcggaacaattaaattacctgataaagaacgatgtcgtttatggtattatgagaggagagagaccttgtgacgcctctgtaaggggagctgcgttgaagaggagcgtttcgaggcggcgacttacgtttgcgtttggatgttaaggcaatggacgcagactcagacgcagacgctgttttatcgctgatttcatcgtcaacgattgttttcttgctcctcccagagacttttgccattaccggtgaatgagaagaataaaagattgagagacaatcctgaaaatggaattatgaaaatgagagacagatagttggaaatggttgagtatatttatattaaatccgtcacatcttttttttcgtttatatatatatatatatatatgttaaaattttagaacaattttttggtttaaatacagattctcagccgaatattttaaattgtactgatcatatgataaagtcactaagattatggcactaattatcttgtatttttttttaatagattttatttccggtgatataaccgtgtctagtccactgtcacgttttcttaattagattcatatatgctaccatttttgcacttttcttagtcagattgattattaaacaccacggttaagaatttctcaaatcagaattaatgaaccattttctaaattgattatgactagcaaaaaagatccatatctgtattattgtttttatctgctcatttttgtcgaagaacctaattagccaaagaaaaaaatggagtgcctcaagttttatcgattcttggttgatctacttcttggtcggcccatgagagatgtgatgccgaactagcaagaaactttgttatattttttcattttttttgtacatatttacctgttctcccaataatttagcacttggtaaacaaatatgacgttttgatcataacagcacacacacacacacacaaacaggagaaattttatcacacaataaatttcataacttccaaaccattatctgttttattaatgtttgtatgaataaaagtcataatttattaaatataatgtgtctactacctgccctcatttttatgcaggtggaaggagttgtcaacaattatggtaaaagtttgccaattagagtccaataagcacccttcaaatcaaatgtatttggtagtgacaggtgaggaatctatgtgattgtgaaatttggccatctgaaatcataagtaagcatttaaataaatactttgtttattttcgcatgaaattattaggtattaacattgattctagaatgacaaagatgaacctatgacaaagtatcaacattaaagaccctcttactaagacagaggctttgcctagtttggaacagacaggacatgagccaaatgaagcccacaagacgtctacagaaacaatgggcccaaataagcctaccgaacgactaaagaactaatgggccacaaaaagcccatctactctaatgttctatatctttagaataagtaatttgaaaagattggaaccaaagtcccattgatcttgagtttgaaattccaagacatttttgtgtgcgtgcgtgatttcgtcatccgtgacgtcttcaaacattggttatttaacaagattctctgatttttgattcgtgtgctttctatatagttgggtaccaattcattagtcagatcgcttgttcgtcaacttctctctctaatg

SEQ ID NO: 9848 - DNA, 3000 bp, Unknown
  misc_feature (1)..( 3000): cDNA_ID_2033897_gDNA_ID_1974091_Annot_ID_180617 3000 nt of promoter + ATG
cagcttatcccaattactcttctttatcccaaattctctttgatttcttgctacttggtcttctccgattagatcttcgaatctgtttctctcctctccgggaaccggtggctacgtcatgtgtctttctcatattccggcaatcctcaagaggaaatctagaatcctccatacatttcttatttccttactagggttttgtgtgtgttggcaggtggaagctgacgaagaacaacatcatatatcattcaccaagtaagtaatgtaaagtaaagtagcagctctatttattttctttcctatgattgagatgaaaaattcgattgttgttgtgtgagacagtggtacgagaaaaagatatctgctgggaatacgcagagaaactagatggtaacaaggttaaatgcaagttttgctctagagttcttaatggcggcattagtagattgaagcatcatctctctcgccttcccagtaaaggggttaatccatgtgccaaggttagggacgatgttactgatagagttcgttccattttatctgccaaggatgatccccccattaccaacaagtacaagcctccaccacctttatctcctccgtttgatgctcctgcgtccaaactagtctttcctagttctcctcctaatgcgcaggacattgcagagaggagtatttctctcttcttctttgagaacaagattgacttcgctgttgcccgctcaccctcttatcaccatatgctcgacgccgttgccaagtgtggtcctggatttgttgctccttctcccaagactgaatggctggacagggttaagtcagatattagcttacaactgaaagacactgaaaaggagtgggtcaccaccggctgtactatcatcgctgaggcatggaccgacaacaaatcacgagcactgattaacttctccgtctcttcaccttccagaatcttttttcacaagtctgtcgacgcctcctcatatttcaagaactcaaaatgccttgctgatctctttgattctgtcatccaagatattggtcaggagcatattgtgcaaatcattatggacaacagcttctgctacactggtatctcaaaccatctcttgcaaaactatgcaaccattttcgtctccccctgtgcatctcagtgtttgaacatcatcttagaagaattctccaaggttgattgggtcaatcaatgtatatcgcaagcgcaggtcatatctaagtttgtctacaacaatagccccgtgctagatttattgagaaagttaacaggcgggcaagatattatccgaagcggtgtcacaaggtctgtctccaattttctatcattacagtcaatgatgaaacaaaaggcaaggctaaaacacatgttcaattgcccagagtataccacaaatactaacaaaccacagagcatttcatgcgtgaatatcctagaggataatgatttctggagagctgtggaagaaagtgtggctatttccgagcctatcctgaaagtgttgagggaagtttctactggaaagcccgctgtaggttctatatacgagttaatgtccaaggccaaggagtcaatacggacatactacatcatggatgagaataagcataaggtcttttctgacatagttgatactaactggtgtgagcatttgcattcacctcttcatgcagcagcagcattcttgaaccccagtattcagtataacccagagataaagttcctcacttccttgaaagaagattttttcaaagtgttggagaaacttcttcctactagcgatctacggcgtgatattacaaatcagatattcactttcactagggcaaagggaatgttcggctgtaacctggccatggaggcgagggattcagtttcaccaggtatggacaataaatacatttatattttctttaagtcatgactagtgaacagagatgtataggtagtctgagtcgggagaaaaataatccacttatctatgaccgcaattaaagctatggtcttattacacaactaaataagtccaggttgatatagcctggcacgtagtaaaccgaattgcaaaactagtagatatcttcccctcaccaggctattaggggtatggtctgggatctttagaattggtaacgaagcactagaagactagaagttgatgtctaataatggtttgcttagtaatgcaggtctctggtgggagcagtttggtgactcagcacctgttttgcagcgggtggccatcagaatactaagccaagtttgcagcggttacaacttggaacgccaatggagcacattccagcagatgcactgggaaaggcgaaacaagattgacagagaaatattgaacaagttggcgtacgtgaatcagaatctaaagttagggaggatgataaccttggagacagacccaattgccctggaggacattgacatgatgtcggagtgggtggaagaggcagagaatcccagtcctgcccagtggcttgaccgttttgggaccgcccttgatggaggcgacttgaacaccaggcagtttggcggtgctattttcagtgccaacgaccataacatcttcggcttgtgaagtcctggtaagaggttttcataagttggtccagcgtgttgagtgtttaaccacacacctcggttcgctatactgtacataatgtttgagtaattatcaatgtagaaaataaatattttgtgttcctcacacagtcacacgtcgatgagcttggtggtacaaagcatgtttcgttcatatttgggattcataaaacggtgagcttaagattgtttttgtttgtattgaagccgtaattatcagaacccatatgatagtagcggttattgggccgctagtgaggcccaaattaaagtaaaaaggaaaaatcagtctgaccggagctatataattaatatatatcaagaagactcgttttagttggtttaggtgattcagatcacaaagtacaccgaga

SEQ ID NO: 9849 - DNA, 3000 bp, Unknown
  misc_feature (1)..( 3000): cDNA_ID_4266219_gDNA_ID_1974091_Annot_ID_180598 3000 nt of promoter + ATG
ttggtgtaaggcgcaggagtcatgaatctgtagtagaaaggtttcatttcaggatcatcctccgggccagtcatacaactcccgcttgtactcatggagtcttcttcgcttgtactcattatggacttgttgctgtcatccatcgagtcttctctgccatggaacgaaaggctgcttctcttttccatggtcttttcgggttcgctgttggtcttctctgtttttggttcttcagtttccgtctgcttatgaatgagagagtctggctcaaatcaaatggaaagatgtatttaaagcagacaaagaagacgactcacatggacatgatgatgatgaggtggtgtgtacaatctctgctctaaagacttggcatcccattttatggagtactctctggcgatttcctgcagcagctccactttcatttcctttgacggcggctctgctttgaatctctctacaaactgcaacattcctccgtggagtcagcgaccaagtggcagagcatataaaaaaatatagtcaacaaagaataaatacctcagggttcacaaactgatcaagtgtgtttccgtatctctcagcaaataaagatctgaggtcgcgtagctcagggacttcagagactctagcggctgcatatacaagggaggagatggcctcgcggcactcatcagggcaccggctgctcaagcaaaacccaatatttatttagatgaatggaatccatgcaagtaaattaaacaagtttagggttagtttttacatggatttctgtaatagagagacattggatgcaacacagttgcagaattgctccaaaaactcataacaagccagcctccttttctcctctataagcccttctgcctgtcacacaaacacatgccatcagaaccatctctctatgtacttactcatgtgacttataacttaaaacaggggccaagaatttcttaagcaacaattcactctgttataaccagctggtgacagcatcagaatgaaatatatctatttctttttttttgcattgcttccatctatacccaaaatagaaccaattaacaaagatttaccgaaaccatcgtacgttgaccctctttcagaaaagaaaaacaaaagaaaaaaaaaatcattctgatggaaatgtaattgctttcacgttcggaaaaccaataagatcccgtgattcattaagtcgatagaggacatgaataacgtgtctataactccaaacaaacaaaaaagacgcaatagaggctgccatatgcatgtaataaatgggggtaaaagaaaatgatattaccctgccatatgcattgtaatcgaggctgttcttgagaagatcgacaatgtcgttcttgagatatttgcaaaccgagtttttcttcctcttcaccgtgtctactcttgtcttcgttatcttgaccaacgacttgctgagaaatataattaaaaacaatcaacgaatgaaaccaggaaaacggaaaataagcagagacttaccatttcgtataaaacttgggtttgaacagcccatcaaacattttgcctttcgaaaaaaaaacagacaaggttgtcttcttcttcttcttcttctttttttttttttttttgttgtttttttttggggggttttgttatctctctctctttcttcgtgcaagagaaagagagagacagagagaagaaatgtggtccttttgagaaagatggcgctttaaggtaagggaagggcttttataaggaagagagaggaggtaatgaaaaagaagagaagcgaccttggcttggctcggtcttacatgagatctgaagaaacggacttgtatcgcaagaaaaccatggaaccctgtctccccgcttttttatccacctctctttctctctctctacgtacatgtacatgtattgatttagagctgtaattactaaaacagggtggagttcccgcacgataagggtgttgactagggtttgtttcggtattcaattcttattttttccgttaaaactctttgttatttcgcaagtgagtcagtgatgatgacgaatcaattcaatcattatgttctctcatatatatggtttacttcaattccatcatctcattcattcattcaaaacatgtgaccattttatttgaaattgttaattgttatatataaccatggatggacacaagtgttggagaaccccaattgggcccataataaaagccaagcccatatgacaaggtatgcctgtacatctttagggggtttatatgtctctgatgagtacaacaaaatctgaatatggttgatgagcttgaattatatattgtcttaattccttcgaaaacataagtaaatcatttggtaacttgacgtctctctactcaacctttttttttgttggcgttcttgtctctttgtatagaaaaagatgttcatatgtttgtgtactctacgttacttcttcttcttcttcatgtgacgatgatggggattacgtgcaccccttcttccttaaacaaaatccattagggagttactttttgttttgatagtgtagttgtagtggagcactgagagttatcaaatgaatgaggatctcttgaataataaagaattggagtgtggaattaggatggatctaatttcattaattaaagaggagcatgattatcattttttgttaatttaatttaataatggttaatgtgaaaaacagaggaaactagaagaagagagttttggcaggagatgtaggtggcgggagtgggttgggcgagagagatgatggtgacggtgcagctccaaatcttctctaatcttttgacacttttctataaaactccccaaactgattctctctgactgcctcataagtcattataatagtttcccccggattgttttttctttctttttgctaatcatcatcggtttcttctaatcaaaaaaaaaaacaaaaaaaaaagagggactacgttcgtacaatcccatccttggt

SEQ ID NO: 9850 - DNA, 3000 bp, Unknown
  misc_feature (1)..( 3000): cDNA_ID_2034682_gDNA_ID_1974091_Annot_ID_180604 3000 nt of promoter + ATG
ccatcttttgttttgcggttggacttggaggtaccaagaatattagcaacgtacgactcgtatggtatcatttcctttgtacaaaaagtgaatatcaaaatgcattgtattaattatatataagttagtatatggagttagttgtcctcactgtctttatctggcgcaatctcctatgccatcattccctcttcacacgtacgtgtgcacactcgatgtcacatttgtataaacacgtttgcttttagcgtgagatcatcaccatattccatttttggtgggtcagttctctttctagatagttatttgtaaggacgtgaattaaaagggatcgtcgtcacttgttgagataaaagaaaagatatatggtcagtttctgcatcttggaatcaacttaagggttgtcttaattaattttgatagaccctactttaaaaattaattagttgctttcattggccctcaataagaaaagccaaaaaagaaagaagactggtcttggaagtttgccaacacgggtaatagattaatggtgaaaagggcgaatttttttacccaaaaccctaattaagtagaagtattaatcgagagcaaaaaagagagagagagtcagtagccaaaaggaatgaatggaagaaagaaaaaggaatctctataggcagcatatattcaagtaattaattaaagtagatagatagagcaaaaggagaggttaggaggcattaattaattatttaagagcatgtggtgaatgtaaatgtttatggttgcttccctctctatacattatgtatctacctttcctaactaacaattccctaggccgtacgacgactaacaaagaaaaaaacaaaagaaactgataaagcttttgaattgtagataaatcatctgctacagttataccattatatatcttattaaagacctaagtttccttcactatacgtcttcgtccatttacgtacgtattatacggacggtttaagctactatatctatattgttaacaatgtaactgttgagatatatcttgcaataatatgtcatggtgtatgcatacgataatatgaatcaatgtttgaaatcttgacgtgcccgtgatacaataagatgatcaaaatttcaaattttgtcaaatattaaaacaacatacacatacacatgtgtccaggtggcattataaaatgtatatatggtggatatagagagagagggagatgcgtatagtgaataggaaagtaagtaataaagagagggtggaggaattggaaaggggttggaggcaaacccataaagagcattcatttccttttaaggtcgctgaaattaatgagtaacgatcggtcaatgcctctcgctgacctttttctttttttacaacaacaaataaaaataaaataaatttcgacgtctctttccgctgctgaattacatttgttgaattaattttctctgcttacgtacgtcttctaaactttctctatccgaattcttttttaactttctaacttatattcaacaactcttctttcctgcctttaccgttagtctaattgttttcctaatactgctacgtacatacccctactatactagtcagtgtattagattcgattgggattaatccaggaatatagatatcccattagtttttataaaaatattggaagaggacaagtctcaagcaatttagggttccatgtagcgctgcaatatactgttagtaactctctcttacccatatattgtatatgctaattcttatcaaatatatatatatgcttctcccagagtcccagtttcctataatcctgacgcaattatactaatagagccaagtttacataataaagtatatatgattaatagatagggtttcttattaagccatatcttaaattaagatgtgatgatagcgttttgtataagttaccaattgtttgaaagaagagatcatcacaataataaatcataagtagtagtatatagtaataaataaatacacaagtcataataagagtaatgagaggataattaaggagggaagaagaaagcagaaaatgcggttggagaattaggtgctaaaagttagttgagtccatctcagtatctaacggtcaactctctctctctctagagaaaacaattaagaaatctgacatacacatatgtctctctctctctctctctctagtctatacacacaattcaattaaagaagagacagagaagttcgtcttttttgtttttatacccttaaatcaatcatgcaattgtaacccttccttcttattctcattccttccccccctgtctacagtaatctatagcaacgccattatgtactacttttaacggataatttgctcatgtttcaatatggcttcattgtatatatgttcaagttcttctcaatcctttatatcattccaacataattcatattaaagttagtagctgaaattggaaggctgatatattttccataattcaaatttgaattttgctcatcatatatatatgtatatattaaaaatcgaatattaagaagaaaaatgaagtcgatcgatggctgccaatgctgtagctggccatgttttaaactactcaattgtcggattgaagtatagccaaaatatataaaaccgtaaaaggactaaatataataatataataggtattaattaattaaaactaattaattataaaagaagcacctaaaagtcaagagcagtagagaaatggaagaaatatctgaaaaacgaccgcttatatatatatgtatcattggaattgaagaggctatatatatatatatatatatatatatcgatcttagcttatatattaattgaaagtacattttggtgtataagtaattaaagaagaaagaaaaaaagagagataatatataaggaagaaggagtgcgaggagaagagggaagagatcataattaagcaaagaagctagctagggacaggatttgtatgtcaatg

SEQ ID NO: 9851 - DNA, 3000 bp, Unknown
  misc_feature (1)..( 3000): cDNA_ID_4255108_gDNA_ID_1974091_Annot_ID_180606 3000 nt of promoter + ATG
cattgaccgatcgttactcattaatttcagcgaccttaaaaggaaatgaatgctctttatgggtttgcctccaacccctttccaattcctccaccctctctttattacttactttcctattcactatacgcatctccctctctctctatatccaccatatatacattttataatgccacctggacacatgtgtatgtgtatgttgttttaatatttgacaaaatttgaaattttgatcatcttattgtatcacgggcacgtcaagatttcaaacattgattcatattatcgtatgcatacaccatgacatattattgcaagatatatctcaacagttacattgttaacaatatagatatagtagcttaaaccgtccgtataatacgtacgtaaatggacgaagacgtatagtgaaggaaacttaggtctttaataagatatataatggtataactgtagcagatgatttatctacaattcaaaagctttatcagtttcttttgtttttttctttgttagtcgtcgtacggcctagggaattgttagttaggaaaggtagatacataatgtatagagagggaagcaaccataaacatttacattcaccacatgctcttaaataattaattaatgcctcctaacctctccttttgctctatctatctactttaattaattacttgaatatatgctgcctatagagattcctttttctttcttccattcattccttttggctactgactctctctctcttttttgctctcgattaatacttctacttaattagggttttgggtaaaaaaattcgcccttttcaccattaatctattacccgtgttggcaaacttccaagaccagtcttctttcttttttggcttttcttattgagggccaatgaaagcaactaattaatttttaaagtagggtctatcaaaattaattaagacaacccttaagttgattccaagatgcagaaactgaccatatatcttttcttttatctcaacaagtgacgacgatcccttttaattcacgtccttacaaataactatctagaaagagaactgacccaccaaaaatggaatatggtgatgatctcacgctaaaagcaaacgtgtttatacaaatgtgacatcgagtgtgcacacgtacgtgtgaagagggaatgatggcataggagattgcgccagataaagacagtgaggacaactaactccatatactaacttatatataattaatacaatgcattttgatattcactttttgtacaaaggaaatgataccatacgagtcgtacgttgctaatattcttggtacctccaagtccaaccgcaaaacaaaagatggatagttagttggagaggatcagctgatgaaaaccaaaagacacagttgtgagagagctactagctagtgagtaccacatatatacgtatattgggatatatatataccttgaatcttacacattttgcttacatctaaaatagaaaatgaaccagtaattagtttttgtttggatccataaatatcacatatattacttaattatttcatataatttatcactcaaattacatttctgtataccagttgtagtattttaatgaataactctactagtaaattgtaacattcaaacagaaataaaaatgaaaaatgtaaatgtaaagatataatcgtgatctgaaataggatggtttacaatacgtaagagaatacgaatgtacatcatgagtatcaaaacaaatcaagattcataccaaaaggaagagaaaaaacatatcaacatatgcataggttagcgtcttagcgagcgtgcggaaccgagggtgccttggtttgctggccccaaaatgggtgggcttttaggggcccaatattgttacttacagaggctaaaatggatcctactgttttccctttacaaaaacggagacaggccttgtatataaaaaattcagaccaaagccgcttagaatgaagtaaatgatatcaagacagaacgtttttctaatccgcgaaacgacgccgtttgtaccgccggtggccgagggaaaaaaaaggatttggattttgttggatctaaaaaaacataaaacacataggggtgggtctctctcctccggaattcgatcacgacggcaaggacgacgcatctccttctcgtaagccattgatgatcccaatagatagctctattctgctttatccaatcgcctcgtcttaataattgattcagtgatgtaattgggatctaaactcgattggttgattgttttccttggaagccacagggctggagatggatctggtccggtgatttctgagatttaagtcgatcgagtttccagatatatctctcaagtagagatggcttggttcagtggcaaagtttctctgggaggattcccagatctcactggcgctgtcaataaattccaggagagcgttaaaaacattgaaaagaatttcgacaacgcccttggcttcgacgacaagtccgattctgccgctgaaggtgttctcttcttctcactttttttccaatcaatacacataatattatcatccttcccaataatctgctgttagtcagctgggaatataggatttgattactcaaggcgcatttgttgataggacctgccatttttcttcttcttctttatgtaggatgtttagatcaataatctgctgttgcaataatacaatcttgcaagttatgggattctgtcttatttttcttagaactagcttagctagtgtgcttcagattctacccattgcattttattctgaatttgaaaaaaacactttgttttggatctttgcgtttacttggtgacagctttttctggctatgatttcaggggtattctgtgtttacctaactgtagcacaaatcattttcttctctagtttgtcttgagtttcttgtacctttcacaacaaaaatccttttgttctttctttttagatgcagcttcaagt

SEQ ID NO: 9852 - DNA, 3000 bp, Unknown
  misc_feature (1)..( 3000): cDNA_ID_3034190_gDNA_ID_1974091_Annot_ID_180616 3000 nt of promoter + ATG
ctcttccttctcccgtttgctgccatatccaatcttctttttttcacctagagcgtctgcgctaagctttggtatttataagcggtgctgtctgtgttgacatattcatgtgtattgtgtggttcagcattgccatctcacgtacgtgctcacgctatagcgacctagctctttacttactctttgttttacttttcacaacaatactaattaatgaagccactaattcacgtgctacattgcaactggatcctagcctttaatacaactcttctaaattggtatatctctctctgtattgagttcatgcatatatggggatatatacaaacaaaaacattatttattttttgtctgccgtcactaatcgatctcaactaaacttttgtcatttttttaatgaactgtaaacttggtgttcatttcgttctcattaatgtagtttccttagagattgcaaaaattagatacattttgtagcatgaaatctgaattatagaaggaaatcagataagcaagtgtgcaaatatacaaaaatgtgctattcgagctaaaagtgaagatacaaacaattacgtaccaaaagcaagccctcaagaattgtgtggaggtaagtaaaaggaactatatggatcgcagagacaacgatatataggtcacgtgtgtgggagttttgtctaaccacacatataagagaggaacaacatggactcgaggaagaccactcgtaatgaagttaaaagttgaaacttgtaaatattatcaatcccaacaaaaagaagaagaagaaaaaatatatattggttgttttaaactcacttttgcgataacttggaaagtgggaggacgctcacgtgcatgcatacatttcttgtctattatatgtagctgattcaacataactctatatatcttgttgtctatattgcattatagttacacttacattacatacgtagtgtgaaaacgatgcatagcattactatacatcaaatctgtgcatatatatacacgttacgtttcttgcagtgaaatactcgaaggtggatatgtgctcttgcaccacctaattaatctcgggttatgtaagaattacttcagagttcagagtatatatctatgtgattcttgcgcagtgtcaagtggattgggcatgagattgataaccgaatgggtgaggggtcaaatatcgttatttggatatagcgggattttaaactgaatgattgggccatgcattgcttgggaaaaaggctaaaattaaacaagattgagatacacattacccacttgtattttagtttccaaagaaaaaaaggaaaaaaggagcaacaaggcaacaagtatgtaatgatcaaggaagtaaaaaagggaagaggagtgtgagaaagagagcaaagaggagctgttggaagagggaaatggtcttcttcttcgtccttttggtaatttttctgcttgtgttgtggagagtggtagtactagtgtagagaaaggatatggaaatcagattgtgatgaagatctgatttgtaaagaaggggcctccccacaacgcccttgaatcttccgctccagccttgatctccgattgtgacgatcaccgcatcgggacgtggggagaaggagacccaacctcttttggagtagacgtggaactctgcatggcagaagttgagacatagagaatgtctttcgtcatagcctcttagcagcatccttatggcttcttcctttgattcgtttttaatattatgcctcttcacgtagcaaacccctaccccttccttttggcttcttcctcctgctcctagcttttctctcaccgccttccctatcctctctgcctcacccatcaactccctgcatcttcaaatcattacttactactttattttaaacaatatatattcctaatcaattactatatatagtaaattttgctgccttacctcaaatctgaataacaagccgtgtgatcatcagcattaatatctttattaaacacgaactcctccgtctcatcgtggaaaatggttttgtccatggcggctttcaccatagcctctggaacaccgtggttaacgagctgaaaacaaccgatggtggcgatggcatcaagcagagccgagagggagtccaaccggtggaaatcgaaggtgggagggttgagaaggaatgtgtgcttggggaagactttatcgggcaatacaagatttgggactcgaccacacttgtccaggaactccgagaggacgtcttcgttggccgtgaaggaggcacggcggctggatgctaccggggacggaggaggggctcggaagtcgggagaggaaactcccatttttgtttggggtcttactcgtgataatacttgtatatatgtagagcaaggatcgatcattggccaaagaaaaagtttttgttaaataaagcgagagcataatgatgagatgcaattctcttgtttgcttttattcattgcaacttttccttttccaaaaaccagagaggatgacactattcatcatattatggatggacccaagttgggccttaagcggccttttgtttacccaattgacgtggatcctcacaggatgggcatcgagtgtgacacaagtccaagttggaagagtccttttctgtcacataaataaaaaaataaatgtcaagtagagagggcaagtggtgaatctctctcataccaattccaaaccaactaaatctacttagtaccagtacattgatggtagttgcattttcgcttgaaattgtctgtccttttgctagtttgagtcacaattttcaattgaaaagaaataagagagagaggtcagagtcaacgaaaagttataatttagattttgtgggctaaaattgacaaaagcgtaccaatacagggaccggtgagcaatggcaaattggtaaataaagggagaagccaaggagtggagacgcaatttgggaagagatagaaaaggaagaagacacgtcaaca

SEQ ID NO: 9853 - DNA, 3000 bp, Unknown
  misc_feature (1)..( 3000): cDNA_ID_3034202_gDNA_ID_1974091_Annot_ID_180608 3000 nt of promoter + ATG
ccagctttcatgtctcagagcagaacagggccagttaagcaagtcacttgagaaagagaggcagagagcagcagaaaatagacaggagtatctggcagctaaggaggaagcagataccctagaaggtcgagcaaaccaacttgaagttgagataagggaacttcggagaaaacataagcaagagttgcaggaagtgctactccacaacgagcttattcaaaaggttctacattgctttatggacataacttaatctaataagagttagtcccatgaaaaatgccccatcagttacggaatttaaaggactgaagtacctagcgaattcaatcaaagtagtgctttcccaaactttttcatcctgagtagcttctattaacaaccgaactgttccagtttattactcttctttattgtccaagtagtttctcaatatggcctatttttttcaggacctagagagggagaaggcttcacgtttggatcttgaaagaacggcccgtatcaattcctcggcagtctctgaacagcttcctatagcaaggcaaaattctgcctttgagaatggtgatgcatctagatctatactactgcttaataagtcaggcattgcacatctgtaattcattaactattgcatcaggaagcttgcctagaaagctatcaagcgcaagcagccttggaagcatggaggagagctattttctgcaagcttctcttgattcttcagataaattttctgagaagcgaagcatgcctgaggcaactatgagtccgtactacatgaagagcatcacaccgagtgcttatgaagccacacttcgacagaaagagggtgaacttgcttcatacatgacccgcttggtaggtgtagaaaatatccaactgggacatttttgtgtaactctgttggtaggcttttggcaattggcttagtaatgggattgaggttgacatcagtccttacaatgggacactatgggtgtttggatcatgttgagaaattattggttagttgcacaccgtggttagccttcttttataagctggtttagaaggtttagctctactcgtcgaggtagtataggctggttgttagtatcatcgttatctgtagaatctaactgtaagagtctatttgcctttggacaggcatcaatggagtctatccgagattccctggctgaagaactagtcaaaatgacagcagaggtatgtatagcgctgagagtttagagttgatattatgctcagtgttatgatgatatttcgtctatatctggtaactgtggatgtagtgtgagaagctacggggggaggcagatagggtcccgggcataaaggcagagctggaagcactaaggcaaagacacgcggctgctctggaattgatgggtgaacgagatgaggaggtaagatatgtgaataaaatagtagtgtatccagcattaacaacagtagttggcattgagttaataaaaaagtgggtttgggtggtagttggaggaacttcgagcggatatagtggacttgaaggagatgtacagggagcaagtgaacatgctggtgaacaaggtaaggcaaacagacacaagtggagtcaaagtgttgacaaactcaggctaatgggtttgtgcaattttgggtttgcagatccaatgaggggcaagggaagatggtgttggcaagctcaggctcacgagtaggaccacctaatccttgtttccccaatattgtatagctctataagctaccaacctaagcccactatattcatttgtcgttttgtctctcaggtgttggttgaacttgaggctttttaaaacaaacttttgctgctcgaaagaagatttttcttacagtgaattcgatcgtaaattattattttggagacgagaataaacttttgtctgtgtgacttatctacgtatgtaacatgtattgtctgtgtagtagaaaaacggtggagagacccattaataatgggattcgttgatgtagcaatccatccatataggaaaactgtgtgactcgaatggacccgaatgagatatcaaaatcacagaaatgatagataaagaaaataaagaacaaaaaggcctccggccctcttgtaaatgttaataaaagcccaaaggcccaaaatagctctgcaatggcttctcctgtaatgaatagttgtaggctggtttcagcatcaatcaatagtcataaagcaggggagggatcctttcatcaaaagtcttgtactcttgtacatacagcattactgaattcatatataaatgtcattatttcattggtactagagtatagtttgctgagttccatgaaaagaacggtagaggcgagagcaggtgattaaaacccatcccctgtgaacggagtgagtgtaggtgtagccataaagttgtcgtcgctcctctgtaaaagtttcttctattcgacgattcctctcgacgttatcatatttcctctccaggttggtactatcatcatccttgttctctttgtttgcatccctccttccttccttgcttccttgtagatctgccattgccttttttaatccaaatcttatatttctgatttacattgcttccgtcagatccgacgatctcactttctcatcatctgtcgtcagcttttttgtttcttcttttatctctttttatttttaaaataaatatattgttgattctggaattttcctagtagctcacgtcacgttacgtcatgtgtgtgctttgaattttaaattgactcgcaaggctggttttgattatgtgtaagtgatcgctggacttcacacacactaacaagtagcacttgaatgaagctttcctttaatggattgattatttaataaattgcgactttgacgtctttgagcatccatccatgttgaagaatcccattattcgtatgcttttcttctatggccttgcatcagtcagcactcaacttgtttgaatgtgcaggagcgtgtttccagagggg

SEQ ID NO: 9854 - DNA, 3000 bp, Unknown
  misc_feature (1)..( 3000): cDNA_ID_2034666_gDNA_ID_1974091_Annot_ID_180595 3000 nt of promoter + ATG
tggaagaggaagaagttgaagttccggtcacaaaagaacattcagaggaaactactaagatggactctgacaaagcttctgctgaggcagctcctgcttctggagactgtgatgtaaacatgcaggacgccaaagacaccagtgatgcaactggtactgacaatggtgttccagagtctgctgagaagccggtgcaaatggaaactgattcaaaggctagtttctctcttaactgatactgcttgctattcgcttgtgaacatcaaataattatggatacttattaatggattgtgcaggctgaggctccaaagaagaaggtgaagaaaacaaatgtaccactgtctgaattggtctatggtgccttgaaaactgtggaggtcgaaaaggcagtggagaaggaatttgagatggctttgcaagacagagttatggaagagaccaaggaccggaagaatgctgttgagtcttatgtttatgatatgcggaacaaagtgagaatctttatttcgtcttttcattggcagtatgcatatgtaaagttgtgagtattgggtactaacgtgtcttgttttcagctgagtgacaaataccaggaatatatcactgactcggagagggaagcattcctggcgaatctgcaggaagttgaggattggttgtatgaagatggggaagatgagaccaaaggtgtttatgttgcgaagctcgaggagctcaagaaggtaatgcatgcatatgatgacactttatattgtgcaggaagaaatcatatttcaggataatgttttaacagaggagtgggattaatattttgcaggtgggtgaccctgttgaagtgcgttacaaggagtcattggaaagagggtcggtcattgatcagcttggttactgtattaacagctacagagaggcagctatgtctactgatcccaagtttgatcacattgaattggcagagaagcaaaaggtaataatttggctcaatcttggaagcacaaaaaaaatcttaaatttctcaggcttggggaaattgtttgatgttttgttgttgtgaaatgattaaggttttgaacgagtgtgtggaagcagaagcatggctgcggggaaagcagcagcagcaggacacacttcccaagtatgccacaccggctctcttgtcagctgacgttaaaagcaaggcagaggcattggacaagtaagcaaggctccttgtgtctttgtcttttaaaagaaatgctaaatctgataatagagagtgaaccagctatggatgttttacaggttttgcaggcctataatgaccaaaccaaagccggtggctaaagcagaggcaccacaagccaagggaggtgagcaggcggatgagggcaagagtgagccagagcaaccagcttctgccgaaccaatggagactgagaatcccgcggaaggtagtacctaaatgaatgacgagagagagatggtgttgtatcgattttgttcttaactctttttgatttacctagtggaacctctttttctggtttcgctattattcccggaaaaaatctatattgttaattcttccttttcgaaaacaatttttaggaagcatcttttttcttattgttccttgtggttttgtttttaatttgaaagtcattttttctgctcctctatataactattatggagtgtacacggattcgttctatgttggactgggctgtttttataaacagcaaatgaaatgcaatttggttctatatatattggagctttaaaaggcaactttgaaccccctaagcttaacatcttttctcttatatcttacgtgaaatcagtgtgacaaaactcgtcttcctcacttctcttccttaccattgttgtacaaagaacatcttccttgatgaagcagtcgtagcctttggcaacatctttgaggtcatccaggctgaagttgtatcgtttctccaatccaaacggggttaaacaaggatgaattcatttcctcgttatgagcacagaatgagtgcgactgctacgatatgtgattaagctgcctgcaccagtgaggacaatgaaaatctctaacataaatccatgaatcatctctgggcgccgcagataatggcatgttccagacaccacaatgcaattagttcgtgcatatcttatgtaccacaaattctgataacaccagccacttctctataataattttattaattttaaatacattgggtttaaataattatatgtagactcgaataaaaatatacaaaaacactgggataaaaaaaaaaaacctaagaaaaaaaaaggcaataaataaataatttaggcaaaaatatcacaaaaataaaaaggaaatgaaagtgtttttaaaataaaaaaaaaaaaggaaaggagaagaacattccagaggaacccaaaccctgtggtggtgtctgctccttaattaaaacctcttctctcttgctcttcctttataaaagaagctcttctcccttcctcttcactttttggctgcgacacgattacagatttctcaccttcacccagatttcggtggaagcttccagaacgcgaacccctctcgcgatccaggtatgctctagttgcagatcttctagatctgatgcttctctttttcctcacttttaggttttatttatttcttgttgccagattacttgttcctcgtacttgtgtttcaatatgaatcttctgctttcgctgcttccggatttgtattttagtttcaaactccaccaatcttcgttgtatgtattgttgatgtaaacccaaactggtggttttattttaggtttagtaatacgatggtttaaggctacctggcctgagttaccgccaattcgtcatctcctgtaatctctcgagctcaagactagtctgcttcgatcgctatctgatagtgtttttcttttttttgttctataaggttgctatcgaacacgtgggacgccccagtactgaagaacacaaagcctaaca

SEQ ID NO: 9855 - DNA, 3000 bp, Unknown
  misc_feature (1)..( 3000): cDNA_ID_2034662_gDNA_ID_1974091_Annot_ID_180594 3000 nt of promoter + ATG
gataaaaatgggaaacaatgcgctattctcttctgacgccgccatctttggagcctttaaactgagagattctattctgctgaaaggaaaagctctgttataatctcacaacatccaaaaagcttcaaggatacaaaattatcaataacatgaaaagctggatctgaggccactgaaattaattagggattctacatgacggagatcaacactaatagatctcggctaatctagtctaaaggtatatgaatccctggactcactttgagatcgacacaaaaccttagaaaacaaacaaacgaaactacgggaaggaagcaaaaccaataattggtgaaagaagatgaaatcgaacttgaaaggatattgtagaagaggaaatcgaagaagaagctcacctaggatgatagctctctataatcagagagatcgcgctgctgcagatcggcaacaaacggcgttgcagtttttttttctttatgcttctcttctcttctaatttctgatttctgattggtgagttctttcttctttacttgcttattcacttttctttaccttctcaattaaaatatttcgcaattcatttctctctttacatttttacgagttatttattttccattaaattagagtaattattaatagcaaagtttttatggtgaacgaaaacgaatttcccaaaaaaaatcacattttttataaattagaaaggaaaaagagaaaaggatatggatcaaagagggattatatgctctagagatttaatgtgatccagatattgtaatagggattgcaacaaatctcttatatgttctagagatttaatgtgatctagagattgtaaatagttacaacaaaatagagatttaaacaaaacaaatatttaatgattttaagaaaactgttttgttgtaactatttatatttcgaccagaaataaattgttctacttgcaaaatacatcaatcttcgttattattatcgatttaatcataaactgtctaattcaattaaatttataagagcatggttaccaatacttttttatctactgtaacgaaagctaataatgattttgaatgagtttggtatgatttggttattcgattcactaaaatagtcgttttaaatctagccaaatatcgtataattttacttgttttgattatattaaataatcagttatttgaaaactttgttgacatgttaatattatatataactaaaacaaaatatagatattaaaaacaaagaaaatgttattatatagctattatcgtttttcataccatttaaattttattactggctttcatattatgatattgttgtacatagacaccactgctaaaatgcttattaacttgagattttgcttgtgagatttggaggctaatttttttctcggttaagcatttctcgcatcatatgccttccacatagtttgagcttttgttcaccaaatgttcttaccactctcaagaaactggcagcacacgaatatgctttccacatggtttgagcttttctcttggacaaaaactcgttcaccaaatgttcctaccactctcaagaaactggcagcacacgcatatgccttccacatagtttgagcttctctcttggacaaaaactcgttcaccaaatgttccttccactctcaaaaaaatggcagcacacggtggagtttaccacatttgaaaacaagtaaataatgtcttacataattcacagtcactgctttcttcgatcattttcaagaattttgaccgtgaaatttgcaataccatatcttcaagaagacatctaaaaggttttcgcaatctggtgattaggttaatgctcttttgtaatacatttctttcattttatatatgatattaacatttataacaaaagaaaacaatcatagcatattgcatgtcattgcaagtttgctatatacagtagttttaaaccgagtaaacttaagatcaggtaggaaagatgcaaataaagaagcaagtgataccaaaaatatatgtaaacatttaatatagttcttcaatctaattgacgattagaaagtactgtactagatgattacgatccaagatttttgtccacactaagaatatttcacaaaataaggtttgcaacagtaggattgaaatgccagtaaacagtgacattatctcgaaaaaatccaactcagaaatcatttactagctaataatatttttcaaatagtttagaattattattgttgtttatcattaacgcatacaaagttagttgtataatctttcaacttataaataatttggttttggacggaagagctttacgcaaatgtattaatttggttttgataatttttatttgtagactcgatttgtttacgtaaattatgaaagagaggcaaaaataaatatcataagatatagtattagaagaaaaggacataaaagtagtaattaaaaaaaaaaaggaaaagaaagtgtgaaaagaaaaaaggaaaagtagagaggaacgcaaccctgggggcttcttaataaacccctctcgctctcttgtctcttccttacgacaacctctcctgctcttcgttttctctctacgacgataaaacccagatttgggttcaagcttccataactttaaacccctctcgcgatccaggtatgtttcccaatctttattcccagatcttccagatctgaagctcctcttctattttttcgtagatttgatttttaggtttgatctatttgtatgaatggctcgcgtgttctcccgtattggtgattgtaatctaaaatgttgatttgatttaggttcagtaataagactagttatctgacctgtgttaacaccaattagtcttctcctagtctgctttcattgatattccatccttgttcatctgatacttattttttttgcttttattgatctgagaaggttgctatcaaatacttgggagcccccagtattattgaataacacagcctgaca

SEQ ID NO: 9856 - DNA, 3000 bp, Unknown
  misc_feature (1)..( 3000): cDNA_ID_1024639_gDNA_ID_1974092_Annot_ID_180635 3000 nt of promoter + ATG
atatataaaccaaaaaaaacaatttaaattgaaatccaaacaaatctagatgtccgtataaaatcacgtttaaaaattctaaaagttatcatcaggtgtgacacatgtataatcaattgtattatccagaacaatgagttgatgtcaatgactcgatgctatgagcttatgagtagatcatacaatgtggacacgacaacctaaatttaacaaaggatataaaattgtgaactgtttttctgccaaggatttaaaattcatttagcgttgtaatttggtacacacatatacatattaataaaatctacggcatattattaacgaggtaatcaacatttagggtataaatggttgcaaacacgatcaatcatacaattaggttaaccggtttgtgacacaatgggcgactcaggataagacatggaggaggagctgatatgataagacgaagttaggtgatatatatagagatgtaccagagatcataatgcatatgaaatgagatcgatagctgtcttctcttaaactgaattacgacctctctatacttctggtcctatccgtgagtcatgtgctctctgtctttagtcataatatgattttgaattggctctgcaccattcaagatcatggcccattatggttctctgcacctgattctgtttccataataattccatttacctacaaggctatacatataatttattagtataataaccatattatgagaagattaattatactgttcatacggcaattaagatatcgatgcgaaaggattcgtgatctttatagagtttatattccgccgttgctagctaatcatgtttattttgtttctctagtacttaacgcgtttgtcaatttattaaattcgattagctaaaaaaaggatttgactcaatttcatctttagagacttacaaaccaatttatacaaatcaattttttatagatgttacattttttcgttcacattaatgacaggttttcttctttctatgacttaaatccacctaactccaaaattaaatccccaattcatgttaaagaagtgaatttcaacgcttcgaaaagttaataaaagacaatgaagaacatacatgaaacatgcttagcgcctagcggacgagcctcttaattagaaccaagtccttagaaaattacaaaattttaggtatatgccaaaaatcaaactaaagttgtcgataaccatgataaatgttgcgtatatctatctaagaaatatcacgcctaaaagataaattttggtacaactctcctcaacgttcatttttttaatactctgaaataccacaactatattccatatagatgaggtttgaggtttctaagacttttaaaacttaaagtcctagaattaaagaaacgtgtaacctttcaagtttaatatgggggaggtttggatcggcggaagctaaaaacagcaaggatcaggacaacaatggcctaacgaatgacacgtgatgctcttttcatgttgctcaacttcgatagcgaccgtttttctatttttatcactttcatattttacccccaagaaaaacaaaaacaagcgagtccgatatgtttaagagtcccaacctaaaatctattttcatcaccttccctatatagcccgcacaccgcacacaactaatacctcaaaatattaatttgtttgtgtttgcgcttgtttttatgttcttaacatcagggtaaaatgtatcttatgtgattagttttagtgggatactctacatagcattcacatgtctattagtttaaatacgtgtatgtcaatctaatgatacaattcagttcgcatgacttgcaaaacataaacgtaaaaagcaacacatatgaaccacttaccacaattttcgctacaactttttccaccatattagcaaaaaaaacaagggcgaataacattcatttggtataatccataacgatcaaattatcgattatcatcactacatttagctagagattttctagcctttctatttgccaaaccttttaatccattcttccttttaaaaaaaaaattatttatttcttttcaatttttatgaaaaccgtatctttaactaattgttatccttgctaatacatgcatcaacattttcttaaagtttttggtaaaattaacacataagaaataagaaatagttttcttctttaaactcgtccttatcacaaattttagattgtatgatattaaattcgatcttatcttaaatactttaaataacgttttatttactcttctcatattacaaatttactacactgttgcttttctatgttttacaattatatttaggagatcttttgttgtattatcaatactcttagatattcatttatgtagttaaaatttattaagattacttagattttattgagctttgaaatatattttaaaaaaaaacttttaattacacgttggtaaaaaaaaaagacacgtatgcaaaagcaccaaaaaaggtaaaaccggaaaaattctcaaatttcaaaattacccaaaaaagcctttaacctaaccaccttactttataaacaacctcaccgtctctcttagctcaccaacaatcacattcttctcccataagaaaaaaaaaataatcaaatcctcctcctctgcttcaccaccaaaaagcatattcttctctcgtcttctccggttaatcaaaatctctccgtgtgaatcgtttgtgaatggtggaaactaatccgatcggtggtaagtttacgctctccctttccatcaaaagggcgagcttttctcttcctctctcgacatcctctgttttcgctttcggatcttgcaaagaaggctggtactttcgctgccttggcctcgacccgtgaacgattcgcccctaaaattcacaacccggaaccctaatttcctaaaaagtggttctttttttattgattctgttacttgtgagatttgctctgttttttgttctctcgatttcgaag

SEQ ID NO: 9857 - DNA, 3000 bp, Unknown
  misc_feature (1)..( 3000): cDNA_ID_3034312_gDNA_ID_1974092_Annot_ID_180639 3000 nt of promoter + ATG
ctctcaattcaccatcatttctctcaccatttttactcattataaaaaataaaaaataaaatctcccataccattaccatttttctaacatgttattattatttagaaaactaataataacatactctaacaatcaaattctttctcaaaaataaaatgttattcctcaatttcaaattaagtgttaccactacttttttcatggaagtgactagcgagttattcttagttttcacatttttagaatcccaagtgagtttcgaaataattttcttcttttccgggattttggagagccattggtgtggaaagttaatcacatgttaaaggcttaacctaaaagcttagactgcaaaccccaccaccattttttttaatttttaaagtctctatattgattcggccgacgaatgttaatcattgaggtcgcttctcctttcttgttttcaatgataaaattaaaatcaaataagtacatagtataataaacatggtaatagaataataatacttcaatttttttgaattaatcgatttccatttactatatatttgcttaggagcgtttctcacgatcacctgtttaattctaaatcaacaaacgatcaagaaatgatgtgaaagttcaactgattgcatgcacctaccaatatttataccttagaaatcttaaaactacgatgaatatgtaaactccaaatcaaacaaaaattcggaaagattctatactataattaagtagtaaattattaggcaaaacagtgaggtgggagtgacctgtcattaaactttgtatgagccacggccaacaccacatggcccttttcattcacagaaattattttgttgctaaaacaaataatcgaaatcacaagtttccaatatctctctatggtatagtgatcgaatatttgatatggttaataccttcaataatattaattaattttctgacatagtataagtttaagtgggatatactggcccctttgaatattaattacttacatgtttaacatacatttggtgatgattatctcttcgcaaacacgcaaattataagttgacaaggccacgaggttcaaaaaacgacatatattgtaatgtgtcttcgaaaaagtcaatatttgtatgtccctatgatgtcaatgtgaaccattcggctaacgaagagaataataatattataacattcatacacaatgttgaaatgtcccgtcaatattttataaaaatggacacggtctaattaattaaaatgaattcggttttgatgtgaaatataaaaatgaagtggcacataatgttagactggtccattaactcttaaaaattttttaatcacaatttctttatttatttgctcatttcgaatatcgattaccttgtctacactacacacgttacatatgtaattgtttatgaatgatgcatagttagttgcatactttcaaaattggataccgccaacttttttatcaaccatgttttttagtagaagtgtttttaaacctcttttatttttaactgtggtctcctttattttggttgtaagctgtaacaaggtcttgtcctctctttatggttctccttacgggcctagttaaacttggtcaaaataatgaaagaagtaaagtggtgttcttaaataaaaggaaactaaaggaaattttgttacccaccttcttattaatcgattttcaattcattgtacgacagcataatgaatatgaatttttggggatttaaatgaaatatccttcacgaattggccaatttactttaaaaacccttagttaaattattaatagaaaaaccttttaaatataaaagttttaattataaaaaaagttagatattagtccatctatttaaaaactcctaactaaattactaatgagaaactctcgaatacaaaattctagtgaaaaaactctttcatataacttcatttaaatatattttgtttttaaacctcactaacattgatttaaaccgttattttacaccgttttaagtttctttccgctgaaaaatactatggtttccggttcaaaatgtgtgggcccttttacgcgcatgtgggtcagatgtatgggcccattctatttttttcctccaaagttaaaggcagagtggcggggtcatttaaaccacgtggcaagttttttttttttatcaactactgtttcttttgctgaaaaagctaaacaacataaataaaattcaacagtatgattgcgtcacgagcaatgcttaatcataaatcactcgcttgacgacaaaaaataaaatcattaatcagtagctttccgctacactaatccactctcctcttataaatttcaaaggattcatagtttttatgttaagtattgataattttttattttttaatatgttaaaactaatacataaaaaatatataactctgttaaatataatttgataaaatatgttattacttactatttatgaaaatacagacataaataataatctatatagactataacctaaaataggaaggtgtgttggcaaaaaacctaaatggaaggttaaaatctcaaaaaaaaaaaactgtaatcagataaaatcgaatccaaaacattgaataaaaatattaataactcggtcaaccagtataaacaataatctttttactagtacttaatttcttattttatataaactaaaacttaatatcaaacaactattgtttccattatatatacctacccgtaacctttaaataatttagtacatacataaatgtgttattatcctaacctttttttttctctgactcttagcttcatttccattttcatatatataatgttgtcaaattcaaattaaaataaaataaaaaagtgtcactaatggtcggtccgatttctccggctaacttacttaagctgacaagtctttctcctccttcctaacttcgtcccccacacaaatctctctatctctctcaagctttctttatcgtcgtct

SEQ ID NO: 9858 - DNA, 3000 bp, Unknown
  misc_feature (1)..( 3000): cDNA_ID_3034304_gDNA_ID_1974092_Annot_ID_180641 3000 nt of promoter + ATG
aaatccctaaatctctctctgttgttaccttcccatgggatggtcactaagaactctcataagagcaatctgggcatgacaaagtccatgaatttctttcagaacatcattaaacctttcaaacgcagctccaatcgaggtaagatccgtttgatttgttgattcttagtgtaagattaggtttttgtgaaatttgactaactttttcttcgttgacttaaaggtcttgaagatgatattgagcgaattgctgctatggagcaaaaagttttcccatttcaagttttagtttccgctaccaaagattttcacccgacccataaactcggtgaaggtggtttcggtcccgtcttcaaggtaaccctaattttgacatacccagagcttaaagtttccatttttagggttgtggttgtataattgtgtgtgtgtgttttcgtgggttttgttagtttggctgatgaggttgattggtgtgtaatagggaagattacctgacgggagagacatagcagtgaagaagctatctcaggtttcaaggcaaggcaaaaacgagtttgtgaacgaggctaagttgttggctaaagttcagcatcgcaatgttgttaatctttggggttattgtacacatggagatgataagctcttggtttatgagtatgtcgttaatgagagcctcgacaaggtcctcttcagtaagtttttcttctcaatgagattggtttgtatattaggataaatgatattgaaagaagatggttttaacatgtagtggttgcttcatttgaatgcagaatccaacagaaaatcggagatagattggaagcagaggtttgagatcataacaggcattgctcgaggactgctctatctacatgaagacgcgccaaactgcatcatccacagggatattaaggctggcaatattttgctggatgaaaaatgggttcctaagattgcagattttgggatggctagactctatcaggaagatgtaacacatgtcaacactcgtgttgcaggaaccaagtatgctctctctattgtttacccttaaaaagctcatttacatatcttcttgtgtcatttgaactctttttgtttgttggtgtttcatggtagaatgttatttaacgtccattgcttcttcttttcttatgcgcagtggttatatggcgccagagtacgtaatgcacggggttctatcggtaaaggcagacgtattcagctttggggttttggttctggagctcgtaagtggacagaagaactcgagttttagcatgagacaccctgaccagactcttcttgaatgggtaaagcctctagtctcatgctccattgtttatagggttgttgtgtgatggcctgacccagccaatattcttcagcgtaatataaccaatgctaaattctttctgaatgtgacacaggcatttaagttgtacaagaaaggccggaccatggagatactagaccaagatatagcagcttcagctgatccagatcaagtcaaactctgtgtacagatcggactactctgcgttcaaggcgatccgcatcaaagaccgagcatgagacgggtatctctacttctctctagaaaaccaggacatctagaagaaccggatcatcctggtgtcccgggatctagataccgtcggcgaacacaacgtccttcaggagcagcatcacttggaacattgtcgaccactggttccagcacagattctttcggttcaaacctgaacacaaacacgggaactggtgttagaggtacccccgcatcttctaaagcttcaactcggagtaatgccactagaagtgctggtcagagctctagctcagaccctcacgggaaacgacatatgagttattgaagtacataaaatctggtcataggtgattgtaaatagcgagctgcatatataatatttgtttcataatttatttaattttgcttttgaaaagtaaattaatttatttttttgactgcagtagtgatttagttttgtagtatgatttgttatattagcgggaaaaaattatgattcatttgttacatttgtatattagaataatcacttgtagtcccattatctaggtccccactattggcctcgtacgtataaaagcatattctcttgtacgtattaacggtaccttactttaaacaaaacataaaactaaaatgttttttatgcgttttaaattatttttcagttaaaatttataaaaagggtttttgtaaacaattattttgatagtaaaagaaatactaactgaaattagtggagaaaatacacaaacatatatttaactttctttaatttaaaatatacagattttgtttctttaattttttttttcaaattttagttttcatttatttttaaataaagtatgacatgtcataatgttgtattttgatttgtcattaaaaagggggtgaatcaaattggttcactctagaggtgaacttcgccaaagaatcacagaccgtcagtgttaatcatcagagacatcaacgtaatgttcctcttggttacttcttgctttaatgttcctcttggttacttcttgctttctacctgattcaggttcttcagttaaagtttctcttttcatttttggggtaatgcccggttgggcctcgttgttttatttaggttctagttctagggcctgcgtgtccttttaggcagttattgccatgtatgttctttgggccattcgtgcctctgtcggcttgttgggccttgtaatcgtttcggctctattggaaattaaaaataaaatatatatactaacccgttttgggtaaaaagttaggtccactaaaagacgaaaagagatcctaccaaaaaaaaaaacgaaaagagacgagccacacgcgtcaccttctcgtttagcctcttcatctcctttcctcagactcactgtgtaaaaaggcttttattttatcatcttcaggcttattcgattttcttcagatttgaa

SEQ ID NO: 9859 - DNA, 3000 bp, Unknown
  misc_feature (1)..( 3000): cDNA_ID_3034293_gDNA_ID_1974092_Annot_ID_180644 3000 nt of promoter + ATG
aaaaaccaaaagcatgcaacatggaaccacatataagagtacccttctttacgtcaattatctttaaagcaagtcttcgctcttcaatttatattttaccaaatcatcttctctctttctctatctctcaaaacaaaaagtaaccatgatcaagacaaagacgacgtcccttctctgtttccttctcacagccgttatactaatgaacccatcttcctcctcccccactgacaattacatatacgccgtttgttctccggctaaattctcccctagctccggctacgagacaaatcttaactccctcctctcttccttcgtcacctcaaccgcccaaacccgctacgccaacttcacagttcccaccgggaaaccggaaccaaccgttaccgtatacggtatttaccagtgccgcggcgacctagacccaaccgcctgctcgacgtgcgtatcaagcgccgtcgcacaggtcggagccttatgttcaaactcgtactccgggttcttgcagatggaaaattgtctgatccgttacgacaacaaatcgttccttggggttcaagacaaaacgttgatcctcaacaaatgtggacagccgatggaattcaacgaccaggatgcgttgaccaaagctagtgacgtcatcggttctttaggtaccggagatggatcttacaggacaggtggcaacgggaatgttcagggtgtggctcagtgctccggtgatctaagtacatcacagtgccaagattgcttgtctgatgcaatcggacggctcaaatctgattgtggaatggctcagggaggatatgtttacttgtcgaaatgttacgcgcgtttcagtgttggtggtagtcacgcgcgtcagaccccaggcccaaactttggtcatggtcagtcttcctctaaacttattttaactaaactagataaaaaaataaaaagtcgtaatcactaaaaaaaaaacctttttacgtaacctcagatgaaaatttaaatattagactgatcttaacaattagtctaatggtttatatatttgtgtacgacgctaaatttttaaacccataaaattgatagtgttgaccataaataaaaatatgaacattatacttgatggagaaaacaaatttattaaaaactttagaggtggatggatagttttaaaattatatatatatatatttggcagaaggagagaagggcaataaggatgataatggagtgggaaaaacattggcgataataataggaatcgtcaccttaatcatcttgctcgttgtgtttctcgcttttgttggaaagtgttgtagaaaattacaaggtatttttgatattgatttacgtttttttttcagttcttttatcgatcataaaatctaaattactatgtatatgccttttgcagatgagaaatggtgtaaatgaaaggacaaagtgggaaagatatcaatcaacaactcgagtcgagccacactgttagttgtatttttgtaattttttttgttctccctcataagatgtacgtagttatagtatattgataatttgatatagtattgatatgattgtatctccgaatcgatttttgtataattgtcggacttatataggccaaagcgatatcttcttctttgatgtgaatgaaaccttcgatttcttatcttctataaatgccatgtttttcgtctatgcaaaaaataacagtaattaaaagggtttgagcttcttttatcaatacacaaacaagttaaaataaatgaacgtgtcgagaataatggaacatattaaaccgtaaatcaggatggagatccaaaaaatgataactgtgttcgtcctattgcgaatgtctgaacgaatcttttcatcgtattcatcattatttattctcatattgtctaaagaactcaattgaagacttggcctaatgtcctttaatcattaaaaatgataatttaaaattgtaagctgactaccaaatcgttttaggactttgaaagaccaactaacgtctaattcttttccatattttttttaattttctgaaattcttaatgtactaccgatgattgcttcataaccaggttcttcttttaatttgtacatgagtaacatgactaataaatgacttgcgtctgtttgaaacattatatgaataagaaaaattggtctcaaataacaacatgatgtatcaaagattcaaaaatttcacgtgttatgaaatgagcttagcaaaagttcactcaagttcttggaggtctagtttggaatgcaatttagccaaatctgtacagttatactgaacagatttaatgtaagtcgggccgtaaacaaaattatgggccttagataagcaaatcaaacttctttcagcccattgagcattctcgtgatttggttattgtatatccaatacgtgacattacttttgcctcaacgaaagagtcttggcttatcatttcatttattattatagttgaaataattttcaaagaaaagaaaaaaatatgtgataaataccaaaccgttgcataagaaaagcaaccacacattttacatgtgtgtgtgagttcacgaagaaaatatccaatagccaaactaattaatccacctttgaaaaaaaacatgcactattataaactagagccaccgacggtcgacggatgtctaattgtatatggtcctcagaaatgaaaaaatcaaaagaataaacacgtgtgaattaaccggtttaaccagtagcaccaaccgtttgtaccggtcagaaaaaagccccacatgctttaatcaagcaagcctttaaaaacaggaaaggcaaagagttaaataagcctctccaaaagtgtgtctgtaacattaccaaaacgaaaccttccttgtggattcccacttctttcttctgttttcttcttcctcttctttaaattggatgttttgggcaagaaacagagagaaacacgttaatttgagagtttgtcattgaatatttggtttgcaatg

SEQ ID NO: 9860 - DNA, 3000 bp, Unknown
  misc_feature (1)..( 3000): cDNA_ID_2992216_gDNA_ID_1974092_Annot_ID_180646 3000 nt of promoter + ATG
aataccgtaagtcggcaatgcgaaacgatcaaaattatgcaatttttaactaatagaaacacatgaaaaattacaagttgtatattaaattactgatacgttaaaattaaattttaggagtaacgaataatgagaattcttattttattttttattttattaaaacgaggaaagtatcagccaaagcaaacgtggtgggtgaatgataagtataaaagatgtctaaagcttcccactcattttcttgtcttcgtatagaatcaaaaaaaaagtaacgacgatgcaaatatactatatattacataggcttcaccagatcatctcgaatcttaatcacattattaatacaattacatagaaggagcaattaaatctctatatataaaaggaagcgtgtgtttcgccttctcttttcaccattttcagttactttctctctttcatcttttaccattctcttcttcttttttttctctcattctgatcatggcttcctctatttccactggtacgtttttctaacattcatatttgtgattagtaattaattaccattaaatcgatcctaaaacgtttgtgtgtggttgtaggagtgaaatttgttccagaagaagataatttcttgcagagacatgtcgcttttttcgataggaacaaagatggtatcgtttatccctcggagacatttcaaggtacggtcttaaaaatgtcctaaacaaatctcgtgatatctaaaacctagatttgtattaagagaatatagatctttcattcttgtgtcttctctatgtgtgtgtgtgtgtgtgtgtggatgttatggtcttatcaagatcttttgatatgtttactaatttttattgtcgaattttaaaaaaattaaacaggatttagagcaattgggtgtggatatttgttgtcagcagtcgcttctgtgttcataaacataggtctcagcagcaaaactcgtccggtaattaatctgaaattatgttggtacagttaaaaacttaaaatttagtttcgtacgttacaaaagaaaaaaggaatcaaagatgtgtttggttacagggtaaaggattctctatctggtttcctatagaggttaagaatattcaccttgccaaacacggaagcgattcaggcgtttacgacaaagatggacggtatggtttttttacatctttagaggtaattaattagtgaatttgggaaatctaaataatttttttgtttttgttaggtttgttgcttcgaagtttgaggagatatttacgaagcatgcacacacacatcgcgatgctttgaccaacgaggaactcaaacaactcctaaaggcaaacaaagaacctaatgatcgtaaaggatggtaagtactaaaccggtttgattttgttcggtttaatttgctctatatacaacgcataaccggaaacgtgatatgaattatatatatgtgaattataaatgcaggcttgcagggtatacggagtggaaggtattgcattatttgtgtaaagacaagaatggtttgttgcacaaagacacagtgagagctgcctacgatggttctcttttcgaaaaactcgagaaacaaagatcttctaaaacttctaagaaacatccataaatccttatttaaatataatcaagctctcctgcatgcttgtggatctgtttatttttaaaactattacttcaatgttatagtgaatatttatggtgtgaagattgtaatgagttttaacaacaataaaaaaaacatgtaatgtgtttaatttatgttattgtttttcgtgtatttgatcaattacatacttgattctatttccaatcaaagaagtataattaaaattgaaggcaaaacttatctcaatttccaaccattttttttttacaacatcattgattcttttcttacaacacatttaaaaattgtaagccaagcgccggattagtaaaatgttttttgggtcaacagataaaaacttccaaagttataaaggaatatacatattgatgacattgatgtgacatgtatatatgatatatccaaaccagattgagaactagaaactataaattataaatgttaaaatgtagagatatccgacaaagaaaaatgtcgagataccaaattagagttttgttttttttggtgcacctaattagagttttgtatgtacttaaaaaggagaagaaaaaaaaaattaaggaccttatgtttttttccgaacttgcggaattatttattatagttgacctgggtccctataaaatttaaaggtacacaaacatgagtgacaaaaaatcaaaccaataacctttggttatacgtatacgtaggttgcgaatcgatttcaacaatgagatcatgggatgtctcgatttgttggatggaagaggattataagaagataagattaaacttatatagttatatataatttaaatgctataagatttaggttccaaaatccaaatgatgaccacgatccactaattaaattgagcgaatatggtatacaaaacaagtaaaaactcttaaattattttttttcctgactgaatttcattattctcttttaaaaatcacgtataagccatgtatttaaaatctatctccaacatagttgcattatcgccattcaccaatatttgaactcctttgccgataaggaatgtatatcactaattttgtacaaacaaggactaatcaggcccaatatgttcatatctagattcagtaaccttctcagtcttgcacgatatgtacacttttgtttttgtttattacacgatatgtttacttagataatgacttattataatatacagaacaactgtatataaatatatcgaccgcacgagatcgaatcgagtatttatcacattaattattatcatacaataacagcgtttcaccattctcttttcaatattttcagttactttctataagaaccattcacttattcttttttctctctatctgtgattatg

SEQ ID NO: 9861 - DNA, 3000 bp, Unknown
  misc_feature (1)..( 3000): cDNA_ID_3034283_gDNA_ID_1974092_Annot_ID_180648 3000 nt of promoter + ATG
tcgcaaaaacagtacaaatgggataaatcacttgtttatacattcttctttttcacttgtttatacattactcaaatttagattagatatatgatgttcaaaatcaaaaaaaaaaattaaccattaatcaagtaataaaataaacatggattatcattatacaaacatcaaatgttatttcccgattgattcctcttatatatcggattatctatgtggcatcatgtaataatatctcctcaattatcaaaacaaatatcaagatgtttaagatattgcaatgtgaaaaaaaaaattgatattgcaatgcaaatgttcatggtcgttgtgggcttttcaagggaccggttgcacaagacgagaggcctacgtcaatagaaaatatcaaatattttgtttgacaggagaaagaaatatagcaaaatatattatttgttttcccatttatgtttttttgtgtaaaagaaaaatacgaaaaaatatctagaattttactgaactacgataattatatcattttaaccatataagagaagaagaatctatattatagtacttttatcaaacaaacataatcttatttgttgtattacatgtgtgcatttatttaccatcacattattgtgttcaagaacatattgcttacctattaagtaaaatcaagcttgtctgcatatttgcctataaagtaaaatcaaaaatcgccgatggtcgagcgagaccggttaacataaatagtgtcgtatgggtccttcaaactccactcattttataacacgcgtcaaaatagtcctatgattttctttttgttttttgttttcatatgagagaatattccaaaaagaaaaaaattacgtcggcaaaatcttatttttcattggagcttttttgtaattaaattacacgacacacaaaaaaaacagagaataaataattttatacatatctacgctttacacactcctttgcattcttggaaaagcctctctctctatatatatcgattgaacattagttaattggctttaagaaaaacaaactatacaacaaccttctccaactccgaccttttcaactaagcataaaaaaacgatatggtcccaaatacaacaaccgtcaagttcctttgtagctacggtggcagaatcaccccacgttatcccgacggcaagctccgttatcaaggcggcgatacacgtgtcctctccgtcactcgcgccatatccttcaccggttagttagttaatcagttttttttttttttatcaccctacgaattctagggttagtgtagccgtctagtagcacactcaccggttatctgtttgataatattaacagagctaaagaagaagctcggtgagatttgcgggattgcggtgactagtctccgatgtcagttaccaacagatgatcttgacgcgcttgtaacggtaagatccgacgaggatctaaagaatcttatggaggaatacgatctcgctataacagcgcaagttaagattcacgtctttctttctccgcttaaatcaacgagaacaacagcaaactcgtctcctccaccttcaacgacgtcatcttcttcgtcaaaatcacgctctcgttctcctccatcgccttcaactccggaaacatgtcctagttgcgtagagagatctatacgtaacaatggatgttacgttcatagaagtccaagtcataaccaattatacttcatcaacaattgaaacaatctctctaaacattgtaacaatatagaagtcttgaattctcggaattatatttaataacgtgaggatcagtttcatatatattagcccaaaaaagtgagtccaatagatgtaaaagatcatcatgatgttgatgatgatgctagatttttttattttttttttccttttgtgattggtgaaagagtgtccttgggaatttttagtgttaccagtacacaatttctttcttttatgaaaatccaatgaatatgagccacgtggaaactcaataaagatattttttttcctctcttcttgaactgtacgtttcagatattttttttgttataaaccaagaaccaatttggtttagtatggtttaagatttacgtaaccggtttaaaactaactaaaaagcgcaattgaaattctgtttttaaccgggttttagtctttcagtctttcttcttcctctatacctctccgttttccgatgatggtgttgattctaatccttcttgtgcttatggttgttttgttttgtttctaccattttcttataaaatttcgccgctttcggagttgaaatccggtgaaagctttgcggaagaattcttatcggcgctcttctttgaaactagctcctcaaagtcttgtgctcttctacggcggcgggtggtctcttcgggaaacggcggtcctttgtcggcgatttcatgtggtcctcaatttcacacgtggcagtttctttcaccttctacgtgttactagtactacacgtgggttcccgagttgtttatgtataattgtataccataaccatgtaatgggattgttgataataataacatcgtttgtagattgggcctaagtggactcttatatgggccatgtaacaaacccacccaacaatatcgaagctgtaatagataaaatggacagaaagttcttttcatttccaataggaagtcaaaacgattgaccttctgttttcccaatacgagtttaacaagttctttggtttccaataaaaaatggctattacattttcttgtaatgaagttgcatataaataagtctcatgccttctaagaaattcttgcacttatcgactatggttatttcatagagagcaacaaaatcagtgtgtatttgttaagacaaatgtttatataagtcgtccatgcgttgtacatttaatcttaactaatacgcattgagtttcgttgctttctcgggaaaaatctctttgtaactaaacttttatgtacctactaaaaatctcatg

SEQ ID NO: 9862 - DNA, 3000 bp, Unknown
  misc_feature (1)..( 3000): cDNA_ID_3034263_gDNA_ID_1974092_Annot_ID_180656 3000 nt of promoter + ATG
ttcgataattagcactagagtcgacaattttgaagtcaacctaattaaatactagtagctttcctcttcattcaattataggtaaggctaaataatcatatcgaacctttccacgtgaatatcacgagtcacgacccttcaaaaagacatactccttaaacagttaaaactcgtaattgtttgaaacaaatagtagatgcattttagtgttatatgcacacttttccaaatttgttttattcgcggtatcgatgtaataatggttttgttattaaaatagtaatctcgtcaataaagcaatgataaaatcatgagtatgactatttatgttaacagttaactcccattaatgaaatgaatttagaagaaatgaaaaacattgacatctcttttttgtcaaccattgtccattgacaaagcctttaaatatagttttactttcatagagataaagatattttgcatcacttaagagtttagacgcaatttctaaaattgtcaaataggtttatagttccttcagatgatcagaaatatcatattctatattgtgtatttacataactttattggtaacttttcaatatgttttgtcagtgcctcattgtactaaagttttaatatattaagacattatattgtgttcgatttatagatacgcattaattgttttgtagagagcaaaaacacaaccataagatgatttgttttgagaaaatataaaatggtgtatatatcaaaagattatcattggatgcatagtcatcattgagcgggactctttgactctttgtgcgtatatatcaatacttggtccccggaactagtatgattaattgattatggatcaacgacttgaatcgtccttacgtaaaacaatatttagttcagtttagacggatacataattggatagagcgactctcacgtccacccacttttgtttcttggaaagagtcgatcaaatttcatagttgttaatatgatttcgatggactaatatcctccatatcgagggtatgaatagagatagtgttcaaataggtccatctaggaaaatgatatgtgatgatgaagtgctatggggatggagaattaattgtttaaattgaatggcttgtgacttcatcatttcctccaatctcctacgctttccaacttggtggtctcagtactctttttattaatttaaaagaaattccactacgttgttaaatgttagtgttgatggtttttcatggaaaaatatcccaactgccgatgaattgatttatattcaaatgacacgccatcaaaacaattgtatctaataaataaagataagtcattgtaactaaacaaattttgtccacaacagtatcaattatgttagataaacaacattcaacgtttaagattttacaatggatcattcacatttcactatgcattgaggatgcgtgataggacgcatcaaactcaaaacttggtttacaagaagccaagaagtaaaaaagttgtttgaactcttaagcatttactaccctcggattttcttcattgatgttcattcaatgtataggaaagaataaaccaacgaatataaagaaagaatcctacaagatttactctcgcccactgacaataaatgaagctgattttgaaaatgaaattccgggaaaagaatcaattttgaaacagaaaatgatatttttccaaaacgttacttaaattaagtaacttaatatatattaaatagatttggtatattagttatttcaaagtataccacagctcaccggtgaatttaccggagcagaaaatgttaattcaacatttggtggttacatcactagaagagttctcgaaggttaaaagcactacacatagtatacaaacctcttcactttcttgctaaaagacattttggataaaggtttttgaccacgtcaaagatgttacataatattgaatttatacttcatctgtttcatataaaataaaattaacaaaaactaaaaaaaccaattcatatcatacagagttttaaattaataatgcacaaaaaaaacattagttggtttcttaatagttaatataataaatgattagaattttaaaaaataaattaaataatatcactttctaaaactacaattttttggttcgttttcagtaatagccaaaaatataagttgacaaattcttaggaagcattttaaaatatcggtcatcaactcttcagttaaaatttaaaatgcaggaaaagaaaactctagaatcaatcatatatatttggtgttttctaactctttggtagtttggaatttattaaacatgttcatgttttaatctatttagagatttacgaaagcgacaaataagaatttttccgcatttggtagcgagaaaaatgttgcatagtatgcgacaaaaaatgtaaaaacaaataggatctttaaaagatgagaatgtcggacaaaaagtgcgaacatcagattcaaattatcagattcaaaacaaaatacgtaaaacctgatatttattgagttattctgttgtaatttttctttttagttttgtaaaaaaatgtttttgaaataagaaaatatgtgatttaataaaatcacttgtttaaaataaaaccgagggtacattttaactcatggcaattttgttaattatgtggtaattcattaccatcttgttattctttgttaaataggtattatatattgcgtggcaactattgctatttatttgctattttgtttattattgagtaattcttttcagaaaaatgtttacataattgaccttaaaaagcaaagatttttaattttaatatatttttctccatttaaaaagcagataccagtcttttttttagggaaaaaaatatattttactaataaaatattttagtaaaatatcgctttccttctataaatacacttcgacctacactattctctaatcattaaacactatacaaacgaccaaaccaagaagaagaagatg

SEQ ID NO: 9863 - DNA, 3000 bp, Unknown
  misc_feature (1)..( 3000): cDNA_ID_3034275_gDNA_ID_1974092_Annot_ID_180651 3000 nt of promoter + ATG
tttgtggagcctttttctgagcaatttgattgcttctatctgcagttcaaccttcaaatcccaaggaagcgatgaaatggttgaaacaatctgcagagaatggttatgttcgagcacagtatcagttagctctttgtttacaccatggtcgggtcgtgcaaaccaatctgcttgaagctgtatgtgccttcttctgattcttttcttcatgcttctagttgagattctatattgttttcatgaggtgaagctgttatctagattgaaagtagtatctagtcgtttatactaatggctgcactcttggtggaaactgataatcctatgtatagacatgtgcttagttcgtttgtggaaactgatactgctatgtttggatgggttattggttcatttgtggaagctgataatgctatgtttggacatgtgcttagttcatttgtggaaatgtgcggtttctgtttttcatctttctagaatcagtaaagtttgtatcgatatgatgattggattttttttctctttttcgacagactaaatggtacctaaaggcagcagaaggtgggtatgtacgagcgatgtataacatttcgctttgttattcggttggagaaggcttaccacaaaaccgcaagctagcaagaaaatggatgaaacgagcagctgatcacggccacagtaaagctcagtttgaacacggccttgctctattttctgtaagcacctcaactcaactactgcttctgagagtctacttctcttagtagtaatagggataacttatcgacttatgtatatccagaaacaaacatattacgcaatgagttcattcgattttaggttatgagaaggtttggatatgtaagtaatgaatgtaatgggttgatgcaggaaggggagatgctgaagtcagtgctttacttagaacttgccgaacgtggtggcgaagcagctgctactcccgtcaaagaagttgtacaccaacagctttctgcaacttttggtggtcaggccgtacaccatgccatacaccaagccaataactggcgtcctctaccagttactcgatgactcctatcatttatttcagtgaggtctagtgattggctagttacatgtccataacttaaattccaatttgacaatgtatcaatgacaaaaccttatttcagatttctacttttagttcgtactcatgttttaatccaaatggtgcgactgataaatttgtatccacacaataccaccaaaattgtaaatccgcgtttgcagtaggataataaatattacagattgtttcgattttggttttcttttgtgggtttgaaatgttccatggtgtagtgtacaagtaatgatgatttgaaaacacaaactttatatgaataacatgtaaaccaagcttatcccaaacatatgcgatatgataaatatcatacggtatatcatttctcatagcacgacactgagcgtaccatttgaaaaattcaacgatttcttcagatcttgcttgaaaataaagtttgaatctcaaaactccgttcaaaatagaagaatatcaaaaacacgatggatacagtataatatccaaacacattattttttcgtccaaatctatgtgactatgttgactccgttcaaatctatgtgacaatctgtactattgggaaatttgaaatgcatttccgcatatttacgtaaatacattactaagcaaaatcacattctagctgtttcaacgttacatataactaatcaaatgcaacaacaccttctcactttgatgacaatcgaacatccaattaaaaattcaacaagaacaatgcatatgtatggtagaaacaatcacaacgagttaaaaggatcgtaacgaatgaatcatgacagacaattaaaccagcatacgcaattataagtctgaattcggaataccaaacatttatcaaaatccaacaaaaggttcataaaactactaactttaaagagatctcgctctttccaaaatccaaaagacaacaaaagatgataaaactccatagaagattcaaaaacagagttaagcaaataaattcacctaacttaagcagtaagcacaacagcaccaccagcttccttaatcttcttctcagcagtcttcgaaataagcttcgccttcacaacgaacggcttgttctcaggcaaatgacctttacccaaaaccttgaagaaaccatgttgagtcacatcgatcaacggaacattgtccttggttgatttcgccttcacatcttcagggacgagtgaccaaagcttgtcgaggttaacgattgggcagaagaacttgttcctcagcttgtggaaatacctcataccaactttaccgaagtaacctggatggtacttgtcgaagaggatcctgtggtgatgcatacctccagcgttaccacgacctccgggatgcttacggtgcttaccgatacgtccatgtccggcgctgacgtgacctctcttcttcctgttcttcttgaatctggttgtcattttcgccgatctgctacactctcctccctccctttctctctttgcggctagggtttcttaagatatcactgagtttataaagacgataaggatttttacgtttcctattttaccctctagggtttacgacattttgggctatttagttataacgcgagatgggcctttaggcccgattatatcgtagagggggaagagagatcatctaccacaaccacatgattgaaccttcacgcgcctttctgacgcgccggtgttgttgttgttaccatgtggttcatgccttcggtggtggatctccgtgggttccacctcggtttattttggttgacacgattcttccttacgtgacgtctttcttcttcaatttcgaaacgacgcgttttaattcttcttctgcatttcatatgaaccaaggaaaaagcttgaagcgtcgtgactcgtgaagcttcttcatctttagtccaccgaacataaatg

SEQ ID NO: 9864 - DNA, 1668 bp, Unknown
  misc_feature (1)..( 1668): cDNA_ID_3034260_gDNA_ID_1974092_Annot_ID_180657 3000 nt of promoter + ATG
ttcacaattcagataaagatggggaaaaactttatatcctttactactttgggttaaaaaacttaaagcgagttggatctaactgtattatccaaaataaacgagaattgtcttcttgaggttaattagctattatataacgtcatgttgtgccattgtgccaaactcagtcataattttatttttctctcaatcataagttctctctggtcaactctgcttcggtattgagtataattaatcaaaagccaaatagaaaacagtatggtacaagactcaaatctcaaaagagacaaaaatctatatgcatgccatagtgatttttgaaagaaatggaagagaaaaaaaaatgagaggggaaaagctagaggagagcgatgacccattaagattaaatggactaacaaacgaaacgatcatcaatgtgtaagtgtccctacgaggaccgcacccacttaattccccaaattcaatacctattgaccctcttttcttataatgacccacttataattattatcgtatattgttgtatattgtcgttacaagattgtgaaatgttttatattttctatacacgacgaataacctggtcaagctatatatcgagattcaagtaagtatatataatcgcatgcttggttaaatcagtcctccatttcgagagacaatatgattatactttaaaaaatagagactctcgaatgtcgacaatcaaatgtcacaactcgtactatgctattgtaatgtttttcaatcaataaacttggtttgttttccacaattttatatatagttttattaaatttatatcaccggttggtgttgagcctaacaaataatatgcattattaatagtctactactactagtttgtgatatattctttttccagcttggagagaagattaagcatattttggtctctgattaaagagattacgtaccgtaacctcaagacttctataattaaaagaaaaaaatcaccatatttgtttgttagaaactccaagagattccataacaaaaacatttcattattctacaagcaacattgtgaacatggaccataaatttaacttgtacagtactctacataaacggtaaaaaacaataaagcgcttggaaaaagagagtaacaccagaaagcaaagagctttgaagaaacccaaattcaaaggtactcaatttcatctgactagctctgaccccatttcttcaaaccaaagaatgatcacaccaaatccaaaatttcccctataaattacctatctcacataaatataaagtttacttctcttacctctctttcctctttttatcatttacttcataaactttctagatatctgcaaagcccttaatttgaattcatcactaacccacatgcccaaaactttagcaacacacaaccctaataaatttttgttggagggttcgatgagttaattcattctttattgtttttgatcttctgtgttttcccttaagaaagtgattatgtgtttaataggtttgttgggagatgtgtcagtgacatcaagaagacgaacaacaattcaaaaccgtattaaatgttgtctttttgatcactcaagaagaaaacaacaagacagcagatgttttcatcattcttcacaacaagtttcgttcaagtctgatccgatg

SEQ ID NO: 9865 - DNA, 3000 bp, Unknown
  misc_feature (1)..( 3000): cDNA_ID_4266701_gDNA_ID_1974092_Annot_ID_180647 3000 nt of promoter + ATG
ctctgagcaaagagccacatatcatagtttttctaaccaaaactgaatgtatcatcaggtaatgaggaaggcaggacagacccaaagggactagtggtgaaatgttgcgtgatgtgaaaagaggtaatgaggaatttataagaatttaagagacaaaacaatgtatataaacagcatttgaagggctttgagattggcctaagaaccctttcttctataggccttcttaatcctaccatttgattatgtattatgtaatatttgagaatatattcaccaaaaacaggtgcccttaataaacctccactcttcttcactttttttggtcttttacttttgtgtgagtgtatgcggcctactttggaggacatagagattgaaggtcgtatcaaaagaagtgccttttgcatataattgataaagcaaaagttgcaggtaattactttttcatttgggaagaatgatgaaagatgttcgttatagtcacgtagttgtagacacattctactcttcggatcttgagaaccaaactttaagcagtgtggttagagaatatgcgaacaatttgaagtgtttagagatcgattagacagacatacagaacacgtagaacatgcagttgaaacggcagtggcaaatccgactgatagatttgacaaatagcaatactaaacaaggcaacaaatccgacttatagatatgaatatatgatactcgagtcgatgcatgcgattgttaagtagcggaatgattagatatatgtaactaaattctacaaaatagcgatgctaagtcgaacacctctttaacttaaccagttttactaaccatcaagtcatcaactataatggttggtaattcaaatcctatactatatatatgttaatgttgaattatattgtcaattagaagatttgtgattccttttttacagaataatagtgtaatgattaaaaactaggaatttttcatgagcgtttggattagaatctgaaagggaatgtttgtggtaatttgcagaagcaaactacctataccaagtgtgaatgtgtagaggaatttgtagtgttatcaatattccatcatgagcatttggacaagacaagagataaagcataaggaatctattacactcagctttacgcaatggcctttttgttacttcacatttccaatgcgtgtgaatattgataccgtgtcttaacgttctaaccatcttataacatttcccatttagattatagtttgcattcaaatcaagtctctgttgtaatcacttttagaaaatcacattaattaaaatgcattttgtaaaaaaaatactacgtaattgtttggtaatctaggtgtaattgatggacatgaaagtcgttcacatatacacactttactataaaaagaaaagttgaaacttgaaagaaattagatatgttgtgtactacttttatgtcactaacaagaaaatagaagattatcacgattagaaaagaaaaaaaaaacatcttgcaattttagtccaaaattttgttacttccaaagtttttctttgataatatatgtgaaaattttaaatttttatctttcatgcacaatgctacattgaaatacctaataataataatgaccaccagatttttttctttacgacaatggttacattttttggatcctaactatttagaaatgttttattacatttacatattttaaaagctattttcattggattagcactaagttggtaaaactaaaaaccaaaatttttagtttaaagatttgtattagtgtcgtacatgtgtcacaccctgattcaaatttgatataatgaatattattggaaaaagaaaatcaactagcagaactaaatctatttaaattatcacaactttgaaattacaattcatatactatagataaaagacaaaccaccacactttctataacttaaaaaatgggtctaccgtctactacacgactcaatctaaatggtaaaaatagagcacaccaaacgtgtttagtttgctaggcgataccatttgacaccaatattatcgtcaaaactgttaaactatggataagactaacaagtaagggtaagttttgtagccgcagcctttgcttgtcagcattcagacgccgagctgattcatccacattgatcaagaacccaagatttttagtgcataggctttaaaatagatatagaaagcgactataaacaatacgaaaacacatgtggcatatacacccactaatacccatatctttcttttcttttcttaaatggatttcattttaatttctctttcaaaaagcactttattgagccatgaatttaatatacattacttcattaatctcctttgccgagaggtaatgtatatcactattattttgtataaaacccgttcattaattctcaatatattcatatttaaagttttaaactaattaaccttctcaggcttatacgatatatgtactaagtcttaggtaacgacttattaattaaataccgtaagtcggcaatgcgaaacgatcaaaattatgcaatttttaactaatagaaacacatgaaaaattacaagttgtatattaaattactgatacgttaaaattaaattttaggagtaacgaataatgagaattcttattttattttttattttattaaaacgaggaaagtatcagccaaagcaaacgtggtgggtgaatgataagtataaaagatgtctaaagcttcccactcattttcttgtcttcgtatagaatcaaaaaaaaagtaacgacgatgcaaatatactatatattacataggcttcaccagatcatctcgaatcttaatcacattattaatacaattacatagaaggagcaattaaatctctatatataaaaggaagcgtgtgtttcgccttctcttttcaccattttcagttactttctctctttcatcttttaccattctcttcttcttttttttctctcattctgatcatg

SEQ ID NO: 9866 - DNA, 3000 bp, Unknown
  misc_feature (1)..( 3000): cDNA_ID_4266697_gDNA_ID_1974092_Annot_ID_180645 3000 nt of promoter + ATG
aacatgaaataaataaaaaagaagaagactggatcagacattatgcttattgtggtgtctaatctaacatacacatgtgtcgtgttacattcttttagttcccttttcaaatagaaaaacttttgtttaaagggacagccaagtgggtgagtttaaaccttttattcctcaaaataattagatcctgacaaattatgtcttaatccacaactaatctactttcatatatggcattgatcaatatctttatacactttcaggatgtaatggtctctaactctctctatatataagatatgctcgaatatgtagcaacaattgtaaacgagtatcatataatcaataagactttaaaaaataatcagaatcagattcttactaaccaattactgatgcgtaagaagagaaaaggtgaaaagatcataattatatctgatcttgctatgaacatattcatgtgaaaatagacagactttgatacgaagaaaactaaaacagagggaaattgatcttgtcagtttgtactataacttttgaattcttgctagatattttactctagcctctaaatgaaaacgtaaattttgaaggtaaacataagacgatcctaattataatttgtaagctaagattctcatataaataatatcagattagttcactcaaatctataataggcatagggatattggatgtctccacagattttaatcttgaaagagttccacaatttgtcgaagaaacgttttccttttggaattgacgaatgagtcaacttaattaggttagtctaaatacaagaaaattatcgagtgcccattcgaatttttttattatttttcaggaaatgaccaaagacttattagaagtcaagcacgaaattactcaccaaaatcccttaatctctgcattagtttatttctccctaaatttatattttctccatctaaatgattacggatccacctgccaaggaaaaaaaaataactgtgttacgaaaaaattaaaaatcaatacttggttggaaaactaaaactaaaaccgaacaaaaatccaaatatgacattcctattctaattcaacaatagaattaattattagcgttggaacaatctatatatagatattaaagctttgtgtgtgtaagatagaagagttcttaaaagtctatttgtgtgggtaagccattgatcgtttagtgactaaatgatacaacttctaatcccctttatcaaactttatccagtctttgtttagctgtacttttcactgatatattttctcttcttatgttacgtgaaaataaaataatactattgaaaagtaatttgattgatcaattccaccatgcaattaattaccagaactttctgctttcaattatatcttcttaattaattggttattatttcaacttcataactgaatagaatcccttatcgacaaaatgattactcttgtattgttacattattgtcattgtttccttaataattatcaatgatctagtatcataaatgttaccttctatagttaatagttcatgtactaagtactaaaacatgtgtagtatgaaaaaatacaacatccatgttgtaattaatttatagatagattcaagtatacgtacaacaataaattcttttgcagccgtaacgatttttttattttttattttttattgaataccagtaaattctgggccgaagcccgtaatcccctcaggttcgaaaccacagcatgtaatattagtttcgtcccaagcgtcattcgaactggcgacctctaagattcgcctaaggtctttactaattgagctacaatggataataaaagaatctaaccttccaacaaaaagaaatagtattactaaagtcaataagaacaatctatagccaaagaaaaggtctatgggtgttgtggttataagaactaaacaaaagtcggtcaaataacattattgtcttctctattcgttcaccggtcccgtaactgaactttgacgttggcagcctagttacttgattgatttctcatcatactaataaaaataataaaatgttgatacaacccttacataaatgtatacaacatctcgaccagcacgccaatatccctttctatataattaaaattcatcttctaaaatcattttcaagtaccattgcctatccaaactctatacgctatactacatgtaatatattaatgaccataactcgttttcatgacgtatacgtcgtcattgctcggtattattcgtattgctttttttttctgatgatatagaaaaacaaaaaaaaagacctactattgtcaatttttatatacacacacataatgcgagaattgcttcgtcactcctatcatctgatataagaaaaataaactagttgaatgcaaattttcatatctttttgtgttgattatatatacataatacatgaataaagaagttggttttttattaatttcgtggtaagtccgccgatttggcctttctatacgcattcaaacttcacaatactataagaaattaactcctcagttttattgccttcttgataagtggcaactggcaagtaagggtaattagtagtaacggtagaggctaacgaattcacacgagtcactgtcaaaataaaaaattgaattcaaatgacatgagtaaggatagattaacaaaaagaaagttgtaatggatagacgcacattgccaaattccacattatagctttaaaaaaaaaagtctgaacgaagaaagagttgcaattatttagtaatttcaatgatatggaacttgcaaattgtggaaattcttaagaacgtccccaaccaaaaaccaaaaaaaaaaaaaccaaaagcatgcaacatggaaccacatataagagtacccttctttacgtcaattatctttaaagcaagtcttcgctcttcaatttatattttaccaaatcatcttctctctttctctatctctcaaaacaaaaagtaaccatg

SEQ ID NO: 9867 - DNA, 3000 bp, Unknown
  misc_feature (1)..( 3000): cDNA_ID_3034296_gDNA_ID_1974092_Annot_ID_180643 3000 nt of promoter + ATG
attggttattcaacatataggattctgaatgaccgaaatatattttttctaatataattgtattggctgatagaaacttatacaaaccttttaaaagtttttaaattaacatcaatatatacaaaacatgattacacttacgacatcatgtgtgctgcataattacgtccacctttgttacaacattgctttgtttgtactgtaattcgaatcaaaattaccctcgttatttcttctgtctacagcatcatatatatacaacattttctattcttacaaaccattgataattatgaagtaatgaactaagcgcatcatgttcatgccttttgcggttgattattgaaatataaacaaaataaaatgatatggttgtttcgcactgcatgatgatcttacaagtcaatttcacccaaaaagctacaaacatagcaaaagtaggagtttcacgtcttcttgccatcacacagaatcaatatgttgaaacgtatcaaaagtttcttacattatatggtgcatacggaattaacatctggacctatatcatgcatgtttaatatgatgtcgtgttctaggaacgctagtggcaacgaatatatgatgatggttcatgcatatcaccgataaatgaacaaattatccattctgtattatattgatatatatagagtaagttgttatctgattgtggttggtccaaaaaatacatgaatgtttatttcgatcacactactacctctaccatcttggttttttccaattttttagcatgattttttatttacgattagatatatttctttaaaaaaacatgaacatgcatatgagtgaaagtaaattgacttgttagaatcgtcaatatttagttctaataattatatccattgctttaatcactttctatgttgatattattgtttgatcaaaaccatcagtataacctattatacaatagtttgatcaaaaccatcagtataacctattatacaatagttttgattcgttttgatctcttaggtttctttttagctattagaaacaaattcatagagactatagacattagacaatgataatgtagaacaacaattaatgttcctcaaatatcccataaaacctattgaatcaactggtccaaaaccaatacaacgagaacttattgtctacgtttatatgacccaaagacactaatcaatcggcctcaattagaggcggatttaaagacatcacggtatcatcatatccatgttactttttctgttctcttttttacttacccgtccatttctttcttttggcaaaataattttgctaaattacgtggcaaaataattttgctaaattacagcgaagaggatcacatgcatcagcactatttacaacaatcctttagggtatatgttagtcaaccccgtaacaccattcgtacccattaatcatgaacatttcgcaaagttttcccaccaaaaacggcgtcggataaggtttttggcattttgtgtttctttttttgtgtgcatagcataatttcattttaaccgtactattcgaagatttttaaattggataaagatgattcattcattacatagtcgctttgttgttactagtgataaattcatgttaatgattctatgattttcggccagctatctcattaattattaagacgtttaagtggagctattagcaatcgtgtatgacataatgattagcattttcatgtgccatgcccatgcatgaggcttttttttgtttaaaattttattctattatatccgaattttgttatatactaaatgaacatttgtctctgatttggtctactagttaattaacctttagcttcactaataaaaaatctcatgattttgatacttaaacccaaaacatattaaaaacaattagcagtcttttaaatcgataatgtgcttagatgattatacgttcgtaggaaactcttttgtttccaatgcatgttaagaactaagaactcgtatccttaagcaccaatgctttatgcttaatgcctcattagagatataaactgagattgactgtgttctgaatcatcataatataaggcacacaaagaacagaacaggaaatacttagcaatataataggtttccaataaaagtgaagaagaatacaataaacttttataaaaaaaaaagtatataataatttcacactcgaatcaaccaaatgtaagatgtcttgtccatttacacatcacatgagtaagtggattacagattgcaattgatgaaatctggatcttagctaaaaatttattacgttactatatacatcgagttttaagatgttcataatcacaaccacaaccacaagtttgaagaaataagaaacagagtaataatatatcaaataaaatttcatggctgatggaatcttttttctaattgtaggtccaaaaaagcctaaattaatggggaaacaaaaaccaaaattcaatagtaattttactaattatgtcttggttaaatagagtaaaaagaaaattaatcacaaacctccaaaaatcaactaattgagatcaaaacacgtgtcgcatgccaatagggcggtggatcacatggtaaaaaaattcactttaatttttgtctttcttcataattcatctcacagatttcaacttctcttttggattctctcaccgtacaccgtcggcgtaccactccccttccacaccgtcggcattaaaaatctcaaaccctaaaacccgtatccaataacccacccggtccaaccggttattcaaacccggtcaatccaaaattcgcctcggaatccaaacctccatacccaatctaacatggaaaaacctccaatcacaaacctccacgtggtgatcactcattggctcttattctggaatccaagaggacctttttagtataaagagccccttcgttggtcctatcaccttctctctctcacacactaacagaaagcacaaaaaacagagacaaaaga

SEQ ID NO: 9868 - DNA, 3000 bp, Unknown
  misc_feature (1)..( 3000): cDNA_ID_3034308_gDNA_ID_1974092_Annot_ID_180640 3000 nt of promoter + ATG
ataaactcgacccaaaaagttcaaagaagtctaaacatattgctgttcacgtgaaaaagacaacgacttaagaatatgacatttggtaaatgttacttgaagtcttgaagactactctttaatactttatcatcatcatattcgacaaataagcgtgtgcctgatttggtgtgatattgtatgtaccgtacgactctttcaaagtgtctccaacaagtatcattggatatactacgcggcaattaaacaaaataatgaaaaagctttaatttggttgaaatttttgccaaatgacgtaacctttctttattttacggcatagcaaaactataagtcgcaaatcgtacgtactatttcgattgtataaagattcaatgattctacaatttttctaaatcaaaaagttgttgaaagattcaatgattctaccatttttctaaatcaaaagttgttgtcgaacctccgtccgagtaaagattgagtttaatattattagttttatctaaatttctttttgtgaatttccaatagtcttcaccttaatttggacatctctctgatcatgctgactattaaattttttaacattccagcataaaaattgatcattttcagggattagtataactacaaccgttttttgtcaatcaattatataagatttattaaaccgaatacaaacgaaaacaaaacattgactctgatcgatatcacgcgttatggcggaataacgtttgtaatgcgattatgcagaaattttacttattagaaaaattttcatagtgtttagttgtttaccataacgtaaaaatatagaaattgcattttcgcctaaaaattataaataaatcattatgcaaataagtgaatatctatatagtagtttatatcattatgcagtattttattttgggatttattgcaaattttattgtgagacacatttgtattttattgtatacatttgtattttaaattttattgggatttattgcgaattttattgtgcgattatgcgacttatatcataatagaattatgtgatgttaccactcaaagtcattatcttatcacttatgaatataagttatgttatatatttatgtgaaatacatttgtacgtgaagttgttattagttatggttacgtatacattggtttgacacaggacagaaacatctaaaataaatgcagcgtaatttgcaagtactatttaatggtttcattgacatttgttgcaagtttctttcggtggatactgagtgatcaacaccctagaaagtaaaagacttcaaaagatttggtatttttattttgtttttttcattgacccatttatttatcactgtagagatataaacacgattgcaaaatatttatctaaatatacaataatgttttaatccgagtatataacaaattggcaagtgaatcagtgaattgattaaccgaatagtatgactcgtatctaaactaatacttaaaaagatcgatgttagagtatctccattgcaaatatttcatatggattatacaaaaataataaaaagtagaataataataaaacattttagctttctcaaatagtagtagaaacccacataaaaaaagtttctattttttctctataaaaaattttctttggattttttccgtactgaaaacttcttatattttattatttttaatatatatatttttattaactcatgtgagattttttcattttgcaatgaaaatgttcttattaaaagaaaaaaaaaattggaaaggtgaccaagcttgaccgatcgagctaagtcaaaagaacgcgtcttgcttgggtcatgttttggttgttccaagtggtatcgttttttttctccttttgaacgtcatcctcagtgatgtcatattttagttttaatttttgtttcaaatgatctcatatatatatatttttttgggcacacaaatgatctcatatagattgattttttttgtcacccatattagaaattagaaaacactacactaaatgcatgctccaaccacatagggttaaaagtctatgtcattgactacgaacgatgactccaagaaactaaatgaatatgatgcaaacaaaatctttattcgtcataagattgcgattatgtataaatactataaggtttaccggatatttcatttagtttgtcttaacctgataattgctctactagtggatctgccattgaaacaaaaaggctttccactcaaattctctgaggttgcacttgcacatgcatacaaacaaatattcttctaattgtttgcgcgtaagaaaaagaaaaaaaaaactatatccattattgagaaaagtagctgaaaaataaataaattaatagacaaaaatgttaatcaaaatttgcttttgagtaaaaattaaccagttgaatgaataaaatataacttctacagaaggtataagagtttacatgttctaatcctccattaaacaattataaaatacccacaaaatctaaaacttttaggtgaatattcattaatgaataattgaataccactaattaattatgttaaattcatcacaactttttcatgatacatcacacataaaccaccataatataataatgaaagaaatgtgaatttggttgaaaaaaacaaaagaaaaaagtaaaaaggttgaagcaagagactgacttttatccaaaaatgtgcttgaattttaattaaaaaacacgaattcttcttgactttcgtttcaaatctaaatccttcctcgcataaactcttccctgaatcaaaaacccattctaataaaaacaaagacgatctcaaacacgcttcttcttcttcctcattcctcaatcatccctaagacgtcacctcacttaaacccaatccaacgccgccgaaccaaaatcaacttcttcggttcttccccaattcaatactactttctgggtcgtcgttaaatccctaaatctctctctgttgttaccttcccatggg

SEQ ID NO: 9869 - DNA, 3000 bp, Unknown
  misc_feature (1)..( 3000): cDNA_ID_1989710_gDNA_ID_1974092_Annot_ID_180637 3000 nt of promoter + ATG
cagaatttaaaagtgctcatgagaaacatacgtttcagttttcactctcaaaggaacacatttttggtcaactcagttcagttagtttgaagacttgaagttaagaaaactaaattcaatcgaaaggaaaaaaaaactttttcacttttagtttcttttactttttcagacagcttcgtgacaaaacaatataattggttacaactgaaaaacaatcaaaaagaagtttgatgaacatattttgaaaaatgagaaagaagggggttcaaatgttagctttaaaaagattcatatgagacgacaaaaaaaaaaaaaagaaagattcatatgattttaatgtgaatgtgatccgcaaataaataatctaatgtttttttaatagtacaatggtatcttacaaaattaaatgctatttattctatagaaaacttatttttgctaaaaacgtaagatatacatttctaaaaaacataaatttatctaaaaccagattggatttaaaaaaaatagtaacaagtatttgaacctaaaaaaaaaaaaaaaaaactcagataaacagaaatcacctttaaaattacttgatgttttttcttcttctgttaattatacaaatgttgtattactaattatacttaagctgaaattaaacgggattgtggttggagacttggagtgtgtgggaaaccaattcgctttcaacatgcaagcatgtaagtatgaatgctctcattattatcacgttacgttcgccgataataaatgtatttaatttgtaatacaagtataattagtggtaacgaacacattacacatgaacggctatgttacttacttggccattaattccgttgaccttaagagatggcatatttatgagtttctttgactatttgtatatcgacaacttctccaccaccataggcaccactttccattttcttttatgccaaaactatatcagcccacttaaatcaatattttattcacttttatttatggatttatgaatcacacaattctccacaattctaaaattaataaattttgaagaatgaacataaaaatttgttaacatatatcatatattacttgtagatccttctttttggaataaaataaaagtgttgttagcgtcaatatacttcaactttgttaaaaatgagtaaatgaccacaaattgtgaaggaaaaaaaagtagacttgatcttgatttgtcgattgttgtctttcttcggtgtgtttatgattacctaaggtgacaatgaatttgaaggatttccaaaactagagctgcggaacaaaactgtgacggtaggtttctcctagctagtagagaacttggtttagaggagacacgatttctacagatttgctccatctgttgttagtaaactgccaatgctggttttagtgtagtaataacaccgacgtaacgttgttctctttatcaaaaaggaaaaaacaaaacaccaactttattcactattccttccaagagtttgtagatatgcatatatctttcaaagtggagatatttggtggaacatgaagacatttggtgactgagttcattgaaggttttaaggtagggaataacgtatgcttaacatgatgcacggtagcacgtcatctgtccgcaaaatgaggttgtgattattccttgattccaaaagttatttgacactatttgtctattcaatacaaatcgctactcctgatttaataagtgtccctttaaattaattgttctatttttttaaaaattgtcgtttctttataactttgaactatttttcaatttttgtgtcatctctaaatagagagactatactaattttctctgtactatttctattttattggatactccaaagatatgattactgttttacgatttaatatataatttttaacaaaaaaaaattaaatttattcctatttcatattaaagaaaattcaaaatatagtcaatttgttattaggagtataatagaaaatttaatttattttgttaataagtttattgaattgcttgaaaatacaaaatatagtcaatttctgattaagagtatataaaaaaaattagtttattttgttaataagtttattaaattgcttgaaattacaaaatatagtcaatttcttattaagagtataataatagaaaaacattatactattaataattttattaaattgcttgaagttacaaaatatagtcaatttctattaggagtatagtagaaaattttaatttattttgttaacaattttgttaaattgctttttaatccacatgaaaatatccaatctgcaagaagtataaaatcatcattttcaaaatatagaaagaaaataatggttttgaacattgaaaaaaatgatcttattgacaaagaaaggagctttcgacttttggaaacataatccaaattttagataattatgctaatgtatctaaaaatcttaaaacaggataattataatacgttagtgtcatcattatcatacatttcaccaaaataacgaaagaatagactagcaacaaagatttgattttctgagaatatttgttccaatccaaagtaaaaccaatcagaaaaatagaaaatttctatattcacggtaaaaaatatatattttaaaaacagaggctgtgatattttttacccatcatttctagaattttggggaaatgcaaaacactaatccataaaaattaaaaaataattaaactaaaaataaaacaaaacaaaaccaaatcccaaaggattggtccaaaatctgtgtttacaaaatatcaatggcaatttcgtagtaaagataaaaaacaaggatattgtttttaatctttctattaccctattattctcttatatatatatactcttccctccggtcaaatctcgtcgtcttgtttggtctctgtttttcacgccggagatagagagagagaagtaaaaaagcgagaaaaagctagaaactttagaatacccaata

SEQ ID NO: 9870 - DNA, 3000 bp, Unknown
  misc_feature (1)..( 3000): cDNA_ID_4262201_gDNA_ID_1974092_Annot_ID_180638 3000 nt of promoter + ATG
tttttaaatagatggactaatatctaactttttttataattaaaacttttatatttaaaaggtttttctattaataatttaactaagggtttttaaagtaaattggccaattcgtgaaggatatttcatttaaatccccaaaaattcatattcattatgctgtcgtacaatgaattgaaaatcgattaataagaaggtgggtaacaaaatttcctttagtttccttttatttaagaacaccactttacttctttcattattttgaccaagtttaactaggcccgtaaggagaaccataaagagaggacaagaccttgttacagcttacaaccaaaataaaggagaccacagttaaaaataaaagaggtttaaaaacacttctactaaaaaacatggttgataaaaaagttggcggtatccaattttgaaagtatgcaactaactatgcatcattcataaacaattacatatgtaacgtgtgtagtgtagacaaggtaatcgatattcgaaatgagcaaataaataaagaaattgtgattaaaaaatttttaagagttaatggaccagtctaacattatgtgccacttcatttttatatttcacatcaaaaccgaattcattttaattaattagaccgtgtccatttttataaaatattgacgggacatttcaacattgtgtatgaatgttataatattattattctcttcgttagccgaatggttcacattgacatcatagggacatacaaatattgactttttcgaagacacattacaatatatgtcgttttttgaacctcgtggccttgtcaacttataatttgcgtgtttgcgaagagataatcatcaccaaatgtatgttaaacatgtaagtaattaatattcaaaggggccagtatatcccacttaaacttatactatgtcagaaaattaattaatattattgaaggtattaaccatatcaaatattcgatcactataccatagagagatattggaaacttgtgatttcgattatttgttttagcaacaaaataatttctgtgaatgaaaagggccatgtggtgttggccgtggctcatacaaagtttaatgacaggtcactcccacctcactgttttgcctaataatttactacttaattatagtatagaatctttccgaatttttgtttgatttggagtttacatattcatcgtagttttaagatttctaaggtataaatattggtaggtgcatgcaatcagttgaactttcacatcatttcttgatcgtttgttgatttagaattaaacaggtgatcgtgagaaacgctcctaagcaaatatatagtaaatggaaatcgattaattcaaaaaaattgaagtattattattctattaccatgtttattatactatgtacttatttgattttaattttatcattgaaaacaagaaaggagaagcgacctcaatgattaacattcgtcggccgaatcaatatagagactttaaaaattaaaaaaaatggtggtggggtttgcagtctaagcttttaggttaagcctttaacatgtgattaactttccacaccaatggctctccaaaatcccggaaaagaagaaaattatttcgaaactcacttgggattctaaaaatgtgaaaactaagaataactcgctagtcacttccatgaaaaaagtagtggtaacacttaatttgaaattgaggaataacattttatttttgagaaagaatttgattgttagagtatgttattattagttttctaaataataataacatgttagaaaaatggtaatggtatgggagattttattttttattttttataatgagtaaaaatggtgagagaaatgatggtgaattgagagttgttggaggaggtggggggtccaatggcccctctttttattccttattaaaaagtaaaataaccattacatagttctgattaattttgcaattaatagaataatattaagagtaaattttacaagatgttattttgactaactttacgggtgcttcatacacaaacgtaaaagaaatctatgtacagatgaatagtatcatgcaaatctaaaaaaggttacaaaataatgtaacaagtactttatcaaaaaaaaattaacagtgaaacaaagcatgtagtgtgttatgggagactcatgtcttatccgtttcaagatccatgcaagaggaaacattggaatgtctctgtcagtgtctctactgtgaagaacattaagggacagtagtttttgtctggttcgttctcaggttctgcattgtaacaataccacacactcatcaatgtttctctttatgtaatgaatgaggatcaatcaaatagcttataagcaagcaagtgaaatctcacaataggctactgtgaaatcacaacaaaaaacaactttatctgtatcaggtttcaacagtttctttctaattgaacagaatcaaatctttatgccaatttcattctatctacaagttacaacaaagtaaatcattatcctagttatgctcacttgctcagtcattatttagctagctttctattgaagaataacaataatcaaatatcgaaaatgctatttctctgttggatcaaaggatttcagcttcaagataatgacaattgacacatttcaccattcttgatctctctttggttatatctactctaatttacatcaatttacttactttgaactgcctcactttcaaagacatgaaccaaattacagaaacggcgatgcaactataaaatttggaatacatgtggaatttggaatgagattattcgtttttatttcattttcttgaaataaaacactatatgccaaaatcaaacgtgggacctccttatgacacgtggaatttatgtgattcagacaaaagtaatcctagaagtctctgccattagaaccaatctcaagagataaggaaacttcacaaccaaaaacaagaacaacagacacatagagatg

SEQ ID NO: 9871 - DNA, 3000 bp, Unknown
  misc_feature (1)..( 3000): cDNA_ID_3034535_gDNA_ID_1974095_Annot_ID_180677 3000 nt of promoter + ATG
caagccctccagatatttccaatttgcttaaaaataacaactctctaccattcttcttgcaagttaaacctcccctacatcacatacaacaatcaaaagtcacacctgtttcatttatgttcaaccaaattttttttccatataaatatatacatgaatttcttcccacattgcttgtttagccactgcatcaattttcctccaatcagctagtgtaaccggaacgtgttccctcacaaggacacaaagaaaagatgataatgttattgaaccaggtccaacatgatcaccaaagtcagtgaaagtaactgaaaccttttcattaggattttcatccactttacgcatctttgttggtcctctcttctttctttctttcactctttcctccgctactttacttccttcaccatcttcttccatattggcagcttcttccatattggcagcttcttccatattggcagcttcttccatattggcagcttcttcattctcctgctgttcttgtccagtcaaacaagcttctccttctatctcagaatcttctttctcatcttcagacatttgctttctcagtctgatcagcctccggtactgttacatctttgtcattacccttctcttcttccacaacatccggtgtaacatcttctacctcatcatcttgcggtgtcacatcttctacctcatcatctacaggtgtaacatcttctacctcatcatctcgagcagccattttcttgcttcttcttgtagccactttctttgcttttcttttcttattcacctttaatgttgttgcaggagcaacttgtggtgttatatcttctacctccaagccttggttacgtctactacgacgagaaccaactttacctccacctcttgtcttcaccatttctgaaactgataaatgaagaacagtttcaaccgaaacccaaaaatcataatcgaaacccaaaaaaacataatccaaacaagacatgcatgttctccgaaactaagaatcaaaactaacaaatcaaaattgatacccaaaatcacaaacttccgcatccatgttcacacaagccaagaatcggaaccacaaatcaaaattgttttccattccaaagaacaaagaagctatgattgaatgagaacatacctattgaagattgtagggagattgtgataaatcgagttgagagactgagaaatcgaattcagagactgataaatcgagtgaaataaagtgcgaattagatggagagacagagaaagcgagtgagattgagagaaatcgagtgagagttgcagattttgtgctcaataactcaagaaattcgaatgatacctcaagagagaaaatgagagatcgagaatgaaaagttgattttttagatccaacaaaaatgagaaagttattttttaggattttgtttattttgccttagccaaaatttcactttttcctcatacaattttcaatagcgggatactaaagattagaaccacaaaattgccccgcgtcaatttcattatcccgctttaataatttatagcgtttacaatatacaaaacgctatctttaaaacacgattaagtcaattatagcacatagataaaaaaaaacgctatcttattatgctatcaatacccacatttcctgtagtggtcattactcgcaatttgtacaagaaaacctgattgatttcataagtataaatattacacaacatgttaccaaacatttataagtttcatggccagggcctagtgccaaaagcacgatacatattagaaacatacttgttttacaaaaggcacaaaactactgggtttcctaatgtccaccacgccctctatttcccactacgggtttcctgcaaaacaagtagaatcatgagtaatctaagattactcagtgagcttgggattccctgcaacagacatttgtttaccccaacccaaatacccaacatgaaacacgcaacatagaatggcaacgaaaggtagcttgtcgaagcaactacataaatatgcaatgcattaagactccagttttattaaatcttttaaatagggccggatatgctgccaaacccaacaccaaacacacactcccgtgatctcccgcattacaaccacaaaggtatgcaatcggagcatcactaccaaacgctacaccgtcgtgtagacactcggccaaggtaacaacgttacaagaccccaaaaatagcacggttcactacgaaggccagacttatcacgatcttggcacgcttatagtctttgcctcctaccacaagcaccacgtaccaagaccccaaattttaagatattatgaaacatatgattaaatcaacacatagaatcatcaatatctcagcacaacctctcaaccataagcaatagcataagaatctaaagatcacatatgcaatcgaatataaccattcaaacaattcatataactcatgaaatcaatcaagaatgcatgaggatatgattatgaaacttaaacaattatccagaactcactcagtaaccaacggaaagcttctaatgattcaggcagagttctcggctatgggaccctaacttggatcgaacagacgggttaaactcggcagcctctcactcccacctcaatttctcttcacaaatcaaatgtggtcgagttgggcttttataggcaagggattggcgagtcagcatgtccacgtgtcatgagtatgggcgagtcaccaatccacgtgtcatctacccgcgatgacacgttcgctactcaagcggatgagtgacacgtggccacctaaatttcggctccaagctactaatattcgattccaaacaacttttcttgggccccaagttagccgagccacgcatccttggcgcggtcaacagtcggtcaacgcttggcaaggcaaactttcgcccgtggcacgcccgttcttgcccaaacttgcccatttgtgcccattcttgcccaaacttgccctttgatattct

SEQ ID NO: 9872 - DNA, 3000 bp, Unknown
  misc_feature (1)..( 3000): cDNA_ID_2186306_gDNA_ID_1974095_Annot_ID_180687 3000 nt of promoter + ATG
tccaacatcttattgaggagctaaaagagttgtggtctactggagtcgatgcgtacgatatttcattgagtcagaattttaatctaaaagctgtattactttggacgattaccgactttccggtgtatagcatattatcaagatggactactcatggtaaattgtcttgtccagtttgcatggaaagtacaaagtctttttatctacccaatggacggaagacatgctggttttattgtcactatagatttcttcctcatggtcatccatcctgtaggaataaaaaagactttctgaaaggaagagatgcttctcgcgagtatccacccaagtctttgacaggggagcaagtttagtacgagcggttggctagtgtaaatccaccaaaaacgaaggatgttggtgggaacggtcatgaaaagaagatgcgaggctatgggaaggaacataattggcacaaggaaagcatcttgtgggagttgccttactggaaggacctcaatcttcgacataatattgatgtgatgcataccgagaagaattttcttgacaacatcatgaacactctcatgagtgttaagggtaagtcaaaagataacatcatgtcaagattggatattaagaaattttgttctcggccaggcttacacattgatagtaagggtaaagctccaattccagcgtatacactgacagaagaagctaaacagagtttatttcaatgtgtgaaacatgatgtttgatttctagatggttattcttcagatttggttagttgtgtagatctggagaattcaaagttttcaggcatgaagagtcatgattgtcatgtttttttggagcgactacttccatttatctttgctgagctccttgattaaaatgtccaccttgcattatgaggtataatacttactattttttttccaacacttttttatctaatcatttaacttgcacatatattttaggaattgtaacatttttccgggacctatgtttgagaactttacagacaagtcgcgttcaaattctcaaacagaacatagttttaatcatctgtaacttgaaaaagatctttctaccattattttttgatgttatggaacacttacctatccatctctcatacgaagctgaattgggtggtgatataacccgattttcaccaattttatctataatttaggtataggattttgattctttatgttatttctcgagtctttttaatgtcttttcaggtattctatgcaatgggacaacaatggagataaggacacattttggagcaaaacctaaggaaaaggaagctaaggacgattttggttcaggaatcagcgaggagtgtcgaccgacacactcttggtgtcgatcgacaccagttttggccccgtaaaaaccctatatgcttttgagtttccagaagctcaagtctgccccagaagatttctctatttacattattagtccctggacgtttttagggtctatatatatatattgtttttagacctaagtttcttttatcaagtcttttatcaagttctttgcaaaaacctattgtgagagacataagctattcatcccttgttcttcagagttttcattcagatctatatacagtgaagagttcctttcttttcccctctttatttactgtgtttatgctttttaattcaaccatgttttttgcttcatccaatatgcctgagtaatctgcttgttaggaatagggtttctcattagggattcatatggtttagtagattgccccttttgctaggttatctatagaattcttcatctttagttatacctaatgctagatctagagtaattaactagatcttgaatccagacaatagatatgcccgccataggtatctgtagttggatctattatttgatgagtctggtctataggtgtgtaataaaaatcggcctatttactaagatgaacaattgaactcgttaagaatgcatacctaaaggttcttatgaaaaatggtgatttgacaaatcttcgattaaattttttggaaatcttacaatttcttgagtcacaaaagtttttgtaatatatcacagctgtatctatgaatccactttagaaagcttccatgtaaaatgttcttacgaaaaatggtgatttgacaaatcttacaatttcttgactcacaaaaaaatatgttcacctaaatgttttacgaaaatggtgatttatcatatcttattagaattcttacaatttattgactcatgaaatatatatatgtatatacactttctctacgaacattcatgtgttcttttatctcacagttttcatattgaaaatgtaaaatgtacataaaaaaaaagtaatatgtgtgtttgtaaaacataaaatttacataaaataaaaatataaaatatacatataataaaagtacaaaactataagaacacaagagaaagggaaagagatggcgcaccattgataaatttgtaagtgtattttcttaactttatatgttaactatatttttcaactttctcgttatgagatttcaacacatgtccccacctttttgttgcttgaatttttaattatcatgtcatttgcttgtaagaagagttttacgagttatatttttgtgtcacaggtgtacatcttcaaacatgtatcgagcccatcatggagatcaagaagtccttgaagaaacagaaagaaatgtattacatgatgacgagttggatgctgacattattttgttggtgctcctgatttcttttcggatgttgtatttgaggaaatgcctacgacatcgaccttaatattctattcgtcgtgcgatcacaagaggcagagaaatctttatagaaaatgtgcaaaagcaaaaccttatgcattttcgacagttgtgtcgaatatatccacaaatatttctgaagttatgtgaacaactccgggagctgacaagtttatgcgatacgaaatatattagtgttgaagaa

SEQ ID NO: 9873 - DNA, 3000 bp, Unknown
  misc_feature (1)..( 3000): cDNA_ID_2186317_gDNA_ID_1974095_Annot_ID_180691 3000 nt of promoter + ATG
catgagtaatctagcattactcaatgagctcggattcctcaagaaaacgttagtctaatccccacccataatccccacatgaataacatgaataatcagagtacacagagaaggtagtaaaccacacaaacacaagcaagaaataacgtttcttaaagttttaattagggcatgaatgcactcccttcctcaacacacgtgaacacccgagttataaccacaaaggcatataaccggaacatcaccttggctacaccgtcgtgaaagcgacaccggcccttgggtagctaacccagtctctctgggtccttcgaaccccttgggtagctaacccagtctctctgggtccttctgactctaggacaaaacttgctcaccaagttagctcgcccgggtggattcggctccaagttggctaaggcgtggggtcgaagttgggcttgcatggcttgggagaaaacttggtcaccaagtcagctctgcccgaatggatttggctccacgttttaaaacttgggctctactctggcttccgcggattataaattggcagcccttcttctcatttcactcaccattctctcttcttcttctcttgcccttctttcttgctcggggtcaatgagcggggtactacatgcaccatataggttggtgccagctgagcttgcagaacttcagaaacaattggaggatctactcgaaaagggatttatttgtccaagttcatcgccatggggagctccggtattgtttgttaagaagaaagatggaagtatgtagttatgtatagactaccgaggtcttaacaacatgaccattaaggataagtaccaattgccatgagttaatgagctaatggatcagttgggaggagcaagttggttctcaaaaattgatctggcctttgggtatcatcaaatttcaatctcgggatcggatgtaatgaagactgcctttcagacgaggaatgggcaatataaatttgtagtcatgccatttggacttacaaatgcgcccgcagccttcatgagacttatgaacgaggtattacacgattatctggatagcttcgttatcatatttatcgatgatatcttggtatattcacagagtgcggaagtgcatcgtgaacatttggggaaagtgttggatagacttagggaacaacggttgttcgctaagtttagcaagtgtaagttccggcaacgagaaattggatttcttggctaccgaatttcaggacaaggagttacggcggatccagaaaagattactgtaatatagcaatggccgcaacctacatccgttacagaagtacggagcttcttaggattggcaggctattatcgtaagtttgtcaagggattttcatccattactaagcctttgacccgacttactggtaaaggtgtacccttcatatggagtaaggatgttgaggaagcctttgttaagttgaaaacggaattaacaaccgccccaaatctagcattgccaaagccaaataaaccatatgatatctacacggatgcctcgcgagttggcttggtatgtgtccttatgcaagaaggaaaggtgattgcctacgcatcatggccattaagatggcatgaggagaattatcccactcatgatttagagatggccgctgtagtattttcgttgaaagcatttgagatcctacctgtatggagagacggtacgagtatttacggaccaccaaagtcttaaatacttattcacgcagccagatctgaatttacgataatgaagatggatggagttaattgccgattttgatttgaaaattcaatatcacccgggaaaggctaatgtagtagcagacgccttaagtcgccggaaaatggaagtagatgttggaaaggatctagagtcgttatctgatgagctaaagaaggtaactttgttagctctagagggtgaatctagtgagcccttgggtttacaagttgtgactcaagcaaacctacttcaccaaatccgagaggaacaagcgcaagatgaaaagttgcagaaaatcgtggaggagttaaaaacattagatggaccaaacgctagtggcaaccatctagctgatgacggcaccttattactcaatgggagaattacagtgcctgatcgtaaaggattacgataagaaattttaagggcggctcatacttctttattgagcattcatccgggaagtataaaaatgtacaaggatataaggaagtattaccattggcctgggatgaagagatcagtggcgaaatgggtaagccaatgtgagtcatgccaaagagttaaggtggaacaccaagtgccgacaggtttattgcataacctaccaattcctgcatggaaatgggagtcaatatcaatggtttttatcactgaattaccaacaagaccaggacgtagcaatgaggctatatgggtagtagtagatcgcttgaccaagacgactcatttggtatcaatgaaaagcattgatcagtcacctatcctggcagaaaagtatattgatgaaatcttaagactccatggggtaccaactaatatagtatctgatcgagatcctaagttctcatctttattttgccaagacctccatcgtgctttagggactgatgttcccatgagcacgacattccatccaaaaactgacaggcaaactgaaaggaccatccgaaccataaaagatatgatttgactatgtgcactagagtgggctggtgattgggaagactacatgcctttaattgaattttcttccaataacagctatcactcgagcatcggtatgtcgccatttgaagcaatgtatgggaggccatgtcgaactcctctttgttggactgaagtaggagagaggacgagttttaataatcggttgatcgatgagtctacggagaaaattcagttcatccgagacaatatgaagaaagctcaagattgacagaaaaagtatgctgaccgaaacaagaaggcgac

SEQ ID NO: 9874 - DNA, 3000 bp, Unknown
  misc_feature (1)..( 3000): cDNA_ID_3034523_gDNA_ID_1974095_Annot_ID_180685 3000 nt of promoter + ATG
ttctgcatttgatttcgtctatcaccttgtttctctactctttatctctttacttatgcaatatacttatttacctatgattatgttttttagcatgttgtctaagtaatgacatttagttcttaaggatgggatagaatggttgtggaatctgtagtctatagaatagttaagttttagaattgattgaatcccttctagactagttgtgtttactgcttatttctgtctgatcaactggaattcgatcaacaacactatcgcacccagaaggtgttcgatggaatgcttgatccactagttcttgagatatgcgtctctatcccaagggattggccgtttagagcgtttattaacttcatcagtcggttcttattgcctgcatagtgagattccgttaatgggaattaagctaggctagctttgcttgaggatttctatcacgggagtgaattaatctgttgttgaacatgttgtctagggatagcttgattgtgcttgttaaccatccgaataggctaggataccactcattgcctgtttcatcgttgatcccttaatcgttctcattgcttgtttcttagtttttgcattcactagaccaacttactcgaccacacctagtgtctggcaacagtctgtgcagtcgagtatagttgtttcattttctgtctgttactcgaccacatcctgcttctagcatcagccagttgtggtcgagtgatttgtgttaaaaaccccaaaacctgttatttttggcttgacttagtgacttctgatcacatctcatctgtttgcatcacacccatttggattgacaccctaagtactacaacgacatgatagtgctataggattaattgactaaaaacctattatcaatttggcgacgttgccaattgggtgtttgtttgttatatttgagatcattagaattgttaagatcaagttcgtttttgtaacaagagatactaacattgtcttttcagtatttgtatttcaggtacttagcaacctgatttacagactcatctctaattcgtctgttatagttgggttgctacttgttgcatgcatacacggtcacaagggaatcataacctcctattcaacgataacatcgaccgtattgttcgacaactaagagaatagacaacaacagaaacaatggctgaccttgtagatgagcaaatacaacctaacaacattggtgctggtgactttccacacaatcacaaccagcgtcatggcattgttccacctctagtacaaaacaataactttgagatcaagagcagcctcattgcaatggttcaagggaacaagtttcatggcttgccaatggaggattcgcttgatcatctagacgagtttggaaggctctatagccttactaaaattaatggagtcagtgaagatggtttcaagcttcgcttgtttcccttctgatgcggacatcaaccttatttcacaaactgctgaactacaagttgtaccacatcttgtactacatcctgtaccagaagtcccggagggtatcatgacacgttcaaaagctaaacaactgaagaaaaggttcaacttagctgtgcaagatattttgagctccctagagctaggagtaaactggtccttagcaccccataccagatatgatctaatagccgaagaagagcttgctgaagcattcacccaaatgagtcttgaacgaactactcccccaggtatgaaatatcgtttgacaggttcaaggacctctagaaaccaagagaaaactttggagcttcaagagacggacgattcaagtgtcatctctgaaagtgatcgagagagtcaagatcaagaacaagatatcaaggacatggaaaagctcaaagacattgatcaaaatactcaagaggaactccacaaagacccctacttcaaggaacaagccaacaaacaagcacaagacttgattccagaagtacctcaagaagtactacaagaaatgactcaggcgacatctattaggcctaaaacgcatctaggtaaggtttattcagtttatattatctttgcaggtccacacagcccagacaacggctagagtcgccctcaatcgtgctccgcaagagaacttaattagtttccttattttagcttattttctttctaaaaacaatggtttttgtgttttgattttatttgcttccttgttgcgtttttacatttaatttcggccttagggctagctgaaggactcttataaggtccccatacagcagttgtacgatttttacctttgattatcaataaagaaccgcattttctcacttcttctctttaagtgttcttaagagaataagcttgttctttgtcttgtgtgtgtgattcaccaaggccaagttcatgtactgtatcagagacttatcacatctctgtggtgtacttcaatccgccagcacttcccctccattagatcccacacgagagaagcgatcgtcatcgtgttagatctccatcatcgaccatctttccttcacaagagagaagcgaccgccagcttgtgaagccaccatctctatcagatacaaagctcaccaccgagtcttgtatcatcttggtataagagcgcagttgtgcttcctttgcgaggtttcatcattttgttttgtctgccctactttctgaatcagtttttgcattagtctagtttctgttttatttaaattaaaaaaaaaagtatttcagtttcattttatttcgtgttaagtatttgtttttgagtttcgtaatattaattaaaaaaaaaataaaaaattattgttaactttgtactacattagcaagtgtgtcaggaagtgattcaacaagtcttaggtttcttgttttttatctttcttttctagtgctgtggtacattgatttctttgttgtttttgtctaatcccatgtcagttttaggcatatactatgggagaagcagcagaaattccccaaaacgccgtaatgcaaatg

SEQ ID NO: 9875 - DNA, 3000 bp, Unknown
  misc_feature (1)..( 3000): cDNA_ID_2186283_gDNA_ID_1974095_Annot_ID_180681 3000 nt of promoter + ATG
ccaacaaacttgaggatattgtggtttccaacacaaccactaaggcttgagctaatctcactactcttccttttacctctttaaacggttagtattcatagatattgactccttgttcatacatgatattgagaccaatgtgataaaaagaaagtgttcgtctccctataataaaaaaataagaaaatgagagattgataggattttcatatagtgtataggggtataaatgtttcctataacctcattattatacatagtgatgttaacttgggcatggaatacccatttattaaatgggtacatgcaaaaaaaaattaacccatttaaacccatttagagaaaaatatttaatggggtttacctacaaacaaatgggttcccattcaagcccatttatgtttatttatattaattaattttattaaaatgtaaataacttaattttaaataaaataaagagcaaaatattatatatattgaaaacaaaacgtaaaatcatgttttttcaccaaaataaccttttcagccaaaattgaaaataacgttttcccaccaaaatcgtaaacggatgttttttcgccaaaatcgtaaaatcacgtttttcccgtccaaaccgtaaaatcacattttcccgccaaaaccgtaaaatcacgttttcagccaaaattgaaaatcacgttttcccaccaaaatagtaaaccgacgttctcccgccaaaatcgtaaaatcacgtttttctcgccaaatccgtaaaatcacgtactcccgccaaaaccgtaaaatcacgttctcccacaaaaatcacaaaaatcacaaagtgttttccgccaaaccgtaaaatcacgtattcccacaaacactgtaaacgatattttcctataaaaatcataaaatcacttttttccgccaaaatcacaaaaaagtattttccgccaaaattgaaaatcatgtttcccgccaaaactgtaaagtgacattttctgctaaaattgcaaaatcatgttttcatccaaaatcgtgaaattgcattttattaccaagaaaacattttcccataaaatgacattttcccgccaaaatcacaaagaagtgttttccgtcaaaattgaaaatcatgtttttcgccgaaattgaaaatcatgttttccgccaaaagtgttttctctccaaaatccgaaacccgtattttctggccaaaattgtgtttttgcaaaaaaaaaatatattcactcataatggggtattcatcatcgttttgagtccagtttcgtatcattcatcactgttttatatcatttctcatcattcttgcagactttgcatgattaggatagctttgcatacatattgcatttctgagttgttttcaagtgatttggagctgtttgcgagcaaattggaagaaacgagccagaaccagaagacaaactcgaccaccaggtcgtgtgcatccagcaccatactcgaccccctagtcgagtgactttggagccattcttcccatctactcgacccccaggtcgagtaacctcagctcaggccactcgatgacgccactcgacccccaggtcgaatatcacttcgacttaccacctgaccacactcggccgttcactctaccacgttactcgaccccctcgtcgagtatcatcactcaccaccaacaccatcactcgaccgggccctcgatcacatcatcatagtctactcaaattcgcactcaaccagacaagctgagcacaaggaagagaagaggagaagacaaagtgtttggaaacggcctggacctccatcggatcatgaagcccacctcggcccattatcattctatgggccgggcgattagttattggcatgtctactatcattttacttcgttttgtataaatagatgtcttagggttctgtcctgagacatctagtcgacattgagtttttgcttcagttttatttttggttttactctagctacgccgcttttgcttctgtaacctataattcgagatttttccaagttattcagattctgcattcgatttcatctatcatcttgtttctctactctttatctctttacttatgcaatattatcatttacctgcgtttatgtctttgagcatgttgtctgagtagtgacttagaattcttaaggatgggatagagtagttatggaatccgtagtctctagaatggttaagttttagaattgattgaatccctttaggactagttgtgtttactgcttatttctttctgatcaactggaattcgatcccaagcattcccgcacccagaaggtgttcgatggaatgcttgatctactagttcctgagatattcgtctctatcccaagggattggccgtttagagcgtttattgactttatcagtctgttcttattgcctgcatagttagattccgttaatgggaattagtctgggcttgaggatttctatcacgggagtgaattgatctgttgttgaacctttgtctagggatagcttgattgcgcttgttaaccattcgaataggctaggataccactctattcgattaccccatccttaggaatttctcatccatctgatttctctgttttaacgttatcacttaatcaatttagtaattctgttattgtttctgttttctgcatgttcgcttaggattgttagaaaccccaaaactgttattgcttggcttgacttagtgacttctgatcacatctcatctgcttgcatgacacccatttggattgacacctaaaatactacaacgacatgattggtgttttaggataattgactaaaaacaaattatcaatttggcgccattgccaattgggtgcttgtttgctatatttgagattttagaattgttaagatcaagttcgtttttgttataaaagatactaacattgtgtcttttcagactttgtatttcaggtacttagcaaccaactttattcgtctcttatagccaggttctacatgttgcatg

SEQ ID NO: 9876 - DNA, 1539 bp, Unknown
  misc_feature (1)..( 1539): cDNA_ID_1011923_gDNA_ID_1974096_Annot_ID_180696 3000 nt of promoter + ATG
gaattcagtggacccaaagacagtaagtaactcaattcgtcccgtgaataatttaaatcatagagttttgattctgttttttcttgttcttgctgctgatgatgatcatcatagggttttgtgtcaatttcaacttatcagtatcaacttgttaatttttggtgattttatctctgtgtgtttgtactatggacaggtatatatgagggaggtgtgtggaagataagagttgaacttcctgatgcttatccttataaatctccatctgttggtttcattaccaaaatataccaccctaatgtcgatgaaatgtgagttcaatcgaatcagtagatcttttggaggagtgattatgttccttctccaaatcttgagtggtgcttatttgttatccctctttgtatgtggttatgcaggtcaggttctgtttgtctagatgttattaaccagacctggagcccgatgttcggtatgatcataacaaatggaacaatatacaagatagttttaactcctgttagtttttgttatgttaattatgatttggatttagttattcagacctggtgaatgtgttcgagacatttcttccgcaacttcttctgtatccgaatccgtcagatccattgaatggtgaagcagctgcattgatgatgcgtgatcgtcctacctatgaacagagagttaaaggttagatattgagttgattagattcttgttaccctacattatcttatcttcttgctcggtttcagagtattgtgagaaatacgcaaagccaagggcggatactgaggaaatgtctagtgatgatgaaatgagtgaagatgaatatgcctcggatggtgatgatgaagatgatgttgcaatcgccggtaaacttgatccttaatcccgcattggtcttgatatgaatcatgtagctggcttaatagatggctaaaccggggatgacaaaaagaagctggtgactttgtatgtatcatgtatatatgaataatcaatgaatgtttaaaggttccagttttaattgaactgtaaaatctctatttctcttgttgtttacgttgtcattttatggtcgtttaatgtaaattattgaagcttttttaatcttcatgttgtgcacctctgttcaaagtatagtttgttgtaaattatgaatggtcttacagatttatctaataaaatattaaaatcacagtattatttaagacagaaatgcccttatagctcagtggtagagcgtcagtcttgtaaactgaaggtccgtagttcgatcctgcgtgagggcacctttttaccatttttactattttttttcttttcctatgggcttctttaggcccacataataaataaacggcccaaaatagctagctatctccgcctcacgttttgaatgacaaacaccttgccgttttctcaacacttcgctatttttcttcagtcgtcttcttcttccggcttctctcgaaacccttacctaaaaccctaatccgccacatccgtgttttagcctcacgacgaatcacgatg

SEQ ID NO: 9877 - DNA, 3000 bp, Unknown
  misc_feature (1)..( 3000): cDNA_ID_2186387_gDNA_ID_1974096_Annot_ID_180707 3000 nt of promoter + ATG
agttgagttggtttaatacaccctttgtggtcccttcgtcttgggcctcacttctacactttcttcagcccattttcataacacgtgacctacacatgctataatgtacatgatttaattatttatctcttaattgtgttttctttaaaaaagaagaagatataattctctttattttctcttgatcttatgaaaaaaaatgtatggaaaacttgatagacattcatcatttataatgtaacacttcacactggatattttaacaaatacaactacgctttatcgttctcactatgaaatatatcatcttataagctctttttttttactcttattttggatcttttggacgcttatcagtgtcccttgacaatttttggacaatcacatatactatctttggaaatgtaaatagaaccttagtgaaccacttagtttgatactcagttaatcacataaacttacttttcattctagaacaattgttttcgtaccaaattaaacaacgagttatttctgatcatcctatcccaatacgaaagtattggaagacccttggacagtttcctggtgttccaagcaactttacaaatttttttccagttagtactgaaagtttatctattcttttgatctccaaaagtctatacgaacaatatttatatacatacgcatgttagacttcatatgtcaacgaggaaaaatgttatgtatgtgcgtgatatacaatttaatttgttggtacactatctcaagctcttaagtataattcatctactgtgttcacgtatgttaatgttatataacgaataaaggattataatatgcgtagccaaatcgacataattatattatattgaacggcagagagaaactttggtgaaaagttagatggatttgattattaataacataagacaagtggacaaccacacgcataccgttacaagtcaaacaatcatatttatgttccaccaatttctatacaataatacgaatgcaatctcaaattttaataactaagtcatattgactaaagagttagattcgttactggcgataaagggatgaacagagcaacacttccggtttgggtaaacatggaataagtgaaacagacgaaaaagagtggattgattcatcaataaaaatcatttgtactaattaacaaaattaagagttaaagcaatcaatgtcaccatctcaactacgacaaatcacatgtcaatagctagtattattactaatcaatatgagaacaacaaacacatgtaaatttcagattattttacgcataaccttattaaaaataacatttgtaaagatattacagacccggtagcaaataccaaacacataaaatagaaagaaaaatggaacatgccgtattgggatcggctactctataattatatactccttgatattcagatattaacttcttgatatatacacacacatattaaatgtgcatgtgtatacacgtactaagacgtagatggaacaatacaagtctttacgttactaattttataaagattaatctgcggaaaataagactaataatattcatttaaggactcgagaaccaattggtaaatgtcaagaaagactataacagcaaaatattatacgtaataaataataatcataaaagcagatgtactactttatttcattatttgagtttgattccaacggttacatttttcgataaaataaattttgggccaaaaaaaagtacttctaccttttattgacagtgataagttaatgtttaaaatcacataaaacccatggtaatatttactatgttttactcaatatactgtatgtatatatatttagagataagaagaggacagaaataaaagctttatttgaaagcattgtcttatatgtgaaaccatctgcaaatttcaatgtctctttcattctcacgtccctctcctcctttctcattttctctcatttattttacaaactttaggaaaaaaactatcattaaccattttttttattttaaaataataatttcaaattattacagtataaaaacaaaaatgtacactaaaaatgtctgatcgcctgcaaaaaaaactgtctgaacatctaaaataaaataaaaaacagtaaatctattggtcttttgtttttttcttttcacttattcaaaaaaaatatttcctttaagtttataagtttgttattttcttcctcttcttcctcttcttctccataagccaaaactaaaaccctctttaatggcgagaggacccatctccaagaataaacagtaatcttcatttattgtcattacaaatttttctttaagtccaaaaaaatccccaaattaaaaatcttttcttttttaattacatgggcagatgaagagacaagggtccctataattttctctttagatcttcaaaacccaaacctcaatcatgttggtcactttttcttcttcttttataatctatgtagaaacaaaaatctatggtttttaacttttcatgtttattcagtctctccatcatcacaaagctgagtgcttgattggctccacagacaaacataaagtttgcatctttttttctgactcatttcaaccaaaaagctccggtaagcaaatctctcttatttatgtaagatatactcacttatttatgataaagattacatttttaggctaaaggaagtttcttttttcatgaatgtctgaatgagaagttttttttataatgaaaatctcagtttagggtttaggggaaggaaaaaaaggtaacccaggaagtaaaattgacagttttgtatacaaaagaagcaatttttggacactatttgaagaattctctgtttttgttgttgctatgtttgtaagatttttagtttaatgctaaaagatataaaaaaaaattgtttttcaggtctttgagaatcggttttactagattgaagacgagagttttgaatgattggtgaatttgttgatcatca

SEQ ID NO: 9878 - DNA, 3000 bp, Unknown
  misc_feature (1)..( 3000): cDNA_ID_3034546_gDNA_ID_1974096_Annot_ID_180709 3000 nt of promoter + ATG
tcaataattttaacggaattcaatttgtcaaacaaccctgactacgtacctagctgtttttcaatatccttaattcattctagtgaaaaagattgagttaattaaatagttgcatatatctcttatgcaaaaaaaacatttgataacgaacaagttgtattttagtatctattgcttgttttagacgtataaacgaattttagttacattgtgcttacattttcatattttgatcagtttcttgttttttttttgtgtgtgtgtgtgtcaattttatctaactaccgtaaatcaaaatgtttggttgatggaacatagctaaaaatccgaaactactgaatagaatctaagttaaacacgtatatatatatatatatatgtaatatgtgaattcaaatggaaatctattgtttgtgtacgtatacgtaaaaagacaatctattttatgatggaaaaagacaatatatataagacaatgacagaagatccaacatacaggcattacgtgagaggtcccattcaaagtgactctgaattcttaggcactttcaataattcgaatttatacaggtctcagaattataagcaaagcttattgaatgggttaaaggaattaatttagatatgaattttggttggttttataatttatgatggaatcaaaatcatagagagtggctcgcgctgacaaagttattaatgctaaattaaataaactggaccccaaaaaatggactgttcgatcactcttttttttttttatcaacagtagactctgttccgtgcaattaatgcgagcatctctttcattttactttttcaatattttgtttttatttctattgtgtgaagaatttatttatattttcagtctcgataaaacaatgcatcatcatctgcggcgttagatattataatgaaagatttattagttgtgtactagctaatggttaatatgtcatatgtgtaacaaaatgaggtgtatatttagtttgtttttttgtttttttgttttttgtccaatgcattagaagtactgtccagaattgtagtatttcactacatttttatagtcaaattatatatattaagcaaaagtcaaaatgaccctttttgagctgagagccggagactataggctacagaatctaatgtttgcgtgtgttcacgatgaccacagtgtaactagatgacatatcttttaggaaagtaacgaaaaaaataatcagcaaagaaaaactatttaagaaattactgaaaacacagacgttcacgttgatataaatgtacaaatcttcatttatcaggttattatgttttatgaatcatacagttagtacatgaaataaacaatatctgactccgtttttcaacgtacagacacgacaagtagtcctagttaggggtgataattttgggagatgcgaagaattaattaagagcatgcacatagcatatgataataatgactcttggtttcttctttattaatcatctcatttaaatatcattttctcgtgattttgatcaacataggttgttacatagctaaacccattatcaatcccttaccttagaattgaagtcaaggaagaatactaaaccttacattatctttagatcccaaattcactcgttcttgataaccttattgtctaactccatatataattggctcgtgtacgcatctttaatacaaataatttacgaggttgcgattaattaaaatgaaggtgcatagaaaattaattagcaattatacaaatgttctatggtatttccgaagattcgaaaacaatgtagaatatatatattcaatgaacatagtatatattatattttagttaaaccatacaacgtaatttagtcaatactagaagcttgtctctctctccagggtatctcctcgaggcataacattaatttcatgtctttcttcgtgtttcaccattaggatttgttctatcttaaaatcaagttaatatttgtgtatatatttgaccagtaaggcagtaacatataaacattgcttataagggtggcaaattggtttggttggatttgtaagtgttatgcctatgaattttttttttggttcaaactctgcttaaagtctaaagacctatattatgagttactaaaaaaagttatttcctccgtttcaaaatataagatgttttaaataaaaatataaaaattaaaaaatcaaaatataagatgttttaattaaaaatataaaaattaaaaaatattttttaaaaaattcagcagattataaaagctgatgcataatataaatatgtatacaatattaaattaatctataatttacataaaaacttgaaaatattttatattgtgaaacaaacaaatttcttcagaacatcgtttatcatgaaacgtagagaataggacatatcattgatagaaaaaagattttagagatggaaaaataactaatttctcttaacaaaaataaatttccaaaaggagagtggtgcttggaacaccgtattcaaaagggttatacactagacactacttttttttttttttaccatcttgttttatatatatttatttaaaattcctcgtaaagttcagtgttttgtgattatatacagtgtacacacacctaaaataagtatccataaagagatttggtcattcggacaccgtccttttctctcaactcaaagctcaattcaaccacaacagatagtaacttgaaagtcacaaatatttaatattttcccattatagaaggttaaaaaaaataaatatattctgggttttgttgtcttcttctttcttcctcaggaaaccaaaccaatgtcatgtaaaaatcactaactcatgactagtcataacctttaaatcacttctgctttttttctgtttctcttttgatttattcaaagacaacaaagttttgtttttgacaaaaaatctgatctttgtttgttcgtttgtttgttacatggggatgaagaaacaatg

SEQ ID NO: 9879 - DNA, 3000 bp, Unknown
  misc_feature (1)..( 3000): cDNA_ID_2186407_gDNA_ID_1974096_Annot_ID_180712 3000 nt of promoter + ATG
agacaaggatcccaaatccatgaataaagctgcacgcttctcataacaagacaatggatcctaatccatgagtaaaacttcaaacttacgaaaacaagaccatttccttaatcatacgtgaatcttcaaacttttatgttgtgtgtttctatttttctatcagagacggtagaaatttgaaaccttcagtgattcaaatttcaaagttgttttcacttatagagacatcagaacaagttaaaattgaccatcacataacatatctcatttcaacagtgaaataaataagcacgacaaataaaaaaaaattaacaagtggaaacatcagaatcgaaatcgatcaagcaagaagcaaaatggcattgaatcttccattatttcattcatcctccaaatgatgatcctgcaaagcaaacacactaagctaatcagagagggttaatctagactctgtatcttaaatttgacttggacaattcgatagcaaacttctccgaaacccaaaatgaaagagcataaactgaaaagaaaaaaaatgagacgaggacatacctcactcttctgcagatcctccaatattgcaaatgcttttcgtaattctttcttactgcataagccggccagcatacagtggaaagtgatgtaatctggagccacaccacaagaaatcatctcattgagaaggtcttgagcggcatcgagatcacccacttgacaaaacccatgaatcaaagtagtgtaagtaactgtattagcaactattcctcttcgatgcatctcacagaaaatctccattccattgtcaacccttttagccttacaatagccattgattagggtgctaaaagtgactacatccggagagcagcccttgctagccatcgaatctaacatgcgctttgcatcatctacacgatcctgcttgcaaaatccatcgatcattgagttatatgtgattgtggtaggaaatatactccaacgaagcatctccttgtatatttcttcagcctcggagacctttctttctttgacaaatgcattgatcaatgcactgaaagtaacaatatcaggattgatttgcttttcaatcatatgacgcaacaattggtcggcatcactccatctaccagagtgacaaaaagagtctatcatacaattgtaagtgagaacattgggaaaaatacctttctcatgcatttcagtgaaaaggttttgagcattgatgtggttcccgtccttgcaaaggcgatcaacgatggcagtagagattacaacatcggctttgatgtggctttgccccatcttcctaagcagattcaaagccgagacaaccaatcttacacaatccatttacaattgttccgtaagtaaccgcgttaggttgatgaccttcttctaccatccgatcaacaagagctagcgcttcaagaactcgaccctcacgacaaagactgttcatcagtgtgttgaaggtgacaacattgggtctacatccagtttcaaccatataatcaaagaaagctacggcctcagaaatcctacctgattttttgtttgaacattgggtctacatccagtttcaacattgggtctacatccagtttcgcctgattttttgtttttcttctcgatatctctcttttctttttttcacacttctcgatctctctaaccataaaggagtgtacattcaaacagtgtgagctctgagaccgagtgagcgtagtaaaacataatcagaaaactaccggttccattaattggtcggtacattgaccggttaagattaatctagccggaccgggactttaactctggttttgccatctaaataacgtttttttcttttcctataacatctacttaaattttgacattagttaagttggagctattgaagtcaatatcgttcttctttctaaattttagtgatttttttttaagataaattttagtgaaactaaataacctatttttctcctacggaacaaattattgggctctgtaacgagtttcgcttcatactaaaccgtacaagaatctgccaaatatatattcaattcttaatcaaatcttctaaatatagtattgttaaatataaaatatttagtgtataagtgggataataatttgaaccaacctattatattttctatgaataaaatttataaacggatggacatctataagatccgatagtattttgttccacccaacagtattttgttccatccgcttaatgcattaaacgtaaaatatgaaaataaactaaacaaatatgtcgtgagcaattacaagtctcttgtaaaccaacgtttggttcccaagactcaaatcaaacagtgacacacaatggtttcttctcttagtatgatgtgagatctaaccatatcatcgaacaaatcagtggcatcatcttaaattttgagataatgaaacccacttgtcaatttcaaactctctccttctaatgttccttggccctttgatgaaagtatacatgtcttgacggaaagaagatgaatcaatctcgtgctgatcaatcaggtagaagcagtagcagattccgatttcaaaaccctagccaacatttttgttgttgtttcgcctgtttttgtttttttgttctcttatcgatcttactctaactctaagcgagtgatgaccgatgatgaaggaatcccagaaaaccggtaattttaaatttgaatcataaaaccggttcgatctcaacgattccgaaaccggtttgattggtccagtggacttgtcacaacgtcgtaaacaaatactattttccttatccgaaccggttcgtaccaatttcctgatgaaatcaaatcaattacacaataatcaaattttggaagataaggaaaaaagaaaaggagcgtgcaaaaaaaagtcacagtcgcgagataaaatccgaagctagcgaaaagcttcgatttccagcgatcctagtgttggattctacgattttagggtttaaatcttgag

SEQ ID NO: 9880 - DNA, 3000 bp, Unknown
  misc_feature (1)..( 3000): cDNA_ID_3018798_gDNA_ID_1974096_Annot_ID_180710 3000 nt of promoter + ATG
tgattcataaaacataataacctgataaatgaagatttgtacatttatatcaacgtgaacgtctgtgttttcagtaatttcttaaatagtttttctttgctgattatttttttcgttactttcctaaaagatatgtcatctagttacactgtggtcatcgtgaacacacgcaaacattagattctgtagcctatagtctccggctctcagctcaaaaagggtcattttgacttttgcttaatatatataatttgactataaaaatgtagtgaaatactacaattctggacagtacttctaatgcattggacaaaaaacaaaaaaacaaaaaaacaaactaaatatacacctcattttgttacacatatgacatattaaccattagctagtacacaactaataaatctttcattataatatctaacgccgcagatgatgatgcattgttttatcgagactgaaaatataaataaattcttcacacaatagaaataaaaacaaaatattgaaaaagtaaaatgaaagagatgctcgcattaattgcacggaacagagtctactgttgataaaaaaaaaaaagagtgatcgaacagtccattttttggggtccagtttatttaatttagcattaataactttgtcagcgcgagccactctctatgattttgattccatcataaattataaaaccaaccaaaattcatatctaaattaattcctttaacccattcaataagctttgcttataattctgagacctgtataaattcgaattattgaaagtgcctaagaattcagagtcactttgaatgggacctctcacgtaatgcctgtatgttggatcttctgtcattgtcttatatatattgtctttttccatcataaaatagattgtctttttacgtatacgtacacaaacaatagatttccatttgaattcacatattacatatatatatatatatatacgtgtttaacttagattctattcagtagtttcggatttttagctatgttccatcaaccaaacattttgatttacggtagttagataaaattgacacacacacacacaaaaaaaaaacaagaaactgatcaaaatatgaaaatgtaagcacaatgtaactaaaattcgtttatacgtctaaaacaagcaatagatactaaaatacaacttgttcgttatcaaatgttttttttgcataagagatatatgcaactatttaattaactcaatctttttcactagaatgaattaaggatattgaaaaacagctaggtacgtagtcagggttgtttgacaaattgaattccgttaaaattattgaccacgtgtatggtcataaacaaattatgaattcatgattcgatcaatattacgacctactacatatgatatgatgttgtaattaaccacattctcttgctttttatctcattaaaatttatttattttaattcattattttataccaccactattttccacgttctatggatgatcatagtggagccacgcatgaacatggcaaaaatagaaatatgcacatggcaatatatatacactatctacgtatgtgtcaatcagggcaatccaactttgttgtggtataaactctaagctcgaacagatccgaagatattctttcgttctctgacctgattaatgatcacgaagctaaaattgattatcttttatttttgtttataaattattagttatccttaatctgaaatcattttaacaaaaattttactgaatttaatcataaaaataggcttatgtataagctaacacatattttccaatgtccattattatttaatggtggaattcgatgtttaacgatatgattcaagttataaaaaaaccgaattaagtatctatttgtttctataataaaattctgaaatccaacatctctaaactatatactgcattatataataaacagatcatatttatttgaatagagtagctaagattaggcatactagttcaaatgtttgatggacatccgatccagttagtccgggccttcaatatttgggctcaaatgggccgaaactatattgggtcgtatatgaaaagttgaaatatctccaaactgaattttggatgggaaaaagcgggaagtcgagagagtaccttatttctaattttctataacgagggtagggcccaccaagaccatatagcgtaaagcaaaatcaaaatcaaacaattaggaaaaaaacataattttctcttttttcgaaattcgaaccgtaattagccttttgtttttcttggaatctaaaagaaataaaagagaggaaaaaaaggaggaacagtgagcaaaatcgtgcgactgggaaaaatttcgaatttttttctcttccggcgagggattcaaacttccgcctccaatttctcgccgtgaatctgagttttttttttccgtagcatttcaataggagcagtcttcattctccgtcgtctacactatagagaggtttatctacaagcttcttcttctccttatggcgttttaggttcgtatcgttttttttttttttggccttcgtctctgtgttacaaaagcgttgttggcttcttagggtttttgactggatctgcgtgattttggtggaatatagagctgattttatgggttgatttggtcgacattgtggatatttgctaagcgagatgttgaaatgtttgaacaaacttcatcattgtttacaatttaaagcaaattttggctgtttatctctttaattggggaactagtcttatctgaaattgaaagcatttgataggtattttaccatatgaggatttggtgtagaatgatgaagtaaggtctttcatgatttaaccatggattaggaattaggaagtatatgtgaaaccaattaacattgatgctaactttgttgttggctaattggttcatttgctttagggtcttctcgctactataattctgggagtcgcgtaatctctgagttgaa

SEQ ID NO: 9881 - DNA, 3000 bp, Unknown
  misc_feature (1)..( 3000): cDNA_ID_3034550_gDNA_ID_1974096_Annot_ID_180708 3000 nt of promoter + ATG
ttttcaggtctttgagaatcggttttactagattgaagacgagagttttgaatgattggtgaatttgttgatcatcaatggagaagaagagatcaccaagaagtagtaagagtcctggacctgcaattttccctaaaagccctcttgtctacgagagttataagtctggttgtggttggaaattgataaagttcttcgatttcggtcatgtcaaatctggtaataagagacttggttcagagaagaagaaattcgtcagagattctgctggttagtagtttttaaaacactgtttcttggatcatttcgttacatgatcttagtgttaatttgattcttcttctttttttgtaggtaatgtttatactaaaagtcagcttgatttgcttaagaagcttcatgagaagtgtcagtgtaatgatgtaagttttttttgtagttttttggtttagcttaaggagagatttgtgagtgagaaactaaatctcttgatttgttcagcggattgtggaagaagagagatcatgtaagcctaaaacaaggagaagatctttgagttctgatagagaacttgagaagtatgaatctaaacctgttcagggattgctagagagagagataagaaggatcaagaatctaaaggatgaaacttgtgatgtcccggataaacaaaagcaatcttcgttgagtgaaattgagaatgatagtgataagcagatggatatgaagaatgggagagattgtaagaagagttcagagattaaccttcaagcttgtgtgaatgaagctgctgaaacctttatctgttcaaaggcagaagagaaggggaaagatcggtctaagcagttcatggaggcgttagatattctaagttcgaacaaagaattgttcattacactcttacaagatcctcattcattttcggcgaaaaaaagcttagacttggagggatctaaggtaaaagaaccgcgtgataaatctccatcaatggctgatgatttggatagcattgttctcttgaagcctagattatcaagctcggttgatgataaagtgtacttgagattcaaacatctagccaagaagttgaaacttgttgttggatctaacaaagacagcaatcacgcagaaaacaaacccgaaggtagcagtagaggtagagaaatcgaggctgctgcttttagaacaagtgatgtttctaccagtacagttggtcatagaagcccggagtcaccggtgtttaggcgcaagaaacgggttgaatccgatgttttcaagctaagtatcgagaacgatgttttgccaaggagattcatggtggaaaggcaacaggagagattaaattcttcaccggtttatgaagttccttatgcattgagtagtttgcagacaaagctcaaagaaagaagacagaagctagagaagaagagagagagcttcaagttgtggtctttggacaagaacttcgaggtttttgacccgaatccatacaattctaatctaaggtttctcgaaaacaattgtacaggtaaaagattacataacttttaacaaatcatcttcaagccaatgagactaaactgttaaaatgtgaaacaggttcttctgagtacaaaagtctgagaactcatgtagaagacggattcgtggaagatagatatcttgagagctcattagcggtaaatactgagagaaagagtagacatttgttatgtctctactgtctacgctgatttggtgttaatatatgctttataatcgttgcaggagacgaatttgagcctagaaagacaagactgcaacattcatgacccgaaacaggagcaggaacaaccgagtcctgtctctgttcttgaaaggattcatttggaagacgaaacagttatccccggaaatgttaaaatatctaaccttggtaaaagtccatgaatcaaagctttcactattatcatccttggatctgtttgatttacctgaaaaagtctgttactttcttgcagaagagaagattggattatcatttgatgatcctaacattgatcttatagaaaaagaatctgttcatgagtttgtgaagaaagttcttgaagcttcaagattgaattggactaatcttatggcaaggtgcaacgaagacacatcactactcgatgaattctcacacggtagtcacaacgaccagcttcttcttgttcttgattacaccgacgagattctccgcgagatttaccgtcaagacatcaagttttggcctttctcgccatcgaagagctcgagagtcctcaatctagaatcatcccttagagaagatgatctgattcacgagacgatgagacattttgactggagtttactctgctctgactctcctacaagatcattggatcagatcattgaaactgatctaataaagccatgtctttggttggattttggtggtgaatctgaaggtgttgtgtctgatattgtggaaaagattcagcaacaattggtgcttgagatctctcatgagctaagaacaatgcagagaagcatattatgtcgattaatctgaatctcttcggagatattcaactttttttttgtctgtataaaaaagtttataatttgagaatctactcttcatttttagttatctaaattaagaaagattcgatcttttgattctttcagccccgaacataggctggttcaagtaaaaagcttctaattcattgaaaaggttttgacttttgaccaattgagattttgtattggatttagggttttagcagcggccggaaattgtgggcaaaaagattcgaactttttttcattatcccaaatattaatgacaaaagatctcggctttctcgatttttgtgattcagacaatattcacaaaaccctagttgctgctcctgctctgtttttataagcctccacttcccgccaagcccctcttagccataaacagtgaaaaacccttttgttccttcaccaagctctaagaccctatcc

SEQ ID NO: 9882 - DNA, 3000 bp, Unknown
  misc_feature (1)..( 3000): cDNA_ID_3034554_gDNA_ID_1974096_Annot_ID_180706 3000 nt of promoter + ATG
atctttataaaattagtaacgtaaagacttgtattgttccatctacgtcttagtacgtgtatacacatgcacatttaatatgtgtgtgtatatatcaagaagttaatatctgaatatcaaggagtatataattatagagtagccgatcccaatacggcatgttccatttttctttctattttatgtgtttggtatttgctaccgggtctgtaatatctttacaaatgttatttttaataaggttatgcgtaaaataatctgaaatttacatgtgtttgttgttctcatattgattagtaataatactagctattgacatgtgatttgtcgtagttgagatggtgacattgattgctttaactcttaattttgttaattagtacaaatgatttttattgatgaatcaatccactctttttcgtctgtttcacttattccatgtttacccaaaccggaagtgttgctctgttcatccctttatcgccagtaacgaatctaactctttagtcaatatgacttagttattaaaatttgagattgcattcgtattattgtatagaaattggtggaacataaatatgattgtttgacttgtaacggtatgcgtgtggttgtccacttgtcttatgttattaataatcaaatccatctaacttttcaccaaagtttctctctgccgttcaatataatataattatgtcgatttggctacgcatattataatcctttattcgttatataacattaacatacgtgaacacagtagatgaattatacttaagagcttgagatagtgtaccaacaaattaaattgtatatcacgcacatacataacatttttcctcgttgacatatgaagtctaacatgcgtatgtatataaatattgttcgtatagacttttggagatcaaaagaatagataaactttcagtactaactggaaaaaaatttgtaaagttgcttggaacaccaggaaactgtccaagggtcttccaatactttcgtattgggataggatgatcagaaataactcgttgtttaatttggtacgaaaacaattgttctagaatgaaaagtaagtttatgtgattaactgagtatcaaactaagtggttcactaaggttctatttacatttccaaagatagtatatgtgattgtccaaaaattgtcaagggacactgataagcgtccaaaagatccaaaataagagtaaaaaaaaagagcttataagatgatatatttcatagtgagaacgataaagcgtagttgtatttgttaaaatatccagtgtgaagtgttacattataaatgatgaatgtctatcaagttttccatacattttttttcataagatcaagagaaaataaagagaattatatcttcttcttttttaaagaaaacacaattaagagataaataattaaatcatgtacattatagcatgtgtaggtcacgtgttatgaaaatgggctgaagaaagtgtagaagtgaggcccaagacgaagggaccacaaagggtgtattaaaccaactcaactgtacatggcggtggtcggtccacgttccaaattaaagtggccatgtggttttatcgtcttctatcaacgaccaaaatacggctctccaaataagagaaaaacaaatacaaaactacgttatactactaactgactttagtgcaaaaaaacttaatataacttaggctcttaatgatcatgtacatggcgggacagatttgtatgcatagcagataatataatatcaaaaatcatgaaattttggatgcaattccatctcttttacacccatttctctactagggcgttagaaagtctaacattagaagttggactttagttactcaatgccaattagaatctaaacttcggccaactatagataaaaccattagctttttacaaaatcaagaaataaaatcaacctcttatgtcagaaaaccaagagccatcaatctttttcttctataaacaattcaaataaaacgtttgtttggttctctgcaacaacatagcaaattagcaatcattaagcaattttgtctactcatcaaacaaaaatatttctctgtaacgaaaaaaagatagtgggctaatattatgggccatgagactgccttagaagcccatcctttcactacacactttgtaatatacattagaaaccctataaattaatactcgataaattaataaacacgataaattaataaattttgccggtcgaagtcgggccaatgtaaaaattaacgaaaatcgataagataataaaataataattttttgaaacccctatgtaaaaatatagtcccaataatatcataaattaataatcataaatcttaagcatacattctaagactaattttatatgaaacttttattcaagctacaattgcaactctttttagaatagagttggtatgatctcttttatactcacataattctttgcgtatttgatccgtcatatttggttttgtaacattttttctatgaaaaaccattgctaagatttttgtaaagaaaaattgatttaacctccacgttaacgtcgtagatatagagacactatatcttgcagaaaaataaatttaaaatatcaaaaataaaattaaagatctaacataattgaatatacaaataacaaaatatgagaaaaatactaaatcggaaaagcatttttaaaataatttagtattgtgttttacgttaatattctattaattactatttattaatttataaaataaattaatattattataaattaataaaaatttatagtccaatcattattaatttatagagtttctcctgtacatatcttttaatcgtttttagtacacactgcaccgttttatcggcgtctttgatttctttaaacgcatcgtttgtaacccaaaaatgaaaaaacccaactcttatcccctggaaaaaacctttcactgcttgctttctcagtctctctgtctccaatg

SEQ ID NO: 9883 - DNA, 3000 bp, Unknown
  misc_feature (1)..( 3000): cDNA_ID_3034569_gDNA_ID_1974096_Annot_ID_180698 3000 nt of promoter + ATG
ctaaaagatgtgataggttcatgagttactgtattagcaacataggactcctgtctttcatgtgaaaaacaatattttagctaactacgtaataaagataggttcagatttctacaatagaagttacaacatttcacatgactatttgataaactctatgaattttccgttcttgttagggacaaggaatcgaagatggttgagacgattgctagagatgtatcaaacaaactaaacactacaatctctaaggattttgaagatatggtgggtattgaagcacacttgcagaaaatgcagtctttgttacatttagataatgaagatgaagctatgatagttgggatttgtggtccttccggtattggtaagactaccattgcaagggctttacatagccgactctctagcagttttcagcttacttgttttatggagaatcttaagggaagctataatagtggtcttgatgagtatggattgaagttgtgtctgcaacaacagcttctttcaaagattttaaaccagaatgatttgaggatattccatttaggtgcgataccggaaaggctatgcgaccaaaatgttcttatcattcttgatggtgtggacgatctgcagcaacttgaggctttgactaatgaaactagttggtttggtcctggaagcaggattattgtaaccacggaagatcaagagcttttggagcaacatgatatcaacaatacataccatgtggatttcccaactataaaagaagctcgtaagatcttttgtagatctgcttttagacagagttctgcaccatatggttttgaaaagcttgtcgaaagagtgttaaaactttgcagtaaccttcccttgggtctccgtgtcatgggttcatcattacgcagaaagaaagaagatgactgggaaagtatattacataggcaagaaaatagccttgatagaaagatcgagggagtacttagagtcggatacgataatttacataagaacgatcaatttctttttctcctgattgcattcttcttcaactaccaagacaatgatcatgtgaaagcaatgcttggtgacagtaaattggatgtcagatacgggttgaaaaccctcgcatataaatctctcatacaaatatcaatcaaaggagatatagtgatgcataagttactacaacaagttggtaaagaagcggttcaaagacaagatcatgggaaacgccaaatcctaatagactctgatgagatttgtgatgtcctcgaaaatgattctgtaagttcatcttcgtttttttaaaaatctatctgtttaaccatgtcatttcgaaaatactctgcatatcttattaatggtgctaacatttacttttattttgaaatttgtttagggtaatagaaatgtgatgggtatatcttttgatatatccacactcttaaacgatgtgtatataagcgcagaagcttttaaaaggatccgtaatcttcgttttctcagcatttacaagacaagacttgatacaaatgttagactgcatctatccgaggacatggtttttccacctcaactaaggttattacattgggaggtatatccaggaaagagtcttcctcatacatttaggccggaatatcttgtggaacttaatttgcgagataaccagctcgagaagctttgggaaggaatccaggttggtatatatttttgttttgtccagatgaagtaattacttgtcaccatgagctgatgatctttactcctttttgtgctgttttgcattcagccccttacaaatctcaagaagatggaattgttacggtccagtaatttaaaggtactcccaaatctttcagatgctacaaatcttgaggtattgaatctggctctttgcgagagtttggtagagattcctccttccattggaaatcttcataagctagaaaagttgattatggatttctgtagaaagctaaaagttgttccgactcacttcaacttggcatctcttgaatcactcgggatgatgggatgctggcaattgaaaaacattccagatatttctacgaatatcacaacactcaaaatcacagacacaatgttagaagatttacctcaatcaattaggctctggtctggcctacaggttctcgatatatatggcagtgtcaatatatatcatgcccctgcagaaatatatctagagggaagaggtgcagatattaagaaaattccagattgcatcaaagatcttgatgggttaaaagagcttcatatatatggctgtccaaaaatcgtatcactgccagagctccctagctctcttaagagactaatagtagacacttgtgaatcactggagacactagtacatttcccttttgagtctgcaattgaagatctatatttctccaactgcttcaaattgggtcaagaagcacgtagggtcattactaagcaatctagggacgcatggctacctggaagaaatgtaccagctgagttccattaccgagctgttggaaattccttaaccatccctacagatacctacgaatgcaggatttgcgtcgtgatatctcctaaacagaagatggtagaattttttgacttgttgtgtcgtcaacgcaaaaatggtttctctactggccaaaaaagacttcagcttctccccaaggtccaagctgaacatctatttataggccactttactctttctgataaactggacagtggggtattgttggaatttagcacctcatccaaggacatcgacattattgaatgcggtatccagatctttcacggacactaccgatagattagaagcagaagaagctaaatatagttggtgctaagctggtttagtatcaattaaaacgttaataattggtgctaggctggtttagtatcaattaaaccattaatcactttatactttatcccctccagctctctctttctcaaaacttataagtcaaaagtcaaagtcaaaagtcaatg

SEQ ID NO: 9884 - DNA, 3000 bp, Unknown
  misc_feature (1)..( 3000): cDNA_ID_3034562_gDNA_ID_1974096_Annot_ID_180701 3000 nt of promoter + ATG
tcgttttgttaaggaagtctgaggggtccatttctaagatttttcttatccaataacaatctccgatttatgttcttcctaattagaccatggttctgtggattacgtcgagtagtatcggttgtgggtggaggcgatatttttttgcaaatgtcagaccaccatgcttctcttagccaactatgccggacgcttatttttcagagttcttccaggatttgtaatcattcggaggtgaccgtccgtcgtgtggaacggtctgaacataccatcaccagtacatgtgcttgcgaagccatattcgagtttgagaacattttgagatacatgatcgttagattccactagtaggaagtagattagatgaattagaattgaggttttagaataatttttaaaaaatgtgaaggaagcaaaactgagtttttggtatctgatttgagaaatgcttaagtttgatttgtaggctacatatatataacattctcttcacatatttgtggtctaatagtttcaaaattctaataactgctgattaattttggtaaagtttgatcaggtttggttacggaaaatgtttatttcttcaaattatagtatctcaaatgaagctttttaaacatacgtgcccacatgaacaaggcaagtgaacttggtctctttctaaccacatttacacattattaatttattatatatccaaatattatagctaaagggttcataaagctggtggtaatggattttttctgataagttcgaatcttaaagtagatttatataatctgacttttattgttctatattgtctttggtatgccttttacttggaagaaatctcacatacacttcttgttcatttgttcatccagctttgatgcacgtgaaatctggtgtcatgttattatctcaacaaataactataatttatctgcgaagttaaacttttaattagaggataatagcgaattttctcacttcataattagtctttgcaaaattgtcttcctttttaagacttgttaggaaaatactaaatctatgagtgcaaagttggttggttacacgtgtcaaaagcatgagttcggaagtggggttgatgacctaactcattgaacttatgattttcttaataatccaagttatgattttcataaaaatttatattttcttaaacggacaataatgtgtttttaacttttaacgacgtgactcttttgttttcatttcagaaaacgacttaaatctaattcccaaagctcaagttcatgttcctaatataactaagaactaaataatttgtgttctgtttataaaaaatattgtgatttagtaaaagtagacttttaatgtactttctaatcgaaggtcaagatttccttagaaagatttcattttattaaatatcgacaacaaagatgacatgtttaggattaaattggtgtcttagacctaatctatgactcttgtattggaactagatgttgatgccgacaaaaagaagacgaatgaaataggtgttgatgatgatatttaatttcaaggcctaaacttttttcagcttattaatctcgtaagaaattatatggatttttatcgatatgattaaagtattaaaccagattattattagctacagatattttttaaaaatatactttcccaaaggtaggtgaaatgcttatcaatctcaataaaaaaaataaaagcaacatgacgaatgtatccttaaacttggccataaacctcatcattttctactttttttttttttttttttttttttatctttttacatttttaactctttagatttaattcttctaactcccaacaatctccttaccaaaatttcctccttaaaattcaagttttttggaacgttcaaaatagtactataagtttgtttttattagattttagtgagctcaatcggtgacagctaaacattattgcacaattaaatcacaataactctctgcctgtcttccttttttgtgtaaatgcttcaataataattttcccctttttggaaccaagaatcagtcaattgcattgattcttttttaaccaagtaagctaccaaagtttgtagtattattcaaagatgaaaccaaaaactactgtaattattggtcacattatgtgactcacatagatatttcaccaaagctgaaaaagtcgctttattattgggtatggggtagagaaaagtaaataagacccaaatataaagtcaagccaccgtgcaaaacaaattgaaattgcgttgtgacatgttcttataaatttctgaattatcttattacttagtttagccccacacttaatgtgcacacgagaaacctaaaactaaaagagatagattcgattctcccacacgtgcgcttctgctgtgtcacctttctctttgaaaggaatgatcgtcattttcttttgcttaaattatcttcaatttttttttccttaaaatatcttcttccactaatcttcgttagttatgcacacaaaattctgaaatattttgacaaacaatttgtcatttttttttttaaagagaaaatagtcgttataaattaatattttaaacaaaataatgatatcttaataaataaattagagaaagaaaacagggaaaaaaacaaattagtcaaaattttcgcaagtgcaatggacaaaattacccctaaagatcgtataatttacaaagaactttgtctttgccgtgttttgaccttaaaccttgacacacacatacacacgaacacacatatacatatacatgtatatatgtatttttctggaagagaaacaataacattcccagaaatttcggggttacgtgtcgctttatttgtaaaacgatttttcagattttgattgttaaagaagctttctgtgtattatttttgatttttactagagaaaaactcgaatgctctgttttgttctctcgagaaaattctcagactcagagaaaagtaaaaacagagaagaaag

SEQ ID NO: 9885 - DNA, 3000 bp, Unknown
  misc_feature (1)..( 3000): cDNA_ID_2186372_gDNA_ID_1974096_Annot_ID_180703 3000 nt of promoter + ATG
aagaaataaagggccacggttaggtatacgtacttaagtcggaaaattcaacatttgttaattgcagagtctctatgaagctttatgttataatatatgtttacttataattgtatggtttctacatactcaagagttgcatgagttcacacttgcttttaaaaagaaatacttctgctaataaaacagtaatctaatacatgagttcatatattaatatatacaccactataaatgagtataggccttgtcattatcattattatttatcattgtcaatgtcattatacttgttaattcttatagtataatattagttatgtcccctggctcgaggtcaaaatgaaagaaaaggcaaaggtcaacggtacgaagcaaggaaccaccgaattcaaaggctctctaatttaacatgctcgtctataaacacgtgaagatgacattgacatgcaagcaatgatattattatacattcaaattaacattaccggaaacagaaataaactagatgtcccaattcgtatacattgatcgttttatgaatagattatataaattaagggcaaaaacatccaatttgaatgtcgttgatgcgttacacatcttactcttaatcaaaatcgtactattttttttttatgatctaactatttatttttataatatcatattttaacagctaatgatttacattaattaagtttgtgtgtgattattccattacgcattgtgcctacggatacgctcttgaaacatcaaaaatctaacattaatttgatgcgacgtaaaaacacaaactaatcaatgtttcgatatttaaacgcttcatttttctcataactaccaataaatagaatgacgaatacatgtaatggttaaatacttaatttaggtctggagcaaatatttttgaaattatattattcgaacagaatcatatctcacaaaaatatactttgatattgcatgttcacctaatataatcttcataaatctgttggttcataaactaatatgtgtataatacacgtaccttatatatgataatatgaaaaaatcatgggatgttgatttattttatacattatggtttttgtgctttacactgataaaaatcataacaacgcgtttcacaaaagcctaacgtgacatcattatctccaatctgaccgttaagatcaattagctgacgtgttataacacatcattgtcctcttgtcatatacttttttttttctattttcacaagccacccaatgatttggaagtgttttcatattctaatcttctgagaaaaaaatcattataaaagtcagcaactaaaacttagcataaatcaagataacaattctcaaattacaaaacaattcataacttatcccataaatcaagattatttttttcctcaaatttctcttcttgatcaaatcatgcaattagaaagaagaagaaacatgacacttttgtttaggttcgaatcaatcaaagtatggtatttttttccactcaaacacctaatgaattggaagtatttcatattcttcccatatttgagaatattactataaagtaccaaaattcaacaaaattagcatagaatagatcaagcaaattaatctcaaaatgtttactaatcttttatcgttttagatcaatcatagacgacaactaagaaacaaaaaaaaaagatactactcattagcttaattagtccaatgatcaagactcaaaatttcaaaacttttttcaattatggtaaacaaaatatatacacaaaaaaaatcagaacaaaatcggagttctgtcttttcattttttttttttacaagttctgtctttttcaaggtaataaaaaagttataaaaaatcgaaataattaattaaggatgatgttttaattatcggttataatcaaaattagttactactagtacaaagattaacgcaccaaaggagaagaaatctgaagaagtgaatgctttcttcaaacgcgctctctctttctctctctctctctctatctccagttcttattctctctctctttctatctctaccaaatttctgagaacctcttcgtcttcttcgttatctcttcccttcttctgtgtcactaactcacttcactgttagtggaagaagctcttaccatattcacacttgtaagcaacgattttagggatctgaaacgctttcactgtttctgttttggattcttcgattgcttttgagctttcgatttgattccatttcaagctgctgaatctggtaatttttccaagaaattaggtttcgattaagctttccctcactatcaattttctccatgaaattggaaaacttgcttcgggtggtgttttgttgtcttgtgttaatcctccaattttgtgtgtgtagatttgagcaattggttgttctacttagggttttcgttttgttgttgtttctggggtttctggaatttttctgtgtagatccgtttgtgaggtgggaattttgagttactgtttggaaatggatcttgtgtagcttaggttgaagatgatcacattgatttttgaaactagctcaaactaatctgaagatgatacttttttattatcatcactcaagatgctattttttttattatctcttgggtgttctatcattttagaatttgctgaaaaaattgggcttctgtgaattctggtgaattttgtatctgtctgtatcttcaatttcacacggaatcatagttgttgtaaaccctaacgctgggttttgttgttgtaatcagatctttcaggttcttcttggtattgtggtcaaaacaccaatgggataataataaaatggtgtttatattgggacttttcttcgtttgttgacctatgttgggtcaaccaagtatgatctctgaagtggtcaaaaggagagttactttgtaatgttgaacaagagcttttaaaagagtgatagtgtgagtgagtgtgcctcttggtttgtgggaagaagatc

SEQ ID NO: 9886 - DNA, 3000 bp, Unknown; identical to SEQ ID NO: 9504
  misc_feature (1)..( 3000): cDNA_ID_3034573_gDNA_ID_1974096_Annot_ID_180697 3000 nt of promoter + ATG

SEQ ID NO: 9887 - DNA, 3000 bp, Unknown
  misc_feature (1)..( 3000): cDNA_ID_3045665_gDNA_ID_2096290_Annot_ID_195331 3000 nt of promoter + ATG
atgtaattaaaacgacgtcgtatcatagttaaccctacgagaggaagtacattagtttggagaagagtaatagacagagagatagagagaaagagaagcagttcggagaaacaatggcggtagaagacactcccaaatctgttgtaacggaagaagctaagcctaattcaatagagaatccgattgatcgataccatgaggaaggtgatgatgccgaagaaggagagatcgccggaggagaaggagacggaaacgttgacgaatcgagcaaatccggtgttcctgaatcgcatcctctggaacattcatggactttctggttcgataatcctgctgtgaaatcgaaacaaacctcttggggaagttccttgcgacccgtgtttacgttttcaactgttgaggaattttggaggttaggtttttgattttattttatttccgactcaatatctggtttgttcaattattctgcatctgggttttgttataggtttcgatttgttgaggaaagttatgttctttattgggggattagaagatcccattgaagtcattatatgtttttgatgaattgctatgtttggtgtttgaattcgtagctaaagcttatgttagggtttagctttgatattctgttcacttgtttgtgaagtaaagtagaagagcaaagtttgtgagagaaagagaccaactttgaaatctttcttagtggttttctaggtatcagaatttgagcaaacactttcgtgatgactgagggttgatgttgtatagttcttgctcttcccaatgagattcataggtttgtgtattgttctttcgacttcttattttaaaagacattttggtttgcagtttgtacaacaacatgaagcatccgagcaagttagctcacggagctgacttctactgtttcaaacacatcattgaacctaagtgggaggatcctatttgtgctaatggaggaaaatggactatgactttccctaaggagaagtctgataagagctggctctacactgtacggtttctattcttcttttattttgactcgtaactcctgcgtcatcatccaattgaatctcaccggtttttctttttacatgcttggtttagttgcttgcattgattggagagcagtttgatcatggagatgaaatatgtggagcagttgtcaacattagaggaaagcaagaaaggatatctatttggactaaaaatgcttcaaacgaagctgctcaggtaaatagaaaagacctttctcatcaaaactcatcaaacagtctctctgtgtaaaaataagactttaattctcgtctgcatcaaatgttgcaggtgagcattggaaaacaatggaaggagtttctcgattacaacaacagcataggtttcatcatccatgtaagaagaaagcttctcataattctaattcaaaagtcttcattttcttcagatctctcattgtttggtttggtttctttttttttcaggaggatgcgaagaagctcgacaggaatgcaaagaacgcttacaccgcttgaaacctctcaaatctttgcattgtttcaattacagttttgtatgtgagagatctctatttatctaaacatgacttgacagtctgtctttgctagtgttgattgttcacgaagctctaacatttcatttagtaatatattagtatggttcttcataatatttacgttggtgcccttgtataaaaccaccggagtgagcgcaagctttacagacaaacagtgcttctgtctacccaaggcgggccttaaaagcctgaatagtgtatatgtttacttgacaagagcccatgtacactcatgagcgattgactttaaccggttttagagaaaagtacttttacattgtcacatttacatcctttataattaaccttttaatttaggttttaaagatccacctcagcatttattttaatggaatgattatttagcagtgtgaaccgattaactcggtttttgacggtgaccggtttagaggaaatgggagtgtcggtaggagatctaagtagcgagtatgtaaattgtccaactgtctgaaaaggaccacttgggacgacaagattcttcggctaataataatacatcactcgtttcaacaaataaaattttcctttctattattatgcaatcttatagcatatggatttgatcttttttaatatataaacaaaaggttttccaattatgctaaaccataatctgaaattgattttaaatagctacaatcaactacccaaaagcttcaaatatgcaaaataataaagtataggtttatatatataaacgcacacaaaagaggttgaataaaaataaacataaggatgcatgtgcagtccagattagatctaaatctattgagtattgtaataatattgttatgaagatcttgctgcgaaactacacacatttaattccaacatgttttgtttatagaaattgaataaaatcaaacgcgccttcatcttcaagttaaaaatcaaatcttaattagtgaagacaaagaagaagaagacattattttaagtgagttctctctctgtcacactcacaaagctttatactttctggctactgcaagctcatcactgaaaagagcttaaaccagagagatctgataagagaaattttagagtctctctgcttcaacaagatctacatcgaccaggttcaatatttttctctactgttagttcgtgttctagctctgtttcaacgagatccgattctgtgttttcgatttcagtgctaaagttacggtctttgaatctttctatgttaggattagtcttttgaatccataaactctagatttcaattgttaaaggctaggttttgattagtttgaattagctagatccttttttaacagatcttgatgtttaagctcaaagttgtgtcgttatactgagaatcaagtttgtgatttgttgggaatggtttcaggagattagaaagaatcatg

SEQ ID NO: 9888 - DNA, 3000 bp, Unknown
  misc_feature (1)..( 3000): cDNA_ID_3593585_gDNA_ID_2096290_Annot_ID_195337 3000 nt of promoter + ATG
aatattccgaacaaacaaagtccttgaaggatgttcaccataaggatgttcgccagcaatcgatcccactccattttggaaaatgttttgaggcataacattgtcaacgttagaatcagcaaaacccattcttgagaagcccttgtttagactgtcatatggatcagtctccaattcaagacctcctccgctaccgaataaatcataatcttccaagtcatccaacgtagctggcaaggaacttaagtttaaatcatccattagaccagagaaaagctcttcctcatcatcaggaagcatgtttccgattggatgtgagtcaccatcatcaagcatattgccaatgcctccactaaaatggtctaagccagaagccatttcatcaacagactgatggtagctgtcacgagggttgactgcaagagttaaagattataacatcatccaacatatgacgatataaagacgaattaggcaactcaatgtacatactgttttggtgttgaataagaggaagagagcttgaaaagagagaagcatcacttgaagcatggaaatgatcagatcttgagaaggttccacttgggatattcatagtgaaagctctgaactttgattaattctgcttcttcgctacaacgacgaaaaggggactcttttaaaccctgatggaggcaagtgattgaaagatgactccaattgaaacagagaaatatgattttctaaaccaagatggatacaattttaaaaaacagaggattgcaaattccattagcaataataatcaaacaaatccttaatgattcaatctctataaaccctgaactttgattccactgagtttataaaccctaatcaaaaccttattggggtaaatcatcatcatcaagacagaaacgatcacagcagaggaaagagggaactaaaggaaacagaacaagaaccctattttcaatatcgaagaagctaaactgtgatcatccaactgtttttgattaaaaaagaaaccaactttattctacttcacccttttgttgtatttagcaggatcactaacacaaactcattgccgctagagccaaaggaacacacaagtatcaattagtttaaaaatcgaaactttagcaggaagaacaaaaaaaaaaaacttacctagaagaaattgttttttgtttgtttctcccacgaatacagaagaaacactttcttatatatgtgtgtattatatatacacattgataaagaagagagaaattaaataagtttttgattattcctgaaattagatattcttttgaaagcattattaaaagagagaatctttaattggatggagaagagaagagtaatgatcggaacaacggcgaatgattgagtaacaaaggaccaagtggctcgacattttttactcctttttctattttttcccattaaattcaactatatttaaacttcttttggaatccgaaaaatatatctgtttaattgtttttagttgataatacttagtcaactaaaacatttgacaaaacaaaaaaaatcagtttggcccgaattttttaattttgtgtttagataatcattgattaaacatgttccatttatttagggcatcattttttctatttttctaaataaatgtaaatttgaaacctaagtgaatttggagactccaatgaacctctataaataaagaagagatcgattgttttagagccaaaacagacataatttaatcaacaaggcttttaattatggagggcacatcaacatggattctaaactatgaatctaagactcacatcgtcgatcacaaaaattcaggatccttctcaataagtatccaaggaattgagcggattcttatccggagtcctagcggtcgtgaaactttggctcaacaaaaatcgctaggaaagaagaatgcaacagtaagaatcgcatccgagatcccacctgttttcctcaccggagaagaaatatgcagtatatttgtggctaacgtgttgtccaagtcaaagatcaacaagtggattcagcaaagtattgttcctaaaatctgcgaagacctgattgatataagacgccaccttgaagaagaagaaaaagatggtttcttggttgaagttgaagttgttctagaaacgttgtatagtgattggttaagagtcaatgattatgactctcaaggttgtctaataccaatagaagaagagtgcataatatgtctagaagagttagcatcatcaggtagtgagaggaggatcatgaagttgctttgttctcacagttttcataaagattgtattctcccctggctacgctgcaagcgatcatgtcctacttgtcgtgacgacatccacaatcgtcgagcagaagaagaccaccatgaatgatattttgtaaaaagaaattaagaaacaaaaaaagaaaaaggaagaaagaaacaattcaagcgtttctcgtttctggattgataatatgcaagatgtttggtgctagattctgagttaagagttttgatttcctttgttgtgtgcttccttagtcgtcattgttttgacttgtttctcttgtagtgttgttatttgctctccatatttcttggcttagtttccgaggatatctttgtcatccttcgacttagtttccgggatcatgtattgatcgtcggctttttgtatttcacctaatatctcatcaatgaaaattaatcttccagtgaaaaaaaaaaaacgaaaaattttcttaattgaagaaaaaagtgtattttccttttagtttaataaattagattgttttcttaagagcatacaatttctttagttgaaggaaaaaacgaaaaggccgtgaaagaaatcttattgggccacaacgtgagcccatttagtaatgtaatatcagaaaccctagtgtacgcttataaaagacattttaggtttgttcagctgttttacggagtcgcttttgagatatcgatcttacgaagaagcaaatatg

SEQ ID NO: 9889 - DNA, 3000 bp, Unknown
  misc_feature (1)..( 3000): cDNA_ID_2178042_gDNA_ID_2096290_Annot_ID_195341 3000 nt of promoter + ATG
catgctttgatcccaaaatatcggagagaatggaacttttggtcactgctactcagaattgcaacaacaacgaggaacagaatataggtaaggcttgtttcttgaattctacaaataggtcggtcatctttttgttttaaatttgttctgatgatgcttttgattactataggtttggattcttctactagggatgttgtaacaaatgaaccccaagacctgctagttgaagacagttccaaaaatgcgtcgaatatggatacaatattttcacctgttcttgatgatgaactgtattctgaaactgaccgaggtatattctcttactctttcatttttttatttaagctgtctttttgattgagaatcgagtaatctaagaatggttttccttagtatttgtggaagggaacaatgtgcaatgggaaatgcctaggtggggagctgatgactgcagcaacaatcagttttgcaacgattctgattactttctatctgatgtgctgattgcaagcttgccattctatgagagtggaaatgttgattttttcactgagataagtcccttgcctcattgtatctttccagagccaagtgtgttactagatgcagctgagcagtacatgttattaccttacttagaagatagatcagccagcagtgatgatgttaagtctgatgaggataacaggattaatcggtcaagatcaaaaaacttggaagcagcagagaatcacactgaagctgaacaaactgaagattttgatccacagattttcttaagaaatcaaccagaattagctgatgtggtattcaattatgtcccggatatgcagcagcctagggactctccgaaaaggaaggcggtaacctttgtcttgatttggatggtatgatatgaaccacttggttaagttttgcctccatggtacaaccacacttactaatcatctttaaatgacattgcagaaactctggtccattcgactctggaagtctgtagagatacagacttttccttcagagtcactttcaatatgcaagagaacactgtttacgtgaaacaaagaccatacctttataggttcttagagagggtggttgaactttttcatgttgtcatcttcacggctagtcacagcatctatgcgtctcagcttctagatatattggatccagatgggaagtttgtatcgcaacgtttttaccgggattcatgcattctttcagatggtatttataccaaggatttaaccgttttgggtcttgatctagcaaaagtggctatagttgacaactgtccacaggtattttctaaaggattcacttcactacctttgtttcattaatttttgcttttaccttagtctcagtgatagacaccacaagcaaatcgaatttcaaagaacgatagttacagtgcagaatttgtagtttagttgagtattacatggaccctcattgttcttgtttcaggtgtacagattgcaaataaacaatgggatccctattaaaagttggtatgatgatccaactgatgatggtctgattacattacttcccttcttagagacattggctgatgccaacgatgttcgtcctgtcattgccaagagattcggtaacaaggaataagaaatctcttccttttgtttccactatatcttgattgcagattctgggtttctttaacagatttagtcatagactagtttagttcctcaagacttcttaggtgctatttaattagtgaaccatagaataatgctcggtgatattagtacacaagtaaagcgtaacccttgttttagccaggataatagatcattgaaatcttaagtgttctaaatgtacagttggtgaagctgagatactgaatgtataaaagtgagtaactattgagtgaaatatcagttttggaggttaacaacagccattatctccttgtggtaaattcaaactgttggttagatctttgtactactgcattgtcagtaatataaatgaagagaggttcaatctggaaccttctttttcgtgaatttatcgaattttctagcttctgtggtctttcataaaggaggaatatcgtatatgggcgcccggatctggtggttctgtggtattataataagctatttaatctataactctcagtaaaagtttcatgattctgttggcatggtccttattgtgcagatcattcaacaagaagttcttttgattaggcgtaaggaagtgacctgactattgttcttctctgtgttaacttgactcttaaggttttgtctaaggtcttaagctccctgacaaacttgccaatatgtacatctttacaatgttaacttgttttcattaacatttgatagtcatatattcttgttactagttaataaacctgtcagaagaatcatattttctaacattggttcttatgaaccaagaaagtcattgatttcttacataacatcagtcgtttagatgctttggagattgcttttggtaactctcgactaaacatagtttcaaatttggctcaaaagaaactttgtttttttttcagaagtatgaggacattatcaaagttgaaagttttgaccaaaatatgttgaaattttgaaggtctattaaatttgagaaagacattagccatttcttcaatagattcagagtaacaaaaaaatacttattccatggaacttttttattcacaaaaataaagcaatttaagaaaagggaaaaaaaatgaaagtgaatcggtggtggtcaccgaacaagctgtacgtgtgggagagaatgcaaacagagtagcaaaaaaaaagcattgaaggaagcaaaacaaaacatgaaaagaagaatcttgaggtaaaaacgaatcccaaatatcaaaaaggaaactttttttacttctttctttctcttgctgcaaatgatacagaatcagcttcttcttcttcttcttctggtcgaaactcactccacactttcccctaagctatg

SEQ ID NO: 9890 - DNA, 3000 bp, Unknown
  misc_feature (1)..( 3000): cDNA_ID_2105872_gDNA_ID_2096290_Annot_ID_195344 3000 nt of promoter + ATG
ctcctgttcctcctccctctgcctatgggttcggtggaggcgctgtctcaagtaataacttccctttgaatcccacaagtgctgcaaactcctacgaagatgtcttgagctcacagtttaatgagagcaaccacttggcatcatctcttcagcagcaggtaaaccatgaaattcttctcaggttttataatcatgttggtgtgttttggttctgtttggtttccttcctctgtttagtcagctggaatttatactggagtattcgattttatttatttttgttcgattttggatgggtttggctcagttttgaactgttggattttaagaaaatcggtgcagtttggtttctgttatttgtgcgttctctttttcgcaaaccttaacgagtagctttctttgttttgctttgatctacagaacgaaaaaacaacagcatggcatcaaggacaacaagccaactcgcgagtggttccaggaagcggatattacagctaccctggtcatcagaatcagcagcctcccggtttccgtcaagcccaacaactgcaacatcagcagcagtcgtctcaacaacaacaacaacaacaacattatggaggacatgggtatgtgagtccttaccattcacaagctgtaatgtcactagaacatcttcatcaccaataccaacaacagcaaaacgctagagacgcgtcgaaactgtcccaacaatagttatgggccaaccactactgatgaaaagcaatccattcaaatccttctttcccccttattttcatctctcattccagagcagcgatgggatgattccgttgtttgaaaatggcgttgtgttgtgtgtgtgtttaaggttcagggtagggtcttatgagagggttttgtgagagaaccttcaatgggttaacttgtttacttgctaaccttcttatattactaaaaagaactctatttttctttcttgtctgtttcttatcattttactttttaactatttagtcttgacattctatatcagaccaaacttcatagtaaagattattaagcttagcatgtcctgactaacctgcgtcatattaaatagtatggaaagagaagaaaaatttgaaaacagagaaattcaattactatttacacattttgacggtgtgattatgctaatttatctactattaaataagttgtgtataatgaagaaagctaatcaaatcatgtgttctttgtttggtactagtctactacacaatatttaattggatagtatagttaatagagagatgtgtacttatctaactctggaaaaccacgtcatgtgagatttgttaacaaaacgacacattttgccgttttatttgttttcagctccaaaaattcaagtcatctctgtgtttaaaaattttaatatgagagagacgctgtacctttttgtcaaacatagttgacactttaattcggtcgaagtgtttactggaattcaaacttacaacttcgacccctccattttaaaattacggttcccaatggtgacgaaaccgcacgttgcagtacaattttaatactccctccatttttatttagttgatgttttaggagaatacacatgcataaaaaaattatttaacttttatctattttaaaactaaaatatcatctattatttaatcaaccagtagaaaaataatctgcaaaaaaaaatcattaaaatcaataaaaatacaaataattttccattgaaaatttaaaacatcattcctttaaaaacaaaaataaaagtttaaaacatcattacggaaagagtagtaacaaaattttctgaaattgctagaattttagggccacaatcaattgcttctttttattttgctcagttacaatataataatacaatgaaaactacatcgcatttgatatgtagttaaaccgtatatctccattcggaacttatttatctgatctataatgtcaattagatttattattcggaacacaattcatataaatgttagttttagataaaattttagagaaaatatgaaaggagccaaactcaatcttagacttaataaagagtatttttccacaaatagttacaagaaaaccaattcaattattagcagcatgtgtaatgtgtgcaatctagtaatctgaaatagaataacaaaatcggtctggatatattattattgaagaagatgccatattattaattattataaaaaaaagatgccatattaattttaaaaaatagcatgttatataggttcttatagtatcatatgtaaatgtttcttgttttttgtgcaaaccgcatcaaatcattattaaatgaatatcagtatataacctttgatttctctctaaaaaatgttaatagccacaagaaaaacttaagaaagcgccatttctgcttcttcttacttcaatcctttgcgagagagagagagagagagagataaagtttcttcctttttcccacgtttcacgttcctcctcttacctctttctccttcgcttcaatcccttcaagtttcagtctttagatcaaaccaaaaaaaaaaaacgatctttttccgataattcagttaacttcaatcggaaaaccatttccagttttccggcgagatggccaacgaaggaagtgaccctttacttcaatacatgattagcccgagattgaaaaaacctccacagctgctgtttccattaccagaagacaacgaagttgcgattccgatgccgatgacaccgtcggagttcaaagagcgtttaatcttcggacccttttcatgttcgccgcgagattcgtctcacttcatcgattccatgaaacaaccgtcaccgtcgtcttcttcaaccgccgttaataatcctttctccgattcctcaaccctagatcctctgcttccaccaccaccaccacaaccagagccatggttgtccgatcaaacttcgagtcactgtcaaggccacgctcttcaccgatccaaaacagcaccagca

SEQ ID NO: 9891 - DNA, 3000 bp, Unknown
  misc_feature (1)..( 3000): cDNA_ID_2178054_gDNA_ID_2096290_Annot_ID_195345 3000 nt of promoter + ATG
atgtgtttactagaaagtagaaataaatttcataataatatctttatatgttaggcacaaatccccaaaaataggtcagacatttcaactgcagacagatacagttatgtatacgtgtaattgtaagctaatgtttttttttcacttacaggttacaaattacatagaggtccacggtctaactttgggtaatttaaatgtggggcttatggataagacaacgcaaacgattaggcaccaattacggcgtttagtttctgcctaaattaaaactataaatgtgtattaatatatatcttagtatgcattaatgtggttaggtacgagaaacagattcatataccaccattatggcattattatagtatgcaatagaagattgaatatatatttgacttcgaagattgaattttttttggtttagagattattctattactcatatggaatctgataagagttgctgtttctctttcccaaattaaagtatgtatacgccttgatgttcttggtcaaatgtgaatggttaatgtctcttttggttcaaagagaattattcggtcttcttaattatttcgaccaaagattactagattggtattgattttctcgaaaacgtttttcatcgtagtttgttttgaccaaaaagcgttaaaaacatggaaattattatgcccttctttcattgatcaaatttttatataccaaagccatagtattttgattcattccaatattttatactgagtatcactgagacactgactatatatatgtatgtattctcgcgctatccgtaatatgctaggtaatatagcagtgattattaaacgcattaagatcatcatacgtaattcacgataatttgtaatccaaaaacttaggtgtgaccaaaaaaaaaaaaagagttgaatccttcacctaccaaaaaaatggattgtgaccaaaagaccatgacatatcaaatttttagtgattaaaccgatttcttccaagatgctagtatttgtttttatcttgccatattttagtgatttttcatagtagtaaatatatcactttgaccacatttaaagttgatgtatgtccccttcgcatttgtcatgtcggttaggcattatatgtctccttttttcctgatcatatgctcctatcaatttctacaaactcatgaaaacgattactagctatataaatcaagcatagggttcataacatgcaactttaattccccacaattatcgcaaataaaattgtatataaagggtttatcgtaattatcataatgttaacattttcataatatagatacttttggtttgaccatcttttccttaatataagttaataaattaagatgctcttttacttgcaaacagaaagttctaatgtgaaaaagaaattgttattgcgtaatcatgatctcacttatccgtcagcataagtaacgatccactccacatagctacgtcacttaaagtcccatagtaactaattttctttgaatgttatagcaaattattagcaatgtatgattctttgggtcaaatcttacactaaaaacatgaaaataatttgaatatcaagagattcatatattcatattttataaccaaaatatgtagggtctaaattattgcttcttgactaggaattacctatgaataattattaaggttcgtgaaacagtgagggaaaaagaagaagaagaagagaagacagtctctagcacgtgccaggtcatgtgtcggcgacggtcaaatgccggtgcaagtgtttccacgtggcagcctaatactcccaaaatataatcttttgttttcgtaaacttttttccctttgaatctttgactgcctcttactgcattcttcacaccaaacgaccggccggtgactgagtgtttccggtttccggtaacacatagttttcgctgactaagactccttcaataacgtcgtcttcttccacgcgccgtttagtcgtagcgcgtgttatcaagcccgtccactatatatgccacgtatagagtggggaagaaaatgaaggtgagaacttttcatgtcctactttttggccccataaaaaaggcagcacacaaaaataacccaaaatttatgcatgtttatcaaatgtggaaaaataaaagtagaattttaggaaatttatacgaagatacaatgcaaagactcgaagaaatgtatttagtggtatagaaatacttgcaagtaagcatattctgaattaaaaatatagaagcttaagtatgtttcctcactagaagccagttttgcagctctatttttgtcaacttagctttacgtaaagttcttattgcccgaaaccaaaaagtcattcaaaaggcataacatgatatcacaaataaaattatcatctacttctatatcttatttcttgaatatatatatatatatatatacctatctattaagttgcttatcgttcacattattaatttataattaactttatgtacatttgactgataaacattaaaaagacttatttgaacctttttgtatatgaattcaaaattatactgataaaataacgtgaggaagaaatattatgaaagcttttaacatataaattaatttgcataggaaaaaattacacaacttaaattgagattagttaagaaacaagaaaaaacaaagttgatagaaaaataaaagtattaacacgactttggattcacacacgtaccattgaattatatctcaatacacttttacttaattaacttatttccaaaccaagtagccaaaatcatattattcttctctctcttccttttttgagtttcaaaatgcataaatacgagaacgagagacgaagaccaaattaaagtccaagcaccaatctagacctcttaggaaaaaaacctaaaaacctaatccccaaacctaaaaggcttatctcatctcttcttctttgtcttctttactctttttttacctctctcttcattgttcttcacc

SEQ ID NO: 9892 - DNA, 3000 bp, Unknown
  misc_feature (1)..( 3000): cDNA_ID_3090853_gDNA_ID_2096290_Annot_ID_195340 3000 nt of promoter + ATG
caattcttccaaaaacgacataagagactaatctggaatcaaactcaacctaatctggaatcgaatgaatattgttcatgagagaactcaggcaagctaaaatcatcattttcatgtaatatcttcatagatagagactaatgtcagatgtttaattcaaccaccatattgcatcctaaagctacaaactttaagatacagctaccaataaaaacttaaaggaacaaaacccagagattgatctactaaaatcctaaaactctgtgaaatcaaatgagaaaaagggtttaccttgacggtgattctacggtcactctggggtctgatgaacttagcagacctcttcttcacaaccttcttggtaagcaatgggaccgccatatttgcttcttcgtaagatcgatatctcaaaagcgactccgtaaaacagctgaacaaacctaaaatgtcttttataagcgtacactagggtttctgatattacattactaaatgggctcacgttgtggcccaataagatttctttcacggccttttcgttttttccttcaactaaagaaattgtatgctcttaagaaaacaatctaatttattaaactaaaaggaaaatacacttttttcttcaattaagaaaatttttcgttttttttttttcactggaagattaattttcattgatgagatattaggtgaaatacaaaaagccgacgatcaatacatgatcccggaaactaagtcgaaggatgacaaagatatcctcggaaactaagccaagaaatatggagagcaaataacaacactacaagagaaacaagtcaaaacaatgacgactaaggaagcacacaacaaaggaaatcaaaactcttaactcagaatctagcaccaaacatcttgcatattatcaatccagaaacgagaaacgcttgaattgtttctttcttcctttttctttttttgtttcttaatttctttttacaaaatatcattcatggtggtcttcttctgctcgacgattgtggatgtcgtcacgacaagtaggacatgatcgcttgcagcgtagccaggggagaatacaatctttatgaaaactgtgagaacaaagcaacttcatgatcctcctctcactacctgatgatgctaactcttctagacatattatgcactcttcttctattggtattagacaaccttgagagtcataatcattgactcttaaccaatcactatacaacgtttctagaacaacttcaacttcaaccaagaaaccatctttttcttcttcttcaaggtggcgtcttatatcaatcaggtcttcgcagattttaggaacaatactttgctgaatccacttgttgatctttgacttggacaacacgttagccacaaatatactgcatatttcttctccggtgaggaaaacaggtgggatctcggatgcgattcttactgttgcattcttctttcctagcgatttttgttgagccaaagtttcacgaccgctaggactccggataagaatccgctcaattccttggatacttattgagaaggatcctgaatttttgtgatcgacgatgtgagtcttagattcatagtttagaatccatgttgatgtgccctccataattaaaagccttgttgattaaattatgtctgttttggctctaaaacaatcgatctcttctttatttatagaggttcattggagtctccaaattcacttaggtttcaaatttacatttatttagaaaaatagaaaaaatgatgccctaaataaatggaacatgtttaatcaatgattatctaaacacaaaattaaaaaattcgggccaaactgattttttttgttttgtcaaatgttttagttgactaagtattatcaactaaaaacaattaaacagatatatttttcggattccaaaagaagtttaaatatagttgaatttaatgggaaaaaatagaaaaaggagtaaaaaatgtcgagccacttggtcctttgttactcaatcattcgccgttgttccgatcattactcttctcttctccatccaattaaagattctctcttttaataatgctttcaaaagaatatctaatttcaggaataatcaaaaacttatttaatttctctcttctttatcaatgtgtatatataatacacacatatataagaaagtgtttcttctgtattcgtgggagaaacaaacaaaaaacaatttcttctaggtaagttttttttttttgttcttcctgctaaagtttcgatttttaaactaattgatacttgtgtgttcctttggctctagcggcaatgagtttgtgttagtgatcctgctaaatacaacaaaagggtgaagtagaataaagttggtttcttttttaatcaaaaacagttggatgatcacagtttagcttcttcgatattgaaaatagggttcttgttctgtttcctttagttccctctttcctctgctgtgatcgtttctgtcttgatgatgatgatttaccccaataaggttttgattagggtttataaactcagtggaatcaaagttcagggtttatagagattgaatcattaaggatttgtttgattattattgctaatggaatttgcaatcctctgttttttaaaattgtatccatcttggtttagaaaatcatatttctctgtttcaattggagtcatctttcaatcacttgcctccatcagggtttaaaagagtccccttttcgtcgttgtagcgaagaagcagaattaatcaaagttcagagctttcactatgaatatcccaagtggaaccttctcaagatctgatcatttccatgcttcaagtgatgcttctctcttttcaagctctcttcctcttattcaacaccaaaacagtatgtacattgagttgcctaattcgtctttatatcgtcatatgttggatgatgttataatctttaactcttgcagtcaaccctcgtgacagctaccatcagtctgttgatgaa

SEQ ID NO: 9893 - DNA, 3000 bp, Unknown
  misc_feature (1)..( 3000): cDNA_ID_2178023_gDNA_ID_2096290_Annot_ID_195333 3000 nt of promoter + ATG
taactgtcagaatttgtttattgtgcatcactactcactagtaacttagtaagtagtaactaattgtgcagaatatactcaaaaaagttattctcgacaccaggagagactataaatatagagtttggtttttgtttacatttctatgctatatattctttagattttataagaaataagattatttgattcgctgcaaaaacataattgcatggcttgtctatatgccgtcaaaccaagaatctcgaatgttagttatacacgtttcaaatatatatttgatatgagttattcgagaatatatttataatgatagtacatacgtaattcgaaaagaataagtttaagtttgctttagttgtcaaccattctttataccaaaaataaataaattgtcaaccattctttataccaaaaataaataaattgtcaaccattcttaatctaacttctcagtgcgtgtgatttttttttaagcagatgtaagaaagaaaaaggttgtcgacgttaatcatggctcatgcaatgaatcaaataaacttattttatatttatcaacatattttatatacgggagatttttcaaatctatcgacttttttgtttagcaacgagcgcttaatgatggtcgatagatcaaagtttgtcgctagttgacgttttcttttgtagtaaagaactgatcaacagtttttttttttctttttttttttgtaaagtttagaagtgactgcctgactggtattgacgacacaagtgataattgataaatgatgagtttggatcgtatgaattgacttgtatggtaatattgcataacgcgtcatcgtttctcccattattctataaagattagaatcaaaatctctttttaatttcttttcaacttttaaaaaattaacattaatatttacttttgaaaagaaagtaaacttacaaaacatgtccaaagaacagagaaaatttgaatccataattgatgtacattctttttatgaaaagatatgtaagacttacatagagtatatataatttaaattgtaaaaagaaatttaaaggaaatggaaaacaaggttaatgcatactttgcttcatctttttttattaatcacttttatcaaaaatatataaattaatcactatattctttgggttttcttttccttgacactgtcatgaacatttatgcgctatacatgtaatcatttcacatcaaattgtcactgattaagttcactcgaatataattgtcactgattacgtaatcattggtgaatgatgatgcccaaggaagcaaacttgtctcttatctggtgtttatatttgtttgaagttatctcataacaacaactcgatgccagaaaattttatgccacaacaacaactaaaattatagcttgaatctatcaatgggcggtgaactatccgtatggcccgtgctggggagatatatacctaagtaagtgttgtttgattataagaattatttctctttgatatatatcgtacaccacatgatttatattactcatttcctttcattatgcacatcttatacaattttcacacattaaaaactataaattcatcttataattaacatttatgatatgcaatttcattttatttcattaactaagaaagcaaaaattaaacagaaaagtttggaacttaatttttaaaatatacattgaaaaatattttttgttaaagtatataacaacatttattatgaaaaatggagtaatacttagagaacacttataagttatcaactatacacatatataccatcttttccaaaagcaagttttcacacaaatttgcggatataaagatgtttgattctccactaaggattatccttaatccatatgactaaattatttttaatatgattcttgttaactctaaaccaatcaattaatatgccgacaaaaaaaaagaccaatcaatattatattatacgtgtactttttaggcttttagcttcccatcttaataacaaaagtagaacatttacaccaaaaacaaaacaaaactagaacataataagtgaatacaaaattaagcaaataaagagtgtaacagttatattattatttagtttgctatctgaacaaaacatttaattagtcacatatctttggtggagccgaacggaataaactatggtcaaagtttggggggaattcggaatttccgaatcgataaatattattggaatatatattggaaaggtcgcttgaagactacattatgttcttatattattacatgcttttctacattaaaatgtatctagtattttgttccggctaatctcctaaagtaaaatatactttttgttttggtcaatttacttaatgcctaattgatcagaatttattattccggcggtttgtatttcattgatgtgttacgtgtactagttaatactgattttctcttattttatccattcaaatatgagatgatatatattgttaaaaaaacaataactaacgtttaatttcttaaaagctctaacaacatcataagtcataacgcaaacgtcaaagagaataattaaaaatagttatcaactatctaactctatattaaggaagagagacgatcacgaaaagtaagtaagtgacttgtatatatataagtgagatctaaaaaatccataacggtatttggaatttcaccagttttgttctcctctctcttcgttgcctcacttctgtatctccctcttttggtccttctagaaactctcttaagattctcataattttacagtctggattttattttgttaccaatttgttttttttcaagaacgcgtatcaaattttgatatctcttgctacgcaataaccttcccttatatataaagccttctctatttttatttccatctccttccttatagatcccgtgaaagtttttatattacctaacttttttttccctaggataactatgaaaaaagaggaggaaagaaaagaaaga

SEQ ID NO: 9894 - DNA, 3000 bp, Unknown
  misc_feature (1)..( 3000): cDNA_ID_2179036_gDNA_ID_2096291_Annot_ID_195358 3000 nt of promoter + ATG
ttgctttctagatgatccttctagaagatagatcgggccaactcgaacaatctttctagttacttcgttctttatttctatttaacggaatccttaggaaaagtatttggtttctaccgagctaaaacaatataatatgtcgatgtctttagtaaaccaaagttctcgtttaatagctattttgcttcaatttttctataccaaacaatgaatagaactgaagatttagttacgattagaaagacacttttctagctttatccatggatcctcttgttatacttattgaattgtaaatagtcatccaattcaaaaattatgtttcggaatttcataatccaaatttacaattgattagagtctttggatataaattacgagaatctataatcttccttgaatctttcattgaaagggaaaggactaaatccttttaagaaataaaatttttgatcggaagattaatcaaaccgagagaccctttaactattaaagggattaaaggaacgaatcacacttttaccactaaactatacccgctacaatgcaattattgcatataaattaaccttttgtcgaacaaagtaatcgggggtgtaataaaaaaatctgaaaaaatttagaaaaaactagagttgacttaagaaaattagtaaaagcgaattcaattccacttttttttttatttcaaatctttttttatctaaaaatccatcggatgagtctttttaattttaacaaaaaaaggcccggctggggactgaccaggccaggctattaaaataaaaaagatcttttacttgtgtttttgttttgacgagacaaaataaaaaaaggattctctatttctatgattatggttttatttatttcttttttgagttcgcgccttttttatctaatctttagctaaatttttaatgtaactagaattgctgagaaagttctataaaaacagttatataatagtaatatatatattatataatatatattatatatatattatatatataatagaggatttatataatttatatataggatatatattatatatatattatatatttaaatataggatatatatatttatataatcaaataatcaaaaagaatatatatatatataataatataataaaatatagaaaaaaatatagaaaatgaaaaaaaatatatatatatataatataaagataaagaatatctataacaaaaaaagaaagctttttaagaataaagtggagaaggttctttttcaagcctttttttttttttatggaacctaattaaatatcccttttcgattaggagagatggctgagtggactaaagcgttggattgctaatccattgtacgagttaatcgtaccgagggttcgaatccctctctttccccttctccttttgatggtgtgtaatagataaaatcctaataaaattcgagcatttccacgaattaaataaagcaataaaaaaactttcttttttattcttcacgtcccggattacgtcctggatcattagataggaatccaaatatgaagagagaaacaaagaatataactacagtgtatacaaaaagtttgagagtaagcattacacaatctccaagatcttactaaaaaaaaagagaatagattctctatttttatatcaaatatctaattttgataccaataaaaaaaaaggtttcagaaagttatttgtaattaagataatagtcgaatctttcatattcaaacagatttgcataccaacatctagatatttttttggtgaacttgaatctaattaggttctttcatttagggaaaagaggataaaatttaggaaatagaaatgatccagatttagtatggctaccaaaaaaattaaatgtttgaattgagagttcgttcatacgtcaagattttttggatcttttgaattgttggaaaaatcaaaatcgtgaatttgtttaagacagtattaagaattttatcgaaaacttacagcggcttgccaaacaaaggctaagagaagaaagaaaagaggtattacgggcataacatctacgattggattcaaaaaggcgtaggcctctggcaatttggcgactaaaaaagtgcttgaaaaaagggtagaattaaaaaaaatacagatcaaattaaatatattaagcataacaaaaattggtgttcttgtggataatttaattttgattgagtttttaatatattttttatataaggaaaaaataaagaaagatagtctaaaaagactttgttgaacttactcaatcaaaaatccttttattctcttatgagaatgaaagaaataatattttcatacaatatcttaattgaattctatgtaatgatcaataaagtaagttttatttgctatctacacgtgttaaaactttagcaccaatgtaatctatatttcattttgaattgacgaacaaccaataggaatattactcttttagtagtcttgaataaaaagcgaaatggggcgtagccaagcggtaaggcaacgggttttggtcccgctattcggaggttcgaatccttccgtcccagagtacagtcattacagaatcaatcttctattgcctttgtacaccatctttctctttctgtttaaaaatccaaattttttaagaataaaatattgaaatgaaaagaagaataaacttaatttttcattatttcaaccgaattcaaaaaaaatctatttgcttttttaatttgtgtgatgcgggtaagtaaggtagaaccgcagattctaagagttttaataaaaaaatctatatttatttatttatatataaatatagatttctattcaaactaatatggaattcattttcattctgaccgaacctttacgcgtaaataaactattccattcatagagaaagaaaaggtatagattattatatactgactgaactatgactattcatgattccatcattgaatcaattacacaaactagaggaatgttatg

SEQ ID NO: 9895 - DNA, 3000 bp, Unknown
  misc_feature (1)..( 3000): cDNA_ID_2179108_gDNA_ID_2096291_Annot_ID_195374 3000 nt of promoter + ATG
tatccattgctttacttagctcacctctgtattccaattctcccttagaaaacataaaattgaaccacgatttttccatagagcttctggcctctatttaaatgaaaatacaataacaatagatgaatagtcattcaatgaaaaaattgaaaaatgcaaaatttttttgaatagttcattttctattcagagtaagcaaaacatatcgatgcaattgctaagattattaagtaaagtaattgaaatgaatcaattttaattctaaatgaaaagaaggattttcttatattgtgtaaaattctcataaaaaaaaaagaaatatttgttcttcgcttatgaatataagaatattaagaacttttttagtaaaatctcgtatactaatataaaaaaaaactttttttattccaatacggaatgaaaagaaaaggacaacatgcaggatggggtagaagaagcggggatacttggttcaagccctgacacgaaagaatataacactcctaagaattaagaatccatgtttcgtataggatttcttgtggacacaacactacaataacaaaattgtagttgtgtttaatcttcttttttttattgaagagttttttttctatctaaatttaagtatgtatctatcaaaaaaaatagtatatacaacagataacctcggctcaatcttttttagtaaaaaaaagattgagccgagtgcaattaaactaataaaacaaacgtgaattactaaatctaattcatctactcttggccatctaatttatcgatggttgggaagttaaatgtgatctctttccatacttcacaagcagcagctagttcaggactccatttgcaagcttcacggataatttcattaccctcgactgcaagatcacgtccctcattacgagcttgtacacatgcttccagagctactcggttggctacggcacccggtgcatttccccaagggtggcctaaagttcctccaccgaattgtagtacagaatcatctccaaagatctcggtcaaagcaggcatatgccaaacgtgaataccccctgaagccacaggcagaacaccaggtagtgagacccaatcttgagtgaaaaagataccgcggcttcgatctttttcaacataatcatcgcgcagtaaatcaacaaagcccaaagttgactccctgtctccttcaagtttacctactactgtacccgcgtgaatatgatctccaccagatagacgtaaagctttagctagtacacggaagtgcataccatgattcttctgtctatcaataacagcgtgcattgcacggtggatgtgaagaagtaggccattatctcggcaataatgagacaaactagtatttgcggtgaatccccctgttaagtagtcatgcattacgataggaactcccaattctctggcaaatacagctcttttgatcatttcttcgcatgtacccgcagtagcattcaaataatgccctttgatttcacctgtttcagcctgtgatttataaatagcttcggcacaaaataagaaacggtctctccaacgcataaatggttgggagttcacattctcatcatctttggtaaaatcaagtccaccacgtagacattcataaactgctctaccatagtttttcgcggataaccccaattttggtttaatagtacatcctaataggggacgtccatacttgttcaatttatctctttcaacttggataccatgaggtggtccttggaaagttttagtataagcaggagggattcgcagatcctctagacgtagagcagccagggctttgaacccaaatacattacccacaatcgaggtaaacatgttagtaaccgaaccttcttcaaaaaggtctaagggataagctacatacgcaataaattgagtttcttctcctggaacgggctcgatgtggtagcatcgtcctttgtaacgatcaaggctggtaagcccatcggtccacacagttgtccatgtaccagtagaagattcagcagctaccgcagcccctgcttcttcaggtggaactccaggttgaggagttactcggaatgctgccaagatatcagtatccttggtttcatattcaggagtatagtaagtcaatttatactctttaacaccagctttgaacccaacacttgctttagtctctgtttgtggtgacataagtccctccctacaagtcatgaatttagaattcttgcaataaaacaaaacaacaaggtctactcgacataaattaggaatagatttaattaacctttttcacaggaatctttcacaaaattatcaactaatcagaattattctttattagaccatgatatttgattcgccaaatacatcattattgtatattctttcatatgtatagcgcaacctaatacttctttttcaagttttgaatctttgactttttataaatccaaatatttaatattaaaattaaaatattaataaaatcactcttgacagtaatatctgttgtatatgtaaatcctagatatgacaatatgcggaattcatccatgaaaatgaaaaacaagggggggttgctaaagggatgaataaatgggacgcataaccggatatgctaaaatgaaaatacgaaaaaaaaggctaatgagatcgaaataatgaatcataactaaagttccgtttcgaattcgctagataaaacaaaggcttgcctattcctattatgataaaaaaataaaagactttccgcaaaaaatttttttattcatatattttttattttaaaactaggtttcagttagttgagcttgaaaatgactattccttcattgaatgaataaaaaattgaattccacatccgcttgggtgggaccaacgaaatcgagtgcttactcccactttttattgaattaaccgattaatttgctatcgaagattttttctgtattcgaaaaaattcgtaacaaaatttaacatattttttttattatg

SEQ ID NO: 9896 - DNA, 3000 bp, Unknown
  misc_feature (1)..( 3000): cDNA_ID_3034635_gDNA_ID_2096291_Annot_ID_195388 3000 nt of promoter + ATG
tttcccccgcttaatggatactcatttgttatcattgggggttttctaaaaaatggagttgattggatttgcaccaatgtaaaccataagtttcagacacaatagagtatatgaacgatctatattttgtaaataatgaatcgagttcgtccattctattttattcataggtactgatccgtgatatttcaaaaagaatttcctttttatgtctcagtctatgatctaaacgagtcgcacatacacccgagtacatgttcctcgtcgctgagggcatccccgaagcgctggggatttcgtgacgtttcggattggctgtcttgtatttctaataagttgtttaatggttggcatacggaatcatataaataatgggctggtttagattagttctaaccggctaattctgaattacttctcttcaagattctcttcaatatttttttatttttatattgaagagaatattaaactaaacctttaatctaaaaagatataaaattctaaattgtagatttgcatgaaatcgctcctattttttattgaaccgctacaagatcaacaattccatgagcttgggcttctgttgctgacataaaaacatcccgttccatgtcttcggatataacccatataggtttgcccgttctttgtacataaacccttgtgatggtttcgcgaagtttaagtaattcttccgcttccaagataaattctcccgtttgtgcctcataaaacgaactagcgggttgatggatcattaccctgatgatataatagaaaaggtttttctatttcgcagaatgagacgggataacaaaaaaaaaaaaatagataaatttgaataaccgtacaggctttttttgtgcattgcatacggctccacaatggaattgacttttttgacctttccttaaatcatccaattaccatccttcttttttttgtaggagttaaaaaaatactatgatggttccgttgctttatatatcattgttttgattcgtcgatgattcagcaatcccaaagtgtctttttttttttttacggtgtgaaaacaaagtttgtgacgctgaaatgtgcccgaataggtaagatatcatttgaaaaacctcttccttatctcatactactctttcaatatataatcgaatttttttttaatctaaaaaatttcatattgaattcgaagtgccatgctattattacttaactaattcatatttcaaatggcgaaggcatagtatttttttctcgaaaataaaaaaactcattggcgccaagcgtgagggaatgctatacgtttggtaattgctcctccgactaggataaaggatgctattgaagcggccaatcccatgcatattgtctgtacatcgggtcgcacaaattgcatagtatcataaatagccattccagatattacccatccaccaggagagtttataaacaaataaagatctttggtatccttttctatactgagatatatcataagactaataagttgattcgagatttcggtatcaacctcttggcctaaaaaaaataatctttctcgataaagtcggttgattaggataattttttattccttaggagccgtacaggcaccttttggtgcatacggttcaataaaaattgtgaaaaaatcaatgtgttgattccaacctacccttttttcatagagggtttttctttctaacttataacggaagggcttgccccaaaagtaaaagaaattttgagttttggcgccttttattagatattaaaatcctctaaaaaaatgattgattcattgatatttttttttttcatcgagattcagttgaaatggcgatggttttttcttgttcctgaacgggcttcttcctttttttattccattttttaggtttatgctctaccccgagtaaaaggaaaaatttgcccgattttgatttgcacatataggacaaatgaaccaaataccgcgtctttttttactactccttcttttttttcaattcagttctttcacttgtcttctgtcaaatagtcaacaaattttgaattatattatatattatttgtatttgatttgagcaacagttttagatcgccctgtttcaattttttttatagagtttttatcataattttgcatataatagaagtagtaattataaaaatattatatattaattatcaattgggtttttgctaaacggagcctggatacttcattttattagtccgatcacgtaaaccataaaaaaattttgataatctaatatcaatctaaatactccctgcatttaattccactttattttttgcgcttcgcgttacaaatttttgataattcaatcaatctttttgagcgaaacagaggatatctcgatcgagggagaaaatggggaaatcccatatagcccgatatatctgacaagtcgcactatatgtcaacccaagatgtatctccttctccaggacttcgaaaaggtacttttggaacgccaataggcatgaaatgaaaaaaaaagagaatgaagttctctatttcactttgatgtggaaacgtaaaattggggtttcgttttttaatactattatccttttttcctactttattaatcatatttaaattaatgatatttaatacataagttgaataagctaaaataaaatataaaataaaagtaaagtaagagagaatgaataaaactaaaggaaattttttacgaacgggcttctgaatgatcaacaacaatagctatcttggttcatagaaaataggattaacccccattgcatattggtacttatcggatatagaatagatccgcttccctttttttctatgaattgaattgttccattattactaacagaatagaacaaatattaatcctttctccgaaataattacctaaaaagggggggtacgtagcatagttttttccaatgcaataaagttacatagtgtctatttttcgttgataaaggggtatttcc

SEQ ID NO: 9897 - DNA, 3000 bp, Unknown
  misc_feature (1)..( 3000): cDNA_ID_2179156_gDNA_ID_2096291_Annot_ID_195387 3000 nt of promoter + ATG
actatccatagggtcaattctaacaagtcacacactcatattccggaaatatacaatgcagaaaaaaatttcgcggtcgaactaccaaaggagaataggctaaaattgttagacctgcatactttacttttttgtatcgagctaaaagctagaacttcaagattcttctcagtctaattcactgaaattccatccagtagaacagaagaattataaatctccaaaataatagataggaataccgcaaatagagccattgcaacacccatcaaaggggtcgttccccatccgggagctactttaccatattcggaattcaatggtttcaataacttccctacagtagtgcttcttggaccagatctagaactatcttcaacagtttgtgtagccataaatcttattttgtattcattacgatctgttgactttgtataccattccgttgtaaataaatgatcttagcatagatccggtgtggtctttcaattctataataatggaaacagcaaccctagtcgccatctttatatctgggttacttgtaagttttactgggtatgctctatatactgcctttgggcaaccctctcaacaactaagagatccattcgaggaacacggggactagttaacgtaatcagcctccaaatatttggaggctgattacgttaatgaagataatgaaaaattatttcattttttagttgaaattttaggtggttcccgaaaaaaaatagcgaaaaaaattatccctaaagtggatactaagagaaatgtataaaccaatgcttccataaatttgatcgtggtttacaattatagctttcatacctgttttgtttacgttttgtttacttgggaggataaagaaagaaaaagagtcaaagaaacggcagcgatttaaataaagattcctacagtaccctacctattaaataaaataacaaacagaaactagaagaaaaaaagcaatgttgcatcagactgcttgtcgttttgtagttggatctccaagtttttggaatgccccgaattccacttgagcatccaaatctggatcaataccagcaaaaacatctctgaagagggttctagcaccatgccaaatgtgtccaaagaagaaaagtagagcaaacgaagcatgtccaaacgtaaaccaacctcttgggctgctacgaaaaacaccatcagatttcaaagtcgcacgatctaattcaaaaatctcacccaattgagcccgtctagcatattttttcacagttgcgggatcactataactcactccattgagttcaccaccataaaactcaacagttacacctacttgttcgacactatattttgattctgcccttctaaacgggacgtcagctctaacaattccgtctccgtctaccaaaactaccggaaaagtttcaaaaaaagtaggcatgcggcgtacaaaaagttcacgcccttctttatttctaaagacggggtggcctaaccatccaacagctattccatccccattgtccattgaacccgctcggaataaccccccttttgctggattattaccaatataatcataaaaagctaatttttcaggaattttcgcccaagcttctgataaactttgattttcagccagtccagcactaactcttcgatatatttcttgttgaaagtatccctgatcccattgataacgagtaggaccaaataattcgatgggagtagttgcagaaccataccacatagttccagcaacaacaaaagctgcaaaaaagacagcagcaatactactggaaaggacggtttcaatattgcccatacgtaatcctttgtatagacgttgaggcggacgaacactaagatggaataggcccgctaatatacccaacgtccctgctgcaatatgatgagaggctattcctcccggaacaaaagggtcaaaaccctccacgccccacgccgggtttacgggttgtacctttccggttagtccataagggtcggatacccatattccaggaccatataatcctgttacatgaaatgcgccaaaaccgaagcaagccactcctgaaagaaataaatgaattccaaaaatcttgggcaaatccaaagaaggttttcctgtacgttcatcacaaaaaatttctagatcccaatatacccaatgccaaatagctgccaagaagcacaaaccagaaaacactatatgtgctccggctaccccttcgtaactccaaagacccggattcgttatagtcccccctgtaatattccaaccgccccaagaattggttattcctaaacgagtcatgaaaggtataacgaacataccttgtctccacattggatcaagaacggggtcggagggatcaaaaactgctaattcatatagagccatcgaaccagcccaaccagcaactagagcagtatgcattatatgaacagcaagtaaacgaccgggatcattcaatacaacagtatgaacacgataccaaggcaaacccatggaaatacccctttatcaacgaaaaatagacactatgtaactttattgcattggaaaaaactatgctacgtaccccccctttttaggtaattatttcggagaaaggattaatatttgttctattctgttagtaataatggaacaattcaattcatagaaaaaaagggaagcggatctattctatatccgataagtaccaatatgcaatgggggttaatcctattttctatgaaccaagatagctattgttgttgatcattcagaagcccgttcgtaaaaaatttcctttagttttattcattctctcttactttacttttattttatattttattttagcttattcaacttatgtattaaatatcattaatttaaatatgattaataaagtaggaaaaaaggataatagtattaaaaaacgaaaccccaattttacgtttccacatcaaagtgaaatagagaacttcattctctttttttttcatttcatg

SEQ ID NO: 9898 - DNA, 3000 bp, Unknown
  misc_feature (1)..( 3000): cDNA_ID_3034595_gDNA_ID_2096291_Annot_ID_195417 3000 nt of promoter + ATG
tttcttctgactctttttcaaattcgataaatgttggttgatcgtatctttcattatagttctatgattcagagtatcatttcctattagatccctttgaattccatattcgaagttgcgatcaggtctcttcattaaaaagaatcgattcaatacatttcttatgtacccatagggactatattggaattggatttgaatcatatttcggatcaatctatattgattgactgcctccattatgttgttgctagcaaataccactcttttttgatcttccaaataattcccgcaggagatccggacccaaatttttctgagccttcgataaaaagattcattttcttcataaaaaataggaggtagaaccaataaagatttcttttttgattcatccctgaagttgaaaacctccttcaagaattgtctttgatccaatccgtaggaatcaatagaaaaggcaaatcccttatgatacaccagatccggctcggttattgatagagtgaatagatctgccatttcttgaaatctctcttctgactcgtggcgtaacgtgtatccccccctcttccgttcatggaatagatgaaataaatcaaaaaatggatttttgttcaagaatgaaatcttattggaactgtccatatccagttcatccttcggaaccatatcacatcccagatctgatgaaataggatgaattgagacggtattttgtaaatacgtaattatcttgaatatattaactatttctttattttccgatcgcctggaagggacaaaagaaacatcttgttctttcttcaacaatttctgatccctagtggacctctcagtaggattcgaacccagatgaagttctgaccatctgtcagagaaaaaagaacgaatggctcttgtaggattcccaagaaattcttcgctttcttccggaagcagatgattattcattcgcttctcacgttccgtgaatagccggggcattgaggaatagccagaaaggtatttagggaatcggtctgattctatctctcttccttccgtttgaataaaggaaggatccaaaagaatcgatctttcttttagttgttgaatctctctttgattgatcaatgtgtgatagtgatattccgaatcctcattactaatggaatcgaaaggatctatgaattgatcagaagatccgttcaattggctagaatccgttacttgaacgaaactagatcttgtagaatcatattgaatatttgacgatacgtttcgtaccttgctaaaaaatctatccttgtttaccaaccacacattgtctaaccaaatccaattctctctcgatattttcctaaaaaaatccgattcgtgcggattcttcccccaactaacgaagagatcttggtggaattgccacatatgaaattgagcacaattttgcaaagaaatagcccacttgtttctcgagaagagatgggaaacatgctcaatatcatttgattgaatagttgacccagctccttgttgtttgcagaaaccctccacttcaattggtattttttcacgaaaagcaaacatgagataacaaatccagtctttcactaagatttcgaatagctgtcccgaattcaagttgattatgtttcgcctcttactcggagaaagacgatcaaacaattcccaatcatggcccttgcggatcggatcatccatataatatacaaaaagaaactccagatatttgatatctttctctttaaatgagatatcaattccagcgacggtttcattagatatcttacaacaaaaacccctcttttttccgatccagttcctccaccaccgcgaactccagttagattcaggcatgatacacttttgagttattgggagaacccaagtactctctttcggatcccggaaacagctctcagagatcttttttccttttgtaagatacaggagcgaaacaatcaacctattgatattgcaagacccaaaagattcttccgatgtatcatttctgggtccaatggaattcataggtataggaagaagccctttcaaatagagatttttgctttcgaccatatttcgattgttaatacgatatagaagggccgctactacaaatagtactacacccttgatcgtgaaatatcgattgcttgttgaaccctgtgaattgcgcaaaagtaggatactaaaaatccgagggtccaagagttttctaaaacgttcttggtggaaaaaaatatgaatgaaagatcccactgaattgaattgggtccatgaatctaagaaatagtgagcattcttgatctctctcactatttctctcaattcgaaaatccaggatttgaattgatgtcctttcattgattcctcctaaattgcattgatttatcctaaagatttcatttcaattggaatttggttattcaccatgtacgaggatccccactaagcatccatggctgaatggttaaagcgcccaactcataattggcgaattcgtaggttcaattcctactggatgcacgccaatcggaccctccaataagtctattggaattggctctgtatcaatggaatcttctcatcatctatacataacgaattggtgtggtatattcatatcataacatatgaacagtaagaactagcattcttattgagactagaactcatagggaagaaaatcgatttatggatggaatcaaatatgcagtatttacagacaaaagtattcggttattggggaaaaatcaatatacttttaatgtcgaatcaggatcaactaggacagaaataaagcattgggtcgaactcttctttggtgtcaaggtaatagctatgaatagtcatcgactccccggaaaggttaaaagaatgggacctattctgggacatacaatgcattacagacgtatgatcattacgcttcaaccgggttattctattccacctcttagaaagaaaagaacttaaatcaaaatacttaatagc

SEQ ID NO: 9899 - DNA, 3000 bp, Unknown
  misc_feature (1)..( 3000): cDNA_ID_3034602_gDNA_ID_2096291_Annot_ID_195415 3000 nt of promoter + ATG
gaaaagaaaagaactgtcttttctgtatacttatgtatactttccccggttccgttgctactgcgggctttacgcaattgatcggatcatctagatatcccttcaacacaacataggtcgtcgaaaggatctcggagacccgccaaagcacgaaagccagaatctttcagaaaatgaattcctattcgaagagtgcataaccgcatggataagctcacactaacccgtcaatttgggatccaattcgggattttccttgagggatattggtaaggaattggaatgtaataatatcgattcataatggattcatatcgatacagaagaaaaggttctctatcgattcaacaagtgctgtacttatgggaaagcgatagagaaagagaaaaaaaaaaacgaagatttcacatagtgatttttttttttttttttgatcaaaaataaatctgattgaatttatttcgtaccccttcgctcaatgagaaaatgggtcagattctataggatcaaacttatgggacttaagaatgatggaagggaataaaatcaaaaaagaaatcaaataaagaaaagagagagaaaataaagaaaaaataagtaaatcaaaatgaagtagaagaacccagattccaaatgaacaaattcaaacttgaaaaagtctctttctgattctcgaagaatgaggggcaaagagattgattgagaaagatctcttgttcttattataagatcgtgtgattggacccgcagatgtttggtaaaaagaataatcttatcctttgagaataatcaaaaatagaaagtgttcagttggaacatgaaaacgtgaccgagtttgtcctagttactcttcgggacggagtggaagaagggaggagattcgcgaacgaggaaagggacccaatgacttcgaaagaattgaacgaggagccgtatgaggtgaaaatctcatgtacggttctgtagagtggcagtaagggtgacttatctgtcaacttttccactatcacccccaaaaaaccaaactctgctttacgtaaagttgccagagtacgattaacctcgggatttgaaatcactgcttatatacctggtattggccataatttacaagaacattctgtagtcttagtaagagggggaagggttaaggatttacccggtgtgagatatcacattgttcgaggaaccctagatgctgtcggagtaaaggatcgtcaacaagggcgttctagtgcgttgtagattcttatccaagacttgtatcatttgatgatgccatgtgaatcgctagaaacatgtgaagtgtatggctaacccaataacgaaagtttcgtaaggggactggagcaggctaccacgagacaaaagatcttctttcaaaagagattcgattcggaactcttatatgtccaaggttcaatattgaaataatttcagaggttttccctgactttgtccgtgtcaacaaacaattcgaaatgcctcgacttttttagaacaggtccgggtcaaatagcaatgattcgaagcacttatttttacactatttcggaaacccaaggactcaatcgtatggatatgtaaaatacaggatttccaatcctagcaggaaaaggagggaaacggatactcaatttaaaagtgagtaaacagaattccatactcgatttcagagatacatatataattctgtggaaagccgtattcgatgaaagtcgtatgtacggtttggagggagatctttcatatctttcgagatccaccctacaatatggggtcaaaaagccaaaataaaagatttgagcccttataaaaagaaaacagattcttgaacccctttcacgctcatgtcacgccgaggtactgcagaagaaaaaactgcaaaatccgatccaatttatcgtaatcgattagttaacatgttggttaaccgtattctgaaacacggaaaaaaatcattggcttatcaaattatctatcgagccttgaaaaagattcaacaaaagacagaaacaaatccactatctgttttacgtcaagcaatacgtggagtaactcccgatatagcagtaaaagcaagacgtgtaggcgggtcaactcatcaagttcccattgaaataggatccacgcaaggaaaagcacttgccattcgttggttattaggggcatcccgaaaacgtccgggtcgaaatatggctttcaaattaagttccgaattagtggatgctgccaaagggagtggcgatgccatacgcaaaaaggaagagactcatagaatggcagaggcaaatagagcttttgcacattttcgttaatccaggaacaggatctatatagacacatagatccatggatccatacatctcgatccgaaaagaatcaatagaaaaagaaaaaatcggaattgatcgatctctttctcgaaacaaacgaaaaggaaagaaaagacgaaacagaaatcatggatcaactaagccctctcggggacttgcttaagaataagaaagagcaatctcatgtaaataccatggaataaggttttatcctattcatggggattccgtaaatattccattccaaaaatcaaaaattggtttttttttggagattggatgcagttactaattcatgatctggcatgtacagaatgaaaatttcattctcgattctacgagaatttttatgaaagcctttcatttgcttctcttcgatggaagttttattttcccagaatgtatcctaatttttggcctaattcttcttctgatgatcgattcaacctctgatcaaaaagatataccttggttatatttcatctcttcaacaagtttcgtaatgagcataacggccctattgttccgatggagagaagaacctatgattagcttttcaggaaatttccaaacgaacaatttcaacgaaatctttcaatttcttattttactatgttcaactctctgtattcctctatccgtagagtacattgaatgtacagaa

SEQ ID NO: 9900 - DNA, 3000 bp, Unknown
  misc_feature (1)..( 3000): cDNA_ID_2179276_gDNA_ID_2096291_Annot_ID_195413 3000 nt of promoter + ATG
gaacctaaacctgcgctcgagagatagctgtccatacactgataagggatgtatggattctcgagaagagaggagccatagtggtcccctccggaccgcccggatcccacgagtgaatagaaagttggatctacattggatctcacctgaatcgccccatctatcctcctgaggagaagtttggtttcaaaccccggttcgaacaggaggagtacgccatgctaatgtgccttggatgatccacatctcagggtcaggcgctgatgagcacattgaactatccatgtggctgagagccctcacagcccaggcacaacgacgcaattatcaggggcgcgctctaccactgagctaatagcccgtcgtgcgggcctcctgctgggggcccgctatgccaagccaaaagcgagagaaaccccatctctctctttcctttttacgcctccctgccgccacacgagagggacatgggggcgtaaaaggggatcctatcaacttgttccgacctaggataataagctcatgggtttggtcttacttcaccgtcgagaaacgaaagaaggcttccacctccaagtttaactcagacgtagctcccttctttttgggtgtgaagctgtgtcaaacctaaatacccaagaagcattagctctccctgaaaaggaggtgatccagccgcaccttccagtacggctaccttgttacgacttcactccagtcactagccctgccttcggcacccccctccttgcggttaaggtaacgacttcgggcatggccagctcccatagtgtgacgggcggtgtgtacaaggcccgggaacgaattcaccgccgtatggctgaccggcgattactagcgattccggcttcatgcaggcgagttgcagcctgcaatccgaactgaggacgggtttttggagttagctcaccctcgcgggatcgcgaccctttgtcccggccattgtagcacgtgtgtcgcccagggcataaggggcatgatgacttgacgtcatcctcaccttcctccggcttatcaccggcagtctgttcagggttccaaactcaacggtggcaactaaacacgagggttgcgctcgttgcgggacttaacccaacaccttacggcacgagctgacgacagccatgcaccacctgtgtccgcgttcccgaaggcacccctctctttcaagaggattcgcggcatgtcaagccctggtaaggttcttcgctttgcatcgaattaaaccacatgctccaccgcttgtgcgggcccccgtcaattcctttgagtttcattcttgcgaacgtactccccaggcgggatacttaacgcgttagctacagcactgcacgggtcgatacgcacagcgcctagtatccatcgtttacggctaggactactggggtatctaatcccattcgctcccctagctttcgtctctcagtgtcagtgtcggcccagcagagtgctttcgccgttggtgttctttccgatctctacgcatttcaccgctccaccggaaattccctctgcccctaccgtactcaagcttggtagtttccaccgcctgtccagggttgagccctgggatttgacggcggacttaaaaagccacctacagacgctttacgcccaatcattccggataacgcttgcatcctctgtattaccgcggctgctggcacagagttagccgatgcttattccccagataccgtcattgcttcttctctgggaaaagaagttcaggacccgtaggccttctacctccacgcggcattgctccgtcaggctttcgcccattgcggaaaattccccactgctgcctcccgtaggagtctgggccgtgtctcagtcccagtgtggctgatcatcctctcggaccagctactgatcatcgccttggtaagctattgcctcaccaactagctaatcagacgcgagcccctcctcgggcggattcctccttttgctcctcagcctacggggtattagcagccgtttccagctgttgttcccctcccaagggcaggttcttacgcgttactcacccgtccgccactggaaacaccacttcccgtccgacttgcatgtgttaagcatgccgccagcgttcatcctgagccaggatcgaactctccatgagattcatagttgcattacttatagcttccttcttcgtagacaaagctgattcggaattgtctttcattccaagtcataacttgtatccatgcgcttcatattcgcatggagttcgctcccagaaatatagctacccctaccccctcacgtcaatcccacgagcctcttatccattcttattcgatcacagcgagggagcaagtcaaaatagaaaaactcacattcattgggtttagggataatcaggctcgaactgatgacttccaccacgtcaaggtgacactctaccgctgagttatatcccttcccccatcaagaaatagaactgactaatcctaagtcaaagggtcgagaaactcaaggccactattcttgaacaacttggattggagccgggctttcctttcgcactttatacgggtatgaaatgaaaataatggaaaaagttggattcaattgtcaactactcctatcggaaataggattgactacggattcgagccatagcacatggtttcataaaaccgtacgattctcccgatctaaatcaagccggttttacatgaagaagatttgactcggcatgttctattcgatacgggtaggagaaacggtattcttttcttaaacttaaaaaaatagagaaataagaaccaagtcaagatgatacggattaatcctttattcttgcgccaaagatcttcctatttccaaaggaactggagttacatctcttttccatttccattcaagagttcttatgtgtttccacgcccctttaagaccccgaaaaatcgacaaattcccttttcttaggaccacatgcgagataacgaaaaaaaaaaagagaga

SEQ ID NO: 9901 - DNA, 3000 bp, Unknown
  misc_feature (1)..( 3000): cDNA_ID_2179272_gDNA_ID_2096291_Annot_ID_195412 3000 nt of promoter + ATG
aaattatttcaatattgaaccttggacatataagagttccgaatcgaatctcttttgaaagaagatcttttgtctcgtggtagcctgctccagtccccttacgaaactttcgttattgggttagccatacacttcacatgtttctagcgattcacatggcatcatcaaatgatacaagtcttggataagaatctacaacgcactagaacgcccttgttgacgatcctttactccgacagcatctagggttcctcgaacaatgtgatatctcacaccgggtaaatccttaacccttccccctcttactaagactacagaatgttcttgtaaattatggccaataccaggtatataagcagtgatttcaaatcccgaggttaatcgtactctggcaactttacgtaaagcagagtttggttttttgggggtgatagtggaaaagttgacagataagtcacccttactgccactctacagaaccgtacatgagattttcacctcatacggctcctcgttcaattctttcgaagtcattgggtccctttcctcgttcgcgaatctcctcccttcttccactccgtcccgaagagtaactaggacaaactcggtcacgttttcatgttccaactgaacactttctatttttgattattctcaaaggataagattattctttttaccaaacatctgcgggtccaatcacacgatcttataataagaacaagagatctttctcaatcaatctctttgcccctcattcttcgagaatcagaaagagactttttcaagtttgaatttgttcatttggaatctgggttcttctacttcattttgatttacttattttttctttattttctctctcttttctttatttgatttcttttttgattttattcccttccatcattcttaagtcccataagtttgatcctatagaatctgacccattttctcattgagcgaaggggtacgaaataaattcaatcagatttatttttgatcaaaaaaaaaaaaaaaaatcactatgtgaaatcttcgtttttttttttctctttctctatcgctttcccataagtacagcacttgttgaatcgatagagaaccttttcttctgtatcgatatgaatccattatgaatcgatattattacattccaattccttaccaatatccctcaaggaaaatcccgaattggatcccaaattgacgggttagtgtgagcttatccatgcggttatgcactcttcgaataggaattcattttctgaaagattctggctttcgtgctttggcgggtctccgagatcctttcgacgacctatgttgtgttgaagggatatctagatgatccgatcaattgcgtaaagcccgcagtagcaacggaaccggggaaagtatacataagtatacagaaaagacagttcttttcttttctattatattaggattttctattctattagattagttagtgatcttggcgcagtgagtcctttcttccgtgattaactgttggcaccagtcctacattttgtctctgcggaccgagaagaaaggaggctccgcgggaagaggattgtaccatagaagcacggaggtaaacctctttccaatatataaattctggcaatgtagttgggctttcatgttgatccgaatgaatcatctttttcgcggagtgaaatctttgcctgctaggcaagatgataggatagcaagttacaaattctgtttcggtaggacatgtatttctattactatgaaattcataaataaaatagttaatcgtggggttaccattctctctttttttttttcgttatctcgcatgtggtcctaagaaaagggaatttgtcgatttttcggggtcttaaaggggcgtggaaacacataagaactcttgaatggaaatggaaaagagatgtaactccagttcctttggaaataggaagatctttggcgcaagaataaaggattaatccgtatcatcttgacttggttcttatttctctatttttttaagtttaagaaaagaataccgtttctcctacccgtatcgaatagaacatgccgagtcaaatcttcttcatgtaaaaccggcttgatttagatcgggagaatcgtacggttttatgaaaccatgtgctatggctcgaatccgtagtcaatcctatttccgataggagtagttgacaattgaatccaactttttccattattttcatttcatacccgtataaagtgcgaaaggaaagcccggctccaatccaagttgttcaagaatagtggccttgagtttctcgaccctttgacttaggattagtcagttctatttcttgatgggggaagggatataactcagcggtagagtgtcaccttgacgtggtggaagtcatcagttcgagcctgattatccctaaacccaatgaatgtgagtttttctattttgacttgctccctcgctgtgatcgaataagaatggataagaggctcgtgggattgacgtgagggggtaggggtagctatatttctgggagcgaactccatgcgaatatgaagcgcatggatacaagttatgacttggaatgaaagacaattccgaatcagctttgtctacgaagaaggaagctataagtaatgcaactatgaatctcatggagagttcgatcctggctcaggatgaacgctggcggcatgcttaacacatgcaagtcggacgggaagtggtgtttccagtggcggacgggtgagtaacgcgtaagaacctgcccttgggaggggaacaacagctggaaacggctgctaataccccgtaggctgaggagcaaaaggaggaatccgcccgaggaggggctcgcgtctgattagctagttggtgaggcaatagcttaccaaggcgatgatcagtagctggtccgagaggatgatcagccacactgggactgagacacggcccagactcctacgggaggcagcagtggggaattttccgcaatg

SEQ ID NO: 9902 - DNA, 3000 bp, Unknown
  misc_feature (1)..( 3000): cDNA_ID_3034606_gDNA_ID_2096291_Annot_ID_195410 3000 nt of promoter + ATG
aaaaaaaaatcaaaaatttgattgatagaaaaaagacaatcagaaatcaaatagaagaaatttcaaaagaaaaacaaaacttaactaatagttgtaccaaactgcgttatgattctaaaataattgagtcatcaaaaaaaatttggcagacattcaaaagaaaaaatacccgattaattcgtaaatccatttttttttttaaattttgcatcgaacaaatgtctatagctatttttctaggtatcattaatattccaagaattactacacaacttttttttgaatcaacaaaaaaaattcttgataaatatatttacaagaatgaagaaaatggagaaaaaaaaaaaaatactctttattttatttcgactataaaaaatttaatatccaataaaaaaaaaatgagttatgacctatgctctttatcacaagcatatgtattttacaaattatcacaaattaaagttagtaacttttgtaaattaaaggctgttcttgaatataacatatgcataacatccttttttgttaagaataaaataaaggttttttttcaagaacacggaatctttcattatgaattgaaaaataaaacctttttgaattccgaagtaaatcaatggaaaaactggttacgaagtcagtatcaatacaatttaccccagatttcatgggctagattagtaacccaaaattggaaaaataaaataaataaagattctctagttctaaacccaagtttaaccaaagaggattcatatgaaaaaaagaaatttgataattataaaaaacaaaaattttttgaggccgactcattattaaatccaaaacataatgtaaaaaaagattctatatataatcttttttgctataaatctattcattctacagaaaaaaattttgacatgtctataggcattgccctagataattgtttagtctcttcttttctagaaaaatataatattcggggtatgggggaaattcggcatagaaaatatttggattggagaattcttaacttttggtttacaaaaaaagtaactattgagccttgggttgatactaagagtaaaaaaaaatatattaatactaaagttcagaattatcaaaaaattgataaaataacgcagacggatcttgctaataaaaaaagaaacttttttgattggatgggaatgaatgaagaaatactaaatcagcgtataacaaattttgaattttttttctttccggaatttttcttattttctagtacatataaaatgaaaccatgggtcataccaatcaaattacttcttttaaattttaatgaaaacataaatgttaataaaaagatcattcgaaagaaaaaaggttttataccatcaaatgaaaaagaatcccttcgattttataatctgaataaagaagaaaaagaatcggccggtcaagtagaacttgaatcagataaagaaacaaaaagaaatcccgaagcagctcgattaaaccaagaaaaaaatattgaagaaaattttgcagaatcaacaataaaaaaacgtaaaaataaaaaacaatacaaaagtaatacagaagcggaacttgatttatttctgacaagatattcgcgttttcaattgcgatggaattgtttttttaatcaaaaaattctcaataatgtaaaagtatactgtctcttggttagactaaacaatccaaacgaaatagcggtatcttctattgaaagaggagagatgagcctagacattctaatgattgagaaaaatttcacttttgcaaaattaatgaaaaaaggaatattgattattgaacctgtgcgtttgtctgtacaaaacgatggacaacttattatatatagaaccataggtatttcattggttcataaaaataaacacaaaataagtaaaagatacaaaaaaaaaagctatattaataaaaaattttttgaaaaatccattacaaaatatcaaaacaaaactgtaaataaaaaaaaaaataattatgatttctttgtccctgaaaaaattctatcccctaaacgacgtagagaatttcgaattctaatttgtttcaacttaaaaaaaaaaaatgctagggatacaaattcaagatttgataagaatattcaaaacttgaccaccgttttgcataaaaagaaagatcttgatcttgataaggataaaaataacttaattaatttaaaatcctttctttggcccaattttaaattagaagatttagcttgtatgaatcgctattggtttaatactactaacggaaatcatttcagtatgataagaatacgcatgtatacgcgatttccaattccttaatcataaatactttttactatatataataagttacggtatatgaaaacaactatatgcacaaatatgagggattgttttaaattaaatctttatacatgagattaatttaatcaatcacatagataccaattatagcggattcataaataaattaacagaatccttctttttgagatctaaatttagatttttttctaaaatgaagaattaagaggttgataattaaattaagatccttgtacaaaaaaactaccattattattactgatcagtaaaattaatatctttcaattcatattaaaaggggaaggatttctttttatgataaaaaatatagtcatttcatttgaagaacaaaaagaagaaagcaggggatccgttgaatttcaagtatttagtttcactaataagatacgaagacttacttcacatttggaattgcacagaaaagattatttatctcagcggggtctacgaaaaattctgggaaaacgtcaacgactgctggcttatttgtcaaaaaaaaatagagtacgttataaagaattaattaatcagttgaatattcgggaattaaaaactcgttaaattcaaaaattgtgaattagtgaattttttagatcttgaattttttgataaacttctttattcagaaatctaattcatg

SEQ ID NO: 9903 - DNA, 3000 bp, Unknown
  misc_feature (1)..( 3000): cDNA_ID_3034610_gDNA_ID_2096291_Annot_ID_195402 3000 nt of promoter + ATG
aattgtaatcagaagtctttggtctttgtattgtgagaaccttttgaatcattgtactacttgattcaaaaggttctttatgatttactactaaaactaaatgagatttcttaacttatatgaagttagatatagatgctatttttttatttttttatttagatttcgattccttcttatttgttactttaattcgatgtaaatgaaccataactatgtaaacctattcctaaaagattgacgccaaaatagcatatccaaattaaaataaaaccgatcaaagccacaattgcagaatttatacccctaacattcctatttgttttaatatgtaaataaattgcgaatatagtccaagtaataaatgcccaagtttcttttgggtcccagttccaatatgaaccccatgtctcattagcccagacagctcctgaaagaatgccgacggttaaaaagataaatccaagactaataatacgaaaactccaaaaatctaattgttgaatcagttgatacctataataatttctagaaaaactaaaattaatgttttgttgtagtaaaatagaatttctttcatttatgtagtaaagtacatcaaaagaaaataattcatttaataaaaaatttttttttatattctttttccaaaaagtaggtccgactttgcgaaatgtaatcactagaagagctattgataataatgatccgcataacagagcgccatagcctaatatcatcatacttacgtgcatcattaaccactgggactggagagctggtactaatattgcagactgaggcattttgtttaaaagacctgaagtagcaaaaccctgaataaaaataacacttggcgcagttattgtgtttaacttattttgttgttttttattaaaataggaaaccatatgaataattgaaaaagcccacgaaagaaaaattaatgattcatataaattacttaatggaaaatgtcctgaataaatccaacgagttaataataatcctgttataccaaaaaacgtaattatgattcctttatctgatgaatcaaaaaatcctatgatttcatctaaattaactaataaagttaaaaaataaattgtcagcacaattgaaacgaccgaaaaagatatatgagttaatatatgctctaaaattgaaaaaatcataaaaaatttgttaaaaattaataaattaatactaggttttacccgattttagaaaaaagtcgggtattattttgattataaaacttataatatctcttttagaagatcttatgccgctactcggactcgaaccgagatgctctagcactgcttcctaagagcagcgtgtctaccaatttcaccatagcggcaacttgttcaaaacaatattaacaagttttgattcaatcgtcgagattaaaatttaaataaagaagccaatttattaaaatttccaattgatttttaaaattatttcaattgactttttgtcctttatatttttttcgagaatacaatgaaaaatgtaactaaattaaagtagttggaacttcaacccaaagacaaaactctaaatgctctttatcattttttttcatttatatgaaaaaaaattgataaaaaaatgctttttcgaaaaataaaaacttcttcaaaatccttagcaattttaaataaaattagattttcctaattgctcaagagaaatcaaaaaaattatcaaaatattttttttgatgtatctttttatattgtacaaacataagattttttgctcacttaaagtaattaatttcaagatcttttatttcctcattaagaggaaataaaagatctttttttattattgtctcaaggtagtgatgggaacaatacgaatcccctttttggaactaaaaaaatgcgaacctttattttttatatattttatctatatattgtctttttttcttcttttgcttcctattttttttagatgtatttaaacaaattggtttttaagttaggctaattctaattattatagtgttttttatttattttgctgtacaaaaaaactttttgaattacctgtagaaagtgatttccctaatgaaaaagctttcaacgatgtccaatatcccttccttttccaaatttttttacgaatacgctttttcgagatagaagtacgtttttttggaactgccattcaaaaatgaaaaaaaatttcagtggtataattggatgtcaaagacatttattattttattctttcgtactccgtacgagtttttttctttcaaattttattatatattattttcaaaacaaaaaagacattcaaaagtttcaaacccaacttttttttttaacgtttgaaatccgtatgagagtactcatttaaataatctatactgatagcttatattataaaaaaattataatatttcttcacatcatatgtaaaaaaaacatatcattatagtaatctttcttaaaaaatataaataaaaaaagctcacttagtgtactgaaagacaatcactaaattccacgatgaaaatccattccttaacaatcctaaataatcaaactcaaataactttgttttaggtcaagctttttttatataattaatattaagtttttttttgtcgtggaaatctttgttctattcttaatatatgtatataaattattgtaatatggaattataattcactttttctgtatttgcataaaatcacaataaaattttatttagtagtaataaaaaaagacaaataaaatcttttgacagtaacttagtaatattttttaatcatttctaatttttttatttgaatatatattgcttttcaaagatttatgaaggattatattaattcgaaaacatttctatttaggtttgaaatcgcgtgcttttttattgtcccctttgaaaaaaaaatatatatatacaaaccagtgaataagaaaaaataaaattaagaataaaataaaaaggattttttattttatg

SEQ ID NO: 9904 - DNA, 3000 bp, Unknown
  misc_feature (1)..( 3000): cDNA_ID_2179226_gDNA_ID_2096291_Annot_ID_195401 3000 nt of promoter + ATG
agccccgtaacttcgggagaaggggtgcctcctcacaaagggggtcgcagtgaccaggcccgggcgactgtttaccaaaaacacaggtctccgcaaagtcgtaagaccatgtatgggggctgacgcctgcccagtgccggaaggttaaggaagttggtgacctgatgacaggggagccggcgaccgaagccccggtgaacggcggccgtaactataacggtcctaaggtagcgaaattccttgtcgggtaagttccgacccgcacgaaaggcgtaacgatctgggcactgtctcggagagaggctcggtgaaatagacatgtctgtgaagatgcggactacctgcacctggacagaaagaccctatgaagcttcactgttccctgggattggctttgggcttttcctgcgcagcttaggtggaaggcgaagaaggcccccttccgggggggcccgagccatcagtgagataccactctggaagagctagaattctaaccttgtgtcaggacctacgggccaagggacagtctcaggtagacagtttctatggggcgtaggcctcccaaaaggtaacggaggcgtgcaaaggtttcctcgggccggacggagattggccctcgagtgcaaaggcagaagggagcttgactgcaagacccacccgtcgagcagggacgaaagtcggccttagtgatccgacggtgccgagtggaagggccgtcgctcaacggataaaagttactctagggataacaggctgatcttccccaagagctcacatcgacgggaaggtttggcacctcgatgtcggctcttcgccacctggggctgtagtatgttccaagggttgggctgttcgcccattaaagcggtacgtgagctgggttcagaacgtcgtgagacagttcggtccatatccggtgtgggcgttagagcattgagaggacctttccctagtacgagaggaccgggaaggacgcacctctggtgtaccagttatcgtgcccacggtaaacgctgggtagccaagtgcggagcggataactgctgaaagcatctaagtagtaagcccaccccaagatgagtgctctcctattccgacttccccagagcctccggtagcacagccgagacagcaacgggttctccgcccctgcggggatggagtgacagaagttttgagaattcaagagaaggtcacggcgagacgagccgtttatcattacgataggtgtcaagtggaagtgcagtgatgtatgcagctgaggcatcctaacagaccggtagacttgaaccttgttcctacatgacctgatcaattcgatcaggcactcgccatctattttcatagttcaactctttgacaacacgaaaaaaccattgttcaactctttgacaacatgaaaaaacctaaaattctgcccttctatccaaaggatgggggggcagaggcctttggtgtccactccagtcaagaattggagcctcacaatcactagccaatatgcttttctcgcatgcctttcttcgttcatggttcgatattctggtgtcctaggcgtagaggaacaacaccaatccatcccgaacttggtggttaaactctactgcggtgacgatactgtaggggaggtcctgcggaaaaatagctcgacgccaggatgatgaaaagcttaacacctctcattcttattactttttcatattgaaaaaaaaaatgaaaaatgaaaaggttgtcttattcaaaaccccaattatgaaatcatcccacttcacaccccggaacgcaccgttcttatagagagaaaggcactttcacatccgaaatggctggggagaggaaaggttcctttttttagggtactcctgggaacagatccagtggagacggggtggggcttgtagctcagaggattagagcacgtggctacgaaccacggtgtcgggggttcgaatccctcctcgcccacaaccggcccaaaagggaaggacctttccctccgggggggtaggaaaatcatgctcgggatagcgatagcggactcaaagctatggaacttggggatgggtcttttgtcgaaatagagtggagtgaccttcttttttatttgaatttagatatatatctattatatctatcgcttttttaattttacatatagtatttttaaacggccgaatcagcatattttttgaagccccgtaactcttcctcagccaggcttgggcagaatagcggagcaagtattagtagcatagcaaaaatgcgttcctcatcattaagtcattaaattcatatgtttgctcgcggtaattgtgaactctcgggagaatcgatgactgcatcaaagatgcacttgttagtacatctgaaaattctgaattggctagttgtaaatagccccaggactatagaataaaggattatcccgaacctacaccgaggtattgacggtgattctcaaatatcacagaacagaatgtgatacgatgagatagaatgcaatagaaacaaagacacagggaacgggttaccgactcttaacggtcaaagcgaacccgttcattcttacattctgaattcttaaattcggaatgaatcaaatctccccaagtaggattcgaacctacgaccaatcagttaacagccgaccgctctaccactgagctactgaggaacaacgggagattagatctcatagagttcaattcccgttctcaacccatgaccaatatgaactcgaagtttccttcgtaacccccggaacttcttcgtagtggctccgttccatgcctaatttaatagggaacctcaaagcggctctatttcattatattccatccatatcccaattccattcatttaatatccctttggtgtcattgacataagagatgtcgtttctagtctatctctttctatttctatatatggaaagttgcaaaatcatcatataataatccagaaattgaaatagaaaagaaaaaagggaggtttgtg

SEQ ID NO: 9905 - DNA, 3000 bp, Unknown
  misc_feature (1)..( 3000): cDNA_ID_2179222_gDNA_ID_2096291_Annot_ID_195400 3000 nt of promoter + ATG
ctgaaattatttcaatattgaaccttggacatataagagttccgaatcgaatctcttttgaaagaagatcttttgtctcgtggtagcctgctccagtccccttacgaaactttcgttattgggttagccatacacttcacatgtttctagcgattcacatggcatcatcaaatgatacaagtcttggataagaatctacaacgcactagaacgcccttgttgacgatcctttactccgacagcatctagggttcctcgaacaatgtgatatctcacaccgggtaaatccttaacccttccccctcttactaagactacagaatgttcttgtaaattatggccaataccaggtatataagcagtgatttcaaatcccgaggttaatcgtactctggcaactttacgtaaagcagagtttggttttttgggggtgatagtggaaaagttgacagataagtcacccttactgccactctacagaaccgtacatgagattttcacctcatacggctcctcgttcaattctttcgaagtcattgggtccctttcctcgttcgcgaatctcctcccttcttccactccgtcccgaagagtaactaggacaaactcggtcacgttttcatgttccaactgaacactttctatttttgattattctcaaaggataagattattctttttaccaaacatctgcgggtccaatcacacgatcttataataagaacaagagatctttctcaatcaatctctttgcccctcattcttcgagaatcagaaagagactttttcaagtttgaatttgttcatttggaatctgggttcttctacttcattttgatttacttattttttctttattttctctctcttttctttatttgatttcttttttgattttattcccttccatcattcttaagtcccataagtttgatcctatagaatctgacccattttctcattgagcgaaggggtacgaaataaattcaatcagatttatttttgatcaaaaaaaaaaaaaaaaatcactatgtgaaatcttcgtttttttttttctctttctctatcgctttcccataagtacagcacttgttgaatcgatagagaaccttttcttctgtatcgatatgaatccattatgaatcgatattattacattccaattccttaccaatatccctcaaggaaaatcccgaattggatcccaaattgacgggttagtgtgagcttatccatgcggttatgcactcttcgaataggaattcattttctgaaagattctggctttcgtgctttggcgggtctccgagatcctttcgacgacctatgttgtgttgaagggatatctagatgatccgatcaattgcgtaaagcccgcagtagcaacggaaccggggaaagtatacataagtatacagaaaagacagttcttttcttttctattatattaggattttctattctattagattagttagtgatcttggcgcagtgagtcctttcttccgtgattaactgttggcaccagtcctacattttgtctctgcggaccgagaagaaaggaggctccgcgggaagaggattgtaccatagaagcacggaggtaaacctctttccaatatataaattctggcaatgtagttgggctttcatgttgatccgaatgaatcatctttttcgcggagtgaaatctttgcctgctaggcaagatgataggatagcaagttacaaattctgtttcggtaggacatgtatttctattactatgaaattcataaataaaatagttaatcgtggggttaccattctctctttttttttttcgttatctcgcatgtggtcctaagaaaagggaatttgtcgatttttcggggtcttaaaggggcgtggaaacacataagaactcttgaatggaaatggaaaagagatgtaactccagttcctttggaaataggaagatctttggcgcaagaataaaggattaatccgtatcatcttgacttggttcttatttctctatttttttaagtttaagaaaagaataccgtttctcctacccgtatcgaatagaacatgccgagtcaaatcttcttcatgtaaaaccggcttgatttagatcgggagaatcgtacggttttatgaaaccatgtgctatggctcgaatccgtagtcaatcctatttccgataggagtagttgacaattgaatccaactttttccattattttcatttcatacccgtataaagtgcgaaaggaaagcccggctccaatccaagttgttcaagaatagtggccttgagtttctcgaccctttgacttaggattagtcagttctatttcttgatgggggaagggatataactcagcggtagagtgtcaccttgacgtggtggaagtcatcagttcgagcctgattatccctaaacccaatgaatgtgagtttttctattttgacttgctccctcgctgtgatcgaataagaatggataagaggctcgtgggattgacgtgagggggtaggggtagctatatttctgggagcgaactccatgcgaatatgaagcgcatggatacaagttatgacttggaatgaaagacaattccgaatcagctttgtctacgaagaaggaagctataagtaatgcaactatgaatctcatggagagttcgatcctggctcaggatgaacgctggcggcatgcttaacacatgcaagtcggacgggaagtggtgtttccagtggcggacgggtgagtaacgcgtaagaacctgcccttgggaggggaacaacagctggaaacggctgctaataccccgtaggctgaggagcaaaaggaggaatccgcccgaggaggggctcgcgtctgattagctagttggtgaggcaatagcttaccaaggcgatgatcagtagctggtccgagaggatgatcagccacactgggactgagacacggcccagactcctacgggaggcagcagtggggaattttccgca

SEQ ID NO: 9906 - DNA, 3000 bp, Unknown
  misc_feature (1)..( 3000): cDNA_ID_3034614_gDNA_ID_2096291_Annot_ID_195399 3000 nt of promoter + ATG
cctaaacctgcgctcgagagatagctgtccatacactgataagggatgtatggattctcgagaagagaggagccatagtggtcccctccggaccgcccggatcccacgagtgaatagaaagttggatctacattggatctcacctgaatcgccccatctatcctcctgaggagaagtttggtttcaaaccccggttcgaacaggaggagtacgccatgctaatgtgccttggatgatccacatctcagggtcaggcgctgatgagcacattgaactatccatgtggctgagagccctcacagcccaggcacaacgacgcaattatcaggggcgcgctctaccactgagctaatagcccgtcgtgcgggcctcctgctgggggcccgctatgccaagccaaaagcgagagaaaccccatctctctctttcctttttacgcctccctgccgccacacgagagggacatgggggcgtaaaaggggatcctatcaacttgttccgacctaggataataagctcatgggtttggtcttacttcaccgtcgagaaacgaaagaaggcttccacctccaagtttaactcagacgtagctcccttctttttgggtgtgaagctgtgtcaaacctaaatacccaagaagcattagctctccctgaaaaggaggtgatccagccgcaccttccagtacggctaccttgttacgacttcactccagtcactagccctgccttcggcacccccctccttgcggttaaggtaacgacttcgggcatggccagctcccatagtgtgacgggcggtgtgtacaaggcccgggaacgaattcaccgccgtatggctgaccggcgattactagcgattccggcttcatgcaggcgagttgcagcctgcaatccgaactgaggacgggtttttggagttagctcaccctcgcgggatcgcgaccctttgtcccggccattgtagcacgtgtgtcgcccagggcataaggggcatgatgacttgacgtcatcctcaccttcctccggcttatcaccggcagtctgttcagggttccaaactcaacggtggcaactaaacacgagggttgcgctcgttgcgggacttaacccaacaccttacggcacgagctgacgacagccatgcaccacctgtgtccgcgttcccgaaggcacccctctctttcaagaggattcgcggcatgtcaagccctggtaaggttcttcgctttgcatcgaattaaaccacatgctccaccgcttgtgcgggcccccgtcaattcctttgagtttcattcttgcgaacgtactccccaggcgggatacttaacgcgttagctacagcactgcacgggtcgatacgcacagcgcctagtatccatcgtttacggctaggactactggggtatctaatcccattcgctcccctagctttcgtctctcagtgtcagtgtcggcccagcagagtgctttcgccgttggtgttctttccgatctctacgcatttcaccgctccaccggaaattccctctgcccctaccgtactcaagcttggtagtttccaccgcctgtccagggttgagccctgggatttgacggcggacttaaaaagccacctacagacgctttacgcccaatcattccggataacgcttgcatcctctgtattaccgcggctgctggcacagagttagccgatgcttattccccagataccgtcattgcttcttctctgggaaaagaagttcaggacccgtaggccttctacctccacgcggcattgctccgtcaggctttcgcccattgcggaaaattccccactgctgcctcccgtaggagtctgggccgtgtctcagtcccagtgtggctgatcatcctctcggaccagctactgatcatcgccttggtaagctattgcctcaccaactagctaatcagacgcgagcccctcctcgggcggattcctccttttgctcctcagcctacggggtattagcagccgtttccagctgttgttcccctcccaagggcaggttcttacgcgttactcacccgtccgccactggaaacaccacttcccgtccgacttgcatgtgttaagcatgccgccagcgttcatcctgagccaggatcgaactctccatgagattcatagttgcattacttatagcttccttcttcgtagacaaagctgattcggaattgtctttcattccaagtcataacttgtatccatgcgcttcatattcgcatggagttcgctcccagaaatatagctacccctaccccctcacgtcaatcccacgagcctcttatccattcttattcgatcacagcgagggagcaagtcaaaatagaaaaactcacattcattgggtttagggataatcaggctcgaactgatgacttccaccacgtcaaggtgacactctaccgctgagttatatcccttcccccatcaagaaatagaactgactaatcctaagtcaaagggtcgagaaactcaaggccactattcttgaacaacttggattggagccgggctttcctttcgcactttatacgggtatgaaatgaaaataatggaaaaagttggattcaattgtcaactactcctatcggaaataggattgactacggattcgagccatagcacatggtttcataaaaccgtacgattctcccgatctaaatcaagccggttttacatgaagaagatttgactcggcatgttctattcgatacgggtaggagaaacggtattcttttcttaaacttaaaaaaatagagaaataagaaccaagtcaagatgatacggattaatcctttattcttgcgccaaagatcttcctatttccaaaggaactggagttacatctcttttccatttccattcaagagttcttatgtgtttccacgcccctttaagaccccgaaaaatcgacaaattcccttttcttaggaccacatgcgagataacgaaaaaaaaaaagagagaatg

SEQ ID NO: 9907 - DNA, 3000 bp, Unknown
  misc_feature (1)..( 3000): cDNA_ID_3034616_gDNA_ID_2096291_Annot_ID_195397 3000 nt of promoter + ATG
aagaaaagaactgtcttttctgtatacttatgtatactttccccggttccgttgctactgcgggctttacgcaattgatcggatcatctagatatcccttcaacacaacataggtcgtcgaaaggatctcggagacccgccaaagcacgaaagccagaatctttcagaaaatgaattcctattcgaagagtgcataaccgcatggataagctcacactaacccgtcaatttgggatccaattcgggattttccttgagggatattggtaaggaattggaatgtaataatatcgattcataatggattcatatcgatacagaagaaaaggttctctatcgattcaacaagtgctgtacttatgggaaagcgatagagaaagagaaaaaaaaaaacgaagatttcacatagtgatttttttttttttttttgatcaaaaataaatctgattgaatttatttcgtaccccttcgctcaatgagaaaatgggtcagattctataggatcaaacttatgggacttaagaatgatggaagggaataaaatcaaaaaagaaatcaaataaagaaaagagagagaaaataaagaaaaaataagtaaatcaaaatgaagtagaagaacccagattccaaatgaacaaattcaaacttgaaaaagtctctttctgattctcgaagaatgaggggcaaagagattgattgagaaagatctcttgttcttattataagatcgtgtgattggacccgcagatgtttggtaaaaagaataatcttatcctttgagaataatcaaaaatagaaagtgttcagttggaacatgaaaacgtgaccgagtttgtcctagttactcttcgggacggagtggaagaagggaggagattcgcgaacgaggaaagggacccaatgacttcgaaagaattgaacgaggagccgtatgaggtgaaaatctcatgtacggttctgtagagtggcagtaagggtgacttatctgtcaacttttccactatcacccccaaaaaaccaaactctgctttacgtaaagttgccagagtacgattaacctcgggatttgaaatcactgcttatatacctggtattggccataatttacaagaacattctgtagtcttagtaagagggggaagggttaaggatttacccggtgtgagatatcacattgttcgaggaaccctagatgctgtcggagtaaaggatcgtcaacaagggcgttctagtgcgttgtagattcttatccaagacttgtatcatttgatgatgccatgtgaatcgctagaaacatgtgaagtgtatggctaacccaataacgaaagtttcgtaaggggactggagcaggctaccacgagacaaaagatcttctttcaaaagagattcgattcggaactcttatatgtccaaggttcaatattgaaataatttcagaggttttccctgactttgtccgtgtcaacaaacaattcgaaatgcctcgacttttttagaacaggtccgggtcaaatagcaatgattcgaagcacttatttttacactatttcggaaacccaaggactcaatcgtatggatatgtaaaatacaggatttccaatcctagcaggaaaaggagggaaacggatactcaatttaaaagtgagtaaacagaattccatactcgatttcagagatacatatataattctgtggaaagccgtattcgatgaaagtcgtatgtacggtttggagggagatctttcatatctttcgagatccaccctacaatatggggtcaaaaagccaaaataaaagatttgagcccttataaaaagaaaacagattcttgaacccctttcacgctcatgtcacgccgaggtactgcagaagaaaaaactgcaaaatccgatccaatttatcgtaatcgattagttaacatgttggttaaccgtattctgaaacacggaaaaaaatcattggcttatcaaattatctatcgagccttgaaaaagattcaacaaaagacagaaacaaatccactatctgttttacgtcaagcaatacgtggagtaactcccgatatagcagtaaaagcaagacgtgtaggcgggtcaactcatcaagttcccattgaaataggatccacgcaaggaaaagcacttgccattcgttggttattaggggcatcccgaaaacgtccgggtcgaaatatggctttcaaattaagttccgaattagtggatgctgccaaagggagtggcgatgccatacgcaaaaaggaagagactcatagaatggcagaggcaaatagagcttttgcacattttcgttaatccaggaacaggatctatatagacacatagatccatggatccatacatctcgatccgaaaagaatcaatagaaaaagaaaaaatcggaattgatcgatctctttctcgaaacaaacgaaaaggaaagaaaagacgaaacagaaatcatggatcaactaagccctctcggggacttgcttaagaataagaaagagcaatctcatgtaaataccatggaataaggttttatcctattcatggggattccgtaaatattccattccaaaaatcaaaaattggtttttttttggagattggatgcagttactaattcatgatctggcatgtacagaatgaaaatttcattctcgattctacgagaatttttatgaaagcctttcatttgcttctcttcgatggaagttttattttcccagaatgtatcctaatttttggcctaattcttcttctgatgatcgattcaacctctgatcaaaaagatataccttggttatatttcatctcttcaacaagtttcgtaatgagcataacggccctattgttccgatggagagaagaacctatgattagcttttcaggaaatttccaaacgaacaatttcaacgaaatctttcaatttcttattttactatgttcaactctctgtattcctctatccgtagagtacattgaatgtacagaaatg

SEQ ID NO: 9908 - DNA, 3000 bp, Unknown
  misc_feature (1)..( 3000): cDNA_ID_3034620_gDNA_ID_2096291_Annot_ID_195396 3000 nt of promoter + ATG
gaataaaccaatttaaaaatgggataacatcctcgataaggcataagttctaatatcataagtgcttcttcataggaacgtccacgtatttgatcaattactctccgtgctttatgggcagacatagatatatattgccctaaagcatatacttccgtatatgatttcttttttctcttctttatcataaggtttacctctcactcaaaaaaaatctatattcattttttttaatttatttaattaacgacgagatctattatcatttttggcatgtcctcgaaaatttatagtaggtgaaaattctcctaatttatgtcctaccataagatctattatataaacgggtaagtgttcccttccattatgaatagcgatcgtatggccaatcattgtgggtataatggtggatgcccgggaccaagttattatgatttctttttccgcctttgtattaagcttctctatttttcttaataaatgctttgctacaaaagggtttttttttagtgaacgtgtcacagttaattaactcctatttttttaagacgaagaaagaaattcgattttctctcctatttactacggcgacgaagaatcaaagtctcactatattttttcctttttctagttcttcttccaagtgcaggataaccccagggggttacgggtttttttctaccaattggagccctcccttcaccacctccatggggatggtcgacagggttcataactactcctcttactacaggacgtttacctagccaacatttcgatccggctctacccaaacttttctggtttaccccaacatttcccacttgtccgactgttgctgagcagtttttggatatcaaacggacctctccagaaggtaattttaatgtggccgatttcccctcttttgcaatcagtttcgctacagcacccgctgctctagctaattgtccaccccttccaagtgtgatttctatattatgtatggccgtgcctaagggcatatcggttgaagtagattcttctttttgatcaatcaaaaccccttcccaaactgtacaagcttcttccaaagcatacggctttctggatgtagatgatgatatctatacggatggatcttatatatatcgtagaattcttctatatatggtagaagtaccacacgagtggatatataggaatcaaaatctgccgaataacttatgttatgatcttctacatcctaggtcttcccgttccgtcatctggcttatgttcttcatgtagcattcagaccgaatgactctatgaaattacgtcgatacttccacatattatgggtaacgtaggagacatctctatttttccccgggggaatctttagaattaccactgcttagctttcaattcgcctctgaccatcaaatgaaatgtgaataacccgtcctcctctctttgaaacaaggggcgcttatggttctgtcggtgcttgaaacaattttgtcttctccatattactatatctctagagtcaataattttatatgaggaactactgaactcaatcacttgctgccgttactcttcagttttctgttgaggtctatcctgtagaggtactcaaattggatcagtgatcgatttctaggtttcgtcgtaaacctaattggttacttccaattacgtaaatcaaatagttcaaaccgcactcaaaggtagggcatttcccatttttataggaacttctgtaccagaaacaatggtatctccaattatagcccctctgggatgtaaaatatatctcttctcaccatccccatagtgtatgagacaaatgtatgcatttcgattagggtcgtattctatggttacgattctaccatatatgtcttttgcatttcgtcgaaaatctattttacggtatagacgcttatgacctccccctctatgccttgcggtaattattcctctggcattacgacctttaccacaatgatgctgcccacagatcaaattatttcgtggattggatttcacttgactgtctacggctccattgcgtgtgctcggggtagaagttttgtataaatgtatcgccatgctattaagtattttgatttaagttcttttctttctaagaggtggaatagaataacccggttgaagcgtaatgatcatacgtctgtaatgcattgtatgtcccagaataggtcccattcttttaacctttccggggagtcgatgactattcatagctattaccttgacaccaaagaagagttcgacccaatgctttatttctgtcctagttgatcctgattcgacattaaaagtatattgatttttccccaataaccgaatacttttgtctgtaaatactgcatatttgattccatccataaatcgattttcttccctatgagttctagtctcaataagaatgctagttcttactgttcatatgttatgatatgaatataccacaccaattcgttatgtatagatgatgagaagattccattgatacagagccaattccaatagacttattggagggtccgattggcgtgcatccagtaggaattgaacctacgaattcgccaattatgagttgggcgctttaaccattcagccatggatgcttagtggggatcctcgtacatggtgaataaccaaattccaattgaaatgaaatctttaggataaatcaatgcaatttaggaggaatcaatgaaaggacatcaattcaaatcctggattttcgaattgagagaaatagtgagagagatcaagaatgctcactatttcttagattcatggacccaattcaattcagtgggatctttcattcatatttttttccaccaagaacgttttagaaaactcttggaccctcggatttttagtatcctacttttgcgcaattcacagggttcaacaagcaatcgatatttcacgatcaagggtgtagtactatttgtagtagcggcccttctatatcgtattaacaatcgaaat

SEQ ID NO: 9909 - DNA, 3000 bp, Unknown
  misc_feature (1)..( 3000): cDNA_ID_3034595_gDNA_ID_2096291_Annot_ID_195395 3000 nt of promoter + ATG
cttctgactctttttcaaattcgataaatgttggttgatcgtatctttcattatagttctatgattcagagtatcatttcctattagatccctttgaattccatattcgaagttgcgatcaggtctcttcattaaaaagaatcgattcaatacatttcttatgtacccatagggactatattggaattggatttgaatcatatttcggatcaatctatattgattgactgcctccattatgttgttgctagcaaataccactcttttttgatcttccaaataattcccgcaggagatccggacccaaatttttctgagccttcgataaaaagattcattttcttcataaaaaataggaggtagaaccaataaagatttcttttttgattcatccctgaagttgaaaacctccttcaagaattgtctttgatccaatccgtaggaatcaatagaaaaggcaaatcccttatgatacaccagatccggctcggttattgatagagtgaatagatctgccatttcttgaaatctctcttctgactcgtggcgtaacgtgtatccccccctcttccgttcatggaatagatgaaataaatcaaaaaatggatttttgttcaagaatgaaatcttattggaactgtccatatccagttcatccttcggaaccatatcacatcccagatctgatgaaataggatgaattgagacggtattttgtaaatacgtaattatcttgaatatattaactatttctttattttccgatcgcctggaagggacaaaagaaacatcttgttctttcttcaacaatttctgatccctagtggacctctcagtaggattcgaacccagatgaagttctgaccatctgtcagagaaaaaagaacgaatggctcttgtaggattcccaagaaattcttcgctttcttccggaagcagatgattattcattcgcttctcacgttccgtgaatagccggggcattgaggaatagccagaaaggtatttagggaatcggtctgattctatctctcttccttccgtttgaataaaggaaggatccaaaagaatcgatctttcttttagttgttgaatctctctttgattgatcaatgtgtgatagtgatattccgaatcctcattactaatggaatcgaaaggatctatgaattgatcagaagatccgttcaattggctagaatccgttacttgaacgaaactagatcttgtagaatcatattgaatatttgacgatacgtttcgtaccttgctaaaaaatctatccttgtttaccaaccacacattgtctaaccaaatccaattctctctcgatattttcctaaaaaaatccgattcgtgcggattcttcccccaactaacgaagagatcttggtggaattgccacatatgaaattgagcacaattttgcaaagaaatagcccacttgtttctcgagaagagatgggaaacatgctcaatatcatttgattgaatagttgacccagctccttgttgtttgcagaaaccctccacttcaattggtattttttcacgaaaagcaaacatgagataacaaatccagtctttcactaagatttcgaatagctgtcccgaattcaagttgattatgtttcgcctcttactcggagaaagacgatcaaacaattcccaatcatggcccttgcggatcggatcatccatataatatacaaaaagaaactccagatatttgatatctttctctttaaatgagatatcaattccagcgacggtttcattagatatcttacaacaaaaacccctcttttttccgatccagttcctccaccaccgcgaactccagttagattcaggcatgatacacttttgagttattgggagaacccaagtactctctttcggatcccggaaacagctctcagagatcttttttccttttgtaagatacaggagcgaaacaatcaacctattgatattgcaagacccaaaagattcttccgatgtatcatttctgggtccaatggaattcataggtataggaagaagccctttcaaatagagatttttgctttcgaccatatttcgattgttaatacgatatagaagggccgctactacaaatagtactacacccttgatcgtgaaatatcgattgcttgttgaaccctgtgaattgcgcaaaagtaggatactaaaaatccgagggtccaagagttttctaaaacgttcttggtggaaaaaaatatgaatgaaagatcccactgaattgaattgggtccatgaatctaagaaatagtgagcattcttgatctctctcactatttctctcaattcgaaaatccaggatttgaattgatgtcctttcattgattcctcctaaattgcattgatttatcctaaagatttcatttcaattggaatttggttattcaccatgtacgaggatccccactaagcatccatggctgaatggttaaagcgcccaactcataattggcgaattcgtaggttcaattcctactggatgcacgccaatcggaccctccaataagtctattggaattggctctgtatcaatggaatcttctcatcatctatacataacgaattggtgtggtatattcatatcataacatatgaacagtaagaactagcattcttattgagactagaactcatagggaagaaaatcgatttatggatggaatcaaatatgcagtatttacagacaaaagtattcggttattggggaaaaatcaatatacttttaatgtcgaatcaggatcaactaggacagaaataaagcattgggtcgaactcttctttggtgtcaaggtaatagctatgaatagtcatcgactccccggaaaggttaaaagaatgggacctattctgggacatacaatgcattacagacgtatgatcattacgcttcaaccgggttattctattccacctcttagaaagaaaagaacttaaatcaaaatacttaatagcatg

SEQ ID NO: 9910 - DNA, 3000 bp, Unknown
  misc_feature (1)..( 3000): cDNA_ID_3034624_gDNA_ID_2096291_Annot_ID_195393 3000 nt of promoter + ATG
agtaacggcagcaagtgattgagttcagtagttcctcatataaaattattgactctagagatatagtaatatggagaagacaaaattgtttcaagcaccgacagaaccataagcgccccttgtttcaaagagaggaggacgggttattcacatttcatttgatggtcagaggcgaattgaaagctaagcagtggtaattctaaagattcccccggggaaaaatagagatgtctcctacgttacccataatatgtggaagtatcgacgtaatttcatagagtcattcggtctgaatgctacatgaagaacataagccagatgacggaacgggaagacctaggatgtagaagatcataacataagttattcggcagattttgattcctatatatccactcgtgtggtacttctaccatatatagaagaattctacgatatatataagatccatccgtatagatatcatcatctacatccagaaagccgtatgctttggaagaagcttgtacagtttgggaaggggttttgattgatcaaaaagaagaatctacttcaaccgatatgcccttaggcacggccatacataatatagaaatcacacttggaaggggtggacaattagctagagcagcgggtgctgtagcgaaactgattgcaaaagaggggaaatcggccacattaaaattaccttctggagaggtccgtttgatatccaaaaactgctcagcaacagtcggacaagtgggaaatgttggggtaaaccagaaaagtttgggtagagccggatcgaaatgttggctaggtaaacgtcctgtagtaagaggagtagttatgaaccctgtcgaccatccccatggaggtggtgaagggagggctccaattggtagaaaaaaacccgtaaccccctggggttatcctgcacttggaagaagaactagaaaaaggaaaaaatatagtgagactttgattcttcgtcgccgtagtaaataggagagaaaatcgaatttctttcttcgtcttaaaaaaataggagttaattaactgtgacacgttcactaaaaaaaaacccttttgtagcaaagcatttattaagaaaaatagagaagcttaatacaaaggcggaaaaagaaatcataataacttggtcccgggcatccaccattatacccacaatgattggccatacgatcgctattcataatggaagggaacacttacccgtttatataatagatcttatggtaggacataaattaggagaattttcacctactataaattttcgaggacatgccaaaaatgataatagatctcgtcgttaattaaataaattaaaaaaaatgaatatagattttttttgagtgagaggtaaaccttatgataaagaagagaaaaaagaaatcatatacggaagtatatgctttagggcaatatatatctatgtctgcccataaagcacggagagtaattgatcaaatacgtggacgttcctatgaagaagcacttatgatattagaacttatgccttatcgaggatgttatcccatttttaaattggtttattctgctgcagcgaacgctagtcacaataagggtttcaaagaaaccaatttagtcattagtaaagctgaggtgaaccaagggaatactgtgaaaaaattaaaacctcgtgcccgaggacgaagttacccaataaaacgatccacttgtcatataactatcgtattggaagatatatccttctatcaacaatatgaagaatatttaatgtatttaaaaaaacctggatgcagcaatgaaaacagaaatctaacatgttatgatacatatagtagtggaggcctatgggacaaaaaataaatccacttggtttcagacttggtacaacccaaagtcatcattctctttggtttgcacaaccaaaaaagtattctgaaggtttagaagaagataaaaaaatacgagactgtattaaaaattatgtccaaaaaaatataagaatatcctctggtatggagggaattgcacgtattgaaattcaaaaaagaatcgatctcatccagatcataatctatatgggatttcctaaattattaattgaagataaaccccgaagagtcgaagaattacagatgaatgttcaaaaagaactaaattgtgtcaatagaaaactcaacattgctattaccagaatttccaatccgtatggggatcctaatattcttgcagaatttatcgctggacaattaaaaaatcgcgtttcttttcgaaaagcaatgaaaaaagctattgaattaactgaacaggcgaatacaaaaggaattcaagtacaaattgcaggacgtatcgacggaaaagaaattgcacgtgttgaatggatcagagaaggcagagttcctttacaaacaattgaagctaaaattgattattgttcctatacagttcgaactatttatggggttttaggaataaaaatttggatattcgtagacgaagaataaaaaaactttctttatctttatattttatccgacgataaaaaaacgaaaattatataacacgatacagacagtaataaaaaattgcagtcttcttttttatgtttaaaaataaaataagcaattctataagattgaataaaaatttccatcaaaactcctttgatataattgctatgcttagtgtgtgactcgttggtttaggattagataaagataaaaaaaaaagaaaaaagaacttacctataacagaaactaataactatagcattaataaataacctaagcaactcattgcttcacattatctggataaaaaaatcagtcaagatatgatggattgatcatattattgtagcaactgaaaaaaaaaaagaataaagaactataattataagttatgaaaggtaatcgaaaagtatgcggattcagtggaaggatgaaagaaagagagaaaaaattgaatattaatgatatattattccaatttggaaagtctatg

SEQ ID NO: 9911 - DNA, 3000 bp, Unknown
  misc_feature (1)..( 3000): cDNA_ID_3034628_gDNA_ID_2096291_Annot_ID_195390 3000 nt of promoter + ATG
aaaaattgaatattaatgatatattattccaatttggaaagtctatgaggtcactgtaagaaaagcaatgtaataaagcatcaatacagattcattcagaataattagataaatctgttccgaaaacaaaaaaaattaagagccttgagccaataaaaactaagaaaattgactcaaaaacaaataaaaaaaatgaaattcccgatttcatataagagctccattgtagaattcgggcctaatgattaatcaagaagcgatgggaacgacggaacccatgaatatagaggattctattgaaaaataaatcttagtaattcattggacaggatggcggaataaaccagattattatctattcttatttttattcagagatctcctgggataaacaacaaacttaatatagatattgaaagagtaaatattcgccggcgaatactttttttttaataaaagtaataaaaaacaaaaattaaaaagataaaagaaaataaggatttgttagaatattctaacaaaaacgacattcgagatgatgatattacgttacgttatttttaaataaatagaattaatcttggattccatttcgaaaaagacatacacaaatttagaagagatcagatgaaattgaatatcatgattaatagaattaatcattaactatatcttaatacaagcttttttagtccttttattcgcgaggagctggatgagaagaaactctcacgttcagttctgtagtagagatggaatttctaatttagaaccatcaactataacccaaaaagaaccagatttcgtaaacaacatcgaggaagactaaaaggaatatcttctcgtgggaatcgtatttgttttggcagatatgctcttcaaacacttgaacccgcttggatcacatctagacaaatagaagcagggcgacgcgcaatgacacgaaatgtacgacgtggtggaaaaatttgggtacgtatatttccagacaaaccagttacagtaagacctgcggaaacgcgtatgggttctgggaaaggatcccctgagtattgggtagctgtggttaaaccaggtaaaatcctttatgaaatgggtggtgtacccgaaaatatagcaagaaaagctatttcaatagcggcatcaaaaatgcctataaaaacccaattcattatttctgaataggaatatataatgaaaaaactaaataacatttaagggtaaaaagattataagttttctttttttgacaaacaatatttttttacttcgtcctttgcattaaaagaagagatacaaaaaaaatgatatgattcaaccacaaacctatttgaatgtagcagacaacagcggggctagagaattgatgtgtattcgaataataggagctagtaatcgccgatatgctcatattggtgacgttattgttgctgtaatcaaagaagcaataccaaatactcctctagaaagatcagaagtgattagagctgtaattgtacgtacttgtaaagaactcaaacgtaacaatgggacgataatacgatatgatgacaatgccgcagttgtcattgatcaagaaggaaatccaaaaggaactcgagtttttggggcgatcccacgggaattgagacaattaaactttactaaaatagtttcattagctcctgaggtattataagatctaaatatcgatagcgatagttagtatcggattaaaaaaacaggtattgaaataaaattaattaatagattctgtatcacgcatatacccttaataataaaatattaagaatttaattcatatattaatatataattcgtctatatctatatataaataaaagaaaaagaacatgttgattatatcaaaattatagaacaataaggaattttaacttatcatggggaaagacaccattgctgatataataacctctatacgaaatgctgacatgaatagaaaaggaacggttcggataggatcgactaacatcacggaaagtattgttaaaatccttttacgagagggttttatcgaaaacgtaaggaaacatcgcgaaaacaaccaatattttttgattttaaccctaagacatagacgaaataagaaagaatcctacaaaacgattttaaatttaaagagaataagtcgaccgggtctacgaatctattctaactctcaacgaattccacgaattttaggcggaataggaattgtaatcctttcgacttctcaaggtataatgacagaccgagaagctcgactaaaaagaatcggcggagaaattttgtgttatatatggtaatccttctaatataaaaattagatatctgtaacttacaatttgtgaaaaaagggggttgtgtaataccacccctgttcaaaaaagtttcggatgttttacttcgaatgaaattaaagaaaaaatgaattaataaaagttttctttcttaatcacttccgaacggcatggttcgattttgtttagatactaaagattttttttcgttcatgcttctgaaaggattcgacatatttttgtataggtatacctataggataaaaaggtaaaattttgagtaagttcttaagtataagttaataaggggacagccattttctagactccataataagtattcaaatgagtaagtgttttttcaatttcaaccattcctttcacgaagatacaattcaagattcaaaaatatcaagaaacctttttttcgtccaccaataaatatattcacagaattaaggaataacaactatgaaaataagggcttccgttcgtaaaatttgtgaaaagtgtcgactaatccgcaggaggggacgaattatagtaatttgttccaacccgaggcataaacaaagacaaggataatcttactaaaggaactaaagtaaaagaaaaggcacttccaaagagttggaaaaaagggtctattttgacctgaaatggatatatccatatatttcttgtgaaatgaaaaaaaatg

SEQ ID NO: 9912 - DNA, 3000 bp, Unknown
  misc_feature (1)..( 3000): cDNA_ID_3034631_gDNA_ID_2096291_Annot_ID_195389 3000 nt of promoter + ATG
attttttttatagagtttttatcataattttgcatataatagaagtagtaattataaaaatattatatattaattatcaattgggtttttgctaaacggagcctggatacttcattttattagtccgatcacgtaaaccataaaaaaattttgataatctaatatcaatctaaatactccctgcatttaattccactttattttttgcgcttcgcgttacaaatttttgataattcaatcaatctttttgagcgaaacagaggatatctcgatcgagggagaaaatggggaaatcccatatagcccgatatatctgacaagtcgcactatatgtcaacccaagatgtatctccttctccaggacttcgaaaaggtacttttggaacgccaataggcatgaaatgaaaaaaaaagagaatgaagttctctatttcactttgatgtggaaacgtaaaattggggtttcgttttttaatactattatccttttttcctactttattaatcatatttaaattaatgatatttaatacataagttgaataagctaaaataaaatataaaataaaagtaaagtaagagagaatgaataaaactaaaggaaattttttacgaacgggcttctgaatgatcaacaacaatagctatcttggttcatagaaaataggattaacccccattgcatattggtacttatcggatatagaatagatccgcttccctttttttctatgaattgaattgttccattattactaacagaatagaacaaatattaatcctttctccgaaataattacctaaaaagggggggtacgtagcatagttttttccaatgcaataaagttacatagtgtctatttttcgttgataaaggggtatttccatgggtttgccttggtatcgtgttcatactgttgtattgaatgatcccggtcgtttacttgctgttcatataatgcatactgctctagttgctggttgggctggttcgatggctctatatgaattagcagtttttgatccctccgaccccgttcttgatccaatgtggagacaaggtatgttcgttatacctttcatgactcgtttaggaataaccaattcttggggcggttggaatattacaggggggactataacgaatccgggtctttggagttacgaaggggtagccggagcacatatagtgttttctggtttgtgcttcttggcagctatttggcattgggtatattgggatctagaaattttttgtgatgaacgtacaggaaaaccttctttggatttgcccaagatttttggaattcatttatttctttcaggagtggcttgcttcggttttggcgcatttcatgtaacaggattatatggtcctggaatatgggtatccgacccttatggactaaccggaaaggtacaacccgtaaacccggcgtggggcgtggagggttttgacccttttgttccgggaggaatagcctctcatcatattgcagcagggacgttgggtatattagcgggcctattccatcttagtgttcgtccgcctcaacgtctatacaaaggattacgtatgggcaatattgaaaccgtcctttccagtagtattgctgctgtcttttttgcagcttttgttgttgctggaactatgtggtatggttctgcaactactcccatcgaattatttggtcctactcgttatcaatgggatcagggatactttcaacaagaaatatatcgaagagttagtgctggactggctgaaaatcaaagtttatcagaagcttgggcgaaaattcctgaaaaattagctttttatgattatattggtaataatccagcaaaaggggggttattccgagcgggttcaatggacaatggggatggaatagctgttggatggttaggccaccccgtctttagaaataaagaagggcgtgaactttttgtacgccgcatgcctactttttttgaaacttttccggtagttttggtagacggagacggaattgttagagctgacgtcccgtttagaagggcagaatcaaaatatagtgtcgaacaagtaggtgtaactgttgagttttatggtggtgaactcaatggagtgagttatagtgatcccgcaactgtgaaaaaatatgctagacgggctcaattgggtgagatttttgaattagatcgtgcgactttgaaatctgatggtgtttttcgtagcagcccaagaggttggtttacgtttggacatgcttcgtttgctctacttttcttctttggacacatttggcatggtgctagaaccctcttcagagatgtttttgctggtattgatccagatttggatgctcaagtggaattcggggcattccaaaaacttggagatccaactacaaaacgacaagcagtctgatgcaacattgctttttttcttctagtttctgtttgttattttatttaataggtagggtactgtaggaatctttatttaaatcgctgccgtttctttgactctttttctttctttatcctcccaagtaaacaaaacgtaaacaaaacaggtatgaaagctataattgtaaaccacgatcaaatttatggaagcattggtttatacatttctcttagtatccactttagggataatttttttcgctattttttttcgggaaccacctaaaatttcaactaaaaaatgaaataatttttcattatcttcattaacgtaatcagcctccaaatatttggaggctgattacgttaactagtccccgtgttcctcgaatggatctcttagttgttgagagggttgcccaaaggcagtatatagagcatacccagtaaaacttacaagtaacccagatataaagatggcgactagggttgctgtttccattattatagaattgaaagaccacaccggatctatgctaagatcatttatttacaacggaatggtatacaaagtcaacagatcgtaatgaatacaaaataagattt

SEQ ID NO: 9913 - DNA, 3000 bp, Unknown
  misc_feature (1)..( 3000): cDNA_ID_3034645_gDNA_ID_2096291_Annot_ID_195373 3000 nt of promoter + ATG
ggttggatgaattatccgaagaggatcgcttaaccgtagcaagagcacgaaaaattgagcgtttcttatcacaaccctttttcgtagcagaagtatttacaggttctccgggaaaatatgttggtctagcggaaacaattagagggtttaatttgatcctttccggagaatttgattctcttcccgaacaggccttttacttagtgggtaacatcgatgaagctactgcgaaggctacgaacttagaaatggagagtaaattgaagaaatgaccttaaatctttgtgtactgactccgaatcgaattgtttgggattcagaagtaaaagaaatcattttatctactaatagtggacaaattggtgtattagcaaaccacgcgccgattgccacagctgttgatataggtattttgaaaatacgccttgctaaccaatggttaacgatggctctgatgggcggttttgctagaataggcaataatgaaatcactattttagtaaatgatgcagagaagaatagtgacattgatccacaagaagctcagcaaactcttgaaatagcagaagctaacttgagaaaagctgaaggtaagagacagacaattgaggctaatctagctctcagacgagctcggacacgagtcgaggctctcaatacgatttgattttgtaactagctgacgtgtaaaaaaaaagaatgtataaaaaaaataggatcgaaagacgataaaaacaataaaataaaaaaagctggttacaaaaacttattagacaccattgatcatggtgtctaataagttatacctactattggatttgaaccaatgactcctgccgtatgaaagcaatactctaaccactgagttaagtaggttatttatcattgtaaagagaaggaaaggggatacctatcacatcgataggattataaatccaatattatttctaagcaataccaataaacaatgagatcaaagagatataatgttcgatcatgtaatattaatcttgacaagaaattatctacatgataagataaaatgtgtatcacaaacacaagggctatagctcagttaggtagagcacctcgtttacacgtgcgccaaagtttttcagaggagtccatcacgcaatcaaactaattgattgatcttattaagaaatcgatgtcttactccatgacttttttttaggaaaaaagaggagaacaacagcctgacattaggtcctattaaagtaccccgttaggtagggaatgaatagaacccatcattgatttgagatattgatagggtgaatacccagtctactcaatgctaggtagaatgagtataaggaactcaaaaatgatcttttcgtcctatgaaccttaaggtgtatcaagtttcatgtttgattttttaatcaggatgttagagactatatttaacttaagttgatctagaccaaaagcaaacctacgtcaagagaacccttctttgaaacactttggtagttcttctgtattgtattagaattcaaaaataatcaatcagagtacttggaaccatttcttatcttttttttaagaaaaaatatggtagactaactgatctttcgatcagttaatgaaagagcccaatgcaaaaaaaaatgcatgttgggtctttgaaagagttcgaatcattttgataataataagttcgaactcttttaccgagcaggtctacggttcgagtccgtatagccctaactaagaaatttattctaaaaaatcacattaaaatcaaaataattggataaatttttttacttttttttgtattctttatttctaacaggttacttttaattgctcggttcataaaaaaaatttccatatcataaaccataagtcctggggatcgttcagaataaaacggaaaatttcattttatttcaatggagccaatcactatctatcgatatatcgagatagatacttaatttataatttagaataaacctttttcttcattaattttcatagttgtaatttttttatatgaattttcctcgttcactagctacaatcaaaaagttcataatactttctttttttttttgtatccccactcaatcttggttactttttttatcacacggccttgtttaaaaataaaaaaagaaatctaattaaattcaaccaaaattcaatctatctaatactaagtaagatgagtatggtaaagtcttactggattttttgatacgtcatcatttaaaaaacgaagagatttttcgaaaaatttttttaaacataaacagaaataaaaaaaattactagttattaatcagattaatattatattattatattagaaactattagtaatagaaacatggaactattaagtaataagtgtactgaaaataagaaatcaataaatcttaaaacgagacgtctaccacaacaaccaaacgaaaaaaaatgattcgattaacctgaatttttgttttgactcaagagttctatatcccttgcccaatccactccgattggaattgactaagcgggtattttttccacattcataggagttcgtctatgtttctgctttacgaatatgatattttctgggcatttttactaatatcaagtgctattcctgttttggcatttctaatttccggagttttatctccaattaggaaggggccggagaaactttctagttatgaatcaggtatagaaccgatcggggatgcttggttacaatttagaatccgttattatatgtttgctctagtttttgttgtttttgatgttgaaactgtttttctgtatccgtgggcaatgagtttcgatgtactgggggtatctgcttttatagaagctttcattttcgtgcttatcctaattcttggtttagtttatgcatggcgaaaaggagcattggaatggtcttagttcgtttaccgaatacttgatacaataataaaaaaaaaaaaagtaaaaaaaaccattgaaacaattatg

SEQ ID NO: 9914 - DNA, 3000 bp, Unknown
  misc_feature (1)..( 3000): cDNA_ID_3034665_gDNA_ID_2096291_Annot_ID_195363 3000 nt of promoter + ATG
tgcactggagtactgatgtgtcccatgcacccgaatttacatatagtaatgtccacctcttaccaaaaacaagtcatttatggatattatccggaggttcatgtggatctagtctaattcgtttttcgatccataaagatcaagatcaaatgaatataccctttctttccgccgaaagaaaatctatttctagcctctcagtgaataatgatcaagtgagccaaaaattttttagttccgattttgccgatccaaaaaaattagggatttacgattattcagaattgaatggaaacttaggtactagtcattataatttaatatattctgctatttttcatgagaactcggatttattagcaaaaagacgaagaaatagatttctcattccattccaatcgattcaagagcaagagaaagaattcataccgcagtcaggtatctcggttgaaatacccataaatggtattttccgtagaaatagtatttttgctttttttgatgatcctagataccgaagaaagagttccggaattcttaaatatgggactctaaaggcggattcaatcatccaaaaagaggatatgattgagtatcgaggagtccaaaaaattaagacaaaatacgaaatgaaagtagatcgcttttttttcattcctgaggaagtgcatattttacccgaatcctctgccataatggtacagaactatagtatcattggagtggatacacgactcactttaaatataagaagccaagtcggcgggttgatccgagtagagaaaaaaaaaaaaaggattgaactcaaaatattttcaggggatatccattttccggacaagacagataaaatatcccgacacagtggcatcttgataccgccaggaagaggaaaaaaaaactcgaaggaatccaaaaaatttaaaaattggatttatgtccaacggattacaccaaccaagaaaaagttttttgttttggtgcggcccgtagccacctatgagatagcggacagtataaatttggcaacactcttcccacaagatctctttcgggaaaaggataatattcaacttcgagttttcaactatatcctttatggaaatggcaaaccaactcgaggaatttctgacacaagtattcaattagttcgaacttgtttagtcttgaattgggacaaaaattcttctctcgaggaggtccgtgctttctttgttgaagtaagtacaaagggtttgattcaagatttcataagaattggcttagtgaaatcccatatttcatatataagaaaaaggaataattcgccagattcgggattgatctctgcagatcacatgaatccgttttattcgatttcgcccaagtctggcattcttcaacaatcacttagacaaaatcacggaactattcgcatgttcttaaatcgaaataaggagtcccaatctttgttaattttatcatcatctaattgttttagaatgggtccatttaatcatgtaaaacatcacaatgtgataaaccaatcaataaaaaaaaatactctaattacaattaaaaattcgtcgggccccttaggaacagctaccccaatttcaaatttttattcgtttttgcctttactaacttataatcagatctctttaattaaatattttcaacttgataacttaaaatatatttttcaaaaaattaactcttatttaatcgatgaaaacggaataattttaaatctcgacccatatagtaacgttgttttgaatccattcaaattgaattggtattttcttcatcaaaattatcatcataattattgtgaggaaacgtccacaataattagtcttggacaatttttttgtgaaaatgtatgtatagctaaaaaagaaccgcacctaaaatcgggtcaagttttaattgttcaaagggattccgcagtaataagatccgctaagccctatttggctactccgggagcaaaagttcatgggcattacagcgaaattctttacgaaggggatacattagttacatttatatatgaaaaatcgagatccggtgatataacccaaggtcttccaaaagtagaacaagttttagaagtccgctcgattgattcaatatcgttgaacttagaaaagcggattaagggttggaacaagtgtataacaagaattcttggaattccttggggattcttgattggtgctgagttaactatagtgcaaagtcgtatttctttggttaataagattcaaaaggtttatcgatcccagggggtgcagattcataataggcatatcgaaattattgtacgtcaaataacatcaaaagttttggtttccgaagagggaatgtctaatgtttttttacctggagaacttattggattattacgagcagaacgaacggggcgtgctttagaagaagcaatctgttatcgagccgttttattaggaataactcgagcatctttgaatactcaaagttttatatccgaagcaagttttcaagaaactgctcgagttttagcaaaagctgctcttcggggtcgtatcgattggttgaaaggcctgaaagaaaatgttgttctagggggggtgatccccgccgggaccggattcaacaaaggattggtgcattgttcacggcaacataccaacattattttggaaaaaaaaacaaagaatttagctttattcgagggagatatgagagatattttattctaccacagggaattttgtgactcttctatttccaaatctgacttttctaggatttaatgatttctaatagcggactatttaaaattttagtttttgttgtttgctgtagtcatttgctttcgtaatttgttaacactaataaagataataatcaatacaaaataatggcttggttcatgcataaatggccatccccggtacaagagaaggttccatcggaacaaaattttattttagtttggggtgcccccctttttaagtgtgaaaagaaatg

SEQ ID NO: 9915 - DNA, 3000 bp, Unknown
  misc_feature (1)..( 3000): cDNA_ID_3034661_gDNA_ID_2096291_Annot_ID_195364 3000 nt of promoter + ATG
ctgagaagatcgttttttcgggcaatggtgatactctaagcattccattaattatgtatcaacgctcaaacaaaaatacttgtatgcatcaaaaacctcaggttcgtcggggtaaatgcattaaaaagggacaaattttagcggatggtgctgctacagttggtggggaactcgctttggggaaaaatatattagtggcttatatgccatgggaaggatacaattttgaagatgcggtactcattagtgagtgtctagtatatggtgatatttatacttctttccacatacggaaatatgaaattcagacgcatgtgacaacccaaggtcctgaaaggatcactaaagaaataccgcatctagaaggtcgtttactccgaaatttagacaaaaatggaattgtgatgctaggatcgtgggttgaaacaggtgatattttagtaggtaaattaacacctcaagtggcgaaagaatcctcctatgctccggaagataggttattacgagctatacttggcattcaggtatcgacttcaaaagaaacttgtttaaaattgcctataggtggtagaggtcgagttattgatgtgaggtgggttcagaaaaagggtggttcaagttataacccagaaataattcgtgtatatatttcacagaaacgtgaaataaaagtaggtgataaagtagctggaagacatggaaataaaggtatcatttcaaaaattttgcctagacaggatatgccttatttgcaagacgggagacccgtggatatggtcttcaacccattaggagtaccctcacgcatgaatgtaggacagatatttgaatgctcgcttgggttagcgggaagtctgctagatagacattatcgaatagccccttttgatgagagatatgaacaagaggcttcgagaaaactggtgttttcagaattatatgaagccagtaagcaaacagcgaatccatgggtatttgaacccgagtatccaggaaaaagccgcatttttgatggaagaacaggagatccttttgaacagcctgtgataataggaaagccctatatcttgaaattaattcatcaggttgatgataaaatacacggacgttctagtggacattatgcacttgttacacaacaaccccttagaggccgttccaagcagggggggcagcgggtaggcgaaatggaggtttgggctctggaggggtttggtgttgctcatattttacaagagatgcttacttataaatctgatcatattagagctcgccaagaagtacttggtaccactatcattggaggaacaatacctaaaccagaagatgctccggaatcttttcgattacttgttcgagaactacgatctttggctctggaactgaatcatttccttgtatctgagaagaatttccagattaataggaaggaagtttaatcggaatgaatcacaaaatttcttatatgatcgatcggtataaacatcaacaactccgaattggcttagtttctcctcagcaaataagtgcttgggccactaaaataatacctaatggagagatagttggagaggtgacaaaaccctatacttttcattacaaaaccaataaaccggaaaaagatggattattttgtgaaaggatttttggacctataaagagtggaatttgcgcttgtggaaattatcgagtgatcggagatgaaaaagaagacccaaagttttgtgaacaatgtggagttgaatttgttgattctcggatacgaagatatcaaatgggatacataaaactgacatgtcctgtaactcatgtatggtatttgaaacgtcttcctagttatattgcgaatcttttagataaacctcttaaagaattagaaggcctagtatactgcgatgtgtgatttgatcgaaatttttcttttacagattaagaatgataaactctcatccccttcaatcaatttgggatgccctcgatctgacatgtctcttgaaaagagtaacatgaagctcagaattgtgggtgtattcaatactcccaaataaaaaaaaaggcgattggtctatggtcgattcagaaattcaaattgataggcgtacctcgtgaaaagaagaccttgttttgtcgaattacgcattcccttatctttctaaaagaaaataaatttggttttttatagttttatattattttatttttatataaagtaaacaaatatgtcatggttgcagaagtctatacatcgcatataagctttaagaatattgtggcataaccatcgaggtgacgcaggacctaaaagatcgaatggaacaatacatagacaaataaatcccgtatgaattttaaggcattcctttcacttaaggtaaagagtattccggcattcgaagggaagtagactactcaagaatttgacatttttttctgtcgtaatttttaattcactaaagaatttaaatagaaatcaaagaagaattaattgaatcaatgaaatgttggttggtttgcactgagaacttgagtaaggcgtagattctttttgggtttttcactttattttataaaatgaaatttgaaagcgagacccctttctttatttggtataactacttgagccggatgagaggaaactttcatgtccggttttgaggggggagatcttatagtggaccctatcccaatttttcttttgctaggcccataactaaaaaacctactttcttacgattacgaggttcatttgaatatgaaattcaatcctggaaatacagcatcccacttttttttactactcaaggtttcgatatatttcgaaatcgagaaatttctactggggcgggtgctatccgagaacaattagccgatttagatttgcgaattattatagaaaattcgttggtagaatggaaacaattaggagaagaagggcctacggggaatgaatgggaagatcgaaaaattgtaagaagaaaagattttttagttagacgtatg

SEQ ID NO: 9916 - DNA, 3000 bp, Unknown
  misc_feature (1)..( 3000): cDNA_ID_3034649_gDNA_ID_2096291_Annot_ID_195370 3000 nt of promoter + ATG
tcgtattcgtttagaagaaaaacaaaaattgcgttttcattatggtcttacagaacaccaattacttaaatatgtgcgtatagccggaaaagccaaggggtcaacaggtcaagttttactacaattacttgaaatgcgtttggataacatcctttttcgattgggtatggctttgactattcctcaagcgcgccaattagttaatcatggacatattttagttaatggtcgtatagttgatataccaagttatcgctgcaaaccccgagatattattacagtgaaggatgaacaaaactctagaactttggttcaaaatcttcttgattcatctgcccctgaggaattgccaaaccatctgactcttcacacattccaatatgaagggttagtcaatcaaataatagataggaaatgcgtcggtttgaaaataaatgaattgcttgtcgtagaatattactctcgacagacttaataaacctaacttaagtaaaaaaaaaaattactaaaaacaagagttcggacaactccccttttccattaaaaataaaaaggcacaaggtaagggattttgtcaaagaatatttttcctattcatgtatcatagattggtagggagattgggatcccttgtttgctcttcccagcattttccatatgaaagaaattaggaatagagaatctatttcaaaatcaaaacaaggtagatcttatatcgattcttttttattggatttgatacattgtggtcaatcacgtaagattggtgaatttgttgaaagtacggaaagagagggattcgaaccctcggtaaacaaaagtctacataacagttccaatgttacgccttcaaccactcggccatctctccgacatcaagattatgactgagtatctgggtgaatagcgagttattcatcgttttttagattatggttaatagataccctttttgaccggaaaatttggaagtagatagaaggttttttttaatgagtccgcttttatgttagttcgtactatacaattcctttgtttgtgagaaaattttctcacaaaagaaaaggtaaaggaaataaaaagagttagagaatggattactacctatgccaagatcgcgtataaatggaaattttattgataaaacctttacaattgtagccgatatcttattacgagtcattccgacaacttccggagaaaaagaggcatttacttattacagagatggtgcgatttgattatcattattttttttctcgccgattttgattggaatagaaagaaaaacgagtattgaaaaaaaatctacgcttttgaaggtgaagtttataatataaaaaaaacaatcccttctgtcatgtatccacgattaatgcagccttagatgcttcaattgtgaattatagtattgagcaaaaggtttttacctatggttcccgtattacagatcaatcctactacactaatacaatatacgaataggaggcataggggaagaagcactacgccgagaaatcaacaacacgaaaactttcttaaaaatgattccctttcttcttcttcgttgggattgggactaattaaaatggttggaacaataaacatccatctcgttcgtattttggatacccgtataaccattgaagactgttgaagtgactaattcctggaaacttaggggcgttgagaacaaagaaatttttagagtttccttttttatttttatctagcatgaacccacttggtagtaagaaaagatcttttgcaagaaggttggctagggatttcttgtaaaaacattagccccgcttagttcataatgacatcacatttttacatatattattttcattatgcacctaaaggaggagccgtatgagatgaaaatctcacatacggttctgaaacggagagttcgttaaagcgaatgacgaccgtaacggatgtcggctcaatctgaaggaaattatgcggaagcattacagaattattatgaagctatgcgactagaaattgacccctatgatcgaagttatatactctataatataggccttatccatacaagtaatggggaacataccaaagctttagaatattattttcgggcattagaacgaaacccctttttaccacaagcttttaataatatggctgtgatctgtcattacgtgcgactatctccactatagaaaaaaagaacgaacgctagtcaataaaatactagaaacacaaaaaaagggctttctacataagcatcgcctaaaacgatttttatcagctgtagcaaataactaaacttcatccatcgaaatatgaagtgaagactagatatgcctaaatactttcttttctatggataaaaaaagatttaattgatagaggaagcaccgtaaagatcaattggaaaggttttggaccgacacaacaagagctgtttatttatatcataatatgagataaatcttaggaatctacttatgtaatagagtaatccccgaaggtattgagcagcggtgtagcatcagatcctaaagacagtaagtctttttcttttttatgaagtatgaaaaagtctttttcaaagattctatataaatttttatatgaaagcgggatagttacctttcagaaaattctaatatctaataacagtggacatgcttttttttctgaaggtaggagaaaagataaaacttattatattaattaatatattaattaaatcaaaatgaaagtttgaaactcatgtaattactctcttttgtttaatccaagaaaaacaaaaaatctataagaaatctcattcaattagacattcaattagatataaagttcaaagtaggttaaagttaaaaaactggtacaccaaaacaaaagagttggttgtcgagccgtatgaggtaggaaactctcaagtacggttctcagggagggaattgatccgcctattccgaccgtggagaacaggccattcaacaaggagattctgaaatg

SEQ ID NO: 9917 - DNA, 3000 bp, Unknown
  misc_feature (1)..( 3000): cDNA_ID_3034653_gDNA_ID_2096291_Annot_ID_195368 3000 nt of promoter + ATG
gaaaaaagaaaaatcaaataaaaagataaatgaaaccattttcatccccttgctcggaaacaaaaaggggagttgatgtattgaatccgccgggactgacggggctcgaacccgcagcttccgccttgacagggcggtgctctgaccaattgaactacaatcccatggaaataaagcgggtagcttacatattccttcttatgatttcattttaatcatttcaattttaaattcaaatttttgttttgtaacaaagaaagtcacaagtgatatattgatatctatatggatatcactttagtgagagcaagacggattactgggtaatccttacattattatcaaatcaattgataatctattttttacaaaaaaatagattattttatcgactctgttcattaaagtttctctttaaaggatccatatcggaatccttagcaagatcaagatcggaattttttatggaaaaaaaaagtaactaaacataagaaataaagaaaaaagtaaagtcgaactataccctataccctgaaatttgacctttttttcttaccccttctctgtcatttatgcaaaaaaaaaaaaatggttatgtagacagctaattattgggccgagctggatttgaaccagcgtagacatattgccaacgaatttacagtccgtccccattaaccgctcgggcatcgacccaggaagaatctattctaactttatggataatccatgatcaacttcctttcgtagtaccctacccccaggggaagtcgaatccccgctgcctccttgaaagagagatgtcctgaaccactagacgatgggggcatacttgctcaaccgccatcatactatgatcatagtatgatcagtttttttaaattgtcaatataatgaaatgaaatggtatgactagcttataaggttttttcttttttctatagaattctatatcattttttttttacatttgtattcatattctaatcataattctataacaaataaatatactttctttttatatttgaagtggaaatattaaaattaaaaaataaataaaaaaaaatctaaaaatcgtctagtacggaatcttttcaagaagtgattggtctaacataaaaaaaaaaaagaaaaaaagagggttaagtttcgttttttttttactttccttgatagattgcctcatctcattgttaagaaatagtagtatccctgtctaacactaatccaagaaagtcagccagaatccatcttctaattagggaaaaaggtggatttataagttaagttatcaaaaatttgctttttttttttttagaaaattattgttcagaggataatccgtatctcttcatcacatgtcaagataaaatatcttgggtgtatgtcaacttgctgagtacatgtataaatcaaattaatttcgttcgatgcgctaggctattaaaaaaaaattcattgcatggatatttatcaaatccaatattaaaaaagcaaaaaataccccgttaagtaaatttgaagtcaattcaaattctcatttctagttcccaaatgagctactaaccactatgcgtctattgtatatatatttaatatatatatatatatagattttatttactaccggctcagtcaggaattaaaccaagacggcccttttaactcagtggtagagtaacgccatggtaaggcgtaagtcatcggttcaaatccgataaggggcttttacgttctttactttctaatagtcaaaatttcatttgaaagtctataatttaatttcaaattttgttaatttcattctaataaatttcattctaataatataataactaataataaagttagcgagtaatttaaaaaataaaaatgaacatttgtatattataatacaattacaatgaataatgataagtcgtctcttgaatcgccaaatatatattctttttttttcgatttttcgatagattagaaatcgacaaatccaaaagaaaaagtaagtggacctaacccatcgaatcatgactatatccactattctgatattcaaattcgatagagattaaattgaaacagtagattttttttatttcatatttttgtattaggaaatccgtcgatatctcttattgaatcttcttgtttctatatatttcataggaaatatattgcgttcctgcctagagaaagagagtatttttgcaaagtaataactaaaagggcgtttcaatattttttttgattcgagaacataacaagatcctacattctctttgtattaagaatcaatttgtattaaaaataaacaaaaatcgaatcataatcatggcttcagatatcaattaaatatttccatattgatgcatccgagatgacaatgtaatgtgatcgaaggtgtatgtgagaaagaaactctcatttacagtttcctataattttatttaaatattgaattaaatataaataagaaattttccccttttttgacagatacataagggcatgtacatatagatatcaaagaaaatagaaaaaaatattaaaagttccctttttgcttcaacccgtcaactaaaaaaagggtataaaaggaaaataacaatagttgatactatagtatttaatagacaagtatttaatacacgcaaaaaagaaaaaaaaaagttctttattctttatctgaataatgagtcatccgacaattcatgatttagattcaactacttatacttattaataaactaatagcaaggaagaaacaaattgagttgatccgtttacctaagtaaggaccaataaaatcaaaaattttgatcttcgaaaccaattaaatgaaattctaagggttccattttatggggcagtgcgcgagaaattaaatcataaacaaatgatagaatttgagcgccctgaaaatgccataatatataacatcaaaatctataacattaaggtgttcggaaatggttgaagtagatgaataggaggatcgct

SEQ ID NO: 9918 - DNA, 3000 bp, Unknown
  misc_feature (1)..( 3000): cDNA_ID_3034669_gDNA_ID_2096291_Annot_ID_195361 3000 nt of promoter + ATG
acaagagaaggttccatcggaacaaaattttattttagtttggggtgcccccctttttaagtgtgaaaagaaatgacaaaaagatattggaacatcgatttggaagagatgatgagagcaggagttcattttggacatggtacgaggaaatggaatcctagaatggcaccttatatttctgcaaagcgtaaaggtattcatattataaatctgactagaactgctcgttttttatcagaagcttgtgatttagtttttgatgcggcaagtaggggaaaacaattcttaattgttgggacaaaaaataaagcagctgatttagtgtcgcgggctgcaatacgggctcggtgtcattatgttaataaaaaatggctcggcggcatgttaacaaattggtccactaccgaaaaaagacttcataagtttagggacttgagaactgaacaaaagacagagggattcaaccgtcttccgaaaagggatgcagctgtgttgaagagacaattatctcgcttggaaacatatctaggcgggattaaatatatgacgggattgcctgatattgtaatcatcctcgatcagcaagaagaatatacggctcttagagaatgtatcactttgggaattccaaccatttctttaatcgatacaaattgtaatcccgatctcgcggatatttctattcccgcaaatgatgacgctatagcttcaattcgattcattcttaacaaattagtattcgcaatttgtgagggccgttctagctatatacaaaattcttgattaataataagataaataaatcaattttttttttagggaggggctccctgtatttcgatttcaaaaatcggttactactcctgaattgtagaaaagaaaaagagagaaaaaactggggatattgtgtgatttgtttagttgggatccaaaactaaaatataaaatttaagtaaataagtaaaaaaaaagggggggtcttgaatcaaaataatttaaagttcttatttctgtcagagggcaatatgaatgttttatcatgttccatcaacacactaataaaagaagggttatatgagatatctggtgtagaagtaggccaacatttctattggcaaatagggggtttccaggtccatgcccaagttcttattacttcttgggttgtaattgctatcttattaggttccgcagttctagcgattcgcaatccacaaacaattccaactgacggccaaaatttctttgaatttgtccttgaattcattcgagacgtgagtaaaacccagattggagaagaatatggtccatgggttccctttattggaaccctgtttttatttatttttgtttctaactggtcaggagcccttttaccgtggaaaattatccagttacctcaaggggagttagcagcaccaacgaatgatataaatacgacggttgctttagctttactcacatcagtagcctatttttatgcggggcttagcaaaaaaggattagggtatttcagtaaatacattcaaccaaccccaattcttttacccattaacatcttagaagattttacaaaacccctatcacttagttttcgacttttcggaaatatattagccgatgaattagtcgttgttgttcttgtttctttagtacctttagtggttcctatacctgttatgttccttggattatttacaagcgggattcaagctctcatttttgccactttagctgcggcttatataggtgagtctatggaaggtcatcattaatggttttttttttaatattcttttttaggttagcccaattaattatagaatagttggtttacattatgtaagaaacacttgtatatgtgatatttgatattgcctaggtatatatgagttaaagatctatataatctgaatctgctctactatttttgtgaatttctatttagatttagatagggattcgattagaagttcttcctttttatctgtgaattggctgaaaaaatgataaaaaaagaacgaagaattcaaagaatggttcataaaaaaaatggcataaaaaagtcgtatatatattatggatttttaaaaatcccgcggataggaactactatcaaagtaattcttatgattcaataattttattatattatttcatatttcaattaaagtttttggtttttttggctggattaatcttagcgattacttaattagaattacgtcctaagtcattggatgattgtatcattaactatttctttattttggtgtgaggaacttatcatgaatccactggtttctgctgcttcggttattgctgctgggttggctgttgggcttgcttctattggacctggagtcggtcaaggtacagctgcgggtcaagctgtcgaaggtatcgcgagacaacctgaggcagaaggaaaaatacgaggtactttattgcttagtttggcttttatggaagctttaacaatttatggcctggttgtagcattagcgcttttatttgcgaatccttttgtttaagcccagaaatcacaaaattctggattttttttgtagtttttttaattctatcaagatttaactcctacaattattcattgagacaacaatccttgggaaggactaatttgaggatggggaattagcacatcgattcgctttcttccttccccttattcttttagtttaatagaaacttttttttaaggagtgttgcgaaaaaagtaggtttaggttttttgaacttgacataaaacttggtctcaaattctagcttaattctaataagtctcattattattattgaaaattaaaaattttggaaaatacgtttgtaaatagaataggtttttgattctgtttacaaatatccaaataggtaaattaaattattaaattcaaatttctttttattttcaataaaaagaataaaaaaaaaaggacagagttccttttttatagtttagctagaagaggagattatatg

SEQ ID NO: 9919 - DNA, 3000 bp, Unknown
  misc_feature (1)..( 3000): cDNA_ID_3034735_gDNA_ID_2096292_Annot_ID_195420 3000 nt of promoter + ATG
tcttgactgtatcggcttacgttagccgtgatgaaactcaaggagtgaaaatgggattagcttttatggcattctttatttttgtgtaccttgtgcgacaatttatgctttgggttataagacatacgccagaaggagccccggtgaagaacgtctatctctacattggtctcttgcttgcttacttatcttatctttattggagccgcttcttattcttcggaccgctaggggcatttgctcttggtttggctgtccctaacgggccgccattaggatcagtatttatacaaaaattcgatagcttcaacgagggcatttttttacccctctttggatcacttagcatgatcaaactagattggtcatttctacgaaaggagtttggaaatggaaggcatctccatggacatatgtacgagtgtttttccttccttcccatcgtatacatagcgaaattcgctacttcgtttttagccgccttagctacaaagatacctttgagagactcaattatcctaggtgtcattatgggcaccaagagtagtttcgagttgggttacgtacttacagccttcgaaaaagacgtaagaatattttagctatactcatataacggatatgatgatcatcttaatttgtatatatatttctgttttaatgtttctcatttttaacagaggattagtctggaggtcttgtcgctcctgggcgtatacattctcgtaaactctttgttaacaccaatggctatacatttcctgtatgaccggtctaagagatttgtgtgttacggaagaagaaacttgaaagagaagccagaaatgcaaacgctggtgtgcatcaacaagcctgacaacataacatcgatgattagccttcttagagcaacttccccatctaaagactctccaatggaatgttgtgttcttcacctaatagagttattgggtcaagctactcccacgtttatctcccaccagcttcaaaaaccaaagcctggaagtcggtcttattccgaaaatgtcataagctctttccaactgtttcaagaggtttattgggactccgcttccataaacatgttcacgtctttaacttccgctaaagagatgcatgaacaaatatgttggtttgctcttagtcaaggttccaatcttattctcctctcgtttcaccgcacttgggagcctaacggaaatgtcattatctcagacgatcaaaccctaagaagtcttaatcttaatgttctgaaacgcgccccttgttctgtcggaatctttgtttatcgcaaaccaatttggcaaaccaaagccctagaatctccgtgccgtgtaagtaactacattcttttttttttgtttttttttgtttattctaaatgatgttgaatattttttattttcatacattaaatgcaggtgtgcttgatttacgtgggtgggaatgacgacaaagaggccctggcattagctgaccacatgagaggtaaccaacaagtgattctaacggtcttgcgtctgatccctacgtcttatgccgatgagagtagcttgaggattcatagccaaatggtagacatgaaccgtcatgaagaccaaaggcctggagataagtcaaccatcattgactggacggtgggagatggcacagagacatccaaaattttgcactccgtgtcttacgactatgatctattcatagtcggtcgaagaagtggggttggtactacagtcaccagaggactcggggattggatggaattcgaagaacttggagtcattggagatttgttagcatctgaatattttccttctagagcctccgtgttagtcgtccaacaacaagagtgagaagcatttatcctgaaattgagttagcttcaatcttggtttattttccttattgaaattaagatcctttacaaacaaagtgtaacggatcttataggaagcacacaatagatttttttgtgttgtaaggactacaaaacacatgttcatcattcatgtataggggagaaatacatatactaggtgatgagaaggtaaatcatcgatcccacaaattaacaggcggatttagtgaagaaatacagggtgcatgtgcaaccactaaattattgaaatatgtgttttattttaattctacactaagatttgtatcctaattggccaattaaacaagataaagattaaaagttgaggaactcgtaaacagcccttcacgcgcttaattttttaattttacggaaaacagcaatttcgcatggatttcggataggtggcgtctacgcgctcattgtgcgaatgagtaagatacttagatttcacagttcgataaccatacgcgtcacgtttgggctgacattatactgtctattgggctataacgatattttttccatatcatagacccacataaaataaaaaggcccaataacaaaaatttaaaactagggcacagtttagtgtatgagtatccattagtgatagcatttgatgtaatttataaaatattatatttacaataacctttgaaataatcatcacaattttgtccaaatttgaagttttcaaaaaaataaaatttgatcattgggatctattaaagatttggactaaccctaattagtaattacaggtagaaactctggataaaaaatcgtattctttcggcaaatccgaaccatcttaagatatcttagcccgcttcttcaggtggtcctaatttggcccaacataaaggagagagtggcgggtgagaaattctgccgccaatatattatcacctttcttcaaggttgcaaacttgcaacacctgtcctttctaaaaccctaatttcaaaatcgactgatgttagcgattcgatcgtcgaattacctccgatgcataccttctctctgtactaaaacccaaatctctcaattctcctccgtgttaatctcttttagccgccaaatttcccacttgcgtcttagctcgtgccatagagccatg

SEQ ID NO: 9920 - DNA, 3000 bp, Unknown
  misc_feature (1)..( 3000): cDNA_ID_3034913_gDNA_ID_2096292_Annot_ID_195443 3000 nt of promoter + ATG
gtacttggcaattgatcagatggagtggacgatctctattcatacacaaacctgaaatgtagaagttaaacagaaaatcaaaagtctaagagtgcttaattaaaagagctttatccttgttaagaaaaagaatggagctttatctttggtaaagaataaaagagccttatccaatatgtagaagataaataagatgattggatataagattaattggaccgatcacaagaaaatggaggtagattattaagaaaactatcgacttctctaggtagaaaaaaattgagcgagaagaaaattaaatgagagtttgtaatttagtccataaaataaaaatagaagaaagagagcagaaaaagaggaggaacccactagaatcactgactcctactccacaatctctctctctctctttgtaaccgcctgtttgtgcttattggctctttttcatcaaatctctttttgggcttattcacgtacacattttttcaataatctatcatcttttctgtagtattattcatcgtattcacgtacatgcctatatcaaaatacgtatctgtatatgtgaaagtaaagtggtgaaatttgcataaaagaattgggtttcactctatcatcttagcagcatggatcatgcatgaagttattttttctaagtagtctgtgtgttaatctaaaaccaaaagaaaactaacaggaaaattctagaattatatcaagaatctttgaatgggcatgatatatacagcatatactttatatttttgccaaaaaaaaaatgatatatatatctttagtctagtaaacaaatatatactataactaaatgatcgaatacaactccccagctatagtttaagctaaattatatatattatttggatgatctaatgagtttgttattggaatagtactagagatagtgatgaaataatgttaatacacataatcataaattcataatcaaagacaatgcattaatgtgggataaggaatgtttgttgatttgtgtatgtatattaaaatagcagaatcgagtgagtttctatttctaaactacaactctttttgttaaatgacctttgagacagagagagggataagaatagtatgaatataatacgtctacttatatgtaacacactatacataattacagatttttttttagtttcatcttcagtctataaccttttgaaagccgagagtgataatatgtgaaacagtttctgaaagttttttcttcttctcaaaaattaacagcttttaggctttaagtttcaaatttggatataatagaactagagcaactttctctagtcggttaacctaacatacttaagtattgaataattaactattttgcctctaccagttcaaccaaaaaagccttagaataatgacaattatgtagaccaataagataaaattaaacggccttcttgcattaatcgtaaataaatatagaaaatagcattaaaattatcaataattattgtaaacatctcaatcgagtgttatttaaattgattagtttggtattatcctataattttgttgatcggtcaacatccactccctgtcatcacctaaatcctaatgccacatttcagattcctttcctttattagaaattgttatatgcctcctttgattcgtatagctgttttagtcaatgcagctctcttgcaaatccacatttgtcatggctttattcctttagtttgtgtcataatgaccccctccgaattgagaatttatttttcacggctctttagatgctttttttgggttcggtagaagtatataactcacggttaagcttttatagaatctcaatattaatttgtccatcaaggcatcaaaataatgtttagattaccatctcagcccaataccggccataatcttatatggaggatgcatattattatgtagacatcaatgatcaatcactttgggacaactactcaagctcgttttctaacgaattgggatttttgaattacttactcaaaatagtgtagtcggttttggtctagcatgatctaaaaagtccaacaagccgagaggcccaaaaccctaatattcaaaacttcgtggcctaaatgtttcatcctgtgtaattttcttcaacaaccattatcttgggtgaaaattgtcaaatttgcatattttccattattgtcattgactttctgattcggtaacagtcatatgatgtaaaaatgggccacatccttatttggtttgcttcaggcccatattcgtttgggctgttagattgtagcaatggtacaaagatctgcaattgatgtaatttaaccttggttaatggtgtaattttattttattttgttggggtcaaactgaaagcctcaaaggataagagtttttttctgttttttttttttcacacttttttttgttttgttagaattcataaaagggtaatataaacttgttaaaaagaaatacagtagatacgtcatatatacagaaaaagtaagagagacagatgttatcaaataggggggagtaaaacccactctaatactacttgttatgcttaaatataaaaatgaataaaagacttggaaatcaaataaggaagtgagtgattcccacgtcgcaccttcctcctaacccttttcttcatcgccactcaatctttctctctgcaacatcctctcttgtaacgtgtaacttgccaaccttttcttttttattaacccaagttcgttgccggccattaccaattcctttatcccataatctcttctctgcttccttcttccatcacattccccaaaaagtctcaacacagagcgagaagaagactcaggttttgcgagaggagagatagagagacttagaaagctcggtaagtccgaactttggtggttcggcggctctacgtcgtctgtaggtcgagtcgtcctggagctcgcccgttgtttctcgacggcggaggtggaagacaacgaccgaccagcc

SEQ ID NO: 9921 - DNA, 3000 bp, Unknown
  misc_feature (1)..( 3000): cDNA_ID_2182941_gDNA_ID_2096292_Annot_ID_195441 3000 nt of promoter + ATG
tgttgaagaaaattacacaggatgaaacatttaggccacgaagttttgaatattagggttttgggcctctcggcttgttggactttttagatcatgctagaccaaaaccgactacactattttgagtaagtaattcaaaaatcccaattcgttagaaaacgagcttgagtagttgtcccaaagtgattgatcattgatgtctacataataatatgcatcctccatataagattatggccggtattgggctgagatggtaatctaaacattattttgatgccttgatggacaaattaatattgagattctataaaagcttaaccgtgagttatatacttctaccgaacccaaaaaaagcatctaaagagccgtgaaaaataaattctcaattcggagggggtcattatgacacaaactaaaggaataaagccatgacaaatgtggatttgcaagagagctgcattgactaaaacagctatacgaatcaaaggaggcatataacaatttctaataaaggaaaggaatctgaaatgtggcattaggatttaggtgatgacagggagtggatgttgaccgatcaacaaaattataggataataccaaactaatcaatttaaataacactcgattgagatgtttacaataattattgataattttaatgctattttctatatttatttacgattaatgcaagaaggccgtttaattttatcttattggtctacataattgtcattattctaaggcttttttggttgaactggtagaggcaaaatagttaattattcaatacttaagtatgttaggttaaccgactagagaaagttgctctagttctattatatccaaatttgaaacttaaagcctaaaagctgttaatttttgagaagaagaaaaaactttcagaaactgtttcacatattatcactctcggctttcaaaaggttatagactgaagatgaaactaaaaaaaaatctgtaattatgtatagtgtgttacatataagtagacgtattatattcatactattcttatccctctctctgtctcaaaggtcatttaacaaaaagagttgtagtttagaaatagaaactcactcgattctgctattttaatatacatacacaaatcaacaaacattccttatcccacattaatgcattgtctttgattatgaatttatgattatgtgtattaacattatttcatcactatctctagtactattccaataacaaactcattagatcatccaaataatatatataatttagcttaaactatagctggggagttgtattcgatcatttagttatagtatatatttgtttactagactaaagatatatatatcattttttttttggcaaaaatataaagtatatgctgtatatatcatgcccattcaaagattcttgatataattctagaattttcctgttagttttcttttggttttagattaacacacagactacttagaaaaaataacttcatgcatgatccatgctgctaagatgatagagtgaaacccaattcttttatgcaaatttcaccactttactttcacatatacagatacgtattttgatataggcatgtacgtgaatacgatgaataatactacagaaaagatgatagattattgaaaaaatgtgtacgtgaataagcccaaaaagagatttgatgaaaaagagccaataagcacaaacaggcggttacaaagagagagagagagattgtggagtaggagtcagtgattctagtgggttcctcctctttttctgctctctttcttctatttttattttatggactaaattacaaactctcatttaattttcttctcgctcaatttttttctacctagagaagtcgatagttttcttaataatctacctccattttcttgtgatcggtccaattaatcttatatccaatcatcttatttatcttctacatattggataaggctcttttattctttaccaaagataaagctccattctttttcttaacaaggataaagctcttttaattaagcactcttagacttttgattttctgtttaacttctacatttcaggtttgtgtatgaatagagatcgtccactccatctgatcaattgccaagtactagcttcacccttgacagctataaagttagtcaactaaattttcaattttctgtacaacttttttgaacccaatattattatttggaaaacaaaaaaaaatgcaacacataaatatagcctggagacaaagtctaggaaggacaagatcttcgtctgatttaccatgaaaaattatcaatatttctttattgttttcttcaataaaattttgaaatttagcaagtggaatttgtgtttactatggaaatagatagagaaaggtggtgaaaaggagagagtgatgatgaatcacaaaggtttcttcacatacaagtatagagagaatagtaataaagagagaaagagtaatgatactatacattagtcaattactaatactttattatcatttctctatccaactacaaatatatacacgcccacataattttgtatatgtatctcggaaagagaaaagattggaccctcttttgtttttctgttcagccataaaaaagcctttgacgagaaagcttccattctactttctctctctcctctttgttctcaaacaccaaaagcaaaacatcacaaaaggtaaacacatagatatcttactttcatgttcatatcatcaactagctttttcttttcaaattccaatcatttgatcaactaatcaagaattaattataagactttgcaatctctctccctctccctctccctagctagttctctcttgtgtttcttaactcgagcttctctcaatagtgattatcatctttttcatcatttcaagatttaatgtgttttgcagaaaagagactaatcaagaagagatatcatcaattgaagctgttttcttgagtagagatg

SEQ ID NO: 9922 - DNA, 3000 bp, Unknown
  misc_feature (1)..( 3000): cDNA_ID_2991145_gDNA_ID_2096292_Annot_ID_195438 3000 nt of promoter + ATG
catcatatacatatgcagcaaaattctcacaaaaagaagtgtatgatcaatagaaggaattaatttacatggtaatgtatgatcatacaattatataaacaattatttaactgtttttaaacatttatacacaaagtacaatacattacggaatacataataataatatacttctttttgtttaaaatatgttgttaattattttgttattaatgtgttgttgaataattaagatatatataaagttttgtttgctgcgatatgataagtttccctttgaggggaaaatgttattcttcaaaaacaaaatgaatttatcgaccgttttttgttttttgctagcttatatgggaaaataagtaaataaccataaatgaattaataccctatgataatggcaaaggtaaagttgatatagtgctaatgtttctttttcttggtaaataatacattgacatatagtaagaatggttaacacataatgcaagatttgtagctgatatgtagattatctaacaaatcatataggaaaaagatgatatttagagagaagacgtacctgcatgttattgtacctattgaatgttttgctgcaaatagagcaagcaaattgcattggaccgacatgaatctgagccggacttggtatccaaaacctcttcccacatacttccacatcagaatcaattatctcctcatcaaacttcatcttcctcctcttcttcatcatcaccacaccatcttctattatctctctcttgatgggtttcttctgatgatcgaaagttatatcagagccatcctccgagctaccacggtggtatttaggaaatccgatttggagggtaaccacatcatccttattctcttctttgatatccgaggcttgactattattttccatgagcttgtttagaagaggcaagcattgaatagacgtgttgagtggttcttgtggttggtacaagaatagagatcgttccaacatgttcatctgactctggtggtgatttgatcttgatatagcatctcttgtcttcccacgatataacacagatttagaagaagtagtagaagattgaggtttaagccattcaataaagcttggggattcgaaacttaagcctttcgtctcataagaattcatctctcgctttctctcctctctttcactctccctctctctctctctctctacctccacacgaagaagggtaagactagtagtatgaaaagtttatatattaatatcaacctacctggtgtgtatcgtagccgttcgtcaaaataggttctctctttatttttctccaatacaaaatcttcttctttaaagttttgttttcttttcctcctaccccccaaaacgtatagtgcagaaatgtcgcacgtgtctgtctacgcgtttacatcaagaggaaaagagtgaaattttcttcacaaaaatgtggtgggtcttacttcacatagtgaaaaggaaacgcacaagcgcaaggcttttcaatgaaagagaatcctaagaatcatagtctttttttttttcttctttaccctcatttcctttcccattattaaaattttgtaacatcttaaaccaacaaatacgatatcctttcatcatattatagtcatgattgtcatttaagtgcatatagaccggcgaagacaaaattcatcattacatatcaaaacaacaattccaacatcattttagccgtctttttagggacaaatgataaaaaaaggtaaattgttataaaatcacgcgttcacttttattgacgttggatgatccaagtagcagattacacgatattgatgatacatacactgtttttcatacgcaagacttttctagctagtactctaatccatgatttgcactttatttaaagatatatgaaaatatttattagctttggaaatgagttcactgatattctttgatgcatgattgggttcacgggtctatagttgatatggcagcccacacacgtatatgtttgcaaatggtactatagaaaactgaatccaaaaagtgtgaaactactttggttgtatttcattcccgttttaaatctgtcgaagctatattcattcagaagtaataaagcttaacattaatccaaaaagcagtcgcattagacattcccatcctcacggtagcgttagaaagactggaatggagcacaacaagcagatgagatgacctacacgaaggagtacgttgacccaaaaactgtaatgaatttacgttaatttttgtgttatagacgaggttttaggacgttgtaagattttgaatacaaagaggtagtggagttttgacccattaagcacaagatttttcttagaaaacaaaaaggttaccgcaagtaagtcaatacctgaagaataaaatacttgaaagaaaaacctaagaagagtgagtattcattttaagacgaaaatagaagctgattcaatgtatgtgtcatgttgtggtggaccctaaaacaatattaaccgcgcaaaatttccgaatggtagtatagctaaccgttgaaccgtatgctactatgctttcattcactaaagaattatggtttacgtcccatgcggttcaaacacggtatatacatatctggtcatattttgtgaaaccgggtttgaacaactcaccaatacaatagtactacaattcaaattaaatttttctttttgtaattaaacttcattttggtataattaaagaaaaaaaatgtttccttttgttgaccgatacaatgactgtatattcaaaaaattacttttagacatccaaattatattttcatctatcaattacaatattatgaaaattatatatttacagatgctaaatcaaaaacggtacgtttcaccttaaaccctaaccctccgaatgagctagagagacaccagcccttctattaaaagttaaaacccttccctctttacttctccgatagctttttattttcctcgtttttgcgccgacca

SEQ ID NO: 9923 - DNA, 3000 bp, Unknown
  misc_feature (1)..( 3000): cDNA_ID_3034706_gDNA_ID_2096292_Annot_ID_195434 3000 nt of promoter + ATG
caattgttattaagtaacgtccttccaaacccgttctgccaaacccgtcctgtaaaaaaaaaccgcggtaccccgctagttgaaatttataattaaaataaatattttatggattgcgattgtgttttagtttgtcaaacaaaattttgttttaaatagttgtcgaaatctagttcaaattttggagaaataagatttagtgaattgataagaaatgtatttagttgcgtttgctcattttaagggattgcaattgtcttttgggttgtcaaacattttttgttttaaatagttgctgaaatctagttcaaattttggaaaaatctgcgtgatatatgggattgaaatatatttggaatgtttttcgtttgttaatcaatttattgctgaaaaaactaataattaaaagccagtgacagccattgtaaataagtttcaactccaggatttatttcacaaaatggatgcaaaaatatatatatagattatatctatatatatgtattttaaaatctttctcactttaacctcaacatccaaagtttatatgtatatatagtttatttgctcgatatgcaaaagcgtctgtagtccaacggttaggataattgccttccaagcaatagacccgggttcgactcccggcagacgcatttatattttttaacaatcttttctgaaaatttgaaaagacaacattttgcatacaccaaacatatgtacatatgttgtgttcttgttggactcgatggtttatcaaccccaggtccaataggacaacacgaaattatcatacaaaccacaatgattgattgtccccaaacccttatttctgttaccaactccaccatattgtcacaacttttcccctgttatcaaaacttccaaatcaatgttctatgaattttagtttaaatttttaccaattgtttattgatttatacgaattcaatcaaatgtaaaacaccaaacagaatggatcagtaaatataaaactttgttatcttctccaaaatttacattttcatgtgtgtatagactatagtatggttacgatgaagttgatgatgttggtgaccaaggagtcatatccatgggataactcccaagcacccgcaagaacgatgtaaactcctgaacctcggcaagcgcgttctgagcacgcgcctccgccatcgaggcctcgaagtcaacataaaacatgtactcaaaatgcttcgccgtcccgacattggcatcatccacgaccctgatcggacggttgtgattcggcctcgattcgatcttcgtcaagctaatgtctctgaaggcgaaagcagagagcaccttgaaaagcacgctggttcctttctcgtgcgcaaagacaatgctagtcttgaacggtctatctgttctaggtatgattggctcacgcgccagcatcacgaagcgcgtcacgttactcacgtcgtcctgaatcccatcttccaaaatctccaacccgtatatctcggcggcgcgtgcactcgcgatagcggctgtgtcgcggaggttgttagaggcgatgaactcagcggctcctgcggtgtcatcaactgcctcacgtgcgacattaagtccgagctttgtgagcgtgtgctcacactgagcgagaccttgagggtgtgagatcacacgtgtgagaaactctttacgaacgccgggaagagccagtaaacagtgatgaacagggagttgaacttcgccgactatatgaagacggtgacggaggaggagatcgtaattacggtggatagaaccgccgagagagttctccaccggtaaaacagcacgatctgcgatccaaagctccaccgcttgaaacgcaacctcaaattgatcgcaaggtatagcttgacaattaggataagctttaccagcggctgcttcagagtaagcaccgggaacaccttgataagcgacgcgtagattagatccgtgcatcggagccggcgagagatccgtcatgctaaggggtttcagtggattatgacgatgctgtggaaccaacggattgctatcagatttctcaatcggaacaagattcattcctggaactcgtgcggcggcgctgttatggccgttgagatgatcaactccgccggaaactggaggcacaggtaaggattcagattcttcttgagaaataaccttgcttgttagaatagcgcaggagctctgccattcagaacgaccagatcgcgcgataagcgcagtcgccgtcgccggctggctagcacctaatattggagaagaagatgatagagctttcatgttttagcaatggcgtcttaaaattggttattcaagctcaatgaaatagcaaagtcgagaatgtagaaaaacatgttttcctggggtagttcgtttgtgtggtcacttctccacctaccacaaccaccttacaagtcacagtcgtatggaccataccggcatttaactgaaaattaattcgacccgatccggtttaagttatttggtttcataaaccgattttctccataccccaattgagatatgagagtgtttaagactttaccggaggtgattcgagttcaaggagacagtctacacttgtgacttgtgagtcggagcttgagaacacctacagctacaagaaggaagtttgttttcgcctcgagctagaaatcctaatttgtcatcatcgtctcgaatggaaaggctgtgttcgaaatccaaaatgcaaatgcgataaagatgggcttttagataggcccaattagagtccaaaaatgaggggcttatcagtgatttggttgccaataccaaaagcgcgggaaaatgataaaagatttttttttcctctctactctttcactcactttctccggcatccacgaagccctaccagtaaaagcccttttgttgaccctaaattctccttcaaagcttctccaggaataaagctcctctctatataggaatctctctctgtcccgcgtaatttataatcgccgcaaa

SEQ ID NO: 9924 - DNA, 3000 bp, Unknown
  misc_feature (1)..( 3000): cDNA_ID_2182888_gDNA_ID_2096292_Annot_ID_195423 3000 nt of promoter + ATG
tcccgcttccaagagtgaaggcactttgaagaaaacagataaggttgagaagaagcaggagaataagaagaagaagaaaaagaagaagagagacgatttggcgggagatgagtataggagatatgtgtataaggtgatgaagcaagtgcatccggatttaggtataacgtcgaaggcgatgacggtggtgaacatgttcatgggagatatgttcgagaggatagcgcaggaggcagcgaggttaagcgattatacaaagcggaggacgttgtcttcgagggagatcgaagcagcggttaggttggttctgcctggtgaacttagccgccacgctgtcgctgaaggctctaaagctgttagtaacttcgttggttatgatagtaggaaacgttagttggttttgattccctaatcgttgtatcttttttcgtgtaatgtttttttcaacttgactgttagtgtaaggtttaacttagagagtatggtttctatagttgtatttcgttttatgttacatgttctgtagaatatatgttatgttgttgaaaatggagatggacttgatcatttgaatcgtggtttatttagctttcatattttgttctcttacatttgttgtgtcgttaaaattagtgacatccactaaagtaatttgatcttgtgtgtgtttgtagaaacagagccattgacaagtgatgcagaataagggaaaagataatgggaactatggaaaaggtaaaagtaaaaagtactcactacatgctgagcattgaagttggtcgccgcatatcccttgaaagatcctttctccttgaccttctccaccccaacctctacatatattgatacacatacatgagaacgtgtctgagtatatatgtgtttttgtaccataaaaacacacaaccaactcagaatgcataacaacaatatatgcataagcagcaccaccaaaaggaatataccataagttattcgatatgtagaaatatatcccccccccccccccaaaaaaggtgaaaaataaaaattgatcccacttcaactgtatcaacttatactaattacaaaggcatactttattatacaaaaaagcatgtatcatcactttgcaataactttttaaagtttcactagtgtcacatgcattttctataaaactatcttcttgtacctttcacaactaatgaattatgatcgccatctctcacccggtgccggtagcatggctaataataagagcaaagtcgagccaaaaactcacgaagaagatcttcgggttagtcgtttaatgatgattattatcattattttgtttacctctattcttctaataattatgactactcttctgatcttgtcctgaaccagtctaagggatcaccgacacctactataggctataataagaagagtcgatgaacatgtttggaagagaaaagagatcaagattttgaccgacttgaaaacgtaagtgtggtcaacggcaaccacaatggataatagtcgaacatcatgtgtctttctctttgaccgggcaacttcggaacctttggcaatgtttctctctatttttaggttttgttattgttgatctttctataatctatttgtagtaggtcttgttgttatttcgattgaacggaacattatcctcgtttacactaatgttttttttttacgagctgagcaacacatatatttgctctgcataagaaaaagctttaaactcgatcaaacgcactcttgacggaaggtgaaaacacagcacagaagaacaccaaagttctttgttttggttataattttatctgcttgatcacgtttcttgttacatgaacacaattgagaaaagaaagagaaagaagctcccactttgctctgttctgctttctccgcttcttaacggctctgttaagtgttaacgaaacagatataaaagtgggcctgggcccaaatatattaagtccctctttcggtcttaaactgggtctgggcccaactgttaacagaagtgaactggttttgatacgctgtcgttctgactgttctaaaaccgaaaacagagttaataagtcataattttccttctttttttttatacggatgtgaatttatttctgcagaagaaagttgtaacttacaaaattgtctttgattggccaaaaaaatagagcaggggaacatatttctgcagaaaaaatgttatttgtttttttcccttaagttcacaacattttttctgactatctttttttcctttgcacatttcgggaaaggaataaaggcttccgacaaagcaaaggagcataattaaataactaatcataacaatgttagttaaagacttaaaagtaaaatggaaatggaaatttatctctctattcaagaaaaacttttaggcttttagctgaatgtactgatgagtgacgcctacaatctcacacaattctttgttccttcatctataaatgaaactgtagtaccttcatgtgaattagaatgttgatttttgttattaactaaattgaaaccatacatacaccacacgaagtctccttttctttattttgctgtgtgttaatgaaaatgtaatatttacatgtaaatgcagttgttgatgttagatataaatatgcgtacgacaaaatttacagacgaatcggatagagaaaacataaatgttatcaacacccaagttgtagtgttgtacaacgttacaaaaagaagcaaagaattaaaaccaaaaaaaaaaaaaaaaaaagtaggaatcttccagcttccaagatttcttgattcattcacaagcaatgctaaagaattaagaattttaaatcagtagttttgtgactaatccttatacaaaggcaaagaatctaattgtccgtgttagtccctttatatatatcgtcgaaccatatcaaagcaatcaaatcaatctttgctctctatcctttccaagcaattaactgaagtccatcaaaaccttctctgacaatg

SEQ ID NO: 9925 - DNA, 3000 bp, Unknown
  misc_feature (1)..( 3000): cDNA_ID_3034723_gDNA_ID_2096292_Annot_ID_195427 3000 nt of promoter + ATG
atttattaaaataggtatataaaagtgatcgaaaattatgtgtaaatcaagtaaagaaagaagagtatatctacagaatcaaatttgattcaggcactattactccttcgtttcttacggacatggtttggttcgtgaacaaataaagtctctacctcttggctcccgacgtcggtggcttcaaagaaccgaagatctttggacaatcttgtcttctttgtgagagaaatctcacgcggtcgctttcttggcggcggaggacacgtctccacctccggaatcttgtgatcacttgaagttggagtacacagagattctaacaactcttctttcttcgagctatcttgatgatcttcttcttcttggcttctgggtttctgctctactgtcttttcttcttctagggtctcgagaagcttagacatggtcacatggatgtgaaagtttcgtgggcttttaccttccaaaggaaagaatattaatttgaaagtgaaattggaatatagaaagtgatatcatataggtagagagagagagagagagaaaaaagaaggggattaaagagtttgtattttgcgaaaatgtacatgtatgaattaatcttgaatattcggatattcaatgctttttgtgcaacttaattgtcttgggaattagaagtgaaacttttcaactgcccctatgtccaaacctatagaaatactatgccggagtcaattagttagttagattcatttgtgtttactgtttaacgtaattaatttgaatataagtttggttaattacccttgttacctattaaaacttgaatgttaacggagaagcttatccaaattaatgtctcatgtgtcacatcattcttcgattgtatgtctaaatacgtacaaatggttggcataggataccatttcatcaacttaaaaataatattttcatttcataattgatgtccactttccgactcgcccctttggaattattcgctccttcgcagcctactatataaaccaatcagataccgccatgtcatcctccactgatttgtgttcgagaattgctcatgttactgtagtcttttctccatgaacaaaattacttacaacttacaaggctaaatgatgtttgataggtttaacattttaattactctgtgctctatataagtccacaatttgaataatcaaactgaaacctgtattttaagtttgtccccccattgaagtaagtatatggttatgttggcatttagtgtttgcatcgaatggtcgtttatgtcaatgaaagacgtcccgtcgctgccattgaacgtacgtaataagcattaaatcttaacagtgtgatgcaaaatttctcttatagctcatcatcctcttttttttttcttaagaatttgttgcatgtgaagatatttggtcactagagtatcgtttctatagatgttcaagacagtagtagttggaaggccgtattgaaaacagtctgagatggtagaaagaaaatcttattttacattgatctaatatatgaagactcttctgatgatgcatatatatatttccaacttcgtttgcgctttattcctacggattgtcaaacttttaagagaaatatgttgtccttttaggttgttattggtcatcagggagatgtaggggccatgactgtacattctttttggcctatcaaaactcgattctcttttttaactcattggattcgtgctgatcatgctctttgagaatgtattcttatagtcaaattcaaaactgttgtagttaacatttgttaaacaattaatggctttaaagtcatacttttgatacctactaaaataaaacgttattaattatgttgcaaatggttagaaggtgtaagatatacaatgcaatttggttaggattccagaaaaggctaaagaacagtgacactactagcaaaagtgaaaaaaaaaacatggccatatttatgtatacaaagtctacgcttaagaggaaaatgaaggcaacagtaaaatagtgaagaaaatgacaatcttataactaagaagatagagacatataaccccatttagtaaagaggaaagttgtaatgagaatggaaaaaataaaacctagagactcagttaatgggttgaaatttcaggctaaaatatgtttcgtcttcttgtacgactacatataacacacataacaaaactaaaactcgtaaggtgtatgtgtgaaactagttgtgtatatacataagaacaaatggtgaaaaccagtagttagggatagatctctgtccaaacatattcttgatcgatcttagatcaatcatgcactcatagagatctacttcgtttgtttgtttattagactcattatctctatgagtgattgagtattatatgaatccgtttctaaacaaagatgccgaaggagttgatgttggggtctgatcgcgccagaaaacttaggtttttctctctgtgtttgaaccaaaagtcgtggtaactctgtctcaaagaatctaataaatctctaattagaccgtttgtaagtaaaagaaaaaaagcttcaagttcaatgaaaaataaagataatgattgggacttttaggtttgtttgtgcttctttaattattttctaacaaccttttatagaaaaaaaactctagactagtgaaaattcggagagtttcatgttgctgcgactacaccacgtctctatctaaacagaaaagggtcaggtaaaggagattaatgtaacaatcgcacacgtggcacctttttctttgtcgccttccaaatcattaattaaatttccatttatttattttctctgctgtcatcaccaataattttaatttaatttttaccaaaaccagaatcaaaattttgaacggagaagaagattgaattcagaaaggaagaggcagatctgttattctctgttgaagtctgattgatctgatcggagctattgcggaggaggggtttactgcaattgcacggtggta

SEQ ID NO: 9926 - DNA, 3000 bp, Unknown
  misc_feature (1)..( 3000): cDNA_ID_3034719_gDNA_ID_2096292_Annot_ID_195428 3000 nt of promoter + ATG
tactcaaatttccagacagaatcaggctgttctcccaacaatctctgttcctattcgtttaagtacggtgatggaagtggcacttctggttactacatctcagatttcatgtcctttgatactgttattaccagtaccttggctataaattcctctgctccctttgtttttgggtaagctaacagcaaagaattgtgtatttacgtggggtttatatatatgtacatatcccataggttttatcttgcatttggaatcccctttcgataatgatgatttctttagtatggtgcattgccttctctaaatttaactaatgactgcatcttcgggggggagaaaatgttggccaaatgagaaacaatatttctgcctatcaaatacactcattagttttatgtttaagtaattaacatctaccaggaagtacaatatgatctaacttccaaatcatcttttctgtactgtttcaactttcaaaatatgtgatgcttgtcttcaatattgctaacaggtgtagcaatttacaatctggagatttacagaggcctagaagagcagtagatggcatctttgggttaggacaagggagtttatcagtaatttctcagcttgctgtgcaaggactcgcgccacgagtattctcgcattgtctgaagggagataaaagcggtggaggtataatggttctaggtcaaatcaagaggccagataccgtctatactcctcttgttccatcacagtgagttctcaatctttctattatacatttaaactcttatcatattacgtaaagagaagcacaggtagattttggggtacttaacatcatgatgaatcagacttcaatgttagggtaggattcctagatttatttttgtataagacaaggaggtagatccagggtttaactgatgattatgaaagtcatttacacagatataaatgcgagagttgttacaatatctgctatatcattctgcttgtaggaatcatatgatccagaaatagacattttgtagctgactctatggaaataatatgcagttcgtatatcttgggttaggaaaatcaaaatatataaacccacgtcttgattcagataatatgctgcaaaaaaatatttcaggccacattataatgtgaacctgcagagcattgctgtgaacggtcagatattaccgattgatccatctgttttcacaatagccactggtgatggaacgataattgatacgggaacgactcttgcttatcttcccgacgaagcttatagtccattcatccaagctgtgagtgtttttttcttcctcagttcaccttcagctttttcagtcaccaaaccgtgtataccatattcagtagtttttgccattgttgaaagtatctgtcctcaaatgttacatttttggaatgaaattacaattcgatgtagacgatatatgttattagaccttacaaaaaagaagatttataaaacgttcaacctgcaggttgcaaatgctgtttcgcagtacgggcgtcccattacctatgagagttaccaatgctttgaaatcacagctgggtaaagttcttctcatgtgtatgtatatataagaagctattatctcctatgcttaagtgctaaaaagatctccatgttgcagtgacgttgatgtctttccccaagttagtttgagctttgctggtggtgcatcaatggtcttaggaccccgtgcatatcttcagattttttctagtgtaagcatattcatacacttacactacttcataaattgtcttttagtgtgtcaatgataagctttgaaaaagtttagctgctcaactcttagctatacgtctactatatctagcctaagactgtatctagcagattagaggtgttaggggtttgtaagcgagccgttagtgagggctgggacgttgggtttataaggatgtctcaacagattgttttgggtgtggatttctcttaaggtttacagtttgaaaaatttgatatgataatttttcttttgctatttcagtcaggaagttcaatatggtgcattggtttccagagaatgtctcatcgtcgtataacaattcttggtggtaactactcttgtttgttaactcaatcaagtgaaactgtaacagtgcagctatttttctcaatgagtgattgctttgcagatttggttcttaaagacaaagtggtggtctacgatctagttcgccaacgtattggatgggcagaatacgactgtgagtgtgttatctattttaccacagagcaataacgaaattggaatacaaatgcagataatgaaattccattccaggttctctggaggtgaatgtttcagcatcaagaggaggacgaagcaaagacgttataaacacaggacaatggagagaaagcggttcggagagttttaatagaagttattacttgttacaactagtagtcttccttgtccacctttttgctcgtttcttgtagtagcttttagcattcactccaccaattatggttggactttgtaagcttatattattgtaatttaatcacactaattaattcttacttacccacccaccacttctctcgtttctctgtttaatcaacctcctatctaccactaaggccaccgacgaattagcacaattttacatgtcggtgtaaagcaacaaacatacccaaaaaaaaattgaaactatatactgtagttgtaatctactagttttaaaatagatttcacgtgaacaatcagcagattcataataattgacttaagagagaatatgacacgtaacgaaaacattaatttcacgtggtgggagtaatgtgcaaggctgtgagagtgtagggaacattattatacgcctttaaatatccatctctcatttctttctttcttttctcccattctcacaaatctctcttccacccattgttatctctgtagaagcgtgagagagatcacgcgtgttcaccgacacaatcaaaatatg

SEQ ID NO: 9927 - DNA, 3000 bp, Unknown
  misc_feature (1)..( 3000): cDNA_ID_3034710_gDNA_ID_2096292_Annot_ID_195432 3000 nt of promoter + ATG
tcctcctccgtcaccgtcttcatatagtcggcgaagttcaactccctgttcatcactgtttactggctcttcccggcgttcgtaaagagtttctcacacgtgtgatctcacaccctcaaggtctcgctcagtgtgagcacacgctcacaaagctcggacttaatgtcgcacgtgaggcagttgatgacaccgcaggagccgctgagttcatcgcctctaacaacctccgcgacacagccgctatcgcgagtgcacgcgccgccgagatatacgggttggagattttggaagatgggattcaggacgacgtgagtaacgtgacgcgcttcgtgatgctggcgcgtgagccaatcatacctagaacagatagaccgttcaagactagcattgtctttgcgcacgagaaaggaaccagcgtgcttttcaaggtgctctctgctttcgccttcagagacattagcttgacgaagatcgaatcgaggccgaatcacaaccgtccgatcagggtcgtggatgatgccaatgtcgggacggcgaagcattttgagtacatgttttatgttgacttcgaggcctcgatggcggaggcgcgtgctcagaacgcgcttgccgaggttcaggagtttacatcgttcttgcgggtgcttgggagttatcccatggatatgactccttggtcaccaacatcatcaacttcatcgtaaccatactatagtctatacacacatgaaaatgtaaattttggagaagataacaaagttttatatttactgatccattctgtttggtgttttacatttgattgaattcgtataaatcaataaacaattggtaaaaatttaaactaaaattcatagaacattgatttggaagttttgataacaggggaaaagttgtgacaatatggtggagttggtaacagaaataagggtttggggacaatcaatcattgtggtttgtatgataatttcgtgttgtcctattggacctggggttgataaaccatcgagtccaacaagaacacaacatatgtacatatgtttggtgtatgcaaaatgttgtcttttcaaattttcagaaaagattgttaaaaaatataaatgcgtctgccgggagtcgaacccgggtctattgcttggaaggcaattatcctaaccgttggactacagacgcttttgcatatcgagcaaataaactatatatacatataaactttggatgttgaggttaaagtgagaaagattttaaaatacatatatatagatataatctatatatatatttttgcatccattttgtgaaataaatcctggagttgaaacttatttacaatggctgtcactggcttttaattattagttttttcagcaataaattgattaacaaacgaaaaacattccaaatatatttcaatcccatatatcacgcagatttttccaaaatttgaactagatttcagcaactatttaaaacaaaaaatgtttgacaacccaaaagacaattgcaatcccttaaaatgagcaaacgcaactaaatacatttcttatcaattcactaaatcttatttctccaaaatttgaactagatttcgacaactatttaaaacaaaattttgtttgacaaactaaaacacaatcgcaatccataaaatatttattttaattataaatttcaactagcggggtaccgcggtttttttttacaggacgggtttggcagaacgggtttggaaggacgttacttaataacaattgtaaactataaaataaaaatattttatagatagagataatttgcaaaattttatatatactagtttaaataaaaaaaattatctccgcggtgtaccgcgggttaaaatctagtctatatatacatttttgcaactattttgtgaaataaatcttgtagttgagaattatttacaatgattgccactggattttaatatttgtttttgataattagaaaaaaaatcttcgaattaaatatttgacatttaataaatttttttaaaatctctttacattaactacacgattggttactaaaataaaactttcaaaatatttaatatcatttaattactacaaaattatcattattgatattgtttttcttcatgactattacaattcaattataatcatcaaaccgcagagatatttgataacatttaattactacaaaattacaaaatatttagacaatgattcataaacatatgataaagaagatcaacattaataaaataaatgagctttttttacgggatgggttggcgggacgagtttggcaggacgagtttggcaggacgagtttggcaggacgagtttggcaggacgttacttaataacaattctaaactataaaataaaaatattttatagatagttacatagattgttacaaattacaaacttttatatatactaattttaaaatataaattgtccctacggtatatcgcgggtgaaaatctagtattattattattaaccgaaagaaatttctttcaattttaaaaattctgtcagttataatgaaaatgtaaaactgtaataaggatttaatatacatattaacatgttatattgatatgttattactattatccaatttgctttttctattactgtttgttggatgtattgaaaatttaagattgtctccaaaatcgattattttgaaattatatataaaaaataagatttaagagatttgtttccaaaatattttgaattctccatttattttcatattctatcatatattttttaaagaaaataatcaagatatacacattttataacttcataaatcgtttgacacagaagagaatcgataaactataaatctgcaatgtttaatattattacgaaatgcttttaggtaaaagatgatatgatagcaagtgtgttttttggacttataaaagtgagtagcacctagtggggggagagagagagaaagagaaacaaagagagcgataaagagatg

SEQ ID NO: 9928 - DNA, 3000 bp, Unknown
  misc_feature (1)..( 3000): cDNA_ID_2182911_gDNA_ID_2096292_Annot_ID_195431 3000 nt of promoter + ATG
attctttttctttttacatttgctctttcctataatcaaagctgcgacaaatttaccttaagagaatttcattcaagattgagatgtatagttgtacgtagacatacgtgtctatatgaacttctatacgtaataattgacacacggccggtaccactccaataatttcatccacgcaataaaggaaggtacatgtcctacgtaataatttgtttgaacaaaaaaaaaagttaatttttgtgtgaaaacgcgagatggaatacttataatcacgtttgctattacgaacaacggaattttataagaaaccaagtaaacattggtatgagctcaacttttgttcgtggttggttaatatcacaatatatgtattgtgtaaacctatgatttttaaaaaaatacttttctatactgtttggtcttgtttcgaattataagaagaaaaaaaactaatcatatggaattcatattatagtgaattttttgatatggcttgcttcggttcaattttgttgggatccggatcgaagtgttgaccattccacatttccactcataccactgttaagtttcaactttttcatgcgttagatagctgtctctttccgtgtcttgtttcatttttgatgcagaaatttgtctttcaaaactaatttcaatttttaaaaatatgtgcgtgtcagaagagtattcataaaacgttggtgccgaccaaaatttaatcttatataagtaaagttggataggttcgatctgctttcaaaagtagaatattctaaatttcagatcctacataggattcgatccaaattaggatagttacgctttgactgtcgactaccaaggaaatccacatgtcaacaaaacttttaagacaaaatttaacgtatttatctatgcaaaaactacaaaatgatgagaaaaaattgattgaaattttttatcttactggataattctgttttagtagctaatatgaaactaaatccattatgcatcgaatcatcgatttggattttagttttcattagagtacaccgctaatctgaaggatttataggaattcgatttagcccactttttcgggactgtatacaactttaattaggataaggtaaagtataatacaggttccgaatgtttgattagttaagatcagtttggttttcctcttaacaattattggggtgtgtttgataaggtccgaaatggggaaggtactacgttggaccaatacaaatggcggtgtgctatggtgtggttattgccaatgcgctcttgggagggcaatgcctaaaggcaatgtacttggtagtgcagccaaatggggaaatgaaactctttgagtttgtgattatttttggatgcttacttttggttttggcacaattcccatcctttcactctctacgatacatcaactcactgtctctcctcctctgcctcctctacagtgcttctgccgctgctgcatccatctacattggtactcttctttactaaaccactttactcttaattcttaaaccttttatattgttacatttaaaaggtgagttttctgttaaatatcaggaaaagaaccaaatgcaccagagaaggactatactatagttggtgatccagaaactagagtgtttggaatctttaatgctatggctattattgctactacatacggcaatggcattatacctgaaattcaggtttcattttgtttccattctttgtttagaacaccactttaatatttattcatcaaaaacaaaagggcagtcacatgatcgactcagttatatatatagagtatttgatatatgaatactatcttcttgcaacgcaggcaacaatatcggcaccagtgaaaggaaaaatgatgaaagggttgtgtatgtgttaccttgtagtaataatgacatttttcacagtagccatcacaggatattgggcattcggtaaaaaagccaatggacttatcttcaccaatttcttaaatgccgagacaaaccattactttgtccctacttggtttatttttctcgtcaatctcttcactgtccttcaactttcggccgttgctgtggtaaatacaatttttttttaacgtttttctttcacatatatacattgttattattttattttattttcgtcacatatatacattgttactaattttgagttatgcaggtatacctacaacctataaacgatattttggaaagtgtgatcagcgatccaacaaagaaagaattctctatccgcaatgtcatccctcgactagttgtgcgttccctcttcgtcgtgatggctacaatcgttgcggcaatgcttccattttttggagatgtaaactccttgttaggcgctttcggttttatacctctagacttcgttcttcctgtagttttcttcaactttactttcaagccgtctaaaaaaagtttcattttttggatcaacactgtgatcgccgtggttttttcgtgtttaggggtgattgctatggtagcggcggttagacagattataatagatgccaatacgtataagttgtttgcggatgtataaaagaacatgcaaagcaaagtgagattgttatttctatatttaagaataagcctttttttttcttagaaaaatgtttatgattataaatttggaaaataatattcaaattttgataacaatatttttacataatttaaattaattaattttgaatgaaataaatacagatgaaataaatatctagaaaattgataaatcacagtacaggcctggaatatgagcatttgaaacccaacgcaaaacaattcctagaaacggaagcccaaaagttgggggctataattaaaccggatttaaaaaatcggtttgattggttacccacacaaaaatctggttcaggattttagactcgttttcaatttcaagcgtgtttggttcgccggcagagagacataaccaaacaaatagggtttaagctctactaaaatg

SEQ ID NO: 9929 - DNA, 3000 bp, Unknown
  misc_feature (1)..( 3000): cDNA_ID_3034727_gDNA_ID_2096292_Annot_ID_195422 3000 nt of promoter + ATG
gtggttactactttttgaaggaaattcacatgtttccggctgttggacccttccttttgggtttgtgtgtgcctcacggtcctcctctagggtctcaactggtagaaaagtttgaaagctttaacactggaatccttttgccacttttcttgttcttctcaatgctgcaaatcgatggaccttggttagctaaccagatcggtcaactaaggcattttgacggtcagttgtatgaagccttgaccatcatcatcgttgtctttgtcgccaagattatcttctcaatgattcctgcattgctagccaaaatgcctctgaccgactctttcgttatggcactcatcctcagcaacaaaggaattgttgagctgtgttattttctgtatggagttgaaagcaatgtgagttcccatatttaactttatattcaagacaattcaactctccaacacttaatgtttttttttttctttctgtcttataagattattttgttgtgttacaggttcttcatgtgaagtccttcacgattatggcaacgatgattttagtgagctctacgatatcaccagtgttgatacattacctatatgattcgtcaaaacgattcattagtttccagaagcggaatctaatgagcttgaagcttggatcagagctgaagtttctagtgtgcattcacaaagcagaccacatctcagggatgatcaaccttctagcacagtcttttcctctacatgaatccacaataagttgctacgtgattcacctcgtcgagcttgtgggtttagacaatccagtctttatctcccaccaaatgcaaaaagccgaacctggaaaccggtcttattcaaacaacgtcctaatcgcttttgataacttcaaacattactggaaatcgatatcgctggaattgttcacatgcatctcaaaccctaggtacatgcatcaagagatttactcgctcgctctcgacaaacaagcttcttttctcatgctccctttccacattatatggtcccttgaccagacaacggtggtctcagacgatgtcatgcgtaggaacgctaacttaaatgtcttgagacaagcaccttgctccgtggggatctttgtccatcgtcaaaagcttttatctgcgcaaaagagcagtccgtcttttgaggtaacacatatttgaaggtttgattgttccatacgctaatcattagtttccgtgcttgaatttgtgtttacgtgtgaaacttgatttgtctaaaaccaggtctgcgcaattttcgtgggcgggaaagacgacagagaagccttggcattgggaaggcaaatgatgaggaatccgaatgtgaacctgacagtgttgaagctaatcccagcgaaaatggatgggatgactacagggtgggatcagatgctggactcggcagaggttaaggaggttctgaggaacaataacaatactgttggacaacatagttttgtggaatacgtagaggagacagttaacgacggttccgacacatcaacactccttctctcgattgctaattcttttgatttattcgtggtggggaggagcgccggagtagggaccgacgtggtgagtgcattgagtgagtggacggagtttgatgagttaggtgtgattggagatctgttggtgtctcaagattttccccgtagagggtcggtgttggtggtgcaacaacaacagaatgtagcttgtagatgatattacattggcaactactctttattcatttataagatacaaaaaatagaaatacacttctcacacgagacacatttgtagccccaaatttttaagtgacagttcgtctccgtggccttgtgatgataacatttgcaaatatgactttaaatttaattgattccacataattttttaaaaacaatgaaatcagaaaaaaatagtacatgttttataattaaattaacattcaatgtgagagttacatctatttacatgttttacaagttttaatctccttttcgctatacaataaagaaaaacggcaaaaataagcaaactagacaaataaattacatagcaaattagtatatagtcttaaaagacctacttgccaccaatttgatcattaaaaatgatgagaatttcacgcacgtagtatacattcaatgaaattacccaattaaaacctttagaggaatctattaccaaccaataggaattgagttcaaaatggtttgtaggtgatttacacttgttctcatttctttatagtcttaagaccacaaatacgactagccaatgaatatttaatgcctaactacttggaagaatcttaatcctgtgattatgctttacgtatacgtagggttcaagcattaattagtaattttgaatttggagaaattttataagagagtaatttggtatcctgacctaggtacaatattctttagtttatattgttatttatcttaccctgccttgattagtaagactcttttagtatccattttcctttgctatattatttggtttaatttgcatgcttagctgtttgaatgacttaatttgtatggtgattttaaagtataagttcctatttcaccaaacatagaaaaaattgtcaaaacaaaaatatatatatccctgagaaagtgtgcaagtggatgcaaaattccctaaatatatatcgttatatgtatagctttggcgttgttgattggtgaaatagacgatgtacaatcatacgtgtgctaatgttgacaaggaacaagagatggagaagaatgaagctataaaaagaaaacaaaatgggtaaatattaactgtacctgagatgcgtatctgttgtttgctggttattcgaccttaattagtcaacgtttataacaaaaccatccctagtcttcttctttcccaatcgaattacaaaccctaaatcattccattagatcttcttgatccctaagcaagtctcttcgttaacttttgtctttctccttaaaatg

SEQ ID NO: 9930 - DNA, 3000 bp, Unknown
  misc_feature (1)..( 3000): cDNA_ID_3034731_gDNA_ID_2096292_Annot_ID_195421 3000 nt of promoter + ATG
agccctctctggggctatggtgactgacatgttggcttttggtgtaacattttttaatgcaatctactacgaaaaattgtacggcttcatgcaaaccgtaggtttctgcctctttgtcgtcgttatgatatgcgttgtgcggccggctatgtattgggtgatcaagcagactccagaagggaggccggtcaaggatttctacctctactcgatttttgggattgctttcgcctgcttcactttttttaacaaggttattcatctttttggacccgcgggatcatttgttttcggcttgacggttccaaatggatatcctttaggtactactttgattcaaaagtttgagagctttaatcttggctctattttgccactctttggatcattaaccatgatgcaagtagatctcttacggttgttcaaagagagtggagatttaatacggatggagggtcaaatctatgaggtcatttcctttattcttttggtgaataccacaaaattcgttgttaccaccataaccgcgtatgcttttaaaatgcccttgagagactcttttgctttagcccttgtgcttagtaataaggggatcttcgagctcgcctactacacgtacgcggttgaattaaaggtgcgtacaattaaactcttctatatatatttaaagtcagaagaattagtttattttcataaaaattaatcaaatctttggacatgtttcacagctaataaggccagaggttttcacaatcctagctgcctacaccctcttgaactctatctttataccaatgctcttggagctcgtgcatgacccaaccaaaagattcagatgctaccgaaaaaggaatttgggcatcttgaaagacggtgcggctctccaatgtcttatgtgcgtctacagacctgatcacataacttccatgaccgacctcttggaaacttttagcccatcacaagattccccaatggcgtgtaacatacttcacctcgtcgagcttgtgggtcaagccaatcctatgttcatttcccaccagttgcaaaaaccagagcccggaagtacttctctgtctgacaatgtcataatctccttccgtggcttccaaagacaattctttgaatacacatcgttggatattttcacttccgtctccgtgtcccaacacatgcatgaggacatttgttggctagccctatccagaagcctatctttgattgtgcttcctttccaccgaacctggtccgttgatcgatccacggttatctccaacgatgataatctgagaatgctcaacgttaacgtcctgagacgagccccatgctctgttggaatcttcgtctatcgcaagcccatcgttgaatctcatatggctaagtcccacagcaaggtgcttttcattttattttgaaaactaattaattatccgtttgggtacgtgaaaatacaaatttcagaattttataaaatctaaaagaatatttttgcaacgtctaaatgaaattaaatgctgaaagaaaatcttttcattttcctttaccatttatgatgaacaaaagaaatggtactaatatattagcatttttaacctgataaaactctcatctttgcagatatgtttgatttttaacggtggaaaagacgatagagaagctttggcgataacaaatcgaatgagactgacagaaaaacgaacaaggctaacgatcataagattcattccaaaatcttctgaaatggataacgatgagtgggagcaacagcaatcgattaacctaaaggagtccgtgactagcatcgttgggtccaacatcaaagaaaatgatgccaaggtgacatatatcgataaggcggtttctgatggatctgagacctcaagaatcttacgagcaatggcaaatgattatgacttgtttatcgttggaagcggcagcggaataggaactgaggctactagcggaattagtgaatggacagagttcaatgaattgggacctattggagatttattagcatcacatgaatatccttcaagtgcatcagtgttggttgttcaaaaacaagtgtacattcatcatacaaaaagccaaaggagaaaatctttctaagaaataatgcgagatatgttcaatgctcagcttttcaatgttgtatttctctacatcaataaacattagttttaggctgcttgaagttatggagtaattgattcgagtttcttctggatatgatgatataaacttcacgatttttttaatcaaattttgagttaacaagattagagtaatttcttgtggcagtgcctgctctatgataacgccttccaactatagctgcctttgttatcacaattcaaaaatatatattctcttgtagtaacagggtctgtttaacatacacactttgtcacgttataattaagtttagtatgtgttagagatatcagagggaacagagcaaaatactctgtttttctcaacaaaaagagattttggtacctaacagagtactctgctctgttccctttgataaaagattgaatttgaggtcttaattaatggatcatcttattaaaaatgggtaaagcgtttatttagactgcctaaagaggtcattttattttaaagtaatacaacttacaagcgccaaaaacaaagacaacacctggacgagacaatccctatatttatacccttatcctaattttagagatcctttgggatctgtgtgaaaccatcagaccggttttaattttagttctttttttgactgcaaaatcttttcattgtcaatttttttttttgttctttttggttttacgtagacaagatttgtcccaaatggatgcagaaaatgcgacttggcgcaaagagttcatgtggaacaacgatgagaaaagagcagagatggggacgaagatgttttgcgatgtaagtccacatataatgttgaactcacatggcgttgcagagaaaatggcttccggatctaagggaatg
